(19) United States
(12) Patent Application Publication
(10) Pub. No.: US 2004/0016025 A1
(43) Pub. Date: Jan. 22, 2004

(54) Rice promoters for regulation of plant expression

(76) Inventors: Paul Budworth, San Diego, CA (US); Todd Moughamer, San Diego, CA (US); Steven P. Briggs, Del Mar, CA (US); Bret Cooper, La Jolla, CA (US); Jane Glazebrook, San Diego, CA (US); Stephen Arthur Goff, Encinitas, CA (US); Fumiaki Katagiri, San Diego, CA (US); Joel Kreps, Carlsbad, CA (US); Nicholas Provart, Toronto (CA); Darrell Ricke, San Diego, CA (US); Tong Zhu, San Diego, CA (US)

Correspondence Address: James E. Butler, Torrey Mesa Research Institute, 3115 Merryfield Row, San Diego, CA, 92121, US

(21) Appl. No.: 10/260,238

(22) Filed: Sep. 26, 2002

Related U.S. Application Data
(60) Provisional application No. 60/325,448, filed on Sep. 26, 2001.
(60) Provisional application No. 60/325,277, filed on Sep. 26, 2001.
(60) Provisional application No. 60/370,620, filed on Apr. 4, 2002.

(51) Int. Cl. A01H 5/00; C12N 15/82; C12N 5/04

(52) U.S. Cl. 800/287; 800/312; 800/320; 800/320.1; 800/320.2; 800/320.3; 435/419; 435/320.1

(57) ABSTRACT

The invention provides a method to identify a plurality of plant promoters having a particular characteristic as well as the sequence of promoters having one of those characteristics.

### CROSS-REFERENCE TO RELATED APPLICATIONS

[0001] This application claims the benefit of U.S. Provisional Application No. 60/325,448, filed Sep. 26, 2001, U.S. Provisional Application No. 60/325,277 filed Sep. 26, 2001, and U.S. Provisional Application No. 60/270,620 filed Apr. 4, 2002, each of which is incorporated herein by reference in its entirety.

### REFERENCE TO MATERIAL SUBMITTED ON COMPACT DISC

[0002] The sequence listing accompanying this application is contained on compact disc. The material on the CD-ROM (filed in duplicate herewith), on CD volume labeled “COPY 1” and “COPY 2”, each containing a text file named “6011 1-NP_SEQ_LST.txt” created Sep. 26, 2002, having a size of 8.81 MB, is hereby incorporated by reference in its entirety pursuant to 37 C.F.R. §1.52(e)(5).

### FIELD OF THE INVENTION

[0003] The present invention relates generally to the field of plant molecular biology. More specifically, it relates to the regulation of gene expression in plants such as monocots.

### BACKGROUND OF THE INVENTION

[0004] Manipulation of crop plants to alter and/or improve phenotypic characteristics (such as productivity or quality) requires the expression of heterologous genes in plant tissues. Such genetic manipulation relies on the availability of a means to drive and to control gene expression as required. For example, genetic manipulation relies on the availability and use of suitable promoters which are effective in plants and which regulate gene expression so as to give the desired effect(s) in the transgenic plant. It is advantageous to have the choice of a variety of different promoters so that the most suitable promoter may be selected for a particular gene, construct, cell, tissue, plant or environment. Moreover, the increasing interest in cotransforming plants with multiple plant transcription units (PTU) and the potential problems associated with using common regulatory sequences for these purposes merit having a variety of promoter sequences available. There is, therefore, a great need in the art for the identification of novel sequences that can be used for expression of selected transgenes in economically important plants. More specifically, there is a need for the systematic identification of genes that are expressed in a particular manner, e.g., using microarray technology.

### SUMMARY OF THE INVENTION

[0005] The present invention provides an isolated nucleic acid molecule (polynucleotide) having a plant nucleotide sequence that directs tissue-specific or tissue-preferential, or constitutive, transcription of a linked nucleic acid segment in a plant or plant cell, e.g., a linked plant DNA comprising an open reading frame for a structural or regulatory gene.

[0006] In one embodiment of the invention, the nucleotide sequence of the invention directs tissue-specific (or tissue-preferential), or constitutive, transcription of a linked nucleic acid segment in a plant or plant cell and is preferably obtained or obtainable from plant genomic DNA having a gene comprising an open reading frame (ORF) encoding a polypeptide which is substantially similar, and preferably has at least 70% or more, e.g., between 71% and 89%, and even 90% or more, e.g., between 91% and 99%, amino acid sequence identity, to a polypeptide encoded by an Orgza, e.g., Oryza sativa, gene, with each individual number within this range of between 71% and 89% and 91% and 99% also being part of the invention, wherein said gene comprises any one of:

[0007] (i) SEQ ID NOs:2275-2672, 5959, 5972, 5973, 5977-5990 and 6001 (e.g., including a promoter obtained or obtainable from any one of SEQ ID NOs:2275-2672, 5959, 5972, 5973, 5977-5990 and 6001) which directs seed-specific (or seed-preferential) transcription of a linked nucleic acid segment;

[0008] (ii) SEQ ID NOs:2144-2274 (e.g., including a promoter obtained or obtainable from any one of SEQ ID NOs:2144-2274) which directs root-specific (or root-preferential) transcription of a linked nucleic acid segment;

[0009] (iii) SEQ ID NOs:1886-1918 (e.g., including a promoter obtained or obtainable from any one of SEQ ID NOs:1886-1918) which directs green tissue (leaf and stem)-specific (or green tissue-preferential) transcription of a linked nucleic acid segment;

[0010] (iv) SEQ ID NOs:1919-2085 (e.g., including a promoter obtained or obtainable from any one of SEQ ID NOs:1919-2085) which directs panicle-specific (or panicle-preferential) transcription of a linked nucleic acid segment;

[0011] (v) SEQ ID NOs:2086-2143 (e.g., including a promoter obtained or obtainable from any one of SEQ ID NOs:2086-2143) which directs pollen-specific (or pollen-preferential) transcription of a linked nucleic acid segment;

[0012] (vi) SEQ ID NOs: 1598-1885 and 5960-5971 (e.g., including a promoter obtained or obtainable from any one of SEQ ID NOs: 1598-1885 and 5960-5971, respectively) which directs constitutive transcription of a linked nucleic acid segment;

[0013] or

[0014] (a) a fragment (portion) thereof which has substantially the same promoter activity as the corresponding promoter listed in SEQ ID NOs:2275-2672, 5959, 5972, 5973, 5977-5990 and 6001, SEQ ID NOs:2144-2274, SEQ ID NOs:1886-1918, SEQ ID NOs:1919-2085, or SEQ ID NOs: 1598-1885 and 5960-5971;

[0015] (b) a nucleotide sequence having substantial similarity to a promoter sequence listed in SEQ ID NOs:2275-2672, 5959, 5972, 5973, 5977-5990 and 6001, SEQ ID NOs:2144-2274, SEQ ID NOs:1886-1918, SEQ ID NOs:1919-2085, or SEQ ID NOs: 1598-1885 and 5960-5971;

[0016] (c) a nucleotide sequence capable of hybridizing to a promoter sequence listed in SEQ ID NOs:2275-2672, 5959, 5972, 5973, 5977-5990 and 6001, SEQ ID NOs:2144-2274, SEQ ID NOs:1886-1918, SEQ ID NOs:1919-2085, or SEQ ID NOs: 1598-1885 and 5960-5971;

[0017] (d) a nucleotide sequence capable of hybridizing to a nucleic acid comprising 50 to 200 or more consecutive nucleotides of a nucleotide sequence listed in SEQ ID NOs:2275-2672, 5959, 5972, 5973, 5977-5990 and 6001, SEQ ID NOs:2144-2274, SEQ ID NOs:1886-1918, SEQ ID NOs:1919-2085, or SEQ ID NOs: 1598-1885 and 5960-5971 or the complement thereof;

[0018] (e) a nucleotide sequence which is the complement or reverse complement of any of the previously mentioned nucleotide sequences.

[0019] For example, in one embodiment, a plant nucleotide sequence is the promoter sequence for a gene, and preferably is obtained or obtainable from a gene, comprising an ORF encoding a polypeptide which is substantially similar, and preferably has at least 70% or more, e.g., between 71% and 89%, and even 90% or more, e.g., between 91% and 99%, amino acid sequence identity, to a polypeptide encoded by an Oryza, e.g., Oryza sativa, gene, with each individual number within this range of between 71% and 89% and 91% and 99% also being part of the invention, wherein said gene comprises an ORF comprising a nucleic acid sequence selected from the group consisting of SEQ ID NOs: 1-398 and 5928-5939 (constitutively expressed ORFs), SEQ ID NOs:399-464 (green-specific ORFs); SEQ ID NOs:465-720 (panicle-specific ORFs), SEQ ID NOs:721-800 (pollen-specific ORFs), SEQ ID NOs:801-1019 (root-specific ORFs), SEQ ID NOs:1020-1597, 5927, 5940, 5941, 5945-5958 (seed-specific ORFs), and a fragment (portion) thereof which encodes a polypeptide which has substantially the same activity as the corresponding polypeptide encoded by an ORF listed in SEQ ID NOs: 1-398 and 5928-5939; SEQ ID NOs: 399-464, SEQ ID NOs:465-720, SEQ ID NOs:721-800, SEQ ID NOs:801-1019, and SEQ ID NOs:1020-1597, 5927, 5940, 5941, 5945-5958.

[0020] In another embodiment, a plant nucleotide sequence is the promoter sequence for a gene, and preferably is obtained or obtainable from a gene, which is substantially similar, and preferably has at least 70%, or more, e.g., between 71% and 89%, and even 90% or more, e.g., between 91% and 99%, nucleic acid sequence identity to an Oryza gene, with each individual number within this range of between 71% and 89% and 91% and 99% also being part of the invention, wherein said gene comprises a nucleic acid sequence selected from the group consisting of SEQ ID NOs:2275-2672, 5959, 5972, 5973, 5977-5990 and 6001, SEQ ID NOs:2144-2274, SEQ ID NOs:1886-1918, SEQ ID NOs:1919-2085, SEQ ID NOs:2086-2143, SEQ ID NOs: 1598-1885 and 5960-5971, and a fragment (portion) thereof which has substantially the same promoter activity as the corresponding promoter listed in SEQ ID NOs:2275-2672, 5959, 5972, 5973, 5977-5990 and 6001, SEQ ID NOs:2144-2274, SEQ ID NOs:1886-1918, SEQ ID NOs:1919-2085, SEQ ID NOs:2086-2143, and SEQ ID NOs: 1598-1885 and 5960-5971.

[0021] In another embodiment the invention relates to a nucleotide sequence for a promoter, which is preferably obtained or obtainable from plant genomic DNA, from a gene comprising an ORF which is substantially similar, and preferably has at least 70% or more, e.g., between 71% and 89%, and even 90% or more, e.g., between 91% and 99%,, nucleic acid sequence identity, to an Oryza gene, with each individual number within this range of between 71% and 89% and 91% and 99% also being part of the invention, wherein said gene comprises an ORF comprising one of the sequences selected from the group consisting of SEQ ID NOs: 1-398 and 5928-5939; SEQ ID NOs: 399-464, SEQ ID NOs:465-720, SEQ ID NOs:721-800, SEQ ID NOs:801-1019, SEQ ID NOs:1020-1597, 5927, 5940, 5941, 5945-5958, and a fragment (portion) thereof which encodes a polypeptide which has substantially the same activity as the corresponding polypeptide encoded by an ORF listed in SEQ ID NOs: 1-398; SEQ ID NOs: 399-464, SEQ ID NOs:465-720, SEQ ID NOs:721-800, SEQ ID NOs:801-1019, and SEQ ID NOs:1020-1597, 5927, 5940, 5941, 5945-5958.

[0022] Hence, the isolated nucleic acid molecules of the invention include the orthologs of the Oryza sequences disclosed herein, i.e., the corresponding nucleotide sequences in organisms other than Oryza, including, but not limited to, plants other than Oryza, preferably cereal plants, e.g., corn, wheat, rye, turfgrass, sorghum, millet, sugarcane, barley and banana, but also non-cereal plants, e.g., alfalfa, sunflower, canola, soybean, cotton, peanut, tobacco or sugarbeet. An orthologous gene is a gene from a different species that encodes a product having the same or similar function, e.g., catalyzing the same reaction as a product encoded by a gene from a reference organism. Thus, an ortholog includes polypeptides having less than, e.g., 65% amino acid sequence identity, but which ortholog encodes a polypeptide having the same or similar function. Databases such GenBank may be employed to identify sequences related to the Oryza sequences, e.g., orthologs in cereal crops such as wheat and other cereals. Alternatively, recombinant DNA techniques such as hybridization or PCR may be employed to identify sequences related to the Oryza sequences or to clone the equivalent sequences from different Oryza DNAs. For example, SEQ ID NOs:2673-4708, SEQ ID NOs: 4768-5229, and SEQ ID NOs:5230-5926, which represent wheat, banana and maize orthologs of some of the rice sequences disclosed herein. The encoded ortholog products likely have at least 70% sequence identity to each other. Hence, the invention includes an isolated nucleic acid molecule comprising a nucleotide sequence from a gene that encodes a polypeptide having at least 70% identity to a polypeptide encoded by a gene having one or more of the Oryza sequences disclosed herein. For example, promoter sequences within the scope of the invention are those which direct expression of an open reading frame which encodes a polypeptide that is substantially similar to an Oryza polypeptide encoded by a gene having a promoter selected from the group consisting of SEQ ID NOs:1598-2672, 5959, 5972, 5973, 5977-5990 and 6001.

[0023] Preferably, the promoters of the invention include a consecutive stretch of about 25 to 2000, including 50 to 500 or 100 to 250, and up to 1000 or 1500, contiguous nucleotides, e.g., 40 to about 743, 60 to about 743, 125 to about 743, 250 to about 743, 400 to about 743, 600 to about 743, of any one of SEQ ID NOs:1598-2672, 5959, 5972, 5973, 5977-5990 and 6001, or the promoter orthologs thereof, which include the minimal promoter region.

[0024] In a particular embodiment of the invention said consecutive stretch of about 25 to 2000, including 50 to 500 or 100 to 250, and up to 1000 or 1500, contiguous nucleotides, e.g., 40 to about 743, 60 to about 743, 125 to about 743, 250 to about 743, 400 to about 743, 600 to about 743, has at least 75%, preferably 80%, more preferably 90% and most preferably 95%, nucleic acid sequence identity with a corresponding consecutive stretch of about 25 to 2000, including 50 to 500 or 100 to 250, and up to 1000 or 1500, contiguous nucleotides, e.g., 40 to about 743, 60 to about 743, 125 to about 743, 250 to about 743, 400 to about 743, 600 to about 743, of any one of SEQ ID NOs: 1598-2672, 5959, 5972, 5973, 5977-5990 and 6001, or the promoter orthologs thereof, which include the minimal promoter region. The above defined stretch of contiguous nucleotides preferably comprises one or more promoter motifs selected from the group consisting of TATA box, GC-box, CAAT-box and a transcription start site.

[0025] In case of promoters directing tissue-specific transcription of a linked nucleic acid segment in a plant or plant cell such as, for example, a promoter directing root-specific, green tissue (leaf and stem)-specific, seed-specific, panicle-specific, pollen-specific, etc., transcription, it is further preferred that previously defined stretch of contiguous nucleotides comprises further motifs that participate in the tissue specificity of said stretch(es) of nucleotides, e.g., for seed-specific promoters, motifs selected from the group consisting of the P box and GCNA elements, including but not limited to TGTAAAG and TGA(G/C)TCA.

[0026] The invention also provides an isolated nucleic acid molecule, e.g., DNA or RNA, comprising a plant nucleotide sequence comprising an open reading frame that is preferentially expressed in a specific plant tissue, i.e., in seeds, roots, green tissue (leaf and stem), panicle or pollen, or is expressed constitutively.

[0027] One embodiment the invention provides

[0028] (a) an isolated nucleic acid molecule, e.g., DNA or RNA, comprising a plant nucleotide sequence comprising an ORF that is constitutively expressed or preferentially expressed in a specific plant tissue, i.e., in seeds, roots, green tissue (leaf and stem), panicle or pollen and which is capable of hybridizing and thus substantially similar, and preferably has at least 70% or more, e.g., between 71% and 89%, and even 90% or more, e.g., between 91% and 99%,nucleic acid sequence identity, to an ORF expressed in a constitutive (e.g., an ORF comprising one of SEQ ID NOs:1-398 and 5928-5939) or in a tissue-specific or tissue-preferential manner, for example, in a seed-specific (or seed-preferential) manner, e.g., an ORF comprising one of SEQ ID NOs:1020-1597; 5927, 5940, 5941, 5945-5958

[0029] (i) a root-specific (or root-preferential) manner, e.g., an ORF comprising one of SEQ ID NOs:801-1019;

[0030] (ii) a green tissue (leaf and stem)-specific (or green tissue (leaf and stem)-preferential) manner, e.g., an ORF comprising one of SEQ ID NOs:399-464;

[0031] (iii) a panicle-specific (or panicle-preferential) manner, e.g., an ORF comprising one of SEQ ID NOs:465-720; or

[0032] (iv) a pollen-specific (or pollen-preferential) manner, e.g., an ORF comprising one of SEQ ID NOs:721-800; or

[0033] (b) a part thereof still encoding a partial-length polypeptide having substantially the same activity as the full-length polypeptide encoded by an ORF listed in SEQ ID NOs.1-398, and 5928-5939 and 399-1597, 5927, 5940, 5941, 5945-5958., e.g., at least 50%, more preferably at least 80%, even more preferably at least 90% to 95% the activity of the full-length polypeptide;

[0034] (c) the complement or reverse complement thereof

[0035] The invention also provides

[0036] (a) an isolated nucleic acid molecule, e.g., DNA or RNA, comprising a plant nucleotide sequence comprising an ORF that is constitutively expressed or preferentially expressed in a specific plant tissue, i.e., in seeds, roots, green tissue (leaf and stem), panicles or pollen and which encodes a polypeptide that is capable of hybridising and thus substantially similar, and preferably has at least 70% or more, e.g., between 71% and 89%, and even 90% or more, e.g., between 91% and 99%,, amino acid sequence identity, to a polypeptide encoded by an Oryza gene with each individual number within this range of between 71% and 89% and 91% and 99% also being part of the invention, wherein said gene comprises an ORF comprising any one of the sequences selected from the group consisting of SEQ ID NOs: 1-398, and 5928-5939 (constitutiv); SEQ ID NOs: 399-464 (green-tissue), SEQ ID NOs:465-720 (specific); SEQ ID NOs:721-800 (pollen); SEQ ID NOs:801-1019 (root); and SEQ ID NOs:1026-1597, 5927, 5940, 5941, 5945-5958 (seed),

[0037] (b) the complement or reverse complement thereof, and

[0038] (c) a fragment thereof still encoding a partial-length polypeptide having substantially the same activity as the full-length polypeptide encoded by an ORF listed in SEQ ID NOs.1-398 and 5928-5939 and 399-1597, 5927, 5940, 5941, 5945-5958, e.g., at least 50%, more preferably at least 80%, even more preferably at least 90% to 95% the activity of the full-length polypeptide

[0039] The invention also provides

[0040] (b) an isolated nucleic acid molecule, e.g., DNA or RNA, comprising a plant nucleotide sequence comprising an ORF that is constitutively expressed or preferentially expressed in a specific plant tissue, i.e., in seeds, roots, green tissue (leaf and stem), panicles or pollen and which encodes a polypeptide that is capable of hybridizing and thus substantially similar, and preferably has at least 70% or more, e.g., between 71% and 89%, and even 90% or more, e.g., between 91% and 99%, amino acid sequence identity, to a polypeptide encoded by an Oryza gene with each individual number within this range of between 71% and 89% and 91% and 99% also being part of the invention, wherein said gene comprises a promoter sequence as given in any one of the sequences selected from the group consisting of SEQ ID NOs: 1598-1885 and 5960-5971, SEQ ID NOs: 1886-1918, SEQ ID NOs:1919-2085, SEQ ID NOs:2086-2143, SEQ ID NOs:2144-2274, and SEQ ID NOs:2275-2672, 5959, 5972, 5973, 5977-5990 and 6001

[0041] (c) the complement or reverse complement thereof, and

[0042] (d) a fragment thereof having substantially the same activity as the corresponding promoter listed in SEQ ID NOs: SEQ ID NOs: 1598-1885, 5960-5971 and 1886-2672, 5959, 5972, 5973, 5977-5990 and 6001 respectively, e.g., at least 50%, more preferably at least 80%, even more preferably at least 90% to 95% of the activity.

[0043] The invention also provides

[0044] (a) an isolated nucleic acid molecule, e.g., DNA or RNA, comprising a plant nucleotide sequence comprising an ORF that is constitutively or preferentially expressed in a specific plant tissue, i.e., in seeds, roots, green tissue (leaf and stem), panicles or pollen and which is capable of hybridizing and thus substantially similar, and preferably has at least 70% or more, e.g., between 71% and 89%, and even 90% or more, e.g., between 91% and 99%, nucleic acid sequence identity, to an Oryza gene with each individual number within this range of between 71% and 89% and 91% and 99% also being part of the invention, wherein said gene is an ORF expressed in a constitutive or a tissue-specific or tissue-preferential manner and comprises a promoter as given in any one of the sequences selected from the group consisting of SEQ ID NOs: 1598-1885 and 5960-5971; SEQ ID NOs: 1886-1918, SEQ ID NOs:1919-2085; SEQ ID NOs:2086-2143; SEQ ID NOs:2144-2274; and SEQ ID NOs:2275-2672, 5959, 5972, 5973, 5977-5990 and 6001

[0045] (b) the complement or reverse complement thereof, and

[0046] (c) and a fragment thereof having substantially the same activity as the corresponding promoter listed in SEQ ID NOs: 1598-1885, 5960-5971 and SEQ ID NOs:1886-2672, 5959, 5972, 5973, 5977-5990 and 6001 respectively, , e.g., at least 50%, more preferably at least 80%, even more preferably at least 90% to 95% of the activity.

[0047] ORFs which are expressed in a constitutive or in tissue-specific or -preferential manner, may be useful to prepare plants that over- or under-express the encoded polypeptide product or to prepare knockout plants.

[0048] The promoters and open reading frames of the invention can be identified by employing an array of nucleic acid samples, e.g., each sample having a plurality of oligonucleotides, and each plurality corresponding to a different plant gene, on a solid substrate, e.g., a DNA chip, and probes corresponding to nucleic acid expressed in, for example, one or more plant tissues and/or at one or more developmental stages, e.g., probes corresponding to nucleic acid expressed in seed of a plant relative to control nucleic acid from sources other than seed. Thus, genes that are upregulated or downregulated in the majority of tissues at a majority of developmental stages, or upregulated or downregulated in one tissue such as in seed, can be systematically identified.

[0049] As described herein, GeneChip® technology was utilized to discover rice genes that are preferentially (or exclusively) expressed in seed, pollen, specific, root or green tissue, as well as those that are constitutively expressed. Specifically, labeled rice cRNA probes were hybridized to the rice DNA array, expression levels were determined by laser scanning and then rice genes were identified that had a particular expression pattern. The rice oligonucleotide probe array consists of probes from over 18,000 unique rice genes, which covers approximately 40-50% of the genome. This genome array permits a broader, more complete and less biased analysis of gene expression. Using this approach, 812 genes were identified, the expression of which was altered, e.g., specifically elevated, in seed tissues and 367 genes were identified that were preferentially expressed in endosperm, 91 genes were identified that were preferentially expressed in embryo, and 137 genes were identified that were preferentially expressed in aleurone; 618 genes were identified that were constitutively expressed; 335 genes were identified that were specifically or preferentially expressed in panicle; 265 genes were identified that were specifically or preferentially expressed in root tissue, 80 genes were identified that were specifically or preferentially expressed in pollen; and 90 genes were identified that were specifically or preferentially expressed in leaf and/or stem tissue.

[0050] Generally, the promoters of the invention may be employed to express a nucleic acid segment that is operably linked to said promoter such as, for example, an open reading frame, or a portion thereof, an anti-sense sequence, or a transgene in plants. The open reading frame may be obtained from an insect resistance gene, a disease resistance gene such as, for example, a bacterial disease resistance gene, a fungal disease resistance gene, a viral disease resistance gene, a nematode disease resistance gene, a herbicide resistance gene, a gene affecting grain composition or quality, a nutrient utilization gene, a mycotoxin reduction gene, a male sterility gene, a selectable marker gene, a screenable marker gene, a negative selectable marker, a positive selectable marker, a gene affecting plant agronomic characteristics, i.e., yield, standability, and the like, or an environment or stress resistance gene, i.e., one or more genes that confer herbicide resistance or tolerance, insect resistance or tolerance, disease resistance or tolerance (viral, bacterial, fungal, oomycete, or nematode), stress tolerance or resistance (as exemplified by resistance or tolerance to drought, heat, chilling, freezing, excessive moisture, salt stress, or oxidative stress), increased yields, food content and makeup, physical appearance, male sterility, drydown, standability, prolificacy, starch properties or quantity, oil quantity and quality, amino acid or protein composition, and the like. By “resistant” is meant a plant which exhibits substantially no phenotypic changes as a consequence of agent administration, infection with a pathogen, or exposure to stress. By “tolerant” is meant a plant which, although it may exhibit some phenotypic changes as a consequence of infection, does not have a substantially decreased reproductive capacity or substantially altered metabolism.

[0051] In particular, seed-specific promoters may be useful for expressing genes as well as for producing large quantities of protein, for expressing oils or proteins of interest, e.g., antibodies, genes for increasing the nutritional value of the seed and the like. Panicle-specific, root-specific, and pollen-specific promoters may be useful for expressing genes that confer pathogen-resistance, e.g., insect resistance, to those tissues, or to silence other genes that are expressed in those tissues.

[0052] For instance, pollen-specific promoters may be employed to introduce genes into pollen for the purpose of arresting pollen development thereby rendering a plant male sterile.

[0053] Such genes may include those coding for proteins toxic to pollen. It is also contemplated that chimeric plasmids may be constructed which allow the expression of antisense mRNAs which are capable of inhibiting expression of genes which play a role in pollen development. It is also contemplated that expression cassettes or vectors of the present invention which comprise a pollen-specific promoter may be useful for the introduction of one or more useful phenotypic characteristics into pollen including but not limited to pesticide resistance, resistance to insect pests or toxicity to insect pests, or which optimize other pollen functions. One embodiment the invention comprises genetic manipulation of plants to potentiate the effects of gibberellin or other hormones involved in initiation of fruit set. The invention comprises the temporal expression of a structural gene which encodes a plant hormone such as a gibberellin or cytokine, or proteins associated with the production of such hormones (i.e,. enzymes, biosynthetic intermediates and the like.) which are associated with initiation of fruit set. The structural gene is placed under the control of a pollen microspore- or megaspore-specific promoter such that the expression of the hormone is timed to occur just prior to pollination so that fruit development and maturation is induced without the need for fertilization.

[0054] Root-specific promoters may be useful for expressing genes including but not limited to defense-related genes, including genes conferring insecticidal resistance and stress tolerance, e.g., salt, cold or drought tolerance, genes for altering nutrient uptake and genes that are involved with specific morphological traits that allow for increased water absorption, uptake or extraction from soil, e.g., soil of low moisture content. For example, introduction and expression of genes that alter root characteristics may enhance water uptake. Additionally, the use of root-specific promoters in transgenic plants can provide beneficial traits that are localized in the consumable (by animals and humans) roots of plants such as carrots, parsnips, and beets. However, other parts of the plants, including stalks, husks, vegetative parts, and the like, may also be desirable, including use as part of animal silage or for ornamental purposes. Often chemical constituents (e.g., oils or starches) of maize and other crops are extracted for foods or industrial use and transgenic plants may be created which have enhanced or modified levels of such components.

[0055] Green tissue-specific promoters may be useful for expressing genes including but not limited to genes involved in photosynthetic pathways, and for those which are leaf-specific, for producing large quantities of protein, and for expressing oils or proteins of interest, genes for increasing the nutritional value of a plant, and defense-related genes (e.g., against pathogens such as a virus or fungus), including genes encoding insecticidal polypeptides.

[0056] Panicle-specific promoters may be useful for expressing genes including but not limited to genes involved in flower development and flowering such as MADS-box genes that, when expressed in transgenic plants, result in such phenotypes as, for example, reduced apical dominance or dwarfism and early flowering.

[0057] Constitutive promoters are useful for expressing a wide variety of genes including those which alter metabolic pathways, confer disease resistance, for protein production, e.g., antibody production, or to improve nutrient uptake and the like. Constitutive promoters may be modified so as to be regulatable, e.g., inducible. The genes and promoters described hereinabove can be used to identify orthologous genes and their promoters which are also likely expressed in a particular tissue and/or development manner. Moreover, the orthologous promoters are useful to express linked open reading frames. In addition, by aligning the promoters of these orthologs, novel cis elements can be identified that are useful to generate synthetic promoters.

[0058] The present invention further provides a composition, an expression cassette or a recombinant vector containing the nucleic acid molecule of the invention, and host cells comprising the expression cassette or vector, e.g., comprising a plasmid. In particular, the present invention provides an expression cassette or a recombinant vector comprising a promoter of the invention linked to a nucleic acid segment which, when present in a plant, plant cell or plant tissue, results in transcription of the linked nucleic acid segment. The invention also provides an expression cassette or a recombinant vector comprising a plant nucleotide sequence comprising an open reading frame of the invention which, when present in a plant, plant cell or plant tissue, results in expression of the product encoded by the open reading frame. Further, the invention provides isolated polypeptides encoded by any one of the open reading frames comprising SEQ ID NOs:1-1597, 5927, 5940, 5941, 5945-5958, a fragment thereof which encodes a polypeptide which has substantially the same activity as the corresponding polypeptide encoded by an ORF listed in SEQ ID NOs:1-1597, 5927, 5940, 5941, 5945-5958, or the orthologs thereof.

[0059] The invention also provides sense and anti-sense nucleic acid molecules corresponding to the open reading frames identified in SEQ ID NOs:1-1597, 5927, 5940, 5941, 5945-5958 as well as their orthologs. Also provided are compositions, expression cassettes, e.g., recombinant vectors, and host cells, comprising a nucleic acid molecule which comprises a nucleic acid segment which is preferentially expressed in seeds (e.g., SEQ ID NOs:1020-1597, 5927, 5940, 5941, 5945-5958), root (SEQ ID NOs:801-1019), pollen (SEQ ID NOs:721-800), specific (SEQ ID NOs:465-720), or green tissue (SEQ ID NOs:399-464), or constitutively expressed (SEQ ID NOs:1-398 and 5928-5939), in either sense or antisense orientation.

[0060] In one embodiment, the invention provides an expression cassette or vector containing an isolated nucleic acid molecule having a nucleotide sequence that directs tissue-specific, tissue-preferential or constitutive transcription of a linked nucleic acid segment in a cell, which nucleotide sequence is from a gene which encodes a polypeptide having at least 70% identity to an Oryza polypeptide encoded by a gene having one of the promoters listed in SEQ ID NOs:1598-2672, 5959, 5972, 5973, 5977-5990 and 6001, and which nucleotide sequence is optionally operably linked to other suitable regulatory sequences, e.g., a transcription terminator sequence, operator, repressor binding site, transcription factor binding site and/or an enhancer. This expression cassette or vector may be contained in a host cell. The expression cassette or vector may augment the genome of a transformed plant or may be maintained extrachromosomally. The expression cassette may be operatively linked to a structural gene, the open reading frame thereof, or a portion thereof. The expression cassette may further comprise a Ti plasmid and be contained in an Agrobacterium tumefaciens cell; it may be carried on a microparticle, wherein the microparticle is suitable for ballistic transformation of a plant cell; or it may be contained in a plant cell or protoplast. Further, the expression cassette or vector can be contained in a transformed plant or cells thereof, and the plant may be a dicot or a monocot. In particular, the plant may be a cereal plant.

[0061] The present invention further provides a method of augmenting a plant genome by contacting plant cells with a nucleic acid molecule of the invention, e.g., one having a nucleotide sequence that directs tissue-specific, tissue-preferential or constitutive transcription of a linked nucleic acid segment isolatable or obtained from a plant gene encoding a polypeptide that is substantially similar to a polypeptide encoded by the an Oryza gene having a sequence according to any one of SEQ ID NOs:1-2672, 5959, 5972, 5973, 5977-5990 and 6001 so as to yield transformed plant cells; and regenerating the transformed plant cells to provide a differentiated transformed plant, wherein the differentiated transformed plant expresses the nucleic acid molecule in the cells of the plant. The nucleic acid molecule may be present in the nucleus, chloroplast, mitochondria and/or plastid of the cells of the plant. The present invention also provides a transgenic plant prepared by this method, a seed from such a plant and progeny plants from such a plant including hybrids and inbreds. Preferred transgenic plants are transgenic maize, soybean, barley, alfalfa, sunflower, canola, soybean, cotton, peanut, sorghum, tobacco, sugarbeet, rice, wheat, rye, turfgrass, millet, sugarcane, tomato, or potato.

[0062] A transformed (transgenic) plant of the invention includes plants, the genome of which is augmented by a nucleic acid molecule of the invention, or in which the corresponding gene has been disrupted, e.g., to result in a loss, a decrease or an alteration, in the function of the product encoded by the gene, which plant may also have increased yields and/or produce a better-quality product than the corresponding wild-type plant. The nucleic acid molecules of the invention are thus useful for targeted gene disruption, as well as markers and probes.

[0063] The invention also provides a method of plant breeding, e.g., to prepare a crossed fertile transgenic plant. The method comprises crossing a fertile transgenic plant comprising a particular nucleic acid molecule of the invention with itself or with a second plant, e.g., one lacking the particular nucleic acid molecule, to prepare the seed of a crossed fertile transgenic plant comprising the particular nucleic acid molecule. The seed is then planted to obtain a crossed fertile transgenic plant. The plant may be a monocot or a dicot. In a particular embodiment, the plant is a cereal plant.

[0064] The crossed fertile transgenic plant may have the particular nucleic acid molecule inherited through a female parent or through a male parent. The second plant may be an inbred plant. The crossed fertile transgenic may be a hybrid. Also included within the present invention are seeds of any of these crossed fertile transgenic plants.

[0065] The present invention also provides a method to identify a nucleotide sequence that directs tissue-specific or tissue-preferential transcription of linked nucleic acid in the genome of a plant cell by contacting a probe of plant nucleic acid, e.g., cRNA from rice, isolated from various tissues of a plant, with a plurality of isolated nucleic acid samples on one or more, i.e., a plurality of, solid substrates so as to form a complex between at least a portion of the probe and a nucleic acid sample(s) having sequences that are structurally related to the sequences in the probe. Each sample comprises one or a plurality of oligonucleotides corresponding to at least a portion of a plant gene. Then complex formation is compared between samples contacted with a particular tissue, e.g., a seed-specific, probe and samples contacted with a different tissue, e.g., a non-seed specific probe, so as to determine which RNAs are expressed in the particular tissue of the plant. The probe and/or samples may be nucleic acid from a dicot or from a monocot.

[0066] The present invention also provides a method to identify a nucleotide sequence that directs constitutive transcription of nucleic acid in the genome of a plant cell by contacting a probe of plant nucleic acid, e.g., cRNA from rice, isolated from various tissues of a plant and at various developmental stages with a plurality of isolated nucleic acid samples on one or more, i.e., a plurality of, solid substrates so as to form a complex between at least a portion of the probe and a nucleic acid sample(s) having sequences that are structurally related to the sequences in the probe. Each sample comprises one or a plurality of oligonucleotides corresponding to at least a portion of a plant gene. Complex formation is then compared to determine which RNAs are present in a majority of, preferably in substantially all, tissues, in a majority of, preferably at substantially all, developmental stages of the plant. The probe and/or samples may be nucleic acid from a dicot or from a monocot.

[0067] The compositions of the invention include plant nucleic acid molecules, and the amino acid sequences for the polypeptides or partial-length polypeptides encoded by the nucleic acid molecule which comprises an open reading frame. These sequences can be employed to alter expression of a particular gene corresponding to the open reading frame by decreasing or eliminating expression of that plant gene or by overexpressing a particular gene product. Methods of this embodiment of the invention include stably transforming a plant with the nucleic acid molecule which includes an open reading frame operably linked to a promoter capable of driving expression of that open reading frame (sense or antisense) in a plant cell. By “portion” or “fragment”, as it relates to a nucleic acid molecule which comprises an open reading frame or a fragment thereof encoding a partial-length polypeptide having the activity of the full length polypeptide, is meant a sequence having at least 80 nucleotides, more preferably at least 150 nucleotides, and still more preferably at least 400 nucleotides. If not employed for expressing, a “portion” or “fragment” means at least 9, preferably 12, more preferably 15, even more preferably at least 20, consecutive nucleotides, e.g., probes and primers,(oligonucleotides), corresponding to the nucleotide sequence of the nucleic acid molecules of the invention. Thus, to express a particular gene product, the method comprises introducing to a plant, plant cell, or plant tissue an expression cassette comprising a promoter linked to an open reading frame so as to yield a transformed differentiated plant, transformed cell or transformed tissue. Transformed cells or tissue can be regenerated to provide a transformed differentiated plant. The transformed differentiated plant or cells thereof preferably expresses the open reading frame in an amount that alters the amount of the gene product in the plant or cells thereof, which product is encoded by the open reading frame. The present invention also provides a transformed plant prepared by the method, progeny and seed thereof.

[0068] The invention further includes a nucleotide sequence which is complementary to one (hereinafter “test” sequence) which hybridizes under stringent conditions with a nucleic acid molecule of the invention as well as RNA which is transcribed from the nucleic acid molecule. When the hybridization is performed under stringent conditions, either the test or nucleic acid molecule of invention is preferably supported, e.g., on a membrane or DNA chip. Thus, either a denatured test or nucleic acid molecule of the invention is preferably first bound to a support and hybridization is effected for a specified period of time at a temperature of, e.g., between 55 and 70° C., in double strength citrate buffered saline (SC) containing 0.1% SDS followed by rinsing of the support at the same temperature but with a buffer having a reduced SC concentration. Depending upon the degree of stringency required such reduced concentration buffers are typically single strength SC containing 0.1% SDS, half strength SC containing 0.1% SDS and one-tenth strength SC containing 0.1% SDS.

[0069] A computer readable medium containing one or more of the nucleotide sequences of the invention as well as methods of use for the computer readable medium are provided. This medium allows a nucleotide sequence corresponding to at least one of SEQ ID NOs:1598-2672, 5959, 5972, 5973, 5977-5990 and 6001 (promoters), SEQ ID NOs: 1-1597, 5927, 5940, 5941, 5945-5958 and 2673-5926 (orthologous open reading frames of wheat, banana and maizeor fragments thereof), to be used as a reference sequence to search against a database. This medium also allows for computer-based manipulation of a nucleotide sequence corresponding to at least one of SEQ ID NOs:1-60001.

### BRIEF DESCRIPTION OF THE TABLES

[0070] Table 1 provides the SEQ ID NOs and corresponding description for Oryza genes which are expressed in a constitutive manner and further the SEQ ID NOs for the corresponding homologous sequences found in wheat, banana and maize.

[0071] * identifies a first subset of genes.

[0072] *″ identifies a 2^{nd} subset of genes.

[0073] Three subgroups of constitutively expressed genes can be distinguished based on the expression level of those genes. The levels are ranked from highest (1) to lowest (3). For example, promoters with the highest level of constitutive expression include those having an open reading frame corresponding to SEQ ID NOs:1-24, the next highest include those having an open reading frame corresponding to SEQ ID NOs:25-142, the next highest include those having an open reading frame corresponding to SEQ ID NOs:143-293, and the lowest include those having an open reading frame corresponding to SEQ ID NOs:294-398 and 5928-5939.

[0074] Table 2 provides the SEQ ID NOs: and corresponding description for Oryza genes which are expressed in a seed-specific manner and further the SEQ ID NOs for the corresponding homologous sequences found in wheat, banana and maize.

[0075] Six subgroups of seed-specific genes can be distinguished based on the expression level of those genes. The levels are ranked from highest (1) to lowest (6). For example, promoters with the highest level of seed-specific expression include those from a gene having an open reading frame corresponding to SEQ ID NOs:1020-1021, the next highest include those from a gene having an open reading frame corresponding to SEQ ID NOs:1022-1025, the next highest include those from a gene having an open reading, frame corresponding to SEQ ID NOs:1026-1030, the next highest include those from a gene having an open reading frame corresponding to SEQ ID NOs:1031-1048, the next highest include those from a gene having an open reading frame corresponding to SEQ ID NOs:1049-1165 and the lowest include those from a gene having an open reading frame corresponding to SEQ ID NOs:1166-1597, 5927, 5940, 5941, 5945-5958.

[0076] Table 3 provides the SEQ ID NOs: and corresponding description for Oryza genes which are expressed in an aleurone-specific manner and further the SEQ ID NOs for the corresponding homologous sequences found in wheat, banana and maize.

[0077] Table 4 provides the SEQ ID NOs: and corresponding description for Oryza genes which are expressed in an endosperm-specific manner and further the SEQ ID NOs for the corresponding homologous sequences found in wheat, banana and maize.

[0078] Table 5 provides the SEQ ID NOs: and corresponding description for Oryza genes which are expressed in an embryo-specific manner and further the SEQ ID NOs for the corresponding homologous sequences found in wheat, banana and maize.

[0079] Table 6 provides the SEQ ID NOs: and corresponding description for Oryza genes which are expressed in a leaf- and stem-specific manner and further the SEQ ID NOs for the corresponding homologous sequences found in wheat, banana and maize.

[0080] Four subgroups of leaf- and stem-specific genes can be distinguished based on the expression level of those genes. The levels are ranked from highest (1) to lowest (4). For example, promoters with the highest level of leaf and stem-specific expression include those from a gene having an open reading frame corresponding to SEQ ID NOs:399-404, the next highest include those from a gene having an open reading frame corresponding to SEQ ID NOs:405-416, the next highest include those from a gene having an open reading frame corresponding to SEQ ID NOs:417-456, and the lowest include those from a gene having an open reading frame corresponding to SEQ ID NOs:457-464.

[0081] Table 7 provides the SEQ ID NOs: and corresponding description for Oryza genes which are expressed in a panicle-specific manner and further the SEQ ID NOs for the corresponding homologous sequences found in wheat, banana and maize.

[0082] Three subgroups of panicle-specific genes can be distinguished based on the expression level of those genes. The levels are ranked from highest (1) to lowest (3). For example, promoters with the highest level of panicle-specific expression include those from a gene having an open reading frame corresponding to SEQ ID NOs:465-469, the next highest include those from a gene having an open reading frame corresponding to SEQ ID NOs:470-535, and the lowest include those from a gene having an open reading frame corresponding to SEQ ID NOs:536-720.

[0083] Table 8 provides the SEQ ID NOs: and corresponding description for Oryza genes which are expressed in a root-specific manner and further the SEQ ID NOs for the corresponding homologous sequences found in wheat, banana and maize.

[0084] Four subgroups of root-specific genes can be distinguished based on the expression level of those genes. The levels are ranked from highest (1) to lowest (4). For example, promoters with the highest level of root-specific expression include those from a gene having an open reading frame corresponding to SEQ ID NOs:801-809, the next highest include those from a gene having an open reading frame corresponding to SEQ ID NOs:810-846, the next highest include those from a gene having an open reading frame corresponding to SEQ ID NOs:847-885, and the lowest include those from a gene having an open reading frame corresponding to SEQ ID NOs:886-1019.

[0085] Table 9 provides the SEQ ID NOs: and corresponding description for Oryza genes which are express in a pollen-specific manner and further the SEQ ID NOs for the corresponding homologous sequences found in wheat, banana and maize.

[0086] Three subgroups of pollen-specific genes can be distinguished based on the expression level of those genes. The levels are ranked from highest (1) to lowest (3). For example, promoters with the highest level of pollen-specific expression include those from a gene having an open reading frame corresponding to SEQ ID NOs:721-728, the next highest include those from a gene having an open reading frame corresponding to SEQ ID NOs:729-743, and the lowest include those from a gene having an open reading frame corresponding to SEQ ID NOs:744-800.

[0087] Table 10 identifies the start and end point and the nucleotide sequences of tri-nucleotide repeat units in the coding sequence of selected ORFs.

[0088] Table 11 provides Swiss Prot information.

[0089] Table 12 illustrates the promoter designation, probe set or gene, gene description, PCR product size for a promoter containing PCR product and primers employed to amplify promoter sequences, for exemplary constitutively expressed promoters.

### DETAILED DESCRIPTION OF THE INVENTION

[0090] In accordance with the present invention, nucleic acid constructs are provided that allow initiation of transcription in a “tissue-specific”, i.e., seed-, root-, green tissue (leaf and stem)-, panicle-, or pollen-specific, or in a constitutive manner. Constructs of the invention comprise regulated transcription initiation regions associated with protein translation elongation, and the compositions of the present invention are drawn to novel nucleotide sequences for tissue-specific as well as constitutive expression. The present invention thus provides for isolated nucleic acid molecules comprising a plant nucleotide sequence that directs tissue-specific, i.e., seed-, root-, green tissue (leaf and stem)-, panicle-, or pollen-specific, transcription of a linked nucleic acid segment in a plant cell. Preferably, nucleotide sequence is obtained or obtainable from plant genomic DNA from a gene encoding a polypeptide which is substantially similar and preferably has at least 70% amino acid sequence identity to a polypeptide encoded by an Oryza gene comprising any one of SEQ ID NOs:2275-2672, 5959, 5972, 5973, 5977-5990 and 6001 (seed-specific promoters) and SEQ ID NOs:1020-1597, 5927, 5940, 5941, 5945-5958 (seed-specific ORFs); SEQ ID NOs:2144-2274 (root-specific promoters) and SEQ ID NOs:801-1019 (root-specific ORFs); SEQ ID NOs:1886-1918 (green-tissue specific promoters) and SEQ ID NOs:399-464 (green tissue-specific ORFs); SEQ ID NOs:1919-2085 (panicle-specific promoters) and SEQ ID NOs:465-720 (panicle-specific promoters); or SEQ ID NOs:2086-2143 (pollen-specific promoters) and SEQ ID NOs:721-800 (pollen-specific ORFs) which directs tissue-specific expression. Thus, these nucleotide sequences exhibit promoter activity in a seed-, root-, green tissue (leaf and stem)-, panicle-, or pollen-specific manner.

[0091] Also in accordance with the present invention, nucleic acid constructs are provided that allow initiation of transcription in a “tissue-independent,” “tissue general,” or “constitutive” manner. Constructs of this embodiment invention comprise regulated transcription initiation regions associated with protein translation elongation and the compositions of this embodiment of the present invention are drawn to novel nucleotide sequences for tissue-independent, tissue-general, or,constitutive plant promoters. By “tissue-independent,” “tissue-general,” or “constitutive” is intended expression in the cells throughout a plant at most times and in most tissues. As with other promoters classified as “constitutive” (e.g., ubiquitin), some variation in absolute levels of expression can exist among different tissues or stages. However, constitutive promoters generally are expressed at high or moderate levels in most, and preferably all, tissues and most, and preferably all, developmental stages.

[0092] The present invention thus provides for isolated nucleic acid molecules comprising a plant nucleotide sequence that directs constitutive transcription of a linked nucleic acid fragment in a plant cell. Preferably, the nucleotide sequence is obtained or obtainable from plant genomic DNA from a gene encoding a polypeptide which is substantially similar and preferably has at least 70% amino acid sequence identity to a polypeptide encoded by an Oryza gene comprising any one of SEQ ID NOs:1598-1885 and 5960-5971, respectively (corresponding to a gene comprising an ORF comprising one of SEQ ID NOs:1-398 and 5928-5939 ) or a fragment thereof which exhibits promoter activity in a constitutive fashion (i.e., at most times and in most tissues). Tissue-specific, i.e., seed-, root-, green tissue (leaf and stem)-, panicle-, or pollen-specific, and constitutive promoter sequences may be obtained from other plant species by using the tissue-specific and constitutive Oryza promoter sequences or corresponding genes described herein as probes to screen for homologous structural genes in other plants by hybridization under low, moderate or stringent hybridization conditions. Regions of the tissue-specific and constitutive promoter sequences of the present invention which are conserved among species could also be used as PCR primers to amplify a segment from a species other than Oryza, and that segment used as a hybridization probe (the latter approach permitting higher stringency screening) or in a transcription assay to determine promoter activity. Moreover, the tissue-specific and constitutive promoter sequences could be employed to identify structurally related sequences in a database using computer algorithms.

[0093] These tissue-specific and constitutive promoters are capable of driving the expression of a coding sequence in a target cell, particularly in a plant cell. The promoter sequences and methods disclosed herein are useful in regulating tissue-specific and constitutive expression, respectively, of any heterologous nucleotide sequence in a host plant in order to vary the phenotype of that plant. These promoters can be used with combinations of enhancer, upstream elements, and/or activating sequences from the 5′ flanking regions of plant expressible structural genes. Similarly the upstream element can be used in combination with various plant promoter sequences. In one embodiment the promoter and upstream element are used together to obtain at least 10-fold higher expression of an introduced gene in monocot transgenic plants than is obtained with the maize ubiquitin 1 promoter.

[0094] In particular, all of the promoters of the invention are useful to modify the phenotype of a plant. Various changes in the phenotype of a transgenic plant are desirable, i.e., modifying the fatty acid composition in a plant, altering the amino acid content of a plant, altering a plant's pathogen defense mechanism, and the like. These results can be achieved by providing expression of heterologous products or increased expression of endogenous products in plants. Alternatively, the results can be achieved by providing for a reduction of expression of one or more endogenous products, particularly enzymes or cofactors in the plant. These changes result in an alteration in the phenotype of the transformed plant.

[0095] I. Definitions

[0096] The term “gene” is used broadly to refer to any segment of nucleic acid associated with a biological function. Thus, genes include coding sequences and/or the regulatory sequences required for their expression. For example, gene refers to a nucleic acid fragment that expresses mRNA or functional RNA, or encodes a specific protein, and which includes regulatory sequences. Genes also include nonexpressed DNA segments that, for example, form recognition sequences for other proteins. Genes can be obtained from a variety of sources, including cloning from a source of interest or synthesizing from known or predicted sequence information, and may include sequences designed to have desired parameters.

[0097] The term “native” or “wild type” gene refers to a gene that is present in the genome of an untransformed cell, i.e., a cell not having a known mutation.

[0098] A “marker gene” encodes a selectable or screenable trait.

[0099] The term “chimeric gene” refers to any gene that contains 1) DNA sequences, including regulatory and coding sequences, that are not found together in nature, or 2) sequences encoding parts of proteins not naturally adjoined, or 3) parts of promoters that are not naturally adjoined. Accordingly, a chimeric gene may comprise regulatory sequences and coding sequences that are derived from different sources, or comprise regulatory sequences. and coding sequences derived from the same source, but arranged in a manner different from that found in nature.

[0100] A “transgene” refers to a gene that has been introduced into the genome by transformation and is stably maintained. Transgenes may include, for example, genes that are either heterologous or homologous to the genes of a particular plant to be transformed. Additionally, transgenes may comprise native genes inserted into a non-native organism, or chimeric genes. The term “endogenous gene” refers to a native gene in its natural location in the genome of an organism. A “foreign” gene refers to a gene not normally found in the host organism but that is introduced by gene transfer.

[0101] An “oligonucleotide” corresponding to a nucleotide sequence of the invention, e.g., for use in probing or amplification reactions, may be about 30 or fewer nucleotides in length (e.g., 9, 12, 15, 18, 20, 21 or 24, or any number between 9 and 30). Generally specific primers are upwards of 14 nucleotides in length. For optimum specificity and cost effectiveness, primers of 16 to 24 nucleotides in length may be preferred. Those skilled in the art are well versed in the design of primers for use processes such as PCR. If required, probing can be done with entire restriction fragments of the gene disclosed herein which may be 100's or even 1000's of nucleotides in length.

[0102] The terms “protein,” “peptide” and “polypeptide” are used interchangeably herein.

[0103] The nucleotide sequences of the invention can be introduced into any plant. The genes to be introduced can be conveniently used in expression cassettes for introduction and expression in any plant of interest. Such expression cassettes will comprise the transcriptional initiation region of the invention linked to a nucleotide sequence of interest. Preferred promoters include constitutive, tissue-specific, developmental-specific, inducible and/or viral promoters. Such an expression cassette is provided with a plurality of restriction sites for insertion of the gene of interest to be under the transcriptional regulation of the regulatory regions. The expression cassette may additionally contain selectable marker genes. The cassette will include in the 5′-3′ direction of transcription, a transcriptional and translational initiation region, a DNA sequence of interest, and a transcriptional and translational termination region functional in plants. The termination region may be native with the transcriptional initiation region, may be native with the DNA sequence of interest, or may be derived from another source. Convenient termination regions are available from the Ti-plasmid of A. tumefaciens, such, as the octopine synthase and nopaline synthase termination regions. See also, Guerineau et al., 1991; Proudfoot, 1991; Sanfacon et al., 1991; Mogen et al., 1990; Munroe et al., 1990; Ballas et al., 1989; Joshi et al., 1987.

[0104] “Coding sequence” refers to a DNA or RNA sequence that codes for a specific amino acid sequence and excludes the non-coding sequences. It may constitute an “uninterrupted coding sequence”, i.e., lacking an intron, such as in a cDNA or it may include one or more introns bounded by appropriate splice junctions. An “intron” is a sequence of RNA which is contained in the primary transcript but which is removed through cleavage and re-ligation of the RNA within the cell to create the mature mRNA that can be translated into a protein.

[0105] The terms “open reading frame” and “ORF” refer to the amino acid sequence encoded between translation initiation and termination codons of a coding sequence. The terms “initiation codon” and “termination codon” refer to a unit of three adjacent nucleotides (‘codon’) in a coding sequence that specifies initiation and chain termination, respectively, of protein synthesis (mRNA translation).

[0106] A “functional RNA” refers to an antisense RNA, ribozyme, or other RNA that is not translated.

[0107] The term “RNA transcript” refers to the product resulting from RNA polymerase catalyzed transcription of a DNA sequence. When the RNA transcript is a perfect complementary copy of the DNA sequence, it is referred to as the primary transcript or it may be a RNA sequence derived from posttranscriptional processing of the primary transcript and is referred to as the mature RNA. “Messenger RNA” (mRNA) refers to the RNA that is without introns and that can be translated into protein by the cell. “cDNA” refers to a single- or a double-stranded DNA that is complementary to and derived from mRNA.

[0108] “Regulatory sequences” and “suitable regulatory sequences” each refer to nucleotide sequences located upstream (5′ non-coding sequences), within, or downstream (3′ non-coding sequences) of a coding sequence, and which influence the transcription, RNA processing or stability, or translation of the associated coding sequence. Regulatory sequences include enhancers, promoters, translation leader sequences, introns, and polyadenylation signal sequences. They include natural and synthetic sequences as well as sequences which may be a combination of synthetic and natural sequences. As is noted above, the term “suitable regulatory sequences” is not limited to promoters.

[0109] “5′ non-coding sequence” refers to a nucleotide sequence located 5′ (upstream) to the coding sequence. It is present in the fully processed mRNA upstream of the initiation codon and may affect processing of the primary transcript to mRNA, mRNA stability or translation efficiency (Turner et al., 1995).

[0110] “3′ non-coding sequence” refers to nucleotide sequences located 3′ (downstream) to a coding sequence and include polyadenylation signal sequences and other sequences encoding regulatory signals capable of affecting mRNA processing or gene expression. The polyadenylation signal is usually characterized by affecting the addition of polyadenylic acid tracts to the 3′ end of the mRNA precursor. The use of different 3′ non-coding sequences is exemplified by Ingelbrecht et al., 1989.

[0111] The term “translation leader sequence” refers to that DNA sequence portion of a gene between the promoter and coding sequence that is transcribed into RNA and is present in the fully processed mRNA upstream (5′) of the translation start codon. The translation leader sequence may affect processing of the primary transcript to mRNA, mRNA stability or translation efficiency.

[0112] “Signal peptide” refers to the amino terminal extension of a polypeptide, which is translated in conjunction with the polypeptide forming a precursor peptide and which is required for its entrance into the secretory pathway. The term “signal sequence” refers to a nucleotide sequence that encodes the signal peptide.

[0113] “Promoter” refers to a nucleotide sequence, usually upstream (5′) to its coding sequence, which controls the expression of the coding sequence by providing the recognition for RNA polymerase and other factors required for proper transcription. “Promoter” includes a minimal promoter that is a short DNA sequence comprised of a TATA box and other sequences that serve to specify the site of transcription initiation, to which regulatory elements are added for control of expression. “Promoter” also refers to a nucleotide sequence that includes a minimal promoter plus regulatory elements that is capable of controlling the expression of a coding sequence or functional RNA. This type of promoter sequence consists of proximal and more distal upstream elements, the latter elements often referred to as enhancers. Accordingly, an “enhancer” is a DNA sequence which can stimulate promoter activity and may be an innate element of the promoter or a heterologous element inserted to enhance the level or tissue specificity of a promoter. It is capable of operating in both orientations (normal or flipped), and is capable of functioning even when moved either upstream or downstream from the promoter. Both enhancers and other upstream promoter elements bind sequence-specific DNA-binding proteins that mediate their effects. Promoters may be derived in their entirety from a native gene, or be composed of different elements, derived from different promoters found in nature, or even be comprised of synthetic DNA segments. A promoter may also contain DNA sequences that are involved in the binding of protein factors which control the effectiveness of transcription initiation in response to physiological or developmental conditions.

[0114] The “initiation site” is the position surrounding the first nucleotide that is part of the transcribed sequence, which is also defined as position +1. With respect to this site all other sequences of the gene and its controlling regions are numbered. Downstream sequences (i.e., further protein encoding sequences in the 3′ direction) are denominated positive, while upstream sequences (mostly of the controlling regions in the 5′ direction) are denominated negative.

[0115] Promoter elements, particularly a TATA element, that are inactive or that have greatly reduced promoter activity in the absence of upstream activation are referred to as “minimal or core promoters.” In the presence of a suitable transcription factor, the minimal promoter functions to permit transcription. A “minimal or core promoter” thus consists only of all basal elements needed for transcription initiation, e.g., a TATA box and/or an initiator.

[0116] “Constitutive expression” refers to expression using a constitutive or regulated promoter. “Conditional” and “regulated expression” refer to expression controlled by a regulated promoter.

[0117] “Constitutive promoter” refers to a promoter that is able to express the open reading frame (ORF) that it controls in all or nearly all of the plant tissues during all or nearly all developmental stages of the plant. Each of the transcription-activating elements do not exhibit an absolute tissue-specificity, but mediate transcriptional activation in most plant parts at a level of ≧1% of the level reached in the part of the plant in which transcription is most active.

[0118] “Regulated promoter” refers to promoters that direct gene expression not constitutively, but in a temporally- and/or spatially-regulated manner, and includes both tissue-specific and inducible promoters. It includes natural and synthetic sequences as well as sequences which may be a combination of synthetic and natural sequences. Different promoters may direct the expression of a gene in different tissues or cell types, or at different stages of development, or in response to different environmental conditions. New promoters of various types useful in plant cells are constantly being discovered, numerous examples may be found in the compilation by Okamuro et al. (1989). Typical regulated promoters useful in plants include but are not limited to safener-inducible promoters, promoters derived from the tetracycline-inducible system, promoters derived from salicylate-inducible systems, promoters derived from alcohol-inducible systems, promoters derived from glucocorticoid-inducible system, promoters derived from pathogen-inducible systems, and promoters derived from ecdysome-inducible systems.

[0119] “Tissue-specific promoter” refers to regulated promoters that are not expressed in all plant cells but only in one or more cell types in specific organs (such as leaves or seeds), specific tissues (such as embryo or cotyledon), or specific cell types (such as leaf parenchyma or seed storage cells). These also include promoters that are temporally regulated, such as in early or late embryogenesis, during fruit ripening in developing seeds or fruit, in fully differentiated leaf, or at the onset of senescence.

[0120] “Inducible promoter” refers to those regulated promoters that can be turned on in one or more cell types by an external stimulus, such as a chemical, light, hormone, stress, or a pathogen.

[0121] “Operably-linked” refers to the association of nucleic acid sequences on single nucleic acid fragment so that the function of one is affected by the other. For example, a regulatory DNA sequence is said to be “operably linked to” or “associated with” a DNA sequence that codes for an RNA or a polypeptide if the two sequences are situated such that the regulatory DNA sequence affects expression of the coding DNA sequence (i.e., that the coding sequence or functional RNA is under the transcriptional control of the promoter). Coding sequences can be operably-linked to regulatory sequences in sense or antisense orientation.

[0122] “Expression” refers to the transcription and/or translation of an endogenous gene, ORF or portion thereof, or a transgene in plants. For example, in the case of antisense constructs, expression may refer to the transcription of the antisense DNA only. In addition, expression refers to the transcription and stable accumulation of sense (mRNA) or functional RNA. Expression may also refer to the production of protein.

[0123] “Specific expression” is the expression of gene products which is limited to one or a few plant tissues (spatial limitation) and/or to one or a few plant developmental stages (temporal limitation). It is acknowledged that hardly a true specificity exists: promoters seem to be preferably switch on in some tissues, while in other tissues there can be no or only little activity. This phenomenon is known as leaky expression. However, with specific expression in this invention is meant preferable expression in one or a few plant tissues.

[0124] The “expression pattern” of a promoter (with or without enhancer) is the pattern of expression levels which shows where in the plant and in what developmental stage transcription is initiated by said promoter. Expression patterns of a set of promoters are said to be complementary when the expression pattern of one promoter shows little overlap with the expression pattern of the other promoter. The level of expression of a promoter can be determined by measuring the ‘steady state’ concentration of a standard transcribed reporter mRNA. This measurement is indirect since the concentration of the reporter mRNA is dependent not only on its synthesis rate, but also on the rate with which the mRNA is degraded. Therefore, the steady state level is the product of synthesis rates and degradation rates.

[0125] The rate of degradation can however be considered to proceed at a fixed rate when the transcribed sequences are identical, and thus this value can serve as a measure of synthesis rates. When promoters are compared in this way techniques available to those skilled in the art are hybridization S1-RNAse analysis, northern blots and competitive RT-PCR. This list of techniques in no way represents all available techniques, but rather describes commonly used procedures used to analyze transcription activity and expression levels of mRNA.

[0126] The analysis of transcription start points in practically all promoters has revealed that there is usually no single base at which transcription starts, but rather a more or less clustered set of initiation sites, each of which accounts for some start points of the mRNA. Since this distribution varies from promoter to promoter the sequences of the reporter mRNA in each of the populations would differ from each other. Since each mRNA species is more or less prone to degradation, no single degradation rate can be expected for different reporter mRNAs. It has been shown for various eukaryotic promoter sequences that the sequence surrounding the initiation site (‘initiator’) plays an important role in determining the level of RNA expression directed by that specific promoter. This includes also part of the transcribed sequences. The direct fusion of promoter to reporter sequences would therefore lead to suboptimal levels of transcription.

[0127] A commonly used procedure to analyze expression patterns and levels is through determination of the ‘steady state’ level of protein accumulation in a cell. Commonly used candidates for the reporter gene, known to those skilled in the art are beta-glucuronidase (GUS), chloramphenicol acetyl transferase (CAT) and proteins with fluorescent properties, such as green fluorescent protein (GFP) from Aequora victoria. In principle, however, many more proteins are suitable for this purpose, provided the protein does not interfere with essential plant functions. For quantification and determination of localization a number of tools are suited. Detection systems can readily be created or are available which are based on, e.g., immunochemical, enzymatic, fluorescent detection and quantification. Protein levels can be determined in plant tissue extracts or in intact tissue using in situ analysis of protein expression.

[0128] Generally, individual transformed lines with one chimeric promoter reporter construct will vary in their levels of expression of the reporter gene. Also frequently observed is the phenomenon that such transformants do not express any detectable product (RNA or protein). The variability in expression is commonly ascribed to ‘position effects’, although the molecular mechanisms underlying this inactivity are usually not clear.

[0129] “Overexpression” refers to the level of expression in transgenic cells or organisms that exceeds levels of expression in normal or untransformed (nontransgenic) cells or organisms.

[0130] “Antisense inhibition” refers to the production of antisense RNA transcripts capable of suppressing the expression of protein from an endogenous gene or a transgene.

[0131] “Gene silencing” refers to homology-dependent suppression of viral genes, transgenes, or endogenous nuclear genes. Gene silencing may be transcriptional, when the suppression is due to decreased transcription of the affected genes, or post-transcriptional, when the suppression is due to increased turnover (degradation) of RNA species homologous to the affected genes (English et al., 1996). Gene silencing includes virus-induced gene silencing (Ruiz et al. 1998).

[0132] The terms “heterologous DNA sequence,” “exogenous DNA segment” or “heterologous nucleic acid,” as used herein, each refer to a sequence that originates from a source foreign to the particular host cell or, if from the same source, is modified from its original form. Thus, a heterologous gene in a host cell includes a gene that is endogenous to the particular host cell but has been modified through, for example, the use of DNA shuffling. The terms also include non-naturally occurring multiple copies of a naturally occurring DNA sequence. Thus, the terms refer to a DNA segment that is foreign or heterologous to the cell, or homologous to the cell but in a position within the host cell nucleic acid in which the element is not ordinarily found. Exogenous DNA segments are expressed to yield exogenous polypeptides. A “homologous” DNA sequence is a DNA sequence that is naturally associated with a host cell into which it is introduced.

[0133] “Homologous to” in the context of nucleotide sequence identity refers to the similarity between the nucleotide sequence of two nucleic acid molecules or between the amino acid sequences of two protein molecules. Estimates of such homology are provided by either DNA-DNA or DNA-RNA hybridization under conditions of stringency as is well understood by those skilled in the art (as described in Haines and Higgins (eds.), Nucleic Acid Hybridization, IRL Press, Oxford, U.K.), or by the comparison of sequence similarity between two nucleic acids or proteins.

[0134] The term “substantially similar” refers to nucleotide and amino acid sequences that represent functional and/or structural equivalents of Oryza sequences disclosed herein.

[0135] In its broadest sense, the term “substantially similar” when used herein with respect to a nucleotide sequence means that the nucleotide sequence is part of a gene which encodes a polypeptide having substantially the same structure and function as a polypeptide encoded by a gene for the reference nucleotide sequence, e.g., the nucleotide sequence comprises a promoter from a gene that is the ortholog of the gene corresponding to the reference nucleotide sequence, as well as promoter sequences that are structurally related the promoter sequences particularly exemplified herein, i.e., the substantially similar promoter sequences hybridize to the complement of the promoter sequences exemplified herein under high or very high stringency conditions. For example, altered nucleotide sequences which simply reflect the degeneracy of the genetic code but nonetheless encode amino acid sequences that are identical to a particular amino acid sequence are substantially similar to the particular sequences. The term “substantially similar” also includes nucleotide sequences wherein the sequence has been modified, for example, to optimize expression in particular cells, as well as nucleotide sequences encoding a variant polypeptide having one or more amino acid substitutions relative to the (unmodified) polypeptide encoded by the reference sequence, which substitution(s) does not alter the activity of the variant polypeptide relative to the unmodified polypeptide.

[0136] In its broadest sense, the term “substantially similar” when used herein with respect to polypeptide means that the polypeptide has substantially the same structure and function as the reference polypeptide. In addition, amino acid sequences that are substantially similar to a particular sequence are those wherein overall amino acid identity is at least 65% or greater to the instant sequences. Modifications that result in equivalent nucleotide or amino acid sequences are well within the routine skill in the art. The percentage of amino acid sequence identity between the substantially similar and the reference polypeptide is at least 65%, 66%, 67%, 68%, 69%, 70%, e.g., 71%, 72%, 73%, 74%, 75%, 76%, 77%, 78%, 79%, 80%, 81%, 82%, 83%, 84%, 85%, 86%, 87%, 88%, 89%, and even 90% or more, e.g., 91%, 92%, 93%, 94%, 95%, 96%, 97%, 98%, up to at least 99%, wherein the reference polypeptide is an Oryza polypeptide encoded by a gene with a promoter having any one of SEQ ID NOs:1-350 and 1051-1551, e.g., a nucleotide sequence comprising an open reading frame having any one of SEQ ID NOs:351-700 or 1552-2052 which encodes one of SEQ ID Nos:701-1050 or 2053-2553. One indication that two polypeptides are substantially similar to each other, besides having substantially the same function, is that an agent, e.g., an antibody, which specifically binds to one of the polypeptides, specifically binds to the other.

[0137] Sequence comparisons maybe carried out using a Smith-Waterman sequence alignment algorithm (see e.g., Waterman (1995) or http://www hto.usc.edu/software/seqaln/index.html). The localS program, version 1.16, is preferably used with following parameters: match: 1, mismatch penalty: 0.33, open-gap penalty: 2, extended-gap penalty: 2.

[0138] Moreover, a nucleotide sequence that is “substantially similar” to a reference nucleotide sequence is said to be “equivalent” to the reference nucleotide sequence. The skilled artisan recognizes that equivalent nucleotide sequences encompassed by this invention can also be defined by their ability to hybridize, under low, moderate and/or stringent conditions (e.g., 0.1×SSC, 0.1% SDS, 65° C.), with the nucleotide sequences that are within the literal scope of the instant claims.

[0139] What is meant by “substantially the same activity” when used in reference to a polynucleotide or polypeptide fragment is that the fragment has at least 65%, 66%, 67%, 68%, 69%, 70%, e.g., 71%, 72%, 73%, 74%, 75%, 76%, 77%, 78%, 79%, 80%, 81%, 82%, 83%, 84%, 85%, 86%, 87%, 88%, 89%, and even 90% or more, e.g., 91%, 92%, 93%, 94%, 95%, 96%, 97%, 98%, up to at least 99% of the activity of the full length polynucleotide or full length polypeptide.

[0140] “Target gene” refers to a gene on the replicon that expresses the desired target coding sequence, functional RNA, or protein. The target gene is not essential for replicon replication. Additionally, target genes may comprise native non-viral genes inserted into a non-native organism, or chimeric genes, and will be under the control of suitable regulatory sequences. Thus, the regulatory sequences in the target gene may come from any source, including the virus. Target genes may include coding sequences that are either heterologous or homologous to the genes of a particular plant to be transformed. However, target genes do not include native viral genes. Typical target genes include, but are not limited to genes encoding a structural protein, a seed storage protein, a protein that conveys herbicide resistance, and a protein that conveys insect resistance. Proteins encoded by target genes are known as “foreign proteins”. The expression of a target gene in a plant will typically produce an altered plant trait.

[0141] The term “altered plant trait” means any phenotypic or genotypic change in a transgenic plant relative to the wild-type or non-transgenic plant host.

[0142] “Replication gene” refers to a gene encoding a viral replication protein. In addition to the ORF of the replication protein, the replication gene may also contain other overlapping or non-overlapping ORF(s), as are found in viral sequences in nature. While not essential for replication, these additional ORFs may enhance replication and/or viral DNA accumulation. Examples of such additional ORFs are AC3 and AL3 in ACMV and TGMV geminiviruses, respectively.

[0143] “Chimeric trans-acting replication gene” refers either to a replication gene in which the coding sequence of a replication protein is under the control of a regulated plant promoter other than that in the native viral replication gene, or a modified native viral replication gene, for example, in which a site specific sequence(s) is inserted in the 5′ transcribed but untranslated region. Such chimeric genes also include insertion of the known sites of replication protein binding between the promoter and the transcription start site that attenuate transcription of viral replication protein gene.

[0144] “Chromosomally-integrated” refers to the integration of a foreign gene or DNA construct into the host DNA by covalent bonds. Where genes are not “chromosomally integrated” they may be “transiently expressed.” Transient expression of a gene refers to the expression of a gene that is not integrated into the host chromosome but functions independently, either as part of an autonomously replicating plasmid or expression cassette, for example, or as part of another biological system such as a virus.

[0145] The term “transformation” refers to the transfer of a nucleic acid fragment into the genome of a host cell, resulting in genetically stable inheritance. Host cells containing the transformed nucleic acid fragments are referred to as “transgenic” cells, and organisms comprising transgenic cells are referred to as “transgenic organisms”. Examples of methods of transformation of plants and plant cells include Agrobacterium-mediated transformation (De Blaere et al., 1987) and particle bombardment technology (Klein et al. 1987; U.S. Pat. No. 4,945,050). Whole plants may be regenerated from transgenic cells by methods well known to the skilled artisan (see, for example, Fromm et al., 1990).

[0146] “Transformed,” “transgenic,” and “recombinant” refer to a host organism such as a bacterium or a plant into which a heterologous nucleic acid molecule has been introduced. The nucleic acid molecule can be stably integrated into the genome generally known in the art and are disclosed in Sambrook et al., 1989. See also Innis et al., 1995 and Gelfand, 1995; and Innis and Gelfand, 1999. Known methods of PCR include, but are not limited to, methods using paired primers, nested primers, single specific primers, degenerate primers, gene-specific primers, vector-specific primers, partially mismatched primers, and the like. For example, “transformed,” “transformant,” and “transgenic” plants or calli have been through the transformation process and contain a foreign gene integrated into their chromosome. The term “untransformed” refers to normal plants that have not been through the transformation process.

[0147] “Transiently transformed” refers to cells in which transgenes and foreign DNA have been introduced (for example, by such methods as Agrobacterium-mediated transformation or biolistic bombardment), but not selected for stable maintenance.

[0148] “Stably transformed” refers to cells that have been selected and regenerated on a selection media following transformation.

[0149] “Transient expression” refers to expression in cells in which a virus or a transgene is introduced by viral infection or by such methods as Agrobacterium-mediated transformation, electroporation, or biolistic bombardment, but not selected for its stable maintenance.

[0150] “Genetically stable” and “heritable” refer to chromosomally-integrated genetic elements that are stably maintained in the plant and stably inherited by progeny through successive generations.

[0151] “Primary transformant” and “T0 generation” refer to transgenic plants that are of the same genetic generation as the tissue which was initially transformed (i.e., not having gone through meiosis and fertilization since transformation).

[0152] “Secondary transformants” and the “T1, T2, T3, etc. generations” refer to transgenic plants derived from primary transformants through one or more meiotic and fertilization cycles. They may be derived by self-fertilization of primary or secondary transformants or crosses of primary or secondary transformants with other transformed or untransformed plants.

[0153] “Wild-type” refers to a virus or organism found in nature without any known mutation.

[0154] “Genome” refers to the complete genetic material of an organism.

[0155] The term “nucleic acid” refers to deoxyribonucleotides or ribonucleotides and polymers thereof in either single- or double-stranded form, composed of monomers (nucleotides) containing a sugar, phosphate and a base which is either a purine or pyrimidine. Unless specifically limited, the term encompasses nucleic acids containing known analogs of natural nucleotides which have similar binding properties as the reference nucleic acid and are metabolized in a manner similar to naturally occurring nucleotides. Unless otherwise indicated, a particular nucleic acid sequence also implicitly encompasses conservatively modified variants thereof (e.g., degenerate codon substitutions) and complementary sequences as well as the sequence explicitly indicated. Specifically, degenerate codon substitutions may be achieved by generating sequences in which the third position of one or more selected (or all) codons is substituted with mixed-base and/or deoxyinosine residues (Batzer et al., 1991; Ohtsuka et al., 1985; Rossolini et al. 1994). A “nucleic acid fragment” is a fraction of a given nucleic acid molecule. In higher plants, deoxyribonucleic acid (DNA) is the genetic material while ribonucleic acid (RNA) is involved in the transfer of information contained within DNA into proteins. The term “nucleotide sequence” refers to a polymer of DNA or RNA which can be single- or double-stranded, optionally containing synthetic, non-natural or altered nucleotide bases capable of incorporation into DNA or RNA polymers. The terms “nucleic acid” or “nucleic acid sequence” may also be used interchangeably with gene, cDNA, DNA and RNA encoded by a gene.

[0156] The invention encompasses isolated or substantially purified nucleic acid or protein compositions. In the context of the present invention, an “isolated” or “purified” DNA molecule or an “isolated” or “purified” polypeptide is a DNA molecule or polypeptide that, by the hand of man, exists apart from its native environment and is therefore not a product of nature. An isolated DNA molecule or polypeptide may exist in a purified form or may exist in a non-native environment such as, for example, a transgenic host cell. For example, an “isolated” or “purified” nucleic acid molecule or protein, or biologically active portion thereof, is substantially free of other cellular material, or culture medium when produced by recombinant techniques, or substantially free of chemical precursors or other chemicals when chemically synthesized. Preferably, an “isolated” nucleic acid is free of sequences (preferably protein encoding sequences) that naturally flank the nucleic acid (i.e., sequences located at the 5′ and 3′ ends of the nucleic acid) in the genomic DNA of the organism from which the nucleic acid is derived. For example, in various embodiments, the isolated nucleic acid molecule can contain less than about 5 kb, 4 kb, 3 kb, 2 kb, 1 kb, 0.5 kb, or 0.1 kb of nucleotide sequences that naturally flank the nucleic acid molecule in genomic DNA of the cell from which the nucleic acid is derived. A protein that is substantially free of cellular material includes preparations of protein or polypeptide having less than about 30%, 20%, 10%, 5%, (by dry weight) of contaminating protein. When the protein of the invention, or biologically active portion thereof, is recombinantly produced, preferably culture medium represents less than about 30%, 20%, 10%, or 5% (by dry weight) of chemical precursors or non-protein of interest chemicals.

[0157] The nucleotide sequences of the invention include both the naturally occurring sequences as well as mutant (variant) forms. Such variants will continue to possess the desired activity, i.e., either promoter activity or the activity of the product encoded by the open reading frame of the non-variant nucleotide sequence.

[0158] Thus, by “variants” is intended substantially similar sequences. For nucleotide sequences comprising an open reading frame, variants include those sequences that, because of the degeneracy of the genetic code, encode the identical amino acid sequence of the native protein. Naturally occurring allelic variants such as these can be identified with the use of well-known molecular biology techniques, as, for example, with polymerase chain reaction (PCR) and hybridization techniques. Variant nucleotide sequences also include synthetically derived nucleotide sequences, such as those generated, for example, by using site-directed mutagenesis and for open reading frames, encode the native protein, as well as those that encode a polypeptide having amino acid substitutions relative to the native protein. Generally, nucleotide sequence variants of the invention will have at least 40, 50, 60, to 70%, e.g., preferably 71%, 72%, 73%, 74%, 75%, 76%, 77%, 78%, to 79%, generally at least 80%, e.g., 81%-84%, at least 85%, e.g., 86%, 87%, 88%, 89%, 90%, 91%, 92%, 93%, 94%, 95%, 96%, 97%, to 98% and 99% nucleotide sequence identity to the native (wild type or endogenous) nucleotide sequence.

[0159] “Conservatively modified variations” of a particular nucleic acid sequence refers to those nucleic acid sequences that encode identical or essentially identical amino acid sequences, or where the nucleic acid sequence does not encode an amino acid sequence, to essentially identical sequences. Because of the degeneracy of the genetic code, a large number of functionally identical nucleic acids encode any given polypeptide. For instance the codons CGT, CGC, CGA, CGG, AGA, and AGG all encode the amino acid arginine. Thus, at every position where an arginine is specified by a codon, the codon can be altered to any of the corresponding codons described without altering the encoded protein. Such nucleic acid variations are “silent variations” which are one species of “conservatively modified variations.” Every nucleic acid sequence described herein which encodes a polypeptide also describes every possible silent variation, except where otherwise noted. One of skill will recognize that each codon in a nucleic acid (except ATG, which is ordinarily the only codon for methionine) can be modified to yield a functionally identical molecule by standard techniques. Accordingly, each “silent variation” of a nucleic acid which encodes a polypeptide is implicit in each described sequence.

[0160] The nucleic acid molecules of the invention can be “optimized” for enhanced expression in plants of interest. See, for example, EPA 035472; WO 91/16432; Perlak et al., 1991; and Murray et al., 1989. In this manner, the open reading frames in genes or gene fragments can be synthesized utilizing plant-preferred codons. See, for example, Campbell and Gowri, 1990 for a discussion of host-preferred codon usage. Thus, the nucleotide sequences can be optimized for expression in any plant. It is recognized that all or any part of the gene sequence may be optimized or synthetic. That is, synthetic or partially optimized sequences may also be used. Variant nucleotide sequences and proteins also encompass, sequences and protein derived from a mutagenic and recombinogenic procedure such as DNA shuffling. With such a procedure, one or more different coding sequences can be manipulated to create a new polypeptide possessing the desired properties. In this manner, libraries of recombinant polynucleotides are generated from a population of related sequence polynucleotides comprising sequence regions that have substantial sequence identity and can be homologously recombined in vitro or in vivo. Strategies for such DNA shuffling are known in the art. See, for example, Stemmer, 1994; Stemmer, 1994; Crameri et al., 1997; Moore et al., 1997; Zhang et al., 1997; Crameri et al., 1998; and U.S. Pat. Nos. 5,605,793 and 5,837,458.

[0161] By “variant” polypeptide is intended a polypeptide derived from the native protein by deletion (so-called truncation) or addition of one or more amino acids to the N-terminal and/or C-terminal end of the native protein; deletion or addition of one or more amino acids at one or more sites in the native protein; or substitution of one or more amino acids at one or more sites in the native protein. Such variants may result from, for example, genetic polymorphism or from human manipulation. Methods for such manipulations are generally known in the art.

[0162] Thus, the polypeptides may be altered in various ways including amino acid substitutions, deletions, truncations, and insertions. Methods for such manipulations are generally known in the art. For example, amino acid sequence variants of the polypeptides can be prepared by mutations in the DNA. Methods for mutagenesis and nucleotide sequence alterations are well known in the art. See, for example, Kunkel, 1985; Kunkel et al., 1987; U.S. Pat. No. 4,873,192; Walker and Gaastra, 1983 and the references cited therein. Guidance as to appropriate amino acid substitutions that do not affect biological activity of the protein of interest may be found in the model of Dayhoff et al. (1978). Conservative substitutions, such as exchanging one amino acid with another having similar properties, are preferred.

[0163] Individual substitutions deletions or additions that alter, add or delete a single amino acid or a small percentage of amino acids (typically less than 5%, more typically less than 1%) in an encoded sequence are “conservatively modified variations,” where the alterations result in the substitution of an amino acid with a chemically similar amino acid. Conservative substitution tables providing functionally similar amino acids are well known in the art. The following five groups each contain amino acids that are conservative substitutions for one another: Aliphatic: Glycine (G), Alanine (A), Valine (V), Leucine (L), Isoleucine (I); Aromatic: Phenylalanine (F), Tyrosine (Y), Tryptophan (W); Sulfur-containing: Methionine (M), Cysteine (C); Basic: Arginine I, Lysine (K), Histidine (H); Acidic: Aspartic acid (D), Glutamic acid (E), Asparagine (N), Glutamine (Q). See also, Creighton, 1984. In addition, individual substitutions, deletions or additions which alter, add or delete a single amino acid or a small percentage of amino acids in an encoded sequence are also “conservatively modified variations.”

[0164] “Expression cassette” as used herein means a DNA sequence capable of directing expression of a particular nucleotide sequence in an appropriate host cell, comprising a promoter operably linked to the nucleotide sequence of interest which is operably linked to termination signals. It also typically comprises sequences required for proper translation of the nucleotide sequence. The coding region usually codes for a protein of interest but may also code for a functional RNA of interest, for example antisense RNA or a nontranslated RNA, in the sense or antisense direction. The expression cassette comprising the nucleotide sequence of interest may be chimeric, meaning that at least one of its components is heterologous with respect to at least one of its other components. The expression cassette may also be one which is naturally occurring but has been obtained in a recombinant form useful for heterologous expression. The expression of the nucleotide sequence in the expression cassette may be under the control of a constitutive promoter or of an inducible promoter which initiates transcription only when the host cell is exposed to some particular external stimulus. In the case of a multicellular organism, the promoter can also be specific to a particular tissue or organ or stage of development.

[0165] “Vector” is defined to include, inter alia, any plasmid, cosmid, phage or Agrobacterium binary vector in double or single stranded linear or circular form which may or may not be self transmissible or mobilizable, and which can transform prokaryotic or eukaryotic host either by integration into the cellular genome or exist extrachromosomally (e.g. autonomous replicating plasmid with an origin of replication).

[0166] Specifically included are shuttle vectors by which is meant a DNA vehicle capable, naturally or by design, of replication in two different host organisms, which may be selected from actinomycetes and related species, bacteria and eukaryotic (e.g. higher plant, mammalian, yeast or fungal cells).

[0167] Preferably the nucleic acid in the vector is under the control of, and operably linked to, an appropriate promoter or other regulatory elements for transcription in a host cell such as a microbial, e.g. bacterial, or plant cell. The vector may be a bi-functional expression vector which functions in multiple hosts. In the case of genomic DNA, this may contain its own promoter or other regulatory elements and in the case of cDNA this may be under the control of an appropriate promoter or other regulatory elements for expression in the host cell.

[0168] “Cloning vectors” typically contain one or a small number of restriction endonuclease recognition sites at which foreign DNA sequences can be inserted in a determinable fashion without loss of essential biological function of the vector, as well as a marker gene that is suitable for use in the identification and selection of cells transformed with the cloning vector. Marker genes typically include genes that provide tetracycline resistance, hygromycin resistance or ampicillin resistance.

[0169] A “transgenic plant” is a plant having one or more plant cells that contain an expression vector.

[0170] “Plant tissue” includes differentiated and undifferentiated tissues or plants, including but not limited to roots, stems, shoots, leaves, pollen, seeds, tumor tissue and various forms of cells and culture such as single cells, protoplast, embryos, and callus tissue. The plant tissue may be in plants or in organ, tissue or cell culture.

[0171] The following terms are used to describe the sequence relationships between two or more nucleic acids or polynucleotides: (a) “reference sequence”, (b) “comparison window”, (c) “sequence identity”, (d) “percentage of sequence identity”, and (e) “substantial identity”.

[0172] (a) As used herein, “reference sequence” is a defined sequence used as a basis for sequence comparison. A reference sequence may be a subset or the entirety of a specified sequence; for example, as a segment of a full length cDNA or gene sequence, or the complete cDNA or gene sequence.

[0173] (b) As used herein, “comparison window” makes reference to a contiguous and specified segment of a polynucleotide sequence, wherein the polynucleotide sequence in the comparison window may comprise additions or deletions (i.e., gaps) compared to the reference sequence (which does not comprise additions or deletions) for optimal alignment of the two sequences. Generally, the comparison window is at least 20 contiguous nucleotides in length, and optionally can be 30, 40, 50, 100, or longer. Those of skill in the art understand that to avoid a high similarity to a reference sequence due to inclusion of gaps in the polynucleotide sequence a gap penalty is typically introduced and is subtracted from the number of matches.

[0174] Methods of alignment of sequences for comparison are well known in the art. Thus, the determination of percent identity between any two sequences can be accomplished using a mathematical algorithm. Preferred, non-limiting examples of such mathematical algorithms are the algorithm of Myers and Miller, 1988; the local homology algorithm of Smith et al. 1981; the homology alignment algorithm of Needleman and Wunsch 1970; the search-for-similarity-method of Pearson and Lipman 1988; the algorithm of Karlin and Altschul, 1990, modified as in Karlin and Altschul, 1993.

[0175] Computer implementations of these mathematical algorithms can be utilized for comparison of sequences to determine sequence identity. Such implementations include, but are not limited to: CLUSTAL in the PC/Gene program (available from Intelligenetics, Mountain View, Calif.); the ALIGN program (Version 2.0) and GAP, BESTFIT, BLAST, FASTA, and TFASTA in the Wisconsin Genetics Software Package, Version 8 (available from Genetics Computer Group (GCG), 575 Science Drive, Madison, Wis., USA). Alignments using these programs can be performed using the default parameters. The CLUSTAL program is well described by Higgins et al. 1988; Higgins et al. 1989; Corpet et al. 1988; Huang et al. 1992; and Pearson et al. 1994. The ALIGN program is based on the algorithm of Myers and Miller, supra. The BLAST programs of Altschul et al., 1990, are based on the algorithm of Karlin and Altschul supra.

[0176] Software for performing BLAST analyses is publicly available through the National Center for Biotechnology Information (http://www.ncbi.nlm.nih.gov/). This algorithm involves first identifying high scoring sequence pairs (HSPs) by identifying short words of length W in the query sequence, which either match or satisfy some positive-valued threshold score T when aligned with a word of the same length in a database sequence. T is referred to as the neighborhood word score threshold (Altschul et al., 1990). These initial neighborhood word hits act as seeds for initiating searches to find longer HSPs containing them. The word hits are then extended in both directions along each sequence for as far as the cumulative alignment score can be increased. Cumulative scores are calculated using, for nucleotide sequences, the parameters M (reward score for a pair of matching residues; always >0) and N (penalty score for mismatching residues; always <0). For amino acid sequences, a scoring matrix is used to calculate the cumulative score. Extension of the word hits in each direction are halted when the cumulative alignment score falls off by the quantity X from its maximum achieved value, the cumulative score goes to zero or below due to the accumulation of one or more negative-scoring residue alignments, or the end of either sequence is reached.

[0177] In addition to calculating percent sequence identity, the BLAST algorithm also performs a statistical analysis of the similarity between two sequences (see, e.g., Karlin & Altschul (1993). One measure of similarity provided by the BLAST algorithm is the smallest sum probability (P(N)), which provides an indication of the probability by which a match between two nucleotide or amino acid sequences would occur by chance. For example, a test nucleic acid sequence is considered similar to a reference sequence if the smallest sum probability in a comparison of the test nucleic acid sequence to the reference nucleic acid sequence is less than about 0.1, more preferably less than about 0.01, and most preferably less than about 0.001.

[0178] To obtain gapped alignments for comparison purposes, Gapped BLAST (in BLAST 2.0) can be utilized as described in Altschul et al. 1997. Alternatively, PSI-BLAST (in BLAST 2.0) can be used to perform an iterated search that detects distant relationships between molecules. See Altschul et al., supra. When utilizing BLAST, Gapped BLAST, PSI-BLAST, the default parameters of the respective programs (e.g. BLASTN for nucleotide sequences, BLASTX for proteins) can be used. The BLASTN program (for nucleotide sequences) uses as defaults a wordlength (W) of 11, an expectation (E) of 10, a cutoff of 100, M=5, N=−4, and a comparison of both strands. For amino acid sequences, the BLASTP program uses as defaults a wordlength (W) of 3, an expectation (E) of 10, and the BLOSUM62 scoring matrix (see Henikoff & Henikoff, 1989). See http://www.ncbi.nlm.nih.gov. Alignment may also be performed manually by inspection.

[0179] For purposes of the present invention, comparison of nucleotide sequences for determination of percent sequence identity to the promoter sequences disclosed herein is preferably made using the BlastN program (version 1.4.7 or later) with its default parameters or any equivalent program. By “equivalent program” is intended any sequence comparison program that, for any two sequences in question, generates an alignment having identical nucleotide or amino acid residue matches and an identical percent sequence identity when compared to the corresponding alignment generated by the preferred program.

[0180] (c) As used herein, “sequence identity” or “identity” in the context of two nucleic acid or polypeptide sequences makes reference to the residues in the two sequences that are the same when aligned for maximum correspondence over a specified comparison window. When percentage of sequence identity is used in reference to proteins it is recognized that residue positions which are not identical often differ by conservative amino acid substitutions, where amino acid residues are substituted for other amino acid residues with similar chemical properties (e.g., charge or hydrophobicity) and therefore do not change the functional properties of the molecule. When sequences differ in conservative substitutions, the percent sequence identity may be adjusted upwards to correct for the conservative nature of the substitution. Sequences that differ by such conservative substitutions are said to have “sequence similarity” or “similarity.” Means for making this adjustment are well known to those of skill in the art. Typically this involves scoring a conservative substitution as a partial rather than a full mismatch, thereby increasing the percentage sequence identity. Thus, for example, where an identical amino acid is given a score of 1 and a non-conservative substitution is given a score of zero, a conservative substitution is given a score between zero and 1. The scoring of conservative substitutions is calculated, e.g., as implemented in the program PC/GENE (Intelligenetics, Mountain View, Calif.).

[0181] (d) As used herein, “percentage of sequence identity” means the value determined by comparing two optimally aligned sequences over a comparison window, wherein the portion of the polynucleotide sequence in the comparison window may comprise additions or deletions (i.e., gaps) as compared to the reference sequence (which does not comprise additions or deletions) for optimal alignment of the two sequences. The percentage is calculated by determining the number of positions at which the identical nucleic acid base or amino acid residue occurs in both sequences to yield the number of matched positions, dividing the number of matched positions by the total number of positions in the window of comparison, and multiplying the result by 100 to yield the percentage of sequence identity.

[0182] (e)(i) The term “substantial identity” of polynucleotide sequences means that a polynucleotide comprises a sequence that has at least 70%, 71%, 72%, 73%, 74%, 75%, 76%, 77%, 78%, or 79%, preferably at least 80%, 81%, 82%, 83%, 84%, 85%, 86%, 87%, 88%, or 89%, more preferably at least 90%, 91%, 92%, 93%, or 94%, and most preferably at least 95%, 96%, 97%, 98%, or 99% sequence identity, compared to a reference sequence using one of the alignment programs described using standard parameters. One of skill in the art will recognize that these values can be appropriately adjusted to determine corresponding identity of proteins encoded by two nucleotide sequences by taking into account codon degeneracy, amino acid similarity, reading frame positioning, and the like. Substantial identity of amino acid sequences for these purposes normally means sequence identity of at least 70%, more preferably at least 80%, 90%, and most preferably at least 95%.

[0183] Another indication that nucleotide sequences are substantially identical is if two molecules hybridize to each other under stringent conditions (see below). Generally, stringent conditions are selected to be about 5° C. lower than the thermal melting point (Tₘ) for the specific sequence at a defined ionic strength and pH. However, stringent conditions encompass temperatures in the range of about 1° C. to about 20° C., depending upon the desired degree of stringency as otherwise qualified herein. Nucleic acids that do not hybridize to each other under stringent conditions are still substantially identical if the polypeptides they encode are substantially identical. This may occur, e.g., when a copy of a nucleic acid is created using the maximum codon degeneracy permitted by the genetic code. One indication that two nucleic acid sequences are substantially identical is when the polypeptide encoded by the first nucleic acid is immunologically cross reactive with the polypeptide encoded by the second nucleic acid.

[0184] (e)(ii) The term “substantial identity” in the context of a peptide indicates that a peptide comprises a sequence with at least 70%, 71%, 72%, 73%, 74%, 75%, 76%, 77%, 78%, or 79%, preferably 80%, 81%, 82%, 83%, 84%, 85%, 86%, 87%, 88%, or 89%, more preferably at least 90%, 91%, 92%, 93%, or 94%, or even more preferably, 95%, 96%, 97%, 98% or 99%, sequence identity to the reference sequence over a specified comparison window. Preferably, optimal alignment is conducted using the homology alignment algorithm of Needleman and Wunsch (1970). An indication that two peptide sequences are substantially identical is that one peptide is immunologically reactive with antibodies raised against the second peptide. Thus, a peptide is substantially identical to a second peptide, for example, where the two peptides differ only by a conservative substitution.

[0185] For sequence comparison, typically one sequence acts as a reference sequence to which test sequences are compared. When using a sequence comparison algorithm, test and reference sequences are input into a computer, subsequence coordinates are designated if necessary, and sequence algorithm program parameters are designated. The sequence comparison algorithm then calculates the percent sequence identity for the test sequence(s) relative to the reference sequence, based on the designated program parameters.

[0186] As noted above, another indication that two nucleic acid sequences are substantially identical is that the two molecules hybridize to each other under stringent conditions. The phrase “hybridizing specifically to” refers to the binding, duplexing, or hybridizing of a molecule only to a particular nucleotide sequence under stringent conditions when that sequence is present in a complex mixture (e.g., total cellular) DNA or RNA. “Bind(s) substantially” refers to complementary hybridization between a probe nucleic acid and a target nucleic acid and embraces minor mismatches that can be accommodated by reducing the stringency of the hybridization media to achieve the desired detection of the target nucleic acid sequence.

[0187] “Stringent hybridization conditions” and “stringent hybridization wash conditions” in the context of nucleic acid hybridization experiments such as Southern and Northern hybridization are sequence dependent, and are different under different environmental parameters. The Tₘ is the temperature (under defined ionic strength and pH) at which 50% of the target sequence hybridizes to a perfectly matched probe. Specificity is typically the function of post-hybridization washes, the critical factors being the ionic strength and temperature of the final wash solution. For DNA-DNA hybrids, the Tₘ can be approximated from the equation of Meinkoth and Wahl, 1984; Tₘ 81.5° C.+16.6 (log M)+0.41 (%GC)−0.61 (% form)−500/L; where M is the molarity of monovalent cations, %GC is the percentage of guanosine and cytosine nucleotides in the DNA, % form is the percentage of formamide in the hybridization solution, and L is the length of the hybrid in base pairs. Tₘ is reduced by about 1° C. for each 1% of mismatching; thus, Tₘ, hybridization, and/or wash conditions can be adjusted to hybridize to sequences of the desired identity. For example, if sequences with >90% identity are sought, the Tₘ can be decreased 10° C. Generally, stringent conditions are selected to be about 5° C. lower than the thermal melting point I for the specific sequence and its complement at a defined ionic strength and pH. However, severely stringent conditions can utilize a hybridization and/or wash at 1, 2, 3, or 4° C. lower than the thermal melting point I; moderately stringent conditions can utilize a hybridization and/or wash at 6, 7, 8, 9, or 10° C. lower than the thermal melting point I; low stringency conditions can utilize a hybridization and/or wash at 11, 12, 13, 14, 15, or 20° C. lower than the thermal melting point I. Using the equation, hybridization and wash compositions, and desired T, those of ordinary skill will understand that variations in the stringency of hybridization and/or wash solutions are inherently described. If the desired degree of mismatching results in a T of less than 45° C. (aqueous solution) or 32° C. (formamide solution), it is preferred to increase the SSC concentration so that a higher temperature can be used. An extensive guide to the hybridization of nucleic acids is found in Tijssen, 1993. Generally, highly stringent hybridization and wash conditions are selected to be about 5° C. lower than the thermal melting point Tₘ for the specific sequence at a defined ionic strength and pH.

[0188] An example of highly stringent wash conditions is 0.15 M NaCl at 72° C. for about 15 minutes. An example of stringent wash conditions is a 0.2×SSC wash at 65° C. for 15 minutes (see, Sambrook, infra, for a description of SSC buffer). Often, a high stringency wash is preceded by a low stringency wash to remove background probe signal. An example medium stringency wash for a duplex of, e.g., more than 100 nucleotides, is 1×SSC at 45° C. for 15 minutes. An example low stringency wash for a duplex of, e.g., more than 100 nucleotides, is 4-6×SSC at 40° C. for 15 minutes. For short probes (e.g., about 10 to 50 nucleotides), stringent conditions typically involve salt concentrations of less than about 1.5 M, more preferably about 0.01 to 1.0 M, Na ion concentration (or other salts) at pH 7.0 to 8.3, and the temperature is typically at least about 30° C. and at least about 60° C. for long robes (e.g., >50 nucleotides). Stringent conditions may also be achieved with the addition of destabilizing agents such as formamide. In general, a signal to noise ratio of 2× (or higher) than that observed for an unrelated probe in the particular hybridization assay indicates detection of a specific hybridization. Nucleic acids that do not hybridize to each other under stringent conditions are still substantially identical if the proteins that they encode are substantially identical. This occurs, e.g., when a copy of a nucleic acid is created using the maximum codon degeneracy permitted by the genetic code.

[0189] Very stringent conditions are selected to be equal to the Tₘ for a particular probe. An example of stringent conditions for hybridization of complementary nucleic acids which have more than 100 complementary residues on a filter in a Southern or Northern blot is 50% formamide, e.g., hybridization in 50% formamide, 1 M NaCl, 1% SDS at 37° C., and a wash in 0.1×SSC at 60 to 65° C. Exemplary low stringency conditions include hybridization with a buffer solution of 30 to 35% formamide, 1 M NaCl, 1% SDS (sodium dodecyl sulphate) at 37° C., and a wash in 1× to 2×SSC (20×SSC=3.0 M NaCl/0.3 M trisodium citrate) at 50 to 55° C. Exemplary moderate stringency conditions include hybridization in 40 to 45% formamide, 1.0 M NaCl, 1% SDS at 37° C., and a wash in 0.5× to 1×SSC at 55 to 60° C.

[0190] The following are examples of sets of hybridization/wash conditions that may be used to clone orthologous nucleotide sequences that are substantially identical to reference nucleotide sequences of the present invention: a reference nucleotide sequence preferably hybridizes to the reference nucleotide sequence in 7% sodium dodecyl sulfate (SDS), 0.5 M NaPO₄, 1 mM EDTA at 50° C. with washing in 2×SSC, 0. 1% SDS at 50° C., more desirably in 7% sodium dodecyl sulfate (SDS), 0.5 M NaPO₄, 1 mM EDTA at 50° C. with washing in 1×SSC, 0.1% SDS at 50° C., more desirably still in 7% sodium dodecyl sulfate (SDS), 0.5 M NaPO₄, 1 mM EDTA at 50° C. with washing in 0.5×SSC, 0. 1% SDS at 50° C., preferably in 7% sodium dodecyl sulfate (SDS), 0.5 M NaPO₄, 1 mM EDTA at 50° C. with washing in 0.1×SSC, 0.1% SDS at 50° C., more preferably in 7% sodium dodecyl sulfate (SDS), 0.5 M NaPO₄, 1 mM EDTA at 50° C. with washing in 0.1×SSC, 0.1% SDS at 65° C.

[0191] “DNA shuffling” is a method to introduce mutations or rearrangements, preferably randomly, in a DNA molecule or to generate exchanges of DNA sequences between two or more DNA molecules, preferably randomly. The DNA molecule resulting from DNA shuffling is a shuffled DNA molecule that is a non-naturally occurring DNA molecule derived from at least one template DNA molecule. The shuffled DNA preferably encodes a variant polypeptide modified with respect to the polypeptide encoded by the template DNA, and may have an altered biological activity with respect to the polypeptide encoded by the template DNA.

[0192] “Recombinant DNA molecule’ is a combination of DNA sequences that are joined together using recombinant DNA technology and procedures used to join together DNA sequences as described, for example, in Sambrook et al., 1989.

[0193] The word “plant” refers to any plant, particularly to seed plant, and “plant cell” is a structural and physiological unit of the plant, which comprises a cell wall but may also refer to a protoplast. The plant cell may be in form of an isolated single cell or a cultured cell, or as a part of higher organized unit such as, for example, a plant tissue, or a plant organ.

[0194] “Significant increase” is an increase that is larger than the margin of error inherent in the measurement technique, preferably an increase by about 2-fold or greater.

[0195] “Significantly less” means that the decrease is larger than the margin of error inherent in the measurement technique, preferably a decrease by about 2-fold or greater.

[0196] II. Nucleic Acid Molecules of the Invention

[0197] The invention relates to an isolated plant, e.g., Oryza, nucleic acid molecule which directs the expression of linked nucleic acid segment in a plant, e.g., in a particular tissue or constitutively, as well as the corresponding open reading frame and encoded product. The nucleic acid molecule, e.g., one which comprises a promoter, can be used to overexpress a linked nucleic acid segment so as to express a product in a constitutive, tissue-specific or tissue-preferential manner, or to alter the expression of the product, e.g., via the use of antisense vectors or by “knocking out” the expression of at least one genomic copy of the gene.

[0198] The nucleic acid molecules of the invention can be obtained or isolated from any plant or non-plant source, or produced synthetically by purley chemical means. Preferred sources include, but are not limited to, corn (Zea mays), Brassica sp. (e.g., B. napus, B. rapa, B. juncea), particularly those Brassica species useful as sources of seed oil, alfalfa (Medicago sativa), rice (Oryza sativa), rye (Secale cereale), sorghum (Sorghum bicolor, Sorghum vulgare), millet (e.g., pearl millet (Pennisetum glaucum), proso millet (Panicum miliaceum), foxtail millet (Setaria italica), finger millet (Eleusine coracana)), sunflower (Helianthus annuus), safflower (Carthamus tinctorius), wheat (Triticum aestivum), soybean (Glycine max), tobacco (Nicotiana tabacum), potato (Solanum tuberosum), peanuts (Arachis hypogaea), cotton (Gossypium barbadense, Gossypium hirsutum), sweet potato (Ipomoea batatus), cassava (Manihot esculenta), coffee (Cofea spp.), coconut (Cocos nucifera), pineapple (Ananas comosus), citrus trees (Citrus spp.), cocoa (Theobroma cacao), tea (Camellia sinensis), banana (Musa spp.), avocado (Persea ultilane), fig (Ficus casica), guava (Psidium guajava), mango (Mangifera indica), olive (Olea europaea), papaya (Carica papaya), cashew (Anacardium occidentale), macadamia (Macadamia integrifolia), almond (Prunus amygdalus), sugar beets (Beta vulgaris), sugarcane (Saccharum spp.), oats, duckweed (Lemna), barley, vegetables, ornamentals, and conifers.

[0199] Duckweed (Lemna, see WO 00/07210) includes members of the family Lemnaceae. There are known four genera and 34 species of duckweed as follows: genus Lemna (L. aequinoctialis, L. disperma, L. ecuadoriensis, L. gibba, L. japonica, L. minor, L. miniscula, L. obscura, L. perpusilla, L. tenera, L. trisulca, L. turionifera, L. valdiviana); genus Spirodela (S. intermedia, S. polyrrhiza, S. punctata); genus Woffia (Wa. Angusta, Wa. Arrhiza, Wa. Australina, Wa. Borealis, Wa. Brasiliensis, Wa. Columbiana, Wa. Elongata, Wa. Globosa, Wa. Microscopica, Wa. Neglecta) and genus Wofiella (W1. ultila, W1. ultilane n, W1. gladiata, W1. ultila, W1. lingulata, W1. repunda, W1. rotunda, and W1. neotropica). Any other genera or species of Lemnaceae, if they exist, are also aspects of the present invention. Lemna gibba, Lemna minor, and Lemna miniscula are preferred, with Lemna minor and Lemna miniscula being most preferred. Lemna species can be classified using the taxonomic scheme described by Landolt, Biosystematic Investigation on the Family of Duckweeds: The family of Lemnaceae—A Monograph Study. Geobatanischen Institut ETH, Stiftung Rubel, Zurich (1986)).

[0200] Vegetables from which to obtain or isolate the nucleic acid molecules of the invention include, but are not limited to, tomatoes (Lycopersicon esculentum), lettuce (e.g., Lactuca sativa), green beans (Phaseolus vulgaris), lima beans (Phaseolus limensis), peas (Lathyrus spp.), and members of the genus Cucumis such as cucumber (C. sativus), cantaloupe (C. cantalupensis), and musk melon (C. melo). Ornamentals from which to obtain or isolate the nucleic acid molecules of the invention include, but are not limited to, azalea (Rhododendron spp.), hydrangea (Macrophylla hydrangea), hibiscus (Hibiscus rosasanensis), roses (Rosa spp.), tulips (Tulipa spp.), daffodils (Narcissus spp.), petunias (Petunia hybrida), carnation (Dianthus caryophyllus), poinsettia (Euphorbia pulcherrima), and chrysanthemum. Conifers that may be employed in practicing the present invention include, for example, pines such as loblolly pine (Pinus taeda), slash pine (Pinus elliotii), ponderosa pine (Pinus ponderosa), lodgepole pine (Pinus contorta), and Monterey pine (Pinus radiata), Douglas-fir (Pseudotsuga menziesii); Western hemlock (Tsuga ultilane); Sitka spruce (Picea glauca); redwood (Sequoia sempervirens); true firs such as silver fir (Abies amabilis) and balsam fir (Abies balsamea); and cedars such as Western red cedar (Thuja plicata) and Alaska yellow-cedar (Chamaecyparis nootkatensis). Leguminous plants from which the nucleic acid molecules of the invention can be isolated or obtained include, but are not limited to, beans and peas. Beans include guar, locust bean, fenugreek, soybean, garden beans, cowpea, mungbean, lima bean, fava bean, lentils, chickpea, and the like. Legumes include, but are not limited to, Arachis, e.g., peanuts, Vicia, e.g., crown vetch, hairy vetch, adzuki bean, mung bean, and chickpea, Lupinus, e.g., lupine, trifolium, Phaseolus, e.g., common bean and lima bean, Pisum, e.g., field bean, Melilotus, e.g., clover, Medicago, e.g., alfalfa, Lotus, e.g., trefoil, lens, e.g., lentil, and false indigo. Preferred forage and turf grass from which the nucleic acid molecules of the invention can be isolated or obtained for use in the methods of the invention include, but are not limited to, alfalfa, orchard grass, tall fescue, perennial ryegrass, creeping bent grass, and redtop.

[0201] Other preferred sources of the nucleic acid molecules of the invention include Acacia, aneth, artichoke, arugula, blackberry, canola, cilantro, clementines, escarole, eucalyptus, fennel, grapefruit, honey dew, jicama, kiwifruit, lemon, lime, mushroom, nut, okra, orange, parsley, persimmon, plantain, pomegranate, poplar, radiata pine, radicchio, Southern pine, sweetgum, tangerine, triticale, vine, yams, apple, pear, quince, cherry, apricot, melon, hemp, buckwheat, grape, raspberry, chenopodium, blueberry, nectarine, peach, plum, strawberry, watermelon, eggplant, pepper, cauliflower, Brassica, e.g., broccoli, cabbage, ultilan sprouts, onion, carrot, leek, beet, broad bean, celery, radish, pumpkin, endive, gourd, garlic, snapbean, spinach, squash, turnip, ultilane, and zucchini.

[0202] Yet other sources of nucleic acid molecules are ornamental plants including, but not limited to, impatiens, Begonia, Pelargonium, Viola, Cyclamen, Verbena, Vinca, Tagetes, Primula, Saint Paulia, Agertum, Amaranthus, Antihirrhinum, Aquilegia, Cineraria, Clover, Cosmo, Cowpea, Dahlia, Datura, Delphinium, Gerbera, Gladiolus, Gloxinia, Hippeastrum, Mesembryanthemum, Salpiglossos, and Zinnia, and plants such as those shown in Table 1.

TABLE 1

| | LATIN | COMMON | MAP REFERENCES | |
|---|---|---|---|---|
| FAMILY | NAME | NAME | RESOURCES | LINKS |
| Cucurbitaceae | Cucumis | Cucumber | | http:// |
| | sativus | | | www. |
| | | | | cucurbit. |
| | | | | org/ |
| | Cucumis | Melon | | http:// |
| | melo | | | genome. |
| | | | | cornell. |
| | | | | edu/cgc/ |
| | Citrullus | Watermelon | | |
| | lanatus | | | |
| | Cucurbita | Squash - | | |
| | pepo | summer | | |
| | Cucurbita | Squash - | | |
| | maxima | winter | | |
| | Cucurbita | Pumpkin/ | | |
| | moschata | butternut | | |
| Total | | | | http:// |
| | | | | www. |
| | | | | nal.usda.gov/ |
| | | | | pgdic/Map_ |
| | | | | proj/ |
| Solanaceae | Lycopersicon | Tomato | 15x BAC on variety | genome. |
| | esculentum | | Heinz 1706 order from | cornell. |
| | | | Clemson Genome center | edu/solgenes |
| | | | (www.genome.clemson.edu) | http:// |
| | | | 11.6x BAC of L. | ars-genome. |
| | | | cheesmanii (originates | cornell.edu/ |
| | | | from J. Giovannoni) | cgi-bin/WebAce/ |
| | | | available from Clemson | webace? |
| | | | genome center | db = solgenes |
| | | | (www.genome.clemson.edu) | http:// |
| | | | EST collection from | genome. |
| | | | TIGR | cornell. |
| | | | (www.tigr.org/tdb/lgi/index.html) | edu/tgc/ |
| | | | EST collection from | http:// |
| | | | Clemsom Genome | tgrc. |
| | | | Center | ucdavis.edu/ |
| | | | (www.genome.clemson.edu) | |
| | | | TAG 99: 254-271, 1999 | |
| | | | (esculentum x pennelli) | |
| | | | TAG 89: 1007-1013, | |
| | | | 1994 (peruvianum) | |
| | | | Plant Cell Reports | |
| | | | 12: 293-297, 1993 | |
| | | | (RAPDs) | |
| | | | Genetics 132: 1141-1160, | |
| | | | 1992 (potato x tomato) | |
| | | | Genetics 120: 1095-1105, | |
| | | | 1988 (RFLP potato and | |
| | | | tomato) | |
| | | | Genetics 115: 387-393, | |
| | | | 1986 (esculentum x | |
| | | | pennelli isozyme and | |
| | | | cDNAs) | |
| | Capsicum | Pepper | | http:// |
| | annuum | | | neptune. |
| | | | | netimages. |
| | | | | com./˜chile/ |
| | | | | science.html |
| | Capsicum | Chile pepper | | |
| | frutescens | | | |
| | Solanum | Eggplant | | |
| | melongena | | | |
| | (Nicotiana | (Tobacco) | | |
| | tabacum) | | | |
| | (Solanum | (Potato) | | |
| | tuberosum) | | | |
| | (Petunia x | (Petunia) | 4x BAC of Petunia hybrida | |
| | hybrida | | 7984 available from | |
| | hort. Ex E. | | Clemson genome center | |
| | Vilm.) | | (www.genome.clemson.edu) | |
| Total | | | | http://www. |
| | | | | nal.usda. |
| | | | | gov/pgdic/ |
| | | | | Map_proj/ |
| Brassicaceae | Brassica | Broccoli | | http:// |
| | oleracea L. | | | res.agr.ca/ |
| | var. italica | | | ecorc/cwmt/ |
| | | | | crucifer/traits/ |
| | | | | index.htm |
| | | | | http:// |
| | | | | geneous.cit. |
| | | | | cornell.edu/ |
| | | | | cabbage/ |
| | | | | aboutcab.html |
| | Brassica | Cabbage | | |
| | oleracea L. | | | |
| | var. capitata | | | |
| | Brassica | Chinese | | |
| | rapa | Cabbage | | |
| | Brassica | Cauliflower | | |
| | oleracea L. | | | |
| | var. botrytis | | | |
| | Raphanus | Daikon | | |
| | sativus var. | | | |
| | niger | | | |
| | (Brassica | (Oilseed | | http:// |
| | napus) | rape) | | ars-genome. |
| | | | | cornell.edu/ |
| | | | | cgi-bin/ |
| | | | | WebAce/ |
| | | | | webace? |
| | | | | db = brassicadb |
| | | Arabidopsis | 12x and 6x BACs on | http:// |
| | | | Columbia strain available | ars-genome. |
| | | | from Clemson genome | cornell.edu/ |
| | | | center | cgi-bin/ |
| | | | (www.genome.clemson.edu) | WebAce/ |
| | | | | webace?db = agr |
| Total | | | | http:// |
| | | | | www.nal. |
| | | | | usda.gov/ |
| | | | | pgdic/ |
| | | | | Map_proj/ |
| Umbelliferae | Daucus | Carrot | | |
| | carota | | | |
| Compositae | Lactuca | Lettuce | | |
| | sativa | | | |
| | Helianthus | (Sunflower) | | |
| | annuus | | | |
| Total | | | | |
| Chenopodiaceae | Spinacia | Spinach | | |
| | oleracea | | | |
| | (Beta | (Sugar Beet) | | |
| | vulgaris) | | | |
| Total | | | | |
| Leguminosae | Phaseolus | Bean | 4.3x BAC available from | http:// |
| | vulgaris | | Clemson genome center | ars-genome. |
| | | | (www.genome.clemson.edu) | cornell.edu/ |
| | | | | cgi-bin/ |
| | | | | WebAce/ |
| | | | | webace? |
| | | | | db = beangenes |
| | Pisum | Pea | | |
| | sativum | | | |
| | (Glycine | (Soybean) | 7.5x and 7.9x BACs | http:// |
| | max) | | available from Clemson | ars-genome. |
| | | | genome center | cornell.edu/ |
| | | | (www.genome.clemson.edu) | cgi-bin/ |
| | | | | WebAce/ |
| | | | | webace? |
| | | | | db = soybase |
| Total | | | http://www.nal.usda.gov/pgdic/Map_proj/ | |
| Gramineae | Zea mays | Sweet Corn | Novartis BACs for Mo17 | |
| | | | and B73 have been donated | |
| | | | to Clemson Genome Center | |
| | | | (www.genome.clemson.edu) | |
| | (Zea mays) | (Field Corn) | | http:// |
| | | | | www. |
| | | | | agron.missouri. |
| | | | | edu/mnl/ |
| Total | | | http://www.nal.usda.gov/pgdic/Map_proj/ | |
| Liliaceae | Allium cepa | Onion | | |
| | | Leek | | |
| | | (Garlic) | | |
| | | (Asparagus) | | |
| Total | | | http://www.nal.usda.gov/pgdic/Map_proj/ | |

[0203] Yet other preferred sources include, but are not limited to, crop plants and in particular cereals (for example, corn, alfalfa, sunflower, Brassica, canola, soybean, barley, soybean, sugarbeet, cotton, safflower, peanut, sorghum, wheat, millet, tobacco, and the like), and even more preferably corn, wheat and soybean.

[0204] According to one embodiment, the present invention is directed to a nucleic acid molecule comprising a nucleotide sequence isolated or obtained from any plant which encodes a polypeptide having at least 70% amino acid sequence identity to a polypeptide encoded by a gene comprising any one of SEQ ID NOs:1-2672, 5959, 5972, 5973, 5977-5990 and 6001. Based on the Oryza nucleic acid sequences of the present invention, orthologs may be identified or isolated from the genome of any desired organism, preferably from another plant, according to well known techniques based on their sequence similarity to the Oryza nucleic acid sequences, e.g., hybridization, PCR or computer generated sequence comparisons. For example, all or a portion of a particular Oryza nucleic acid sequence is used as a probe that selectively hybridizes to other gene sequences present in a population of cloned genomic DNA fragments or cDNA fragments (i.e., genomic or cDNA libraries) from a chosen source organism. Further, suitable genomic and cDNA libraries may be prepared from any cell or tissue of an organism. Such techniques include hybridization screening of plated DNA libraries (either plaques or colonies; see, e.g., Sambrook et al., 1989) and amplification by PCR using oligonucleotide primers preferably corresponding to sequence domains conserved among related polypeptide or subsequences of the nucleotide sequences provided herein (see, e.g., Innis et al., 1990). These methods are particularly well suited to the isolation of gene sequences from organisms closely related to the organism from which the probe sequence is derived. The application of these methods using the Oryza sequences as probes is well suited for the isolation of gene sequences from any source organism, preferably other plant species. In a PCR approach, oligonucleotide primers can be designed for use in PCR reactions to amplify corresponding DNA sequences from cDNA or genomic DNA extracted from any plant of interest. Methods for designing PCR primers and PCR cloning are generally known in the art.

[0205] In hybridization techniques, all or part of a known nucleotide sequence is used as a probe that selectively hybridizes to other corresponding nucleotide sequences present in a population of cloned genomic DNA fragments or cDNA fragments (i.e., genomic or cDNA libraries) from a chosen organism. The hybridization probes may be genomic DNA fragments, cDNA fragments, RNA fragments, or other oligonucleotides, and may be labeled with a detectable group such as ³²P, or any other detectable marker. Thus, for example, probes for hybridization can be made by labeling synthetic oligonucleotides based on the sequence of the invention. Methods for preparation of probes for hybridization and for construction of cDNA and genomic libraries are generally known in the art and are disclosed in Sambrook et al. (1989). In general, sequences that hybridize to the sequences disclosed herein will have at least 40% to 50%, about 60% to 70% and even about 80% 85%, 90%, 95% to 98% or more identity with the disclosed sequences. That is, the sequence similarity of sequences may range, sharing at least about 40% to 50%, about 60% to 70%, and even about 80%, 85%, 90%, 95% to 98% sequence similarity.

[0206] The nucleic acid molecules of the invention can also be identified by, for example, a search of known databases for genes encoding polypeptides having a specified amino acid sequence identity or DNA having a specified nucleotide sequence identity. Methods of alignment of sequences for comparison are well known in the art and are described hereinabove.

[0207] Virtually any DNA composition may be used for delivery to recipient plant cells, e.g., monocotyledonous cells, to ultimately produce fertile transgenic plants in accordance with the present invention. For example, DNA segments or fragments in the form of vectors and plasmids, or linear DNA segments or fragments, in some instances containing only the DNA element to be expressed in the plant, and the like, may be employed. The construction of vectors which may be employed in conjunction with the present invention will be known to those of skill of the art in light of the present disclosure (see, e.g., Sambrook et al., 1989; Gelvin et al., 1990).

[0208] Vectors, plasmids, cosmids, YACs (yeast artificial chromosomes), BACs (bacterial artificial chromosomes) and DNA segments for use in transforming such cells will, of course, generally comprise the cDNA, gene or genes which one desires to introduce into the cells. These DNA constructs can further include structures such as promoters, enhancers, polylinkers, or even regulatory genes as desired. The DNA segment, fragment or gene chosen for cellular introduction will often encode a protein which will be expressed in the resultant recombinant cells, such as will result in a screenable or selectable trait and/or which will impart an improved phenotype to the regenerated plant. However, this may not always be the case, and the present invention also encompasses transgenic plants incorporating non-expressed transgenes.

[0209] In certain embodiments, it is contemplated that one may wish to employ replication-competent viral vectors in monocot transformation. Such vectors include, for example, wheat dwarf virus (WDV) “shuttle” vectors, such as pW1-11 and PW1-GUS (Ugaki et al., 1991). These vectors are capable of autonomous replication in maize cells as well as E. coli, and as such may provide increased sensitivity for detecting DNA delivered to transgenic cells. A replicating vector may also be useful for delivery of genes flanked by DNA sequences from transposable elements such as Ac, Ds, or Mu. It has been proposed (Laufs et al., 1990) that transposition of these elements within the maize genome requires DNA replication. It is also contemplated that transposable elements would be useful for introducing DNA segments or fragments lacking elements necessary for selection and maintenance of the plasmid vector in bacteria, e.g., antibiotic resistance genes and origins of DNA replication. It is also proposed that use of a transposable element such as Ac, Ds, or Mu would actively promote integration of the desired DNA and hence increase the frequency of stably transformed cells. The use of a transposable element such as Ac, Ds, or Mu may actively promote integration of the DNA of interest and hence increase the frequency of stably transformed cells. Transposable elements may be useful to allow separation of genes of interest from elements necessary for selection and maintenance of a plasmid vector in bacteria or selection of a transformant. By use of a transposable element, desirable and undesirable DNA sequences may be transposed apart from each other in the genome, such that through genetic segregation in progeny, one may identify plants with either the desirable undesirable DNA sequences.

[0210] It is one of the objects of the present invention to provide recombinant DNA molecules comprising a nucleotide sequence which directs transcription according to the invention operably linked to a nucleic acid segment or sequence of interest. The nucleic acid segment of interest can, for example, code for a ribosomal RNA, an antisense RNA or any other type of RNA that is not translated into protein. In another preferred embodiment of the invention, the nucleic acid segment of interest is translated into a protein product. The nucleotide sequence which directs transcription and/or the nucleic acid segment may be of homologous or heterologous origin with respect to the plant to be transformed. A recombinant DNA molecule useful for introduction into plant cells includes that which has been derived or isolated from any source, that may be subsequently characterized as to structure, size and/or function, chemically altered, and later introduced into plants. An example of a nucleotide sequence or segment of interest “derived” from a source, would be a nucleotide sequence or segment that is identified as a useful fragment within a given organism, and which is then chemically synthesized in essentially pure form. An example of such a nucleotide sequence or segment of interest “isolated” from a source, would be nucleotide sequence or segment that is excised or removed from said source by chemical means, e.g., by the use of restriction endonucleases, so that it can be further manipulated, e.g., amplified, for use in the invention, by the methodology of genetic engineering. Such a nucleotide sequence or segment is commonly referred to as “recombinant.”

[0211] Therefore a useful nucleotide sequence, segment or fragment of interest includes completely synthetic DNA, semi-synthetic DNA, DNA isolated from biological sources, and DNA derived from introduced RNA. Generally, the introduced DNA is not originally resident in the plant genotype which is the recipient of the DNA, but it is within the scope of the invention to isolate a gene from a given plant genotype, and to subsequently introduce multiple copies of the gene into the same genotype, e.g., to enhance production of a given gene product such as a storage protein or a protein that confers tolerance or resistance to water deficit.

[0212] The introduced recombinant DNA molecule includes but is not limited to, DNA from plant genes, and non-plant genes such as those from bacteria, yeasts, animals or viruses. The introduced DNA can include modified genes, portions of genes, or chimeric genes, including genes from the same or different genotype. The term “chimeric gene” or “chimeric DNA” is defined as a gene or DNA sequence or segment comprising at least two DNA sequences or segments from species which do not combine DNA under natural conditions, or which DNA sequences or segments are positioned or linked in a manner which does not normally occur in the native genome of untransformed plant.

[0213] The introduced recombinant DNA molecule used for transformation herein may be circular or linear, double-stranded or single-stranded. Generally, the DNA is in the form of chimeric DNA, such as plasmid DNA, that can also contain coding regions flanked by regulatory sequences which promote the expression of the recombinant DNA present in the resultant plant.

[0214] Generally, the introduced recombinant DNA molecule will be relatively small, i.e., less than about 30 kb to minimize any susceptibility to physical, chemical, or enzymatic degradation which is known to increase as the size of the nucleotide molecule increases. As noted above, the number of proteins, RNA transcripts or mixtures thereof which is introduced into the plant genome is preferably preselected and defined, e.g., from one to about 5-10 such products of the introduced DNA may be formed.

[0215] Two principal methods for the control of expression are known, viz.: overexpression and underexpression. Overexpression can be achieved by insertion of one or more than one extra copy of the selected gene. It is, however, not unknown for plants or their progeny, originally transformed with one or more than one extra copy of a nucleotide sequence, to exhibit the effects of underexpression as well as overexpression. For underexpression there are two principle methods which are commonly referred to in the art as “antisense downregulation” and “sense downregulation” (sense downregulation is also referred to as “cosuppression”). Generically these processes are referred to as “gene silencing”. Both of these methods lead to an inhibition of expression of the target gene.

[0216] Obtaining sufficient levels of transgene expression in the appropriate plant tissues is an important aspect in the production of genetically engineered crops. Expression of heterologous DNA sequences in a plant host is dependent upon the presence of an operably linked promoter that is functional within the plant host. Choice of the promoter sequence will determine when and where within the organism the heterologous DNA sequence is expressed.

[0217] It is specifically contemplated by the inventors that one could mutagenize a promoter to potentially improve the utility of the elements for the expression of transgenes in plants. The mutagenesis of these elements can be carried out at random and the mutagenized promoter sequences screened for activity in a trial-by-error procedure.

[0218] Alternatively, particular sequences which provide the promoter with desirable expression characteristics, or the promoter with expression enhancement activity, could be identified and these or similar sequences introduced into the sequences via mutation. It is further contemplated that one could mutagenize these sequences in order to enhance their expression of transgenes in a particular species.

[0219] The means for mutagenizing a DNA segment encoding a promoter sequence of the current invention are well-known to those of skill in the art. As indicated, modifications to promoter or other regulatory element may be made by random, or site-specific mutagenesis procedures. The promoter and other regulatory element may be modified by altering their structure through the addition or deletion of one or more nucleotides from the sequence which encodes the corresponding unmodified sequences.

[0220] Mutagenesis may be performed in accordance with any of the techniques known in the art, such as, and not limited to, synthesizing an oligonucleotide having one or more mutations within the sequence of a particular regulatory region. In particular, site-specific mutagenesis is a technique useful in the preparation of promoter mutants, through specific mutagenesis of the underlying DNA. The technique further provides a ready ability to prepare and test sequence variants, for example, incorporating one or more of the foregoing considerations, by introducing one or more nucleotide sequence changes into the DNA. Site-specific mutagenesis allows the production of mutants through the use of specific oligonucleotide sequences which encode the DNA sequence of the desired mutation, as well as a sufficient number of adjacent nucleotides, to provide a primer sequence of sufficient size and sequence complexity to form a stable duplex on both sides of the deletion junction being traversed. Typically, a primer of about 17 to about 75 nucleotides or more in length is preferred, with about 10 to about 25 or more residues on both sides of the junction of the sequence being altered.

[0221] In general, the technique of site-specific mutagenesis is well known in the art, as exemplified by various publications. As will be appreciated, the technique typically employs a phage vector which exists in both a single stranded and double stranded form. Typical vectors useful in site-directed mutagenesis include vectors such as the M13 phage. These phage are readily commercially available and their use is generally well known to those skilled in the art.

[0222] Double stranded plasmids also are routinely employed in site directed mutagenesis which eliminates the step of transferring the gene of interest from a plasmid to a phage.

[0223] In general, site-directed mutagenesis in accordance herewith is performed by first obtaining a single-stranded vector or melting apart of two strands of a double stranded vector which includes within its sequence a DNA sequence which encodes the promoter. An oligonucleotide primer bearing the desired mutated sequence is prepared, generally synthetically. This primer is then annealed with the single-stranded vector, and subjected to DNA polymerizing enzymes such as E. coli polymerase I Klenow fragment, in order to complete the synthesis of the mutation-bearing strand. Thus, a heteroduplex is formed wherein one strand encodes the original non-mutated sequence and the second strand bears the desired mutation.

[0224] This heteroduplex vector is then used to transform or transfect appropriate cells, such as E. coli cells, and cells are selected which include recombinant vectors bearing the mutated sequence arrangement. Vector DNA can then be isolated from these cells and used for plant transformation. A genetic selection scheme was devised by Kunkel et al. (1987) to enrich for clones incorporating mutagenic oligonucleotides. Alternatively, the use of PCR with commercially available thermostable enzymes such as Taq polymerase may be used to incorporate a mutagenic oligonucleotide primer into an amplified DNA fragment that can then be cloned into an appropriate cloning or expression vector. The PCR-mediated mutagenesis procedures of Tomic et al. (1990) and Upender et al. (1995) provide two examples of such protocols. A PCR employing a thermostable ligase in addition to a thermostable polymerase also may be used to incorporate a phosphorylated mutagenic oligonucleotide into an amplified DNA fragment that may then be cloned into an appropriate cloning or expression vector. The mutagenesis procedure described by Michael (1994) provides an example of one such protocol.

[0225] The preparation of sequence variants of the selected promoter-encoding DNA segments using site-directed mutagenesis is provided as a means of producing potentially useful species and is not meant to be limiting as there are other ways in which sequence variants of DNA sequences may be obtained. For example, recombinant vectors encoding the desired promoter sequence may be treated with mutagenic agents, such as hydroxylamine, to obtain sequence variants.

[0226] As used herein; the term “oligonucleotide directed mutagenesis procedure” refers to template-dependent processes and vector-mediated propagation which result in an increase in the concentration of a specific nucleic acid molecule relative to its initial concentration, or in an increase in the concentration of a detectable signal, such as amplification. As used herein, the term “oligonucleotide directed mutagenesis procedure” also is intended to refer to a process that involves the template-dependent extension of a primer molecule. The term template-dependent process refers to nucleic acid synthesis of an RNA or a DNA molecule wherein the sequence of the newly synthesized strand of nucleic acid is dictated by the well-known rules of complementary base pairing (see, for example, Watson and Rarnstad, 1987). Typically, vector mediated methodologies involve the introduction of the nucleic acid fragment into a DNA or RNA vector, the clonal amplification of the vector, and the recovery of the amplified nucleic acid fragment. Examples of such methodologies are provided by U.S. Pat. No. 4,237,224. A number of template dependent processes are available to amplify the target sequences of interest present in a sample, such methods being well known in the art and specifically disclosed herein below.

[0227] Where a clone comprising a promoter has been isolated in accordance with the instant invention, one may wish to delimit the essential promoter regions within the clone. One efficient, targeted means for preparing mutagenizing promoters relies upon the identification of putative regulatory elements within the promoter sequence. This can be initiated by comparison with promoter sequences known to be expressed in similar tissue-specific or developmentally unique manner. Sequences which are shared among promoters with similar expression patterns are likely candidates for the binding of transcription factors and are thus likely elements which confer expression patterns. Confirmation of these putative regulatory elements can be achieved by deletion analysis of each putative regulatory region followed by functional analysis of each deletion construct by assay of a reporter gene which is functionally attached to each construct. As such, once a starting promoter sequence is provided, any of a number of different deletion mutants of the starting promoter could be readily prepared.

[0228] As indicated above, deletion mutants, deletion mutants of the promoter of the invention also could be randomly prepared and then assayed. With this strategy, a series of constructs are prepared, each containing a different portion of the clone (a subclone), and these constructs are then screened for activity. A suitable means for screening for activity is to attach a deleted promoter or intron construct which contains a deleted segment to a selectable or screenable marker, and to isolate only those cells expressing the marker gene. In this way, a number of different, deleted promoter constructs are identified which still retain the desired, or even enhanced, activity. The smallest segment which is required for activity is thereby identified through comparison of the selected constructs. This segment may then be used for the construction of vectors for the expression of exogenous genes.

[0229] Furthermore, it is contemplated that promoters combining elements from more than one promoter may be useful. For example, U.S. Pat. No. 5,491,288 discloses combining a Cauliflower Mosaic Virus promoter with a histone promoter. Thus, the elements from the promoters disclosed herein may be combined with elements from other promoters.

[0230] Promoters which are useful for plant transgene expression include those that are inducible, viral, synthetic, constitutive (Odell et al., 1985), temporally regulated, spatially regulated, tissue-specific, and spatio-temporally regulated.

[0231] Where expression in specific tissues or organs is desired, tissue-specific promoters may be used. In contrast, where gene expression in response to a stimulus is desired, inducible promoters are the regulatory elements of choice. Where continuous expression is desired throughout the cells of a plant, constitutive promoters are utilized. Additional regulatory sequences upstream and/or downstream from the core promoter sequence may be included in expression constructs of transformation vectors to bring about varying levels of expression of heterologous nucleotide sequences in a transgenic plant.

[0232] A variety of 5N and 3N transcriptional regulatory sequences are available for use in the present invention. Transcriptional terminators are responsible for the termination of transcription and correct mRNA polyadenylation. The 3N nontranslated regulatory DNA sequence preferably includes from about 50 to about 1,000, more preferably about 100 to about 1,000, nucleotide base pairs and contains plant transcriptional and translational termination sequences. Appropriate transcriptional terminators and those which are known to function in plants include the CaMV 35S terminator, the tml terminator, the nopaline synthase terminator, the pea rbcS E9 terminator, the terminator for the T7 transcript from the octopine synthase gene of Agrobacterium tumefaciens, and the 3N end of the protease inhibitor I or II genes from potato or tomato, although other 3N elements known to those of skill in the art can also be employed. Alternatively, one also could use a gamma coixin, oleosin 3 or other terminator from the genus Coix.

[0233] Preferred 3N elements include those from the nopaline synthase gene of Agrobacterium tumefaciens (Bevan et al., 1983), the terminator for the T7 transcript from the octopine synthase gene of Agrobacterium tumefaciens, and the 3′ end of the protease inhibitor I or II genes from potato or tomato.

[0234] As the DNA sequence between the transcription initiation site and the start of the coding sequence, i.e., the untranslated leader sequence, can influence gene expression, one may also wish to employ a particular leader sequence. Preferred leader sequences are contemplated to include those which include sequences predicted to direct optimum expression of the attached gene, i.e., to include a preferred consensus leader sequence which may increase or maintain mRNA stability and prevent inappropriate initiation of translation. The choice of such sequences will be known to those of skill in the art in light of the present disclosure. Sequences that are derived from genes that are highly expressed in plants will be most preferred.

[0235] Other sequences that have been found to enhance gene expression in transgenic plants include intron sequences (e.g., from Adh1, bronze1, actin1, actin 2 (WO 00/760067), or the sucrose synthase intron) and viral leader sequences (e.g., from TMV, MCMV and AMV). For example, a number of non-translated leader sequences derived from viruses are known to enhance expression. Specifically, leader sequences from Tobacco Mosaic Virus (TMV), Maize Chlorotic Mottle Virus (MCMV), and Alfalfa Mosaic Virus (AMV) have been shown to be effective in enhancing expression (e.g., Gallie et al., 1987; Skuzeski et al., 1990). Other leaders known in the art include but are not limited to: Picornavirus leaders, for example, EMCV leader (Encephalomyocarditis 5 noncoding region) (Elroy-Stein et al., 1989); Potyvirus leaders, for example, TEV leader (Tobacco Etch Virus); MDMV leader (Maize Dwarf Mosaic Virus); Human immunoglobulin heavy-chain binding protein (BiP) leader, (Macejak et al., 1991); Untranslated leader from the coat protein mRNA of alfalfa mosaic virus (AMV RNA 4), (Jobling et al., 1987; Tobacco mosaic virus leader (TMV), (Gallie et al., 1989; and Maize Chlorotic Mottle Virus leader (MCMV) (Lommel et al., 1991. See also, Della-Cioppa et al., 1987.

[0236] Regulatory elements such as Adh intron 1 (Callis et al., 1987), sucrose synthase intron (Vasil et al., 1989) or TMV omega element (Gallie, et al., 1989), may further be included where desired.

[0237] Examples of enhancers include elements from the CaMV 35S promoter, octopine synthase genes (Ellis el al., 1987), the rice actin I gene, the maize alcohol dehydrogenase gene (Callis et al., 1987), the maize shrunken I gene (Vasil et al., 1989), TMV Omega element (Gallie et al., 1989) and promoters from non-plant eukaryotes (e.g. yeast; Ma et al., 1988).

[0238] Vectors for use in accordance with the present invention may be constructed to include the ocs enhancer element. This element was first identified as a 16 bp palindromic enhancer from the octopine synthase (ocs) gene of ultilane (Ellis et al., 1987), and is present in at least 10 other promoters (Bouchez et al., 1989). The use of an enhancer element, such as the ocs elements and particularly multiple copies of the element, will act to increase the level of transcription from adjacent promoters when applied in the context of monocot transformation.

[0239] Ultimately, the most desirable DNA segments for introduction into, for example, a monocot genome, may be homologous genes or gene families which encode a desired trait (e.g., increased yield per acre) and which are introduced under the control of novel promoters or enhancers, etc., or perhaps even homologous or tissue specific (e.g., root-, collar/sheath-, whorl-, stalk-, earshank-, kernel- or leaf-specific) promoters or control elements. Indeed, it is envisioned that a particular use of the present invention will be the expression of a gene in a constitutive or a seed-specific manner.

[0240] Vectors for use in tissue-specific targeting of genes in transgenic plants will typically include tissue-specific promoters and may also include other tissue-specific control elements such as enhancer sequences. Promoters which direct specific or enhanced expression in certain plant tissues will be known to those of skill in the art in light of the present disclosure. These include, for example, the rbcS promoter, specific for green tissue; the ocs, nos and mas promoters which have higher activity in roots or wounded leaf tissue; a truncated (−90 to +8) 35S promoter which directs enhanced expression in roots, an alpha-tubulin gene that directs expression in roots and promoters derived from zein storage protein genes which direct expression in endosperm. It is particularly contemplated that one may advantageously use the 16 bp ocs enhancer element from the octopine synthase (ocs) gene (Ellis et al., 1987; Bouchez et al., 1989), especially when present in multiple copies, to achieve enhanced expression in, roots.

[0241] Tissue specific expression may be functionally accomplished by introducing a constitutively expressed gene (all tissues) in combination with an antisense gene that is expressed only in those tissues where the gene product is not desired. For example, a gene coding for the crystal toxin protein from B. thuringiensis (Bt) may be introduced such that it is expressed in all tissues using the 35S promoter from Cauliflower Mosaic Virus. Expression of an antisense transcript of the Bt gene in a maize kernel, using for example a zein promoter, would prevent accumulation of the Bt protein in seed. Hence the protein encoded by the introduced gene would be present in all tissues except the kernel.

[0242] Expression of some genes in transgenic plants will be desired only under specified conditions. For example, it is proposed that expression of certain genes that confer resistance to environmental stress factors such as drought will be desired only under actual stress conditions. It is contemplated that expression of such genes throughout a plants development may have detrimental effects. It is known that a large number of genes exist that respond to the environment. For example, expression of some genes such as rbcS, encoding the small subunit of ribulose bisphosphate carboxylase, is regulated by light as mediated through phytochrome. Other genes are induced by secondary stimuli. For example, synthesis of abscisic acid (ABA) is induced by certain environmental factors, including but not limited to water stress. A number of genes have been shown to be induced by ABA (Skriver and Mundy, 1990). It is also anticipated that expression of genes conferring resistance to insect predation would be desired only under conditions of actual insect infestation. Therefore, for some desired traits inducible expression of genes in transgenic plants will be desired.

[0243] Expression of a gene in a transgenic plant will be desired only in a certain time period during the development of the plant. Developmental timing is frequently correlated with tissue specific gene expression. For example, expression of zein storage proteins is initiated in the endosperm about 15 days after pollination.

[0244] Additionally, vectors may be constructed and employed in the intracellular targeting of a specific gene product within the cells of a transgenic plant or in directing a protein to the extracellular environment. This will generally be achieved by joining a DNA sequence encoding a transit or signal peptide sequence to the coding sequence of a particular gene. The resultant transit, or signal, peptide will transport the protein to a particular intracellular, or extracellular destination, respectively, and will then be post-translationally removed. Transit or signal peptides act by facilitating the transport of proteins through intracellular membranes, e.g., vacuole, vesicle, plastid and mitochondrial membranes, whereas signal peptides direct proteins through the extracellular membrane.

[0245] A particular example of such a use concerns the direction of a herbicide resistance gene, such as the EPSPS gene, to a particular organelle such as the chloroplast rather than to the cytoplasm. This is exemplified by the use of the rbcs transit peptide which confers plastid-specific targeting of proteins. In addition, it is proposed that it may be desirable to target certain genes responsible for male sterility to the mitochondria, or to target certain genes for resistance to phytopathogenic organisms to the extracellular spaces, or to target proteins to the vacuole.

[0246] By facilitating the transport of the protein into compartments inside and outside the cell, these sequences may increase the accumulation of gene product protecting them from proteolytic degradation. These sequences also allow for additional mRNA sequences from highly expressed genes to be attached to the coding sequence of the genes. Since mRNA being translated by ribosomes is more stable than naked mRNA, the presence of translatable mRNA in front of the gene may increase the overall stability of the mRNA transcript from the gene and thereby increase synthesis of the gene product. Since transit and signal sequences are usually post-translationally removed from the initial translation product, the use of these sequences allows for the addition of extra translated sequences that may not appear on the final polypeptide. Targeting of certain proteins may be desirable in order to enhance the stability of the protein (U.S. Pat. No. 5,545,818).

[0247] It may be useful to target DNA itself within a cell. For example, it may be useful to target introduced DNA to the nucleus as this may increase the frequency of transformation. Within the nucleus itself it would be useful to target a gene in order to achieve site specific integration. For example, it would be useful to have an gene introduced through transformation replace an existing gene in the cell.

[0248] Other elements include those that can be regulated by endogenous or exogenous agents, e.g., by zinc finger proteins, including naturally occurring zinc finger proteins or chimeric zinc finger proteins (see, e.g., U.S. Pat. No. 5,789,538, WO 99/48909; WO 99/45132; WO 98/53060; WO 98/53057; WO 98/53058; WO 00/23464; WO 95/19431; and WO 98/54311) or myb-like transcription factors. For example, a chimeric zinc finger protein may include amino acid sequences which bind to a specific DNA sequence (the zinc finger) and amino acid sequences that activate (e.g., GAL 4 sequences) or repress the transcription of the sequences linked to the specific DNA sequence.

[0249] It is one of the objects of the present invention to provide recombinant DNA molecules comprising a nucleotide sequence according to the invention operably linked to a nucleotide segment of interest.

[0250] A nucleotide segment of interest is reflective of the commercial markets and interests of those involved in the development of the crop. Crops and markets of interest changes, and as developing nations open up world markets, new crops and technologies will also emerge. In addition, as the understanding of agronomic traits and characteristics such as yield and heterosis increase, the choice of genes for transformation will change accordingly. General categories of nucleotides of interest include, for example, genes involved in information, such as zinc fingers, those involved in communication, such as kinases, and those involved in housekeeping, such as heat shock proteins. More specific categories of transgenes, for example, include genes encoding important traits for agronomics, insect resistance, disease resistance, herbicide resistance, sterility, grain characteristics, and commercial products. Genes of interest include, generally, those involved in starch, oil, carbohydrate, or nutrient metabolism, as well as those affecting kernel size, sucrose loading, zinc finger proteins, see, e.g., U.S. Pat. No. 5,789,538, WO 99/48909; WO 99/45132; WO 98/53060; WO 98/53057; WO 98/53058; WO 00/23464; WO 95/19431; and WO 98/54311, and the like.

[0251] One skilled in the art recognizes that the expression level and regulation of a transgene in a plant can vary significantly from line to line. Thus, one has to test several lines to find one with the desired expression level and regulation. Once a line is identified with the desired regulation specificity of a chimeric Cre transgene, it can be crossed with lines carrying different inactive replicons or inactive transgene for activation.

[0252] Other sequences which may be linked to the gene of interest which encodes a polypeptide are those which can target to a specific organelle, e.g., to the mitochondria, nucleus, or plastid, within the plant cell. Targeting can be achieved by providing the polypeptide with an appropriate targeting peptide sequence, such as a secretory signal peptide (for secretion or cell wall or membrane targeting, a plastid transit peptide, a chloroplast transit peptide, e.g., the chlorophyll a/b binding protein, a mitochondrial target peptide, a vacuole targeting peptide, or a nuclear targeting peptide, and the like. For example, the small subunit of ribulose bisphosphate carboxylase transit peptide, the EPSPS transit peptide or the dihydrodipicolinic acid synthase transit peptide may be used. For examples of plastid organelle targeting sequences (see WO 00/12732). Plastids are a class of plant organelles derived from proplastids and include chloroplasts, leucoplasts, aravloplasts, and chromoplasts. The plastids are major sites of biosynthesis in plants. In addition to photosynthesis in the chloroplast, plastids are also sites of lipid biosynthesis, nitrate reduction to ammonium, and starch storage. And while plastids contain their own circular, genome, most of the proteins localized to the plastids are encoded by the nuclear genome and are imported into the organelle from the cytoplasm.

[0253] Transgenes used with the present invention will often be genes that direct the expression of a particular protein or polypeptide product, but they may also be non-expressible DNA segments, e.g., transposons such as Ds that do no direct their own transposition. As used herein, an “expressible gene” is any gene that is capable of being transcribed into RNA (e.g., mRNA, antisense RNA, etc.) or translated into a protein, expressed as a trait of interest, or the like, etc., and is not limited to selectable, screenable or non-selectable marker genes. The invention also contemplates that, where both an expressible gene that is not necessarily a marker gene is employed in combination with a marker gene, one may employ the separate genes on either the same or different DNA segments for transformation. In the latter case, the different vectors are delivered concurrently to recipient cells to maximize cotransformation.

[0254] The choice of the particular DNA segments to be delivered to the recipient cells will often depend on the purpose of the transformation. One of the major purposes of transformation of crop plants is to add some commercially desirable, agronomically important traits to the plant. Such traits include, but are not limited to, herbicide resistance or tolerance; insect resistance or tolerance; disease resistance or tolerance (viral, bacterial, fungal, nematode); stress tolerance and/or resistance, as exemplified by resistance or tolerance to drought, heat, chilling, freezing, excessive moisture, salt stress; oxidative stress; increased yields; food content and makeup; physical appearance; male sterility; drydown; standability; prolificacy; starch properties; oil quantity and quality; and the like. One may desire to incorporate one or more genes conferring any such desirable trait or traits, such as, for example, a gene or genes encoding pathogen resistance.

[0255] In certain embodiments, the present invention contemplates the transformation of a recipient cell with more than one advantageous transgene. Two or more transgenes can be supplied in a single transformation event using either distinct transgene-encoding vectors, or using a single vector incorporating two or more gene coding sequences. For example, plasmids bearing the bar and aroA expression units in either convergent, divergent, or colinear orientation, are considered to be particularly useful. Further preferred combinations are those of an insect resistance gene, such as a Bt gene, along with a protease inhibitor gene such as pinII, or the use of bar in combination with either of the above genes. Of course, any two or more transgenes of any description, such as those conferring herbicide, insect, disease (viral, bacterial, fungal, nematode) or drought resistance, male sterility, drydown, standability, prolificacy, starch properties, oil quantity and quality, or those increasing yield or nutritional quality may be employed as desired.

[0256] A. Exemplary Transgenes

[0257] 1. Herbicide Resistance

[0258] The genes encoding phosphinothricin acetyltransferase (bar and pat), glyphosate tolerant EPSP synthase genes, the glyphosate degradative enzyme gene gox encoding glyphosate oxidoreductase, deh (encoding a dehalogenase enzyme that inactivates dalapon), herbicide resistant (e.g., sulfonylurea and imidazolinone) acetolactate synthase, and bxn genes (encoding a nitrilase enzyme that degrades bromoxynil) are good examples of herbicide resistant genes for use in transformation. The bar and pat genes code for an enzyme, phosphinothricin acetyltransferase (PAT), which inactivates the herbicide phosphinothricin and prevents this compound from inhibiting glutamine synthetase enzymes. The enzyme 5-enolpyruvylshikimate 3-phosphate synthase (EPSP Synthase), is normally inhibited by the herbicide N-(phosphonomethyl)glycine (glyphosate). However, genes are known that encode glyphosate-resistant EPSP Synthase enzymes.

[0259] These genes are particularly contemplated for use in monocot transformation. The deh gene encodes the enzyme dalapon dehalogenase and confers resistance to the herbicide dalapon. The bxn gene codes for a specific nitrilase enzyme that converts bromoxynil to a non-herbicidal degradation product.

[0260] 2. Insect Resistance

[0261] An important aspect of the present invention concerns the introduction of insect resistance-conferring genes into plants. Potential insect resistance genes which can be introduced include Bacillus thuringiensis crystal toxin genes or Bt genes (Watrud et al., 1985). Bt genes may provide resistance to lepidopteran or coleopteran pests such as European Corn Borer (ECB) and corn rootworm (CRW). Preferred Bt toxin genes for use in such embodiments include the CryIA(b) and CryIA(c) genes. Endotoxin genes from other species of B. thuringiensis which affect insect growth or development may also be employed in this regard.

[0262] The poor expression of Bt toxin genes in plants is a well-documented phenomenon, and the use of different promoters, fusion proteins, and leader sequences has not led to ;significant increases in Bt protein expression (Vaeck et al., 1989; Barton et al., 1987). It is therefore contemplated that the most advantageous Bt genes for use in the transformation protocols disclosed herein will be those in which the coding sequence has been modified to effect increased expression in plants, and more particularly, those in which maize preferred codons have been used. Examples of such modified Bt toxin genes include the variant Bt CryIA(b) gene termed Iab6 (Perlak et al., 1991) and the synthetic CryIA(c) genes termed 1800a and 1800b.

[0263] Protease inhibitors may also provide insect resistance (Johnson et al., 1989), and will thus have utility in plant transformation. The use of a protease inhibitor II gene, pinII, from tomato or potato is envisioned to be particularly useful. Even more advantageous is the use of a pinII gene in combination with a Bt toxin gene, the combined effect of which has been discovered by the present inventors to produce synergistic insecticidal activity. Other genes which encode inhibitors of the insects' digestive system, or those that encode enzymes or co-factors that facilitate the production of inhibitors, may also be useful. This group may be exemplified by oryzacystatin and amylase inhibitors, such as those from wheat and barley.

[0264] Also, genes encoding lectins may confer additional or alternative insecticide properties. Lectins (originally termed phytohemagglutinins) are multivalent carbohydrate-binding proteins which have the ability to agglutinate red blood cells from a range of species. Lectins have been identified recently as insecticidal agents with activity against weevils, ECB and rootworm (Murdock et al., 1990; Czapla and Lang, 1990). Lectin genes contemplated to be useful include, for example, barley and wheat germ agglutinin (WGA) and rice lectins (Gatehouse et al., 1984), with WGA being preferred.

[0265] Genes controlling the production of large or small polypeptides active against insects when introduced into the insect pests, such as, e.g., lytic peptides, peptide hormones and toxins and venoms, form another aspect of the invention. For example, it is contemplated, that the expression of juvenile hormone esterase, directed towards specific insect pests, may also result in insecticidal activity, or perhaps cause cessation of metamorphosis (Hammock et al., 1990).

[0266] Transgenic plants expressing genes which encode enzymes that affect the integrity of the insect cuticle form yet another aspect of the invention. Such genes include those encoding, e.g., chitinase, proteases, lipases and also genes for the production of nikkomycin, a compound that inhibits chitin synthesis, the introduction of any of which is contemplated to produce insect resistant maize plants. Genes that code for activities that affect insect molting, such those affecting the production of ecdysteroid UDP-glucosyl transferase, also fall within the scope of the useful transgenes of the present invention.

[0267] Genes that code for enzymes that facilitate the production of compounds that reduce the nutritional quality of the host plant to insect pests are also encompassed by the present invention. It may be possible, for instance, to confer insecticidal activity on a plant by altering its sterol composition. Sterols are obtained by insects from their diet and are used for hormone synthesis and membrane stability. Therefore alterations in plant sterol composition by expression of novel genes, e.g., those that directly promote the production of undesirable sterols or those that convert desirable sterols into undesirable forms, could have a negative effect on insect growth and/or development and hence endow the plant with insecticidal activity. Lipoxygenases are naturally occurring plant enzymes that have been shown to exhibit anti-nutritional effects on insects and to reduce the nutritional quality of their diet. Therefore, further embodiments of the invention concern transgenic plants with enhanced lipoxygenase activity which may be resistant to insect feeding.

[0268] The present invention also provides methods and compositions by which to achieve qualitative or quantitative changes in plant secondary metabolites. One example concerns transforming plants to produce DIMBOA which, it is contemplated, will confer resistance to European corn borer, rootworm and several other maize insect pests. Candidate genes that are particularly considered for use in this regard include those genes at the bx locus known to be involved in the synthetic DIMBOA pathway (Dunn et al., 1981). The introduction of genes that can regulate the production of maysin, and genes involved in the production of dhurrin in sorghum, is also contemplated to be of use in facilitating resistance to earworm and rootworm, respectively.

[0269] Tripsacum dactyloides is a species of grass that is resistant to certain insects, including corn root worm. It is anticipated that genes encoding proteins that are toxic to insects or are involved in the biosynthesis of compounds toxic to insects will be isolated from Tripsacum and that these novel genes will be useful in conferring resistance to insects. It is known that the basis of insect resistance in Tripsacum is genetic, because said resistance has been transferred to Zea mays via sexual crosses (Branson and Guss, 1972).

[0270] Further genes encoding proteins characterized as having potential insecticidal activity may also be used as transgenes in accordance herewith. Such genes include, for example, the cowpea trypsin inhibitor (CpTI; Hilder et al., 1987) which may be used as a rootworm deterrent; genes encoding avermectin (Campbell, 1989; Ikeda et al., 1987) which may prove particularly useful as a corn rootworm deterrent; ribosome inactivating protein genes; and even genes that regulate plant structures. Transgenic maize including anti-insect antibody genes and genes that code for enzymes that can covert a non-toxic insecticide (pro-insecticide) applied to the outside of the plant into an insecticide inside the plant are also contemplated.

[0271] 3. Environment or Stress Resistance

[0272] Improvement of a plant's ability to tolerate various environmental stresses such as, but not limited to, drought, excess moisture, chilling, freezing, high temperature, salt, and oxidative stress, can also be effected through expression of heterologous, or overexpression of homologous genes. Benefits may be realized in terms of increased resistance to freezing temperatures through the introduction of an “antifreeze” protein such as that of the Winter Flounder (Cutler et al., 1989) or synthetic gene derivatives thereof. Improved chilling tolerance may also be conferred through increased expression of glycerol-3-phosphate acetyltransferase in chloroplasts (Murata et al., 1992; Wolter et al., 1992). Resistance to oxidative stress (often exacerbated by conditions such as chilling temperatures in combination with high light intensities) can be conferred by expression of superoxide dismutase (Gupta et al., 1993), and may be improved by glutathione reductase (Bowler et al., 1992). Such strategies may allow for tolerance to freezing in newly emerged fields as well as extending later maturity higher yielding varieties to earlier relative maturity zones.

[0273] Expression of novel genes that favorably effect plant water content, total water potential, osmotic potential, and turgor can enhance the ability of the plant to tolerate drought. As used herein, the terms “drought resistance” and “drought tolerance” are used to refer to a plants increased resistance or tolerance to stress induced by a reduction in water availability, as compared to normal circumstances, and the ability of the plant to function and survive in lower-water environments, and perform in a relatively superior manner. In this aspect of the invention it is proposed, for example, that the expression of a gene encoding the biosynthesis of osmotically-active solutes can impart protection against drought. Within this class of genes are DNAs encoding mannitol dehydrogenase (Lee and Saier, 1982) and trehalose-6-phosphate synthase (Kaasen et al., 1992). Through the subsequent action of native phosphatases in the cell or by the introduction and coexpression of a specific phosphatase, these introduced genes will result in the accumulation of either mannitol or trehalose, respectively, both of which have been well documented as protective compounds able to mitigate the effects of stress. Mannitol accumulation in transgenic tobacco has been verified and preliminary results indicate that plants expressing high levels of this metabolite are able to tolerate an applied osmotic stress (Tarczynski et al., 1992).

[0274] Similarly, the efficacy of other metabolites in protecting either enzyme function (e.g. alanopine or propionic acid) or membrane integrity (e.g., alanopine) has been documented (Loomis et al., 1989), and therefore expression of gene encoding the biosynthesis of these compounds can confer drought resistance in a manner similar to or complimentary to mannitol. Other examples of naturally occurring metabolites that are osmotically active and/or provide some direct protective effect during drought and/or desiccation include sugars and sugar derivatives such as fructose, erythritol (Coxson et al., 1992), sorbitol, dulcitol (Karsten et al., 1992), glucosylglycerol (Reed et al., 1984; Erdmann et al., 1992), sucrose, stachyose (Koster and Leopold, 1988; Blackman et al., 1992), ononitol and pinitol (Vernon and Bohnert, 1992), and raffinose (Bernal-Lugo and Leopold, 1992). Other osmotically active solutes which are not sugars include, but are not limited to, proline and glycine-betaine (Wyn-Jones and Storey, 1981). Continued canopy growth and increased reproductive fitness during times of stress can be augmented by introduction and expression of genes such as those controlling the osmotically active compounds discussed above and other such compounds, as represented in one exemplary embodiment by the enzyme myoinositol 0-methyltransferase.

[0275] It is contemplated that the expression of specific proteins may also increase drought tolerance. Three classes of Late Embryogenic Proteins have been assigned based on structural similarities (see Dure et al., 1989). All three classes of these proteins have been demonstrated in maturing (i.e., desiccating) seeds. Within these 3 types of proteins, the Type-II (dehydrin-type) have generally been implicated in drought and/or desiccation tolerance in vegetative plant parts (i.e. Mundy and Chua, 1988; Piatkowski et al., 1990; Yamaguchi-Shinozaki et al., 1992). Recently, expression of a Type-III LEA (HVA-1) in tobacco was found to influence plant height, maturity and drought tolerance (Fitzpatrick, 1993). Expression of structural genes from all three groups may therefore confer drought tolerance. Other types of proteins induced during water stress include thiol proteases, aldolases and transmembrane transporters (Guerrero et al., 1990), which may confer various protective and/or repair-type functions during drought stress. The expression of a gene that effects lipid biosynthesis and hence membrane composition can also be useful in conferring drought resistance on the plant.

[0276] Many genes that improve drought resistance have complementary modes of action. Thus, combinations of these genes might have additive and/or synergistic effects in improving drought resistance in maize. Many of these genes also improve freezing tolerance (or resistance); the physical stresses incurred during freezing and drought are similar in nature and may be mitigated in similar fashion. Benefit may be conferred via constitutive expression of these genes, but the preferred means of expressing these novel genes may be through the use of a turgor-induced promoter (such as the promoters for the turgor-induced genes described in Guerrero et al. 1990 and Shagan et al., 1993). Spatial and temporal expression patterns of these genes may enable maize to better withstand stress.

[0277] Expression of genes that are involved with specific morphological traits that allow for increased water extractions from drying soil would be of benefit. For example, introduction and expression of genes that alter root characteristics may enhance water uptake. Expression of genes that enhance reproductive fitness during times of stress would be of significant value. For example, expression of DNAs that improve the synchrony of pollen shed and receptiveness of the female flower parts, i.e., silks, would be of benefit. In addition, expression of genes that minimize kernel abortion during times of stress would increase the amount of grain to be harvested and hence be of value. Regulation of cytokinin levels in monocots, such as maize, by introduction and expression of an isopentenyl transferase gene with appropriate regulatory sequences can improve monocot stress resistance and yield (Gan et al., Science, 270:1986 (1995)).

[0278] Given the overall role of water in determining yield, it is contemplated that enabling plants to utilize water more efficiently, through the introduction and expression of novel genes, will improve overall performance even when soil water availability is not limiting. By introducing genes that improve the ability of plants to maximize water usage across a full range of stresses relating to water availability, yield stability or consistency of yield performance may be realized.

[0279] 4. Disease Resistance

[0280] It is proposed that increased resistance to diseases may be realized through introduction of genes into plants period. It is possible to produce resistance to diseases caused, by viruses, bacteria, fungi, root pathogens, insects and nematodes. It is also contemplated that control of mycotoxin producing organisms may be realized through expression of introduced genes.

[0281] Resistance to viruses may be produced through expression of novel genes. For example, it has been demonstrated that expression of a viral coat protein in a transgenic plant can impart resistance to infection of the plant by that virus and perhaps other closely related viruses (Cuozzo et al., 1988, Hemenway et al., 1988, Abel et al., 1986). It is contemplated that expression of antisense genes targeted at essential viral functions may impart resistance to said virus. For example, an antisense gene targeted at the gene responsible for replication of viral nucleic acid may inhibit said replication and lead to resistance to the virus. It is believed that interference with other viral functions through the use of antisense genes may also increase resistance to viruses. Further it is proposed that it may be possible to achieve resistance to viruses through other approaches, including, but not limited to the use of satellite viruses.

[0282] It is proposed that increased resistance to diseases caused by bacteria and fungi may be realized through introduction of novel genes. It is contemplated that genes encoding so-called “peptide antibiotics,” pathogenesis related (PR) proteins, toxin resistance, and proteins affecting host-pathogen interactions such as morphological characteristics will be useful. Peptide antibiotics are polypeptide sequences which are inhibitory to growth of bacteria and other microorganisms. For example, the classes of peptides referred to as cecropins and magainins inhibit growth of many species of bacteria and fungi. It is proposed that expression of PR proteins in plants may be useful in conferring resistance to bacterial disease. These genes are induced following pathogen attack on a host plant and have been divided into at least five classes of proteins (Bol et al., 1990). Included amongst the PR proteins are beta-1,3-glucanases, chitinases, and osmotin and other proteins that are believed to function in plant resistance to disease organisms. Other genes have been identified that have antifungal properties, e.g., UDA (stinging nettle lectin) and hevein (Broakgert et al., 1989; Barkai-Golan et al., 1978). It is known that certain plant diseases are caused by the production of phytotoxins. Resistance to these diseases could be achieved through expression of a novel gene that encodes an enzyme capable of degrading or otherwise inactivating the phytotoxin. Expression novel genes that alter the interactions between the host plant and pathogen may be useful in reducing the ability the disease organism to invade the tissues of the host plant, e.g., an increase in the waxiness of the leaf cuticle or other morphological characteristics.

[0283] Plant parasitic nematodes are a cause of disease in many plants. It is proposed that it would be possible to make the plant resistant to these organisms through the expression of novel genes. It is anticipated that control of nematode infestations would be accomplished by altering the ability of the nematode to recognize or attach to a host plant and/or enabling the plant to produce nematicidal compounds, including but not limited to proteins.

[0284] 5. Mycotoxin Reduction/Elimination

[0285] Production of mycotoxins, including aflatoxin and fumonisin, by fungi associated with plants is a significant factor in rendering the grain not useful. These fungal organisms do not cause disease symptoms and/or interfere with the growth of the plant, but they produce chemicals (mycotoxins) that are toxic to animals. Inhibition of the growth of these fungi would reduce the synthesis of these toxic substances and, therefore, reduce grain losses due to mycotoxin contamination. Novel genes may be introduced into plants that would inhibit synthesis of the mycotoxin without interfering with fungal growth. Expression of a novel gene which encodes an enzyme capable of rendering the mycotoxin nontoxic would be useful in order to achieve reduced mycotoxin contamination of grain. The result of any of the above mechanisms would be a reduced presence of mycotoxins on grain.

[0286] 6. Grain Composition or Quality

[0287] Genes may be introduced into plants, particularly commercially important cereals such as maize, wheat or rice, to improve the grain for which the cereal is primarily grown. A wide range of novel transgenic plants produced in this manner may be envisioned depending on the particular end use of the grain.

[0288] For example, the largest use of maize,grain is for feed or food. Introduction of genes that alter the composition of the grain may greatly enhance the feed or food value. The primary components of maize grain are starch, protein, and oil. Each of these primary components of maize grain may be improved by altering its level or composition. Several examples may be mentioned for illustrative purposes but in no way provide an exhaustive list of possibilities.

[0289] The protein of many cereal grains is suboptimal for feed and food purposes especially when fed to pigs, poultry, and humans. The protein is deficient in several amino acids that are essential in the diet of these species, requiring the addition of supplements to the grain. Limiting essential amino acids may include lysine, methionine, tryptophan, threonine, valine, arginine, and histidine. Some amino acids become limiting only after the grain is supplemented with other inputs for feed formulations. For example, when the grain is supplemented with soybean meal to meet lysine requirements, methionine becomes limiting. The levels of these essential amino acids in seeds and grain may be elevated by mechanisms which include, but are not limited to, the introduction of genes to increase the biosynthesis of the amino acids, decrease the degradation of the amino acids, increase the storage of the amino acids in proteins, or increase transport of the amino acids to the seeds or grain.

[0290] One mechanism for increasing the biosynthesis of the amino acids is to introduce genes that deregulate the amino acid biosynthetic pathways such that the plant can no longer adequately control the levels that are produced. This may be done by deregulating or bypassing steps in the amino acid biosynthetic pathway which are normally regulated by levels of the amino acid end product of the pathway. Examples include the introduction of genes that encode deregulated versions of the enzymes aspartokinase or dihydrodipicolinic acid (DHDP)-synthase for increasing lysine and threonine production, and anthranilate synthase for increasing tryptophan production. Reduction of the catabolism of the amino acids may be accomplished by introduction of DNA sequences that reduce or eliminate the expression of genes encoding enzymes that catalyse steps in the catabolic pathways such as the enzyme lysine-ketoglutarate reductase.

[0291] The protein composition of the grain may be altered to improve the balance of amino acids in a variety of ways including elevating expression of native proteins, decreasing expression of those with poor composition, changing the composition of native proteins, or introducing genes encoding entirely new proteins possessing superior composition. DNA may be introduced that decreases the expression of members of the zein family of storage proteins. This DNA may encode ribozymes or antisense sequences directed to impairing expression of zein proteins or expression of regulators of zein expression such as the opaque-2 gene product. The protein composition of the grain may be modified through the phenomenon of cosuppression, i.e., inhibition of expression of an endogenous gene through the expression of an identical structural gene or gene fragment introduced through transformation (Goring-et al., 1991). Additionally, the introduced DNA may encode enzymes which degrade seines. The decreases in zein expression that are achieved may be accompanied by increases in proteins with more desirable amino acid composition or increases in other major seed constituents such as starch. Alternatively, a chimeric gene may be introduced that comprises a coding sequence for a native protein of adequate amino acid composition such as for one of the globulin proteins or 10 kD zein of maize and a promoter or other regulatory sequence designed to elevate expression of said protein. The coding sequence of said gene may include additional or replacement codons for essential amino acids. Further, a coding sequence obtained from another species, or, a partially or completely synthetic sequence encoding a completely unique peptide sequence designed to enhance the amino acid composition of the seed may be employed.

[0292] The introduction of genes that alter the oil content of the grain may be of value. Increases in oil content may result in increases in metabolizable energy content and density of the seeds for uses in feed and food. The introduced genes may encode enzymes that remove or reduce rate-limitations or regulated steps in fatty acid or lipid biosynthesis. Such genes may include, but are not limited to, those that encode acetyl-CoA carboxylase, ACP-acyltransferase, beta-ketoacyl-ACP synthase, plus other well known fatty acid biosynthetic activities. Other possibilities are genes that encode proteins that do not possess enzymatic activity such as acyl carrier protein. Additional examples include 2-acetyltransferase, oleosin pyruvate dehydrogenase complex, acetyl CoA synthetase, ATP citrate lyase, ADP-glucose pyrophosphorylase and genes of the carnitine-CoA-acetyl-CoA shuttles. It is anticipated that expression of genes related to oil biosynthesis will be targeted to the plastid, using a plastid transit peptide sequence and preferably expressed in the seed embryo. Genes may be introduced that alter the balance of fatty acids present in the oil providing a more healthful or nutritive feedstuff. The introduced DNA may also encode sequences that block expression of enzymes involved in fatty acid biosynthesis, altering the proportions of fatty acids present in the grain such as described below.

[0293] Genes may be introduced that enhance the nutritive value of the starch component of the grain, for example by increasing the degree of branching, resulting in improved utilization of the starch in cows by delaying its metabolism.

[0294] Besides affecting the major constituents of the grain, genes may be introduced that affect a variety of other nutritive, processing, or other quality aspects of the grain as used for feed or food. For example, pigmentation of the grain may be increased or decreased. Enhancement and stability of yellow pigmentation is desirable in some animal feeds and may be achieved by introduction of genes that result in enhanced production of xanthophylls and carotenes by eliminating rate-limiting steps in their production. Such genes may encode altered forms of the enzymes phytoene synthase, phytoene desaturase, or lycopene synthase. Alternatively, unpigmented white corn is desirable for production of many food products and may be produced by the introduction of DNA which blocks or eliminates steps in pigment production pathways.

[0295] Feed or food comprising some cereal grains possesses insufficient quantities of vitamins and must be supplemented to provide adequate nutritive value. Introduction of genes that enhance vitamin biosynthesis in seeds may be envisioned including, for example, vitamins A, E, B₁₂, choline, and the like. For example, maize grain also does not possess sufficient mineral content for optimal nutritive value. Genes that affect the accumulation or availability of compounds containing phosphorus, sulfur, calcium, manganese, zinc, and iron among others would be valuable. An example may be the introduction of a gene that reduced phytic acid production or encoded the enzyme phytase which enhances phytic acid breakdown. These genes would increase levels of available phosphate in the diet, reducing the need for supplementation with mineral phosphate.

[0296] Numerous other examples of improvement of cereals for feed and food purposes might be described. The improvements may not even necessarily involve the grain, but may, for example, improve the value of the grain for silage. Introduction of DNA to accomplish this might include sequences that alter lignin production such as those that result in the “brown midrib” phenotype associated with superior feed value for cattle.

[0297] In addition to direct improvements in feed or food value, genes may also be introduced which improve the processing of grain and improve the value of the products resulting from the processing. The primary method of processing certain grains such as maize is via wetmilling. Maize may be improved though the expression of novel genes that increase the efficiency and reduce the cost of processing such as by decreasing steeping time.

[0298] Improving the value of wetmilling products may include altering the quantity or quality of starch, oil, corn gluten meal, or the components of corn gluten feed. Elevation of starch may be achieved through the identification and elimination of rate limiting steps in starch biosynthesis or by decreasing levels of the other components of the grain resulting in proportional increases in starch. An example of the former may be the introduction of genes encoding ADP-glucose pyrophosphorylase enzymes with altered regulatory activity or which are expressed at higher level. Examples of the latter may include selective inhibitors of, for example, protein or oil biosynthesis expressed during later stages of kernel development.

[0299] The properties of starch may be beneficially altered by changing the ratio of amylose to amylopectin, the size of the starch molecules, or their branching pattern. Through these changes a broad range of properties may be modified which include, but are not limited to, changes in gelatinization temperature, heat of gelatinization, clarity of films and pastes, Theological properties, and the like. To accomplish these changes in properties, genes that encode granule-bound or soluble starch synthase activity or branching enzyme activity may be introduced alone or combination. DNA such as antisense constructs may also be used to decrease levels of endogenous activity of these enzymes. The introduced genes or constructs may possess regulatory sequences that time their expression to specific intervals in starch biosynthesis and starch granule development. Furthermore, it may be advisable to introduce and express genes that result in the in vivo derivatization, or other modification, of the glucose moieties of the starch molecule. The covalent attachment of any molecule may be envisioned, limited only by the existence of enzymes that catalyze the derivatizations and the accessibility of appropriate substrates in the starch granule. Examples of important derivations may include the addition of functional groups such as amines, carboxyls, or phosphate groups which provide sites for subsequent in vitro derivatizations or affect starch properties through the introduction of ionic charges. Examples of other modifications may include direct changes of the glucose units such as loss of hydroxyl groups or their oxidation to aldehyde or carboxyl groups.

[0300] Oil is another product of wetmilling of corn and other grains, the value of which may be improved by introduction and expression of genes. The quantity of oil that can be extracted by wetmilling may be elevated by approaches as described for feed and food above. Oil properties may also be altered to improve its performance in the production and use of cooking oil, shortenings, lubricants or other oil-derived products or improvement of its health attributes when used in the food-related applications. Novel fatty acids may also be synthesized which upon extraction can serve as starting materials for chemical syntheses. The changes in oil properties may be achieved by altering the type, level, or lipid arrangement of the fatty acids present in the oil. This in turn may be accomplished by the addition of genes that encode enzymes that catalyze the synthesis of novel fatty acids and the lipids possessing them or by increasing levels of native fatty acids while possibly reducing levels of precursors. Alternatively DNA sequences may be introduced which slow or block steps in fatty acid biosynthesis resulting in the increase in precursor fatty acid intermediates. Genes that might be added include desaturases, epoxidases, hydratases, dehydratases, and other enzymes that catalyze reactions involving fatty acid intermediates. Representative examples of catalytic steps that might be blocked include the desaturations from stearic to oleic acid and oleic to linolenic acid resulting in the respective accumulations of stearic and oleic acids.

[0301] Improvements in the other major cereal wetmilling products, gluten meal and gluten feed, may also be achieved by the introduction of genes to obtain novel plants. Representative possibilities include but are not limited to those described above for improvement of food and feed value.

[0302] In addition it may further be considered that the plant be used for the production or manufacturing of useful biological compounds that were either not produced at all, or not produced at the same level, in the plant previously. The novel plants producing these compounds are made possible by the introduction and expression of genes by transformation methods. The possibilities include, but are not limited to, any biological compound which is presently produced by any organism such as proteins, nucleic acids, primary and intermediary metabolites, carbohydrate polymers, etc. The compounds may be produced by the plant, extracted upon harvest and/or processing, and used for any presently recognized useful purpose such as pharmaceuticals, fragrances, industrial enzymes to name a few.

[0303] Further possibilities to exemplify the range of grain traits or properties potentially encoded by introduced genes in transgenic plants include grain with less breakage susceptibility for export purposes or larger grit size when processed by dry milling through introduction of genes that enhance gamma-zein synthesis, popcorn with improved popping, quality and expansion volume through genes that increase pericarp thickness, corn with whiter grain for food uses though introduction of genes that effectively block expression of enzymes involved in pigment production pathways, and improved quality of alcoholic beverages or sweet corn through introduction of genes which affect flavor such as the shrunken gene (encoding sucrose synthase) for sweet corn.

[0304] 7. Plant Agronomic Characteristics

[0305] Two of the factors determining where plants can be grown are the average daily temperature during the growing season and the length of time between frosts. Within the areas where it is possible to grow a particular plant, there are varying limitations on the maximal time it is allowed to grow to maturity and be harvested. The plant to be grown in a particular area is selected for its ability to mature and dry down to harvestable moisture content within the required period of time with maximum possible yield. Therefore, plant of varying maturities are developed for different growing locations. Apart from the need to dry down sufficiently to permit harvest is the desirability of having maximal drying take place in the field to minimize the amount of energy required for additional drying post-harvest. Also the more readily the grain can dry down, the more time there is available for growth and kernel fill. Genes that influence maturity and/or dry down can be identified and introduced into plant lines using transformation techniques to create new varieties adapted to different growing locations or the same growing location but having improved yield to moisture ratio at harvest. Expression of genes that are involved in regulation of plant development may be especially useful, e.g., the liguleless and rough sheath genes that have been identified in plants.

[0306] Genes may be introduced into plants that would improve standability and other plant growth characteristics. For example, expression of novel genes which confer stronger stalks, improved root systems, or prevent or reduce ear droppage would be of great value to the corn farmer. Introduction and expression of genes that increase the total amount of photoassimilate available by, for example, increasing light distribution and/or interception would be advantageous. In addition the expression of genes that increase the efficiency of photosynthesis and/or the leaf canopy would further increase gains in productivity. Such approaches would allow for increased plant populations in the field.

[0307] Delay of late season vegetative senescence would increase the flow of assimilate into the grain and thus increase yield. Overexpression of genes within plants that are associated with “stay green” or the expression of any gene that delays senescence would achieve be advantageous. For example, a non-yellowing mutant has been identified in Festuca pratensis (Davies et al., 1990). Expression of this gene as well as others may prevent premature breakdown of chlorophyll and thus maintain canopy function.

[0308] 8. Nutrient Utilization

[0309] The ability to utilize available nutrients and minerals may be a limiting factor in growth of many plants. It is proposed that it would be possible to alter nutrient uptake, tolerate pH extremes, mobilization through the plant, storage pools, and availability for metabolic activities by the introduction of novel genes. These modifications would allow a plant to more efficiently utilize available nutrients. It is contemplated that an increase in the activity of, for example, an enzyme that is normally present in the plant and involved in nutrient utilization would increase the availability of a nutrient. An example of such an enzyme would be phytase. It is also contemplated that expression of a novel gene may make a nutrient source available that was previously not accessible, e.g., an enzyme that releases a component of nutrient value from a more complex molecule, perhaps a macromolecule.

[0310] 9. Male Sterility

[0311] Male sterility is useful in the production of hybrid seed. It is proposed that male sterility may be produced through expression of novel genes. For example, it has been shown that expression of genes that encode proteins that interfere with development of the male inflorescence and/or gametophyte result in male sterility. Chimeric ribonuclease genes that express in the anthers of transgenic tobacco and oilseed rape have been demonstrated to lead to male sterility (Mariani et al, 1990).

[0312] For example, a number of mutations were discovered in maize that confer cytoplasmic male sterility. One mutation in particular, referred to as T cytoplasm, also correlates with sensitivity to Southern corn leaf blight. A DNA sequence, designated TURF-13 (Levings, 1990), was identified that correlates with T cytoplasm. It would be possible through the introduction of TURF-13 via transformation to separate male sterility from disease sensitivity. As it is necessary to be able to restore male fertility for breeding purposes and for grain production, it is proposed that genes encoding restoration of male fertility may also be introduced.

[0313] 10. Negative Selectable Markers

[0314] Introduction of genes encoding traits that can be selected against may be useful for eliminating undesirable linked genes. When two or more genes are introduced together by cotransformation, the genes will be linked together on the host chromosome. For example, a gene encoding a Bt gene that confers insect resistance on the plant may be introduced into a plant together with a bar gene that is useful as a selectable marker and confers resistance to the herbicide Ignite® on the plant. However, it may not be desirable to have an insect resistant plant that is also resistant to the herbicide Ignite®. It is proposed that one could also introduce an antisense bar gene that is expressed in those tissues where one does not want expression of the bar gene, e.g., in whole plant parts. Hence, although the bar gene is expressed and is useful as a selectable marker, it is not useful to confer herbicide resistance on the whole plant. The bar antisense gene is a negative selectable marker.

[0315] Negative selection is necessary in order to screen a population of transformants for rare homologous recombinants generated through gene targeting. For example, a homologous recombinant may be identified through the inactivation of a gene that was previously expressed in that cell. The antisense gene to neomycin phosphotransferase II (nptII) has been investigated as a negative selectable marker in tobacco (Nicotiana tabacum) and Arabidopsis thaliana (Xiang and Guerra, 1993). In this example both sense and antisense nptII genes are introduced into a plant through transformation and the resultant plants are sensitive to the antibiotic kanamycin. An introduced gene that integrates into the host cell chromosome at the site of the antisense nptII gene, and inactivates the antisense gene, will make the plant resistant to kanamycin and other aminoglycoside antibiotics. Therefore, rare site specific recombinants may be identified by screening for antibiotic resistance. Similarly, any gene, native to the plant or introduced through transformation, that when inactivated confers resistance to a compound, may be useful as a negative selectable marker.

[0316] It is contemplated that negative selectable markers may also be useful in other ways. One application is to construct transgenic lines in which one could select for transposition to unlinked sites. In the process of tagging it is most common for the transposable element to move to a genetically linked site on the same chromosome. A selectable marker for recovery of rare plants in which transposition has occurred to an unlinked locus would be useful. For example, the enzyme cytosine deaminase may be useful for this purpose (Stouggard, 1993). In the presence of this enzyme the compound 5-fluorocytosine is converted to 5-fluoruracil which is toxic to plant and animal cells. If a transposable element is linked to the gene for the enzyme cytosine deaminase, one may select for transposition to unlinked sites by selecting for transposition events in which the resultant plant is now resistant to 5-fluorocytosine. The parental plants and plants containing transpositions to linked sites will remain sensitive to 5-fluorocytosine. Resistance to 5-fluorocytosine is due to loss of the cytosine deaminase gene through genetic segregation of the transposable element and the cytosine deaminase gene. Other genes that encode proteins that render the plant sensitive to a certain compound will also be useful in this context. For example, T-DNA gene 2 from Agrobacterium tumefaciens encodes a protein that catalyzes the conversion of alpha-naphthalene acetamide (NAM) to alpha-napthalene acetic acid (NAA) renders plant cells sensitive to high concentrations of NAM (Depicker et al., 1988).

[0317] It is also contemplated that negative selectable markers may be useful in the construction of transposon tagging lines. For example, by marking an autonomous transposable element such as Ac, Master Mu, or En/Spn with a negative selectable marker, one could select for transformants in which the autonomous element is not stably integrated into the genome. This would be desirable, for example, when transient expression of the autonomous element is desired to activate in trans the transposition of a defective transposable element, such as Ds, but stable integration of the autonomous element is not desired. The presence of the autonomous element may not be desired in order to stabilize the defective element, i.e., prevent it from further transposing. However, it is proposed that if stable integration of an autonomous transposable element is desired in a plant the presence of a negative selectable marker may make it possible to eliminate the autonomous element during the breeding process.

[0318] 11. Non-Protein-Expressing Sequences

[0319] a. RNA-Expressing

[0320] DNA may be introduced into plants for the purpose of expressing RNA transcripts that function to affect plant phenotype yet are not translated into protein. Two examples are antisense RNA and RNA with ribozyme activity. Both may serve possible functions in reducing or eliminating expression of native or introduced plant genes.

[0321] Genes may be constructed or isolated, which when transcribed, produce antisense RNA that is complementary to all or part(s) of a targeted messenger RNA(s). The antisense RNA reduces production of the polypeptide product of the messenger RNA. The polypeptide product may be any protein encoded by the plant genome. The aforementioned genes will be referred to as antisense genes. An antisense gene may thus be introduced into a plant by transformation methods to produce a novel transgenic plant with reduced expression of a selected protein of interest. For example, the protein may be an enzyme that catalyzes a reaction in the plant. Reduction of the enzyme activity may reduce or eliminate products of the reaction which include any enzymatically synthesized compound in the plant such as fatty acids, amino acids, carbohydrates, nucleic acids and the like. Alternatively, the protein may be a storage protein, such as a zein, or a structural protein, the decreased expression of which may lead to changes in seed amino acid composition or plant morphological changes respectively. The possibilities cited above are provided only by way of example and do not represent the full range of applications.

[0322] Genes may also be constructed or isolated, which when transcribed produce RNA enzymes, or ribozymes, which can act as endoribonucleases and catalyze the cleavage of RNA molecules with selected sequences. The cleavage of selected messenger RNA's can result in the reduced production of their encoded polypeptide products. These genes may be used to prepare novel transgenic plants which possess them. The transgenic plants may possess reduced levels of polypeptides including but not limited to the polypeptides cited above that may be affected by antisense RNA.

[0323] It is also possible that genes may be introduced to produce novel transgenic plants which have reduced expression of a native gene product by a mechanism of cosuppression. It has been demonstrated in tobacco, tomato, and petunia (Goring et al, 1991; Smith et al., 1990; Napoli et al., 1990; van der Krol et al.,, 1990) that expression of the sense transcript of a native gene will reduce or eliminate expression of the native gene in a manner similar to that observed for antisense genes. The introduced gene may encode all or part of the targeted native protein but its translation may not be required for reduction of levels of that native protein.

[0324] b. Non-RNA-Expressing

[0325] For example, DNA elements including those of transposable elements such as Ds, Ac, or Mu, may be, inserted into a gene and cause mutations. These DNA elements may be inserted in order to inactivate (or activate) a gene and thereby “tag” a particular trait. In this instance the transposable element does not cause instability of the tagged mutation, because the utility of the element does not depend on its ability to move in the genome. Once a desired trait is tagged, the introduced DNA sequence may be used to clone the corresponding gene, e.g., using the introduced DNA sequence as a PCR primer together with PCR gene cloning techniques (Shapiro, 1983; Dellaporta et al., 1988). Once identified, the entire gene(s) for the particular trait, including control or regulatory regions where desired may be isolated, cloned and manipulated as desired. The utility of DNA elements introduced into an organism for purposed of gene tagging is independent of the DNA sequence and does not depend on any biological activity of the DNA sequence, i.e., transcription into RNA or translation into protein. The sole function of the DNA element is to disrupt the DNA sequence of a gene.

[0326] It is contemplated that unexpressed DNA sequences, including novel synthetic sequences could be introduced into cells as proprietary “labels” of those cells and plants and seeds thereof. It would not be necessary for a label DNA element to disrupt the function of a gene endogenous to the host organism, as the sole function of this DNA would be to identify the origin of the organism. For example, one could introduce a unique DNA sequence into a plant and this DNA element would identify all cells, plants, and progeny of these cells as having arisen from that labeled source. It is proposed that inclusion of label DNAs would enable one to distinguish proprietary germplasm or germplasm derived from such, from unlabelled germplasm.

[0327] Another possible element which may be introduced is a matrix attachment region element (MAR), such as the chicken lysozyme A element (Stief et al., 1989), which can be positioned around an expressible gene of interest to effect an increase in overall expression of the gene and diminish position dependant effects upon incorporation into the plant genome (Stief et al., 1989; Phi-Van et al., 1990).

[0328] Further nucleotide sequences of interest that may be contemplated for use within the scope of the present invention in operable linkage with the promoter sequences according to the invention are isolated nucleic acid molecules, e.g., DNA or RNA, comprising a plant nucleotide sequence according to the invention comprising an open reading frame that is preferentially expressed in a specific tissue, i.e., seed-, root, green tissue (leaf and stem), panicle-, or pollen, or is expressed constitutively.

[0329] B. Marker Genes

[0330] In order to improve the ability to identify transformants, one may desire to employ a selectable or screenable marker gene as, or in addition to, the expressible gene of interest. “Marker genes” are genes that impart a distinct phenotype to cells expressing the marker gene and thus allow such transformed cells to be distinguished from cells that do not have the marker. Such genes may encode either a selectable or screenable marker, depending on whether the marker confers a trait which one can ‘select’ for by chemical means, i.e., through the use of a selective agent (e.g., a herbicide, antibiotic, or the like), or whether it is simply a trait that one can identify through observation or testing, i.e., by ‘screening’ (e.g., the R-locus trait, the green fluorescent protein (GFP)). Of course, many examples of suitable marker genes are known to the art and can be employed in the practice of the invention.

[0331] Included within the terms selectable or screenable marker genes are also genes which encode a “secretable marker” whose secretion can be detected as a means of identifying or selecting for transformed cells. Examples include markers which encode a secretable antigen that can be identified by antibody interaction, or even secretable enzymes which can be detected by their catalytic activity. Secretable proteins fall into a number of classes, including small, diffusible proteins detectable, e.g., by ELISA; small active enzymes detectable in extracellular solution (e.g., alpha-amylase, beta-lactamase, phosphinothricin acetyltransferase); and proteins that are inserted or trapped in the cell wall (e.g., proteins that include a leader sequence such as that found in the expression unit of extensin or tobacco PR-S).

[0332] With regard to selectable secretable markers, the use of a gene that encodes a protein that becomes sequestered in the cell wall, and which protein includes a unique epitope is considered to be particularly advantageous. Such a secreted antigen marker would ideally employ an epitope sequence that would provide low background in plant tissue, a promoter-leader sequence that would impart efficient expression and targeting across the plasma membrane, and would produce protein that is bound in the cell wall and yet accessible to antibodies. A normally secreted wall protein modified to include a unique epitope would satisfy all such requirements.

[0333] One example of a protein suitable for modification in this manner is extensin, or hydroxyproline rich glycoprotein (HPRG). For example, the maize HPRG (Steifel et al., 1990) molecule is well characterized in terms of molecular biology, expression and protein structure. However, any one of a variety of ultilane and/or glycine-rich wall proteins (Keller et al., 1989) could be modified by the addition of an antigenic site to create a screenable marker.

[0334] One exemplary embodiment of a secretable screenable marker concerns the use of a maize sequence encoding the wall protein HPRG, modified to include a 15 residue epitope from the pro-region of murine interleukin, however, virtually any detectable epitope may be employed in such embodiments, as selected from the extremely wide variety of antigen-antibody combinations known to those of skill in the art. The unique extracellular epitope can then be straightforwardly detected using antibody labeling in conjunction with chromogenic or fluorescent adjuncts.

[0335] Elements of the present disclosure may be exemplified in detail through the use of the bar and/or GUS genes, and also through the use of various other markers. Of course, in light of this disclosure, numerous other possible selectable and/or screenable marker genes will be apparent to those of skill in the art in addition to the one set forth hereinbelow. Therefore, it will be understood that the following discussion is exemplary rather than exhaustive. In light of the techniques disclosed herein and the general recombinant techniques which are known in the art, the present invention renders possible the introduction of any gene, including marker genes, into a recipient cell to generate a transformed plant.

[0336] 1. Selectable Markers

[0337] Possible selectable markers for use in connection with the present invention include, but are not limited to, a neo gene (Potrykus et al., 1985) which codes for kanamycin resistance and can be selected for using kanamycin, G418, paromomycin, and the like; a bar gene which codes for bialaphos or phosphinothricin resistance; a gene which encodes an altered EPSP synthase protein (Hinchee et al., 1988) thus conferring glyphosate resistance; a nitrilase gene such as bxn from Klebsiella ozaenae which confers resistance to bromoxynil (Stalker et al., 1988); a mutant acetolactate synthase gene (ALS) which confers resistance to imidazolinone, sulfonylurea or other ALS-inhibiting chemicals (European Patent Application 154,204, 1985); a methotrexate-resistant DHFR gene (Thillet et al., 1988); a dalapon dehalogenase gene that confers resistance to the herbicide dalapon; a mutated anthranilate synthase gene that confers resistance to 5-methyl tryptophan. Preferred selectable marker genes encode phosphinothricin acetyltransferase; glyphosate resistant EPSPS, aminoglycoside phosphotransferase; hygromycin phosphotransferase, or neomycin phosphotransferase. Where a mutant EPSP synthase gene is employed, additional benefit may be realized through the incorporation of a suitable chloroplast transit peptide, CTP (European Patent Application 0,218,571, 1987).

[0338] An illustrative embodiment of a selectable marker gene capable of being used in systems to select transformants is the genes that encode the enzyme phosphinothricin acetyltransferase, such as the bar gene from Streptomyces hygroscopicus or the pat gene from Streptomyces viridochromogenes. The enzyme phosphinothricin acetyl transferase (PAT) inactivates the active ingredient in the herbicide bialaphos, phosphinothricin (PPT). PPT inhibits glutamine synthetase, (Murakami et al., 1986; Twell et al., 1989) causing rapid accumulation of ammonia and cell death. The success in using this selective system in conjunction with monocots was particularly surprising because of the major difficulties which have been reported in transformation of cereals (Potrykus, 1989).

[0339] Where one desires to employ a bialaphos resistance gene in the practice of the invention, a particularly useful gene for this purpose is the bar or pat genes obtainable from species of Streptomyces (e.g., ATCC No. 21,705). The cloning of the bar gene has been described (Murakami et al., 1986; Thompson et al., 1987) as has the use of the bar gene in, the context of plants other than monocots (De Block et al., 1987; De Block et al., 1989).

[0340] 2. Screenable Markers

[0341] Screenable markers that may be employed include, but are not limited to, a beta-glucuronidase (GUS) or uidA gene which encodes an enzyme for which various chromogenic substrates are known; an R-locus gene, which encodes a product that regulates the production of anthocyanin pigments (red color) in plant tissues (Dellaporta et al., 1988); a beta-lactamase gene (Sutcliffe, 1978), which encodes an enzyme for which various chromogenic substrates are known (e.g., PADAC, a chromogenic cephalosporin); a xylE gene (Zukowsky et al., 1983) which encodes a catechol dioxygenase that can convert chromogenic catechols; an ∀-amylase gene (Ikuta et al., 1990); a tyrosinase gene (Katz et al., 1983) which encodes an enzyme capable of oxidizing tyrosine to DOPA and dopaquinone which in turn condenses to form the easily detectable compound melanin; a ∃-galactosidase gene, which encodes an enzyme for which there are chromogenic substrates; a luciferase (lux) gene (Ow et al., 1986), which allows for bioluminescence detection; or even an aequorin gene (Prasher et al., 1985), which may be employed in calcium-sensitive bioluminescence detection, or a green fluorescent protein gene (Niedz et al., 1995).

[0342] Genes from the maize R gene complex are contemplated to be particularly useful as screenable markers. The R gene complex in maize encodes a protein that acts to regulate the production of anthocyanin pigments in most seed and plant tissue. A gene from the R gene complex was applied to maize transformation, because the expression of this gene in transformed cells does not harm the cells. Thus, an R gene introduced into such cells will cause the expression of a red pigment and, if stably incorporated, can be visually scored as a red sector. If a maize line is carries dominant □ultila for genes encoding the enzymatic intermediates in the anthocyanin biosynthetic pathway (C2, A1, A2, Bz1 and Bz2), but carries a recessive allele at the R locus, transformation of any cell from that line with R will result in red pigment formation. Exemplary lines include Wisconsin 22 which contains the rg-Stadler allele and TR112, a K55 derivative which is r-g, b, P1. Alternatively any genotype of maize can be utilized if the C1 and R alleles are introduced together.

[0343] It is further proposed that R gene regulatory regions may be employed in chimeric constructs in order to provide mechanisms for controlling the expression of chimeric genes. More diversity of phenotypic expression is known at the R locus than at any other locus (Coe et al., 1988). It is contemplated that regulatory regions obtained from regions 5′ to the structural R gene would be valuable in directing the expression of genes, e.g., insect resistance, drought resistance, herbicide tolerance or other protein coding regions. For the purposes of the present invention, it is believed that any of the various R gene family members may be successfully employed (e.g., P, S, Lc, etc.). However, the most preferred will generally be Sn (particularly Sn:bol3). Sn is a dominant member of the R gene complex and is functionally similar to the R and B loci in that Sn controls the tissue specific deposition of anthocyanin pigments in certain seedling and plant cells, therefore, its phenotype is similar to R.

[0344] A further screenable marker contemplated for use in the present invention is firefly luciferase, encoded by the lux gene. The presence of the lux gene in transformed cells may be detected using, for example, X-ray film, scintillation counting, fluorescent spectrophotometry, low-light video cameras, photon counting cameras or multiwell luminometry. It is also envisioned that this system may be developed for populational screening for bioluminescence, such as on tissue culture plates, or even for whole plant screening. Where use of a screenable marker gene such as lux or GFP is desired, benefit may be realized by creating a gene fusion between the screenable marker gene and a selectable marker gene, for example, a GFP-NPTII gene fusion. This could allow, for example, selection of transformed cells followed by screening of transgenic plants or seeds.

[0345] 1. C. Exemplary DNA Molecules

[0346] The invention provides an isolated nucleic acid molecule, e.g., DNA or RNA, comprising a plant nucleotide sequence comprising an open reading frame that is preferentially expressed in a specific plant tissue, i.e., in seeds, roots, green tissue (leaf and stem), panicles or pollen, or is expressed constitutively, or a promoter thereof.

[0347] In one specific embodiment the invention provides an isolated nucleic acid molecule, e.g., DNA or RNA, comprising a plant nucleotide sequence comprising an open reading frame that is preferentially expressed in a specific plant tissue, i.e., in seeds, roots, green tissue (leaf and stem), panicles or pollen and which is substantially similar, and preferably has at least 70%, e.g., 71%, 72%, 73%, 74%, 75%, 76%, 77%, 78%, 79%, 80%, 81%, 82%, 83%, 84%, 85%, 86%, 87%, 88%, 89%, and even 90% or more, e.g., 91%, 92%, 93%, 94%, 95%, 96%, 97%, 98%, and 99%, nucleic acid sequence identity, to an open reading frame expressed in

[0348] (i) a seed-specific manner, e.g., one of SEQ ID NOs:1020-1597, 5927, 5940, 5941, 5945-5958;

[0349] (ii) a root-specific manner, e.g., one of SEQ ID NOs:801-1019;

[0350] (iii) a green tissue (leaf and stem)-specific manner, e.g., one of SEQ ID NOs:399-464;

[0351] (iv) a panicle-specific manner, e.g., one of SEQ ID NOs:465-720; or

[0352] (v) a pollen-specific manner, e.g., one of SEQ ID NOs:721-800;

[0353] or the complement thereof.

[0354] In another embodiment the invention provides an isolated nucleic acid molecule, e.g., DNA or RNA, comprising a plant nucleotide sequence comprising an open reading frame that is constitutively expressed and which is substantially similar, and preferably has at least 70%, e.g., 71%, 72%, 73%, 74%, 75%, 76%, 77%, 78%, 79%, 80%, 81%, 82%, 83%, 84%, 85%, 86%, 87%, 88%, 89%, and even 90% or more, e.g., 91%, 92%, 93%, 94%, 95%, 96%, 97%, 98%, and 99%, nucleic acid sequence identity, to a constitutively expressed open reading frame, which comprises one of SEQ ID NOs:1-398 and 5928 -5939 or the complement thereof.

[0355] In another embodiment, the invention provides an isolated nucleic acid molecule comprising a promoter which is preferentially expressed in a specific plant tissue, i.e., in seeds, roots, green tissue (leaf and stem), panicles or pollen and which is substantially similar, and preferably has at least 70%, e.g., 71%, 72%, 73%, 74%, 75%, 76%, 77%, 78%, 79%, 80%, 81%, 82%, 83%, 84%, 85%, 86%, 87%, 88%, 89%, and even 90% or more, e.g., 91%, 92%, 93%, 94%, 95%, 96%, 97%, 98%, and 99%, nucleic acid sequence identity, to a gene comprising a promoter listed in

[0356] (i) SEQ ID NOs:2275-2672, 5959, 5972, 5973, 5977-5990 and 6001 (e.g., including a promoter obtained or obtainable from any one of SEQ ID NOs:2275-2672, 5959, 5972, 5973, 5977-5990 and 6001) which directs seed-specific transcription of a linked nucleic acid segment;

[0357] (ii) SEQ ID NOs:2144-2274 (e.g., including a promoter obtained or obtainable from any one of SEQ ID NOs:2144-2274) which directs root-specific transcription of a linked nucleic acid segment;

[0358] (iii) SEQ ID NOs:1886-1918 (e.g., including a promoter obtained or obtainable from any one of SEQ ID NOs:1886-1918) which directs green tissue (leaf and stem)-specific transcription of a linked nucleic acid segment;

[0359] (iv) SEQ ID NOs:1919-2085 (e.g., including a promoter obtained or obtainable from any one of SEQ ID NOs:1919-2085) which directs panicle-specific transcription of a linked nucleic acid segment;

[0360] (v) SEQ ID NOs:2086-2143 (e.g., including a promoter obtained or obtainable from any one of SEQ ID NOs:2086-2143) which directs pollen-specific transcription of a linked nucleic acid segment.

[0361] In yet another embodiment, the invention provides an isolated nucleic acid molecule comprising a promoter constitutively expressed and which is substantially similar, and preferably has at least 70%, e.g., 71%, 72%, 73%, 74%, 75%, 76%, 77%, 78%, 79%, 80%, 81%, 82%, 83%, 84%, 85%, 86%, 87%, 88%, 89%, and even 90% or more, e.g., 91%, 92%, 93%, 94%, 95%, 96%, 97%, 98%, and 99%, nucleic acid sequence identity, to a gene comprising a promoter listed in

[0362] (vi) SEQ ID NOs:1598-1885 and 5960-5971 (e.g., including a promoter obtained or obtainable from anyone of SEQ ID NOs:1598-1885 and 5960-5971, respectively) which directs constitutve transcription of a linked nucleic acid segment.

[0363] The present invention further provides a composition, an expression cassette or a recombinant vector containing the nucleic acid molecule of the invention, and host cells comprising the expression cassette or vector, e.g., comprising a plasmid. In particular, the present invention provides an expression cassette or a recombinant vector comprising a promoter linked to a nucleic acid segment comprising an open reading frame according to the invention which, when present in a plant, plant cell or plant tissue, results in transcription of the linked nucleic acid segment. Further, the invention provides isolated polypeptides encoded by any one of the open reading frames comprising SEQ ID NOs:1-1597, 5927, 5940, 5941, 5945-5958, or the orthologs thereof, e.g., an open reading frame comprising one of SEQ ID NOs:2673-5926.

[0364] The choice of promoter directing expression of a nucleic acid segment comprising an open reading frame according to the invention will vary depending on the temporal and spatial requirements for expression, and also depending on the target species. In some cases, expression in multiple tissues is desirable. While in others, tissue-specific, e.g., seed-specific, expression is desirable. Although many promoters from dicotyledons have been shown to be operational in monocotyledons and vice versa, ideally dicotyledonous promoters are selected for expression in dicotyledons, and monocotyledonous promoters for expression in monocotyledons. However, there is no restriction to the provenance of selected promoters; it is sufficient that they are operational in driving the expression of the nucleotide sequences in the desired cell.

[0365] These promoters include, but are not limited to, constitutive, inducible, temporally regulated, developmentally regulated, spatially-regulated, chemically regulated, stress-responsive, tissue-specific, viral and synthetic promoters. Promoter sequences are known to be strong or weak. A strong promoter provides for a high level of gene expression, whereas a weak promoter provides for a very low level of gene expression. An inducible promoter is a promoter that provides for the turning on and off of gene expression in response to an exogenously added agent, or to an environmental or developmental stimulus. A bacterial promoter such as the P_{tac} promoter can be induced to varying levels of gene expression depending on the level of isothiopropylgalactoside added to the transformed bacterial cells. An isolated promoter sequence that is a strong promoter for heterologous nucleic acid is advantageous because it provides for a sufficient level of gene expression to allow for easy detection and selection of transformed cells and provides for a high level of gene expression when desired.

[0366] Within a plant promoter region there are several domains that are necessary for full function of the promoter. The first of these domains lies immediately upstream of the structural gene and forms the “core promoter region” containing consensus sequences, normally 70 base pairs immediately upstream of the gene. The core promoter region contains the characteristic CAAT and TATA boxes plus surrounding sequences, and represents a transcription initiation sequence that defines the transcription start point for the structural gene.

[0367] The presence of the core promoter region defines a sequence as being a promoter: if the region is absent, the promoter is non-functional. Furthermore, the core promoter region is insufficient to provide full promoter activity. A series of regulatory sequences upstream of the core constitute the remainder of the promoter. The regulatory sequences determine expression level, the spatial and temporal pattern of expression and, for an important subset of promoters, expression under inductive conditions (regulation by external factors such as light, temperature, chemicals, hormones).

[0368] A range of naturally-occurring promoters are known to be operative in plants and have been used to drive the expression of heterologous (both foreign and endogenous) genes in plants: for example, the constitutive 35S cauliflower mosaic virus (CaMV) promoter, the ripening-enhanced tomato polygalacturonase promoter (Bird et al., 1988), the E8 promoter (Diekman & Fischer, 1988) and the fruit specific 2A1 promoter (Pear et al., 1989) and many others, e.g., U2 and U5 snRNA promoters from maize, the promoter from alcohol dehydrogenase, the Z4 promoter from a gene encoding the Z4 22 kD zein protein, the Z10 promoter from a gene encoding a 10 kD zein protein, a Z27 promoter from a gene encoding a 27 kD zein protein, the A20 promoter from the gene encoding a 19 kD-zein protein, inducible promoters, such as the light inducible promoter derived from the pea rbcS gene and the actin promoter from rice, e.g., the actin 2 promoter (WO 00/70067); seed specific promoters, such as the phaseolin promoter from beans, may also be used. The nucleotide sequences of this invention can also be expressed under the regulation of promoters that are chemically regulated. This enables the nucleic acid sequence or encoded polypeptide to be synthesized only when the crop plants are treated with the inducing chemicals. Chemical induction of gene expression is detailed in EP 0 332 104 (to Ciba-Geigy) and U.S. Pat. No. 5,614,395. A preferred promoter for chemical induction is the tobacco PR-1a promoter.

[0369] Examples of some constitutive promoters which have been described include the rice actin 1 (Wang et al., 1992; U.S. Pat. No. 5,641,876), CaMV 35S (Odell et al., 1985), CaMV 19S (Lawton et al., 1987), nos, Adh, sucrose synthase; and the ubiquitin promoters.

[0370] Examples of tissue specific promoters which have been described include the lectin (Vodkin, 1983; Lindstrom et al., 1990) corn alcohol dehydrogenase 1 (Vogel et al., 1989; Dennis et al., 1984), corn light harvesting complex (Simpson, 1986; Bansal et al., 1992), corn heat shock protein (Odell et al., 1985), pea small subunit RuBP carboxylase (Poulsen et al., 1986), Ti plasmid mannopine synthase (Langridge et al., 1989), Ti plasmid nopaline synthase (Langridge et al., 1989), petunia chalcone isomerase (vanTunen et al., 1988), bean glycine rich protein 1 (Keller et al., 1989), truncated CaMV 35s (Odell et al., 1985), potato patatin (Wenzler et al., 1989), root cell (Yamamoto et al., 1990), maize zein (Reina et al., 1990; Kriz et al., 1987; Wandelt et al., 1989; Langridge et al., 1983; Reina et al., 1990), globulin-1 (Belanger et al., 1991), α-tubulin, cab (Sullivan et al., 1989), PEPCase (Hudspeth & Grula, 1989), R gene complex-associated promoters (Chandler et al., 1989), histone, and chalcone synthase promoters (Franken et al., 1991). Tissue specific enhancers are described in Fromm et al. (1989).

[0371] Inducible promoters that have been described include the ABA- and turgor-inducible promoters, the promoter of the auxin-binding protein gene (Schwob et al., 1993), the UDP glucose flavonoid glycosyl-transferase gene promoter (Ralston et al., 1988), the MPI proteinase inhibitor promoter (Cordero et al., 1994), and the glyceraldehyde-3-phosphate dehydrogenase gene promoter (Kohler et al., 1995; Quigley et al., 1989; Martinez et al., 1989).

[0372] Several other tissue-specific regulated genes and/or promoters have been reported in plants. These include genes encoding the seed storage proteins (such as napin, cruciferin, beta-conglycinin, and phaseolin) zein or oil body proteins (such as oleosin), or genes involved in fatty acid biosynthesis (including acyl carrier protein, stearoyl-ACP desaturase. And fatty acid desaturases (fad 2-1)), and other genes expressed during embryo development (such as Bce4, see, for example, EP 255378 and Kridl et al., 1991). Particularly useful for seed-specific expression is the pea vicilin promoter (Czako et al., 1992). (See also U.S. Pat. No. 5,625,136, herein incorporated by reference.) Other useful promoters for expression in mature leaves are those that are switched on at the onset of senescence, such as the SAG promoter from Arabidopsis (Gan et al., 1995).

[0373] A class of fruit-specific promoters expressed at or during antithesis through fruit development, at least until the beginning of ripening, is discussed in U.S. Pat. No. 4,943,674. cDNA clones that are preferentially expressed in cotton fiber have been isolated (John et al., 1992). cDNA clones from tomato displaying differential expression during fruit development have been isolated and characterized (Mansson et al., 1985, Slater et al., 1985). The promoter for polygalacturonase gene is active in fruit ripening. The polygalacturonase gene is described in U.S. Pat. No. 4,535,060, U.S. Pat. No. 4,769,061, U.S. Pat. No. 4,801,590, and U.S. Pat. No. 5,107,065, which disclosures are incorporated herein by reference.

[0374] Other examples of tissue-specific promoters include those that direct expression in leaf cells following damage to the leaf (for example, from chewing insects), in tubers (for example, patatin gene promoter), and in fiber cells (an example of a developmentally-regulated fiber cell protein is E6 (John et al., 1992). The E6 gene is most active in fiber, although low levels of transcripts are found in leaf, ovule and flower.

[0375] The tissue-specificity of some “tissue-specific” promoters may not be absolute and may be tested by one skilled in the art using the diphtheria toxin sequence. One can also achieve tissue-specific expression with “leaky” expression by a combination of different tissue-specific promoters (Beals et al., 1997). Other tissue-specific promoters can be isolated by one skilled in the art (see U.S. Pat. No. 5,589,379). Several inducible promoters (“gene switches”) have been reported. Many are described in the review by Gatz (1996) and Gatz (1997). These include tetracycline repressor system, Lac repressor system, copper-inducible systems, salicylate-inducible systems (such as the PR1a system), glucocorticoid-(Aoyama et al., 1997) and ecdysome-inducible systems. Also included are the benzene sulphonamide-(U.S. Pat. No. 5,364,780) and alcohol-(WO 97/06269 and WO 97/06268) inducible systems and glutathione S-transferase promoters. Other studies have focused on genes inducibly regulated in response to environmental stress or stimuli such as increased salinity. Drought, pathogen and wounding. (Graham et al., 1985; Graham et al., 1985, Smith et al., 1986). Accumulation of metallocarboxypeptidase-inhibitor protein has been reported in leaves of wounded potato plants (Graham et al., 1981). Other plant genes have been reported to be induced methyl jasmonate, elicitors, heat-shock, anaerobic stress, or herbicide safeners.

[0376] Regulated expression of the chimeric transacting viral replication protein can be further regulated by other genetic strategies. For example, Cre-mediated gene activation as described by Odell et al. 1990. Thus, a DNA fragment containing 3′ regulatory sequence bound by lox sites between the promoter and the replication protein coding sequence that blocks the expression of a chimeric replication gene from the promoter can be removed by Cre-mediated excision and result in the expression of the trans-acting replication gene. In this case, the chimeric Cre gene, the chimeric trans-acting replication gene, or both can be under the control of tissue- and developmental-specific or inducible promoters. An alternate genetic strategy is the use of tRNA suppressor gene. For example, the regulated expression of a tRNA suppressor gene can conditionally control expression of a trans-acting replication protein coding sequence containing an appropriate termination codon as described by Ulmasov et al. 1997. Again, either the chimeric tRNA suppressor gene, the chimeric transacting replication gene, or both can be under the control of tissue- and developmental-specific or inducible promoters.

[0377] Frequently it is desirable to have continuous or inducible expression of a DNA sequence throughout the cells of an organism in a tissue-independent manner. For example, increased resistance of a plant t6 infection by soil- and airborne-pathogens might be accomplished by genetic manipulation of the plant's genome to comprise a continuous promoter operably linked to a heterologous pathogen-resistance gene such that pathogen-resistance proteins are continuously expressed throughout the plant's tissues.

[0378] Alternatively, it might be desirable to inhibit expression of a native DNA sequence within a plant's tissues to achieve a desired phenotype. In this case, such inhibition might be accomplished with transformation of the plant to comprise a constitutive, tissue-independent promoter operably linked to an antisense nucleotide sequence, such that constitutive expression of the antisense sequence produces an RNA transcript that interferes with translation of the mRNA of the native DNA sequence.

[0379] To define a minimal promoter region, a DNA segment representing the promoter region is removed from the 5′ region of the gene of interest and operably linked to the coding sequence of a marker (reporter) gene by recombinant DNA techniques well known to the art. The reporter gene is operably linked downstream of the promoter, so that transcripts initiating at the promoter proceed through the reporter gene. Reporter genes generally encode proteins which are easily measured, including, but not limited to, chloramphenicol acetyl transferase (CAT), beta-glucuronidase (GUS), green fluorescent protein (GFP), beta-galactosidase (beta-GAL), and luciferase.

[0380] The construct containing the reporter gene under the control of the promoter is then introduced into an appropriate cell type by transfection techniques well known to the art. To assay for the reporter protein, cell lysates are prepared and appropriate assays, which are well known in the art, for the reporter protein are performed. For example, if CAT were the reporter gene of choice, the lysates from cells transfected with constructs containing CAT under the control of a promoter under study are mixed with isotopically labeled chloramphenicol and acetyl-coenzyme A (acetyl-CoA). The CAT enzyme transfers the acetyl group from acetyl-CoA to the 2- or 3-position of chloramphenicol. The reaction is monitored by thin-layer chromatography, which separates acetylated chloramphenicol from unreacted material. The reaction products are then visualized by autoradiography.

[0381] The level of enzyme activity corresponds to the amount of enzyme that was made, which in turn reveals the level of expression from the promoter of interest. This level of expression can be compared to other promoters to determine the relative strength of the promoter under study. In order to be sure that the level of expression is determined by the promoter, rather than by the stability of the mRNA, the level of the reporter mRNA can be measured directly, such as by Northern blot analysis.

[0382] Once activity is detected, mutational and/or deletional analyses may be employed to determine the minimal region and/or sequences required to initiate transcription. Thus, sequences can be deleted at the 5′ end of the promoter region and/or at the 3′ end of the promoter region, and nucleotide substitutions introduced. These constructs are then introduced to cells and their activity determined.

[0383] In one embodiment, the promoter may be a gamma zein promoter, an oleosin ole16 promoter, a globulins promoter, an actin I promoter, an actin cl promoter, a sucrose synthetase promoter, an INOPS promoter, an EXM5 promoter, a globulin2 promoter, a b-32, ADPG-pyrophosphorylase promoter, an LtpI promoter, an Ltp2 promoter, an oleosin ole17 promoter, an oleosin ole18 promoter, an actin 2 promoter, a pollen-specific protein promoter, a pollen-specific pectate lyase promoter, an anther-specific protein promoter, an anther-specific gene RTS2 promoter, a pollen-specific gene promoter, a tapeturn-specific gene promoter, tapeturn-specific gene RAB24 promoter, a anthranilate synthase alpha subunit promoter, an alpha zein promoter, an anthranilate synthase beta subunit promoter, a dihydrodipicolinate synthase promoter, a Thil promoter, an alcohol dehydrogenase promoter, a cab binding protein promoter, an H3C4 promoter, a RUBISCO SS starch branching enzyme promoter, an ACCase promoter, an actin3 promoter, an actin7 promoter, a regulatory protein GF14-12 promoter, a ribosomal protein L9 promoter, a cellulose biosynthetic enzyme promoter, an S-adenosyl-L-homocysteine hydrolase promoter, a superoxide dismutase promoter, a C-kinase receptor promoter, a phosphoglycerate mutase promoter, a root-specific RCc3 mRNA promoter, a glucose-6 phosphate isomerase promoter, a pyrophosphate-fructose 6-phosphatelphosphotransferase promoter, an ubiquitin promoter, a beta-ketoacyl-ACP synthase promoter, a 33 kDa photosystem 11 promoter, an oxygen evolving protein promoter, a 69 kDa vacuolar ATPase subunit promoter, a metallothionein-like protein promoter, a glyceraldehyde-3-phosphate dehydrogenase promoter, an ABA- and ripening-inducible-like protein promoter, a phenylalanine ammonia lyase promoter, an adenosine triphosphatase S-adenosyl-L-homocysteine hydrolase promoter, an a-tubulin promoter, a cab promoter, a PEPCase promoter, an R gene promoter, a lectin promoter, a light harvesting complex promoter, a heat shock protein promoter, a chalcone synthase promoter, a zein promoter, a globulin-1 promoter, an ABA promoter, an auxin-binding protein promoter, a UDP glucose flavonoid glycosyl-transferase gene promoter, an NTI promoter, an actin promoter, an opaque 2 promoter, a b70 promoter, an oleosin promoter, a CaMV 35S promoter, a CaMV 19S promoter, a histone promoter, a turgor-inducible promoter, a pea small subunit RuBP carboxylase promoter, a Ti plasmid mannopine synthase promoter, Ti plasmid nopaline synthase promoter, a petunia chalcone isomerase promoter, a bean glycine rich protein I promoter, a CaMV 35S transcript promoter, a potato patatin promoter, or a S-E9 small subunit RuBP carboxylase promoter.

### (a) III. Transformed (Transgenic) Plants of the Invention and Methods of Preparation

[0384] Plant species may be transformed with the DNA construct of the present invention by the DNA-mediated transformation of plant cell protoplasts and subsequent regeneration of the plant from the transformed protoplasts in accordance with procedures well known in the art.

[0385] Any plant tissue capable of subsequent clonal propagation, whether by organogenesis or embryogenesis, may be transformed with a vector of the present invention. The term “organogenesis,” as used herein, means a process by which shoots and roots are developed sequentially from meristematic centers; the term “embryogenesis,” as used herein, means a process by which shoots and roots develop together in a concerted fashion (not sequentially), whether from somatic cells or gametes. The particular tissue chosen will vary depending on the clonal propagation systems available for, and best suited to, the particular species being transformed. Exemplary tissue targets include leaf disks, pollen, embryos, cotyledons, hypocotyls, megagametophytes, callus tissue, existing meristematic tissue (e.g., apical meristems, axillary buds, and root meristems), and induced meristem tissue (e.g., cotyledon meristem and ultilane meristem).

[0386] Plants of the present invention may take a variety of forms. The plants may be chimeras of transformed cells and non-transformed cells; the plants may be clonal transformants (e.g., all cells transformed to contain the expression cassette); the plants may comprise grafts of transformed and untransformed tissues (e.g., a transformed root stock grafted to an untransformed scion in citrus species). The transformed plants may be propagated by a variety of means, such as by clonal propagation or classical breeding techniques. For example, first generation (or T1) transformed plants may be selfed to give homozygous second generation (or T2) transformed plants, and the T2 plants further propagated through classical breeding techniques. A dominant selectable marker (such as npt II) can be associated with the expression cassette to assist in breeding.

[0387] Thus, the present invention provides a transformed (transgenic) plant cell, in planta or ex planta, including a transformed plastid or other organelle, e.g., nucleus, mitochondria or chloroplast. The present invention may be used for transformation of any plant species, including, but not limited to, cells from corn (Zea mays), Brassica sp. (e.g., B. napus, B. rapa, B. juncea), particularly those Brassica species useful as sources of seed oil, alfalfa (Medicago sativa), rice (Oryza sativa), rye (Secale cereale), sorghum (Sorghum bicolor, Sorghum vulgare), millet (e.g., pearl millet (Pennisetum glaucum), proso millet (Panicum miliaceum), foxtail millet (Setaria italica), finger millet (Eleusine coracana)), sunflower (Helianthus annuus), safflower (Carthamus tinctorius), wheat (Triticum aestivum), soybean (Glycine max), tobacco (Nicotiana tabacum), potato (Solanum tuberosum), peanuts (Arachis hypogaea), cotton (Gossypium barbadense, Gossypium hirsutum), sweet potato (Ipomoea batatus), cassava (Manihot esculenta), coffee (Cofea spp.), coconut (Cocos nucifera), pineapple (Ananas comosus), citrus trees (Citrus spp.), cocoa (Theobroma cacao), tea (Camellia sinensis), banana (Musa spp.), avocado (Persea ultilane), fig (Ficus casica), guava (Psidium guajava), mango (Mangifera indica), olive (Olea europaea), papaya (Carica papaya),, cashew (Anacardium occidentale), macadamia (Macadamia integrifolia), almond (Prunus amygdalus), sugar beets (Beta vulgaris), sugarcane (Saccharum spp.), oats, duckweed (Lemna), barley, vegetables, ornamentals, and conifers.

[0388] Duckweed (Lemna, see WO 00/07210) includes members of the family Lemnaceae. There are known four genera and 34 species of duckweed as follows: genus Lemna (L. aequinoctialis, L. disperma, L. ecuadoriensis, L. gibba, L. japonica, L. minor, L. miniscula, L. obscura, L. perpusilla, L. tenera, L. trisulca, L. turionifera, L. valdiviana); genus Spirodela (S. intermedia, S. polyrrhiza, S. punctata); genus Woffia (Wa. Angusta, Wa. Arrhiza, Wa. Australina, Wa. Borealis, Wa. Brasiliensis, Wa. Columbiana, Wa. Elongata, Wa. Globosa, Wa. Microscopica, Wa. Neglecta) and genus Wofiella (Wl. ultila, Wl. ultilanen, Wl. gladiata, Wl. ultila, Wl. lingulata, Wl. repunda, Wl. rotunda, and Wl. neotropica). Any other genera or species of Lemnaceae, if they exist, are also aspects of the present invention. Lemna gibba, Lemna minor, and Lemna miniscula are preferred, with Lemna minor and Lemna miniscula being most preferred. Lemna species can be classified using the taxonomic scheme described by Landolt, Biosystematic Investigation on the Family of Duckweeds: The family of Lemnaceae—A Monograph Study. Geobatanischen Institut ETH, Stiftung Rubel, Zurich (1986)).

[0389] Vegetables within the scope of the invention include tomatoes (Lycopersicon esculentum), lettuce (e.g., Lactuca sativa), green beans (Phaseolus vulgaris), lima beans (Phaseolus limensis), peas (Lathyrus spp.), and members of the genus Cucumis such as cucumber (C. sativus), cantaloupe (C. cantalupensis), and musk melon (C. melo). Ornamentals include azalea (Rhododendron spp.), hydrangea (Macrophylla hydrangea), hibiscus (Hibiscus rosasanensis), roses (Rosa spp.), tulips (Tulipa spp.), daffodils (Narcissus spp.), petunias (Petunia hybrida), carnation (Dianthus caryophyllus), poinsettia (Euphorbia pulcherrima), and chrysanthemum. Conifers that may be employed in practicing the present invention include, for example, pines such as loblolly pine (Pinus taeda), slash pine (Pinus elliotii), ponderosa pine (Pinus ponderosa), lodgepole pine (Pinus contorta), and Monterey pine (Pinus radiata), Douglas-fir (Pseudotsuga menziesii); Western hemlock (Tsuga ultilane); Sitka spruce (Picea glauca); redwood (Sequoia sempervirens); true firs such as silver fir (Abies amabilis) and balsam fir (Abies balsamea); and cedars such as Western red cedar (Thuja plicata) and Alaska yellow-cedar (Chamaecyparis nootkatensis). Leguminous plants include beans and peas. Beans include guar, locust bean, fenugreek, soybean, garden beans, cowpea, mungbean, lima bean, fava bean, lentils, chickpea, etc. Legumes include, but are not limited to, Arachis, e.g., peanuts, Vicia, e.g., crown vetch, hairy vetch, adzuki bean, mung bean, and chickpea, Lupinus, e.g., lupine, trifolium, Phaseolus, e.g., common bean and lima bean, Pisum, e.g., field bean, Melilotus, e.g., clover, Medicago, e.g., alfalfa, Lotus, e.g., trefoil, lens, e.g., lentil, and false indigo. Preferred forage and turf grass for use in the methods of the invention include alfalfa, orchard grass, tall fescue, perennial ryegrass, creeping bent grass, and redtop.

[0390] Other plants within the scope of the invention include Acacia, aneth, artichoke, arugula, blackberry, canola, cilantro, clementines, escarole, eucalyptus, fennel, grapefruit, honey dew, jicama, kiwifruit, lemon, lime, mushroom, nut, okra, orange, parsley, persimmon, plantain, pomegranate, poplar, radiata pine, radicchio, Southern pine, sweetgum, tangerine, triticale, vine, yams, apple, pear, quince, cherry, apricot, melon, hemp, buckwheat, grape, raspberry, chenopodium, blueberry, nectarine, peach, plum, strawberry, watermelon, eggplant, pepper, cauliflower, Brassica, e.g., broccoli, cabbage, ultilan sprouts, onion, carrot, leek, beet, broad bean, celery, radish, pumpkin, endive, gourd, garlic, snapbean, spinach, squash, turnip, ultilane, and zucchini.

[0391] Ornamental plants within the scope of the invention include impatiens, Begonia, Pelargonium, Viola, Cyclamen, Verbena, Vinca, Tagetes, Primula, Saint Paulia, Agertum, Amaranthus, Antihirrhinum, Aquilegia, Cineraria, Clover, Cosmo, Cowpea, Dahlia, Datura, Delphinium, Gerbera, Gladiolus, Gloxinia, Hippeastrum, Mesembryanthemum, Salpiglossos, and Zinnia. Other plants within the scope of the invention are shown in Table 1 (above).

[0392] Preferably, transgenic plants of the present invention are crop plants and in particular cereals (for example, corn, alfalfa, sunflower, rice, Brassica, canola, soybean, barley, soybean, sugarbeet, cotton, safflower, peanut, sorghum, wheat, millet, tobacco, etc.), and even more preferably corn, rice and soybean.

[0393] Transformation of plants can be undertaken with a single DNA molecule or multiple DNA molecules (i.e., co-transformation), and both these techniques are suitable for use with the expression cassettes of the present invention. Numerous transformation vectors are available for plant transformation, and the expression cassettes of this invention can be used in conjunction with any such vectors. The selection of vector will depend upon the preferred transformation technique and the target species for transformation.

[0394] A variety of techniques are available and known to those skilled in the art for introduction of constructs into a plant cell host. These techniques generally include transformation with DNA employing A. tumefaciens or A. rhizogenes as the transforming agent, liposomes, PEG precipitation, electroporation, DNA injection, direct DNA uptake, microprojectile bombardment, particle acceleration, and the like (See, for example, EP 295959 and EP 138341) (see below). However, cells other than plant cells may be transformed with the expression cassettes of the invention. The general descriptions of plant expression vectors and reporter genes, and Agrobacterium and Agrobacterium-mediated gene transfer, can be found in Gruber et al. (1993).

[0395] Expression vectors containing genomic or synthetic fragments can be introduced into protoplasts or into intact tissues or isolated cells. Preferably expression vectors are introduced into intact tissue. General methods of culturing plant tissues are provided for example by Maki et al., (1993); and by Phillips et al. (1988). Preferably, expression vectors are introduced into maize or other plant tissues using a direct gene transfer method such as microprojectile-mediated delivery, DNA injection, electroporation and the like. More preferably expression vectors are introduced into plant tissues using the microprojectile media delivery with the biolistic device. See, for example, Tomes et al. (1995). The vectors of the invention can not only be used for expression of structural genes but may also be used in exon-trap cloning, or promoter trap procedures to detect differential gene expression in varieties of tissues, (Lindsey et al., 1993; Auch & Reth et al.).

[0396] It is particularly preferred to use the binary type vectors of Ti and Ri plasmids of Agrobacterium spp. Ti-derived vectors transform a wide variety of higher plants, including monocotyledonous and dicotyledonous plants, such as soybean, cotton, rape, tobacco, and rice (Pacciotti et al., 1985: Byrne et al., 1987; Sukhapinda et al., 1987; Lorz et al., 1985; Potrykus, 1985; Park et al., 1985: Hiei et al., 1994). The use of T-DNA to transform plant cells has received extensive study and is amply described (EP 120516; Hoekema, 1985; Knauf, et al., 1983; and An et al., 1985). For introduction into plants, the chimeric genes of the invention can be inserted into binary vectors as described in the examples.

[0397] Other transformation methods are available to those skilled in the art, such as direct uptake of foreign DNA constructs (see EP 295959), techniques of electroporation (Fromm et al., 1986) or high velocity ballistic bombardment with metal particles coated with the nucleic acid constructs (Kline et al., 1987, and U.S. Pat. No. 4,945,050). Once transformed, the cells can be regenerated by those skilled in the art. Of particular relevance are the recently described methods to transform foreign genes into commercially important crops, such as rapeseed (De Block et al., 1989), sunflower (Everett et al., 1987), soybean (McCabe et al., 1988; Hinchee et al., 1988; Chee et al., 1989; Christou et al., 1989; EP 301749), rice (Hiei et al., 1994), and corn (Gordon Kamm et al., 1990; Fromm et al., 1990).

[0398] Those skilled in the art will appreciate that the choice of method might depend on the type of plant, i.e., monocotyledonous or dicotyledonous, targeted for transformation. Suitable methods of transforming plant cells include, but are not limited to, microinjection (Crossway et al., 1986), electroporation (Riggs et al., 1986), Agrobacterium-mediated transformation (Hinchee et al., 1988), direct gene transfer (Paszkowski et al., 1984), and ballistic particle acceleration using devices available from Agracetus, Inc., Madison, Wis. And BioRad, Hercules, Calif. (see, for example, Sanford et al., U.S. Pat. No. 4,945,050; and McCabe et al., 1988). Also see, Weissinger et al., 1988; Sanford et al., 1987 (onion); Christou et al., 1988 (soybean); McCabe et al., 1988 (soybean); Datta et al., 1990 (rice); Klein et al., 1988 (maize); Klein et al., 1988 (maize); Klein et al., 1988 (maize); Fromm et al., 1990 (maize); and Gordon-Kamm et al., 1990 (maize); Svab et al., 1990 (tobacco chloroplast); Koziel et al., 1993 (maize); Shimamoto et al., 1989 (rice); Christou et al., 1991 (rice); European Patent Application EP 0 332 581 (orchardgrass and other Pooideae); Vasil et al., 1993 (wheat); Weeks et al., 1993 (wheat). In one embodiment, the protoplast transformation method for maize is employed (European Patent Application EP 0 292 435, U.S. Pat. No. 5,350,689).

[0399] In another embodiment, a nucleotide sequence of the present invention is directly transformed into the plastid genome. Plastid transformation technology is extensively described in U.S. Pat. Nos. 5,451,513, 5,545,817, and 5,545,818, in PCT application no. WO 95/16783, and in McBride et al., 1994. The basic technique for chloroplast transformation involves introducing regions of cloned plastid DNA flanking a selectable marker together with the gene of interest into a suitable target tissue, e.g., using biolistics or protoplast transformation (e.g., calcium chloride or PEG mediated transformation). The 1 to 1.5 kb flanking regions, termed targeting sequences, facilitate orthologous recombination with the plastid genome and thus allow the replacement or modification of specific regions of the plastome. Initially, point mutations in the chloroplast 16S rRNA and rps12 genes conferring resistance to spectinomycin and/or streptomycin are utilized as selectable markers for transformation (Svab et al., 1990; Staub et al., 1992). This resulted in stable homoplasmic transformants at a frequency of approximately one per 100 bombardments of target leaves. The presence of cloning sites between these markers allowed creation of a plastid targeting vector for introduction of foreign genes (Staub et al., 1993). Substantial increases in transformation frequency are obtained by replacement of the recessive rRNA or r-protein antibiotic resistance genes with a dominant selectable marker, the bacterial aadA gene encoding the spectinomycin-detoxifying enzyme aminoglycoside-3N-adenyltransferase (Svab et al., 1993). Other selectable markers useful for plastid transformation are known in the art and encompassed within the scope of the invention. Typically, approximately 15-20 cell division cycles following transformation are required to reach a homoplastidic state. Plastid expression, in which genes are inserted by orthologous recombination into all of the several thousand copies of the circular plastid genome present in each plant cell, takes advantage of the enormous copy number advantage over nuclear-expressed genes to permit expression levels that can readily exceed 10% of the total soluble plant protein. In a preferred embodiment, a nucleotide sequence of the present invention is inserted into a plastid targeting vector and transformed into the plastid genome of a desired plant host. Plants homoplastic for plastid genomes containing a nucleotide sequence of the present invention are obtained, and are preferentially capable of high expression of the nucleotide sequence.

[0400] Agrobacterium tumefaciens cells containing a vector comprising an expression cassette of the present invention, wherein the vector comprises a Ti plasmid, are useful in methods of making transformed plants. Plant cells are infected with an Agrobacterium tumefaciens as described above to produce a transformed plant cell, and then a plant is regenerated from the transformed plant cell. Numerous Agrobacterium vector systems useful in carrying out the present invention are known.

[0401] For example, vectors are available for transformation using Agrobacterium tumefaciens. These typically carry at least one T-DNA border sequence and include vectors such as pBIN19 (Bevan, 1984). In one preferred embodiment, the expression cassettes of the present invention may be inserted into either of the binary vectors pCIB200 and pCIB2001 for use with Agrobacterium. These vector cassettes for Agrobacterium-mediated transformation wear constructed in the following manner. PTJS75kan was created by NarI digestion of pTJS75 (Schmidhauser & Helinski, 1985) allowing excision of the tetracycline-resistance gene, followed by insertion of an AccI fragment from pUC4K carrying an NPTII (Messing & Vierra, 1982; Bevan et al., 1983; McBride et al., 1990). XhoI linkers were ligated to the EcoRV fragment of pCIB7 which contains the left and right T-DNA borders, a plant selectable nos/nptII chimeric gene and the pUC polylinker (Rothstein et al., 1987), and the XhoI-digested fragment was cloned into SalI-digested pTJS75kan to create pCIB200 (see also EP 0 332 104, example 19). pCIB200 contains the following unique polylinker restriction sites: EcoRI, SstI, KpnI, BglII, XbaI, and SalI. The plasmid pCIB2001 is a derivative of pCIB200 which was created by the insertion into the polylinker of additional restriction sites. Unique restriction sites in the polylinker of pCIB2001 are EcoRI, SstI, KpnI, BglII, XbaI, SalI, MluI, BclI, AvrII, ApaI, HpaI, and StuI. PCIB2001, in addition to containing these unique restriction sites also has plant and bacterial kanamycin selection, left and right T-DNA borders for Agrobacterium-mediated transformation, the RK2-derived trfA function for mobilization between E. coli and other hosts, and the OriT and OriV functions also from RK2. The pCIB2001 polylinker is suitable for the cloning of plant expression cassettes containing their own regulatory signals.

[0402] An additional vector useful for Agrobacterium-mediated transformation is the binary vector pCIB 10, which contains a gene encoding kanamycin resistance for selection in plants, T-DNA right and left border sequences and incorporates sequences from the wide host-range plasmid pRK252 allowing it to replicate in both E. coli and Agrobacterium. Its construction is described by Rothstein et al., 1987. Various derivatives of pCIB10 have been constructed which incorporate the gene for hygromycin B phosphotransferase described by Gritz et al., 1983. These derivatives enable selection of transgenic plant cells on hygromycin only (pCIB743), or hygromycin and kanamycin (pCIB715, pCIB717).

[0403] Methods using either a form of direct gene transfer or Agrobacterium-mediated transfer usually, but not necessarily, are undertaken with a selectable marker which may provide resistance to an antibiotic (e.g., kanamycin, hygromycin or methotrexate) or a herbicide (e.g., phosphinothricin). The choice of selectable marker for plant transformation is not, however, critical to the invention.

[0404] For certain plant species, different antibiotic or herbicide selection markers may be preferred. Selection markers used routinely in transformation include the nptII gene which confers resistance to kanamycin and related antibiotics (Messing & Vierra, 1982; Bevan et al., 1983), the bar gene which confers resistance to the herbicide phosphinothricin (White et al., 1990, Spencer et al., 1990), the hph gene which confers resistance to the antibiotic hygromycin (Blochinger & Diggelmann), and the dhfr gene, which confers resistance to methotrexate (Bourouis et al., 1983).

[0405] One such vector useful for direct gene transfer techniques in combination with selection by the herbicide Basta (or phosphinothricin) is pCIB3064. This vector is based on the plasmid pCIB246, which comprises the CaMV 35S promoter in operational fusion to the E. coli GUS gene and the CaMV 35S transcriptional terminator and is described in the PCT published application WO 93/07278, herein incorporated by reference. One gene useful for conferring resistance to phosphinothricin is the bar gene from Streptomyces viridochromogenes (Thompson et al., 1987). This vector is suitable for the cloning of plant expression cassettes containing their own regulatory signals.

[0406] An additional transformation vector is pSOG35 which utilizes the E. coli gene dihydrofolate reductase (DHFR) as a selectable marker conferring resistance to methotrexate. PCR was used to amplify the 35S promoter (about 800 bp), intron 6 from the maize Adh1 gene (about 550 bp) and 18 bp of the GUS untranslated leader sequence from pSOG10. A 250 bp fragment encoding the E. coli dihydrofolate reductase type II gene was also amplified by PCR and these two PCR fragments were assembled with a SacI-PstI fragment from pBI221 (Clontech) which comprised the pUC19 vector backbone and the nopaline synthase terminator. Assembly of these fragments generated pSOG19 which contains the 35S promoter in fusion with the intron 6 sequence, the GUS leader, the DHFR gene and the nopaline synthase terminator. Replacement of the GUS leader in pSOG 19 with the leader sequence from Maize Chlorotic Mottle Virus check (MCMV) generated the vector pSOG35. pSOG19 and pSOG35 carry the pUC-derived gene for ampicillin resistance and have HindIII, SphI, PstI and EcoRI sites available for the cloning of foreign sequences.

### (b) IV. Production and Characterization of Stably Transformed Plants

[0407] Transgenic plant cells are then placed in an appropriate selective medium for selection of transgenic cells which are then grown to callus. Shoots are grown from callus and plantlets generated from the shoot by growing in rooting medium. The various constructs normally will be joined to a marker for selection in plant cells. Conveniently, the marker may be resistance to a biocide (particularly an antibiotic, such as kanamycin, G418, bleomycin, hygromycin, chloramphenicol, herbicide, or the like). The particular marker used will allow for selection of transformed cells as compared to cells lacking the DNA which has been introduced. Components of DNA constructs including transcription cassettes of this invention may be prepared from sequences which are native (endogenous) or foreign (exogenous) to the host. By “foreign” it is meant that the sequence is not found in the wild-type host into which the construct is introduced. Heterologous constructs will contain at least one region which is not native to the gene from which the transcription-initiation-region is derived.

[0408] To confirm the presence of the transgenes in transgenic cells and plants, a variety of assays may be performed. Such assays include, for example, “molecular biological” assays well known to those of skill in the art, such as Southern and Northern blotting, in situ hybridization and nucleic acid-based amplification methods such as PCR or RT-PCR; “biochemical” assays, such as detecting the presence of a protein product, e.g., by immunological means (ELISAs and Western blots) or by enzymatic function; plant part assays, such as seed assays; and also, by analyzing the phenotype of the whole regenerated plant, e.g., for disease or pest resistance.

[0409] DNA may be isolated from cell lines or any plant parts to determine the presence of the preselected nucleic acid segment through the use of techniques well known to those skilled in the art. Note that intact sequences will not always be present, presumably due to rearrangement or deletion of sequences in the cell.

[0410] The presence of nucleic acid elements introduced through the methods of this invention may be determined by polymerase chain reaction (PCR). Using this technique discreet fragments of nucleic acid are amplified and detected by gel electrophoresis. This type of analysis permits one to determine whether a preselected nucleic acid segment is present in a stable transformant, but does not prove integration of the introduced preselected nucleic acid segment into the host cell genome. In addition, it is not possible using PCR techniques to determine whether transformants have exogenous genes introduced into different sites in the, genome, i.e., whether transformants are of independent origin. It is contemplated that using PCR techniques it would be possible to clone fragments of the host genomic DNA adjacent to an introduced preselected DNA segment.

[0411] Positive proof of DNA integration into the host genome and the independent identities of transformants may be determined using the technique of Southern hybridization. Using this technique specific DNA sequences that were introduced into the host genome and flanking host DNA sequences can be identified. Hence the Southern hybridization pattern of a given transformant serves as an identifying characteristic of that transformant. In addition it is possible through Southern hybridization to demonstrate the presence of introduced preselected DNA segments in high molecular weight DNA, i.e., confirm that the introduced preselected, DNA segment has been integrated into the host cell genome. The technique of Southern hybridization provides information that is obtained using PCR, e.g., the presence of a preselected DNA segment, but also demonstrates integration into the genome and characterizes each individual transformant.

[0412] It is contemplated that using the techniques of dot or slot blot hybridization which are modifications of Southern hybridization techniques one could obtain the same information that is derived from PCR, e.g., the presence of a preselected DNA segment.

[0413] Both PCR and Southern hybridization techniques can be used to demonstrate transmission of a preselected DNA segment to progeny. In most instances the characteristic Southern hybridization pattern for a given transformant will segregate in progeny as one or more Mendelian genes (Spencer et al., 1992); Laursen et al., 1994) indicating stable inheritance of the gene. The nonchimeric nature of the callus and the parental transformants (R₀) was suggested by germline transmission and the identical Southern blot hybridization patterns and intensities of the transforming DNA in callus, R₀ plants and R₁ progeny that segregated for the transformed gene.

[0414] Whereas DNA analysis techniques may be conducted using DNA isolated from any part of a plant, RNA may only be expressed in particular cells or tissue types and hence it will be necessary to prepare RNA for analysis from these tissues. PCR techniques may also be used for detection and quantitation of RNA produced from introduced preselected DNA segments. In this application of PCR it is first necessary to reverse transcribe RNA into DNA, using enzymes such as reverse transcriptase, and then through the use of conventional PCR techniques amplify the DNA. In most instances PCR techniques, while useful, will not demonstrate integrity of the RNA product. Further information about the nature of the RNA product may be obtained by Northern blotting. This technique will demonstrate the presence of an RNA species and give information about the integrity of that RNA. The presence or absence of an RNA species can also be determined using dot or slot blot Northern hybridizations. These techniques are modifications of Northern blotting and will only demonstrate the presence or absence of an RNA species.

[0415] While Southern blotting and PCR may be used to detect the preselected DNA segment in question, they do not provide information as to whether the preselected DNA segment is being expressed. Expression may be evaluated by specifically identifying the protein products of the introduced preselected DNA segments or evaluating the phenotypic changes brought about by their expression.

[0416] Assays for the production and identification of specific proteins may make use of physical-chemical, structural, functional, or other properties of the proteins. Unique physical-chemical or structural properties allow the proteins to be separated and identified by electrophoretic procedures, such as native or denaturing gel electrophoresis or isoelectric focusing, or by chromatographic techniques such as ion exchange or gel exclusion chromatography. The unique structures of individual proteins offer opportunities for use of specific antibodies to detect their presence in formats such as an ELISA assay. Combinations of approaches may be employed with even greater specificity such as Western blotting in which antibodies are used to locate individual gene products that have been separated by electrophoretic techniques. Additional techniques may be employed to absolutely confirm the identity of the product of interest such as evaluation by amino acid sequencing following purification. Although these are among the most commonly employed, other procedures may be additionally used.

[0417] Assay procedures may also be used to identify the expression of proteins by their functionality, especially the ability of enzymes to catalyze specific chemical reactions involving specific substrates and products. These reactions may be followed by providing and quantifying the loss of substrates or the generation of products of the reactions by physical or chemical procedures. Examples are as varied as the enzyme to be analyzed.

[0418] Very frequently the expression of a gene product is determined by evaluating the phenotypic results of its expression. These assays also may take many forms including but not limited to analyzing changes in the chemical composition, morphology, or physiological properties of the plant. Morphological changes may include greater stature or thicker stalks. Most often changes in response of plants or plant parts to imposed treatments are evaluated under carefully controlled conditions termed bioassays.

### (c) V. Uses of Transgenic Plants

[0419] Once an expression cassette of the invention has been transformed into a particular plant species, it may be propagated in that species or moved into other varieties of the same species, particularly including commercial varieties, using traditional breeding techniques. Particularly preferred plants of the invention include the agronomically important crops listed above. The genetic properties engineered into the transgenic seeds and plants described above are passed on by sexual reproduction and can thus be maintained and propagated in progeny plants. The present invention also relates to a transgenic plant cell, tissue, organ, seed or plant part obtained from the transgenic plant. Also included within the invention are transgenic descendants of the plant as well as transgenic plant cells, tissues, organs, seeds and plant parts obtained from the descendants.

[0420] Preferably, the expression cassette in the transgenic plant is sexually transmitted. In one preferred embodiment, the coding sequence is sexually transmitted through a complete normal sexual cycle of the R0 plant to the R1 generation. Additionally preferred, the expression cassette is expressed in the cells, tissues, seeds or plant of a transgenic plant in an amount that is different than the amount in the cells, tissues, seeds or plant of a plant which only differs in that the expression cassette is absent.

[0421] The transgenic plants produced herein are thus expected to be useful for a variety of commercial and research purposes. Transgenic plants can be created for use in traditional agriculture to possess traits beneficial to the grower (e.g., agronomic traits such as resistance to water deficit, pest resistance, herbicide resistance or increased yield), beneficial to the consumer of the grain harvested from the plant (e.g., improved nutritive content in human food or animal feed; increased vitamin, amino acid, and antioxidant content; the production of antibodies (passive immunization) and nutriceuticals), or beneficial to the food processor (e.g., improved processing traits). In such uses, the plants are generally grown for the use of their grain in human or animal foods. Additionally, the use of root-specific promoters in transgenic plants can provide beneficial traits that are localized in the consumable (by animals and humans) roots of plants such as carrots, parsnips, and beets. However, other parts of the plants, including stalks, husks, vegetative parts, and the like, may also have utility, including use as part of animal silage or for ornamental purposes. Often, chemical constituents (e.g., oils or starches) of maize and other crops are extracted for foods or industrial use and transgenic plants may be created which have enhanced or modified levels of such components.

[0422] Transgenic plants may also find use in the commercial manufacture of proteins or other molecules, where the molecule of interest is extracted or purified from plant parts, seeds, and the like. Cells or tissue from the plants may also be cultured, grown in vitro, or fermented to manufacture such molecules.

[0423] The transgenic plants may also be used in commercial breeding programs, or may be crossed or bred to plants of related crop species. Improvements encoded by the expression cassette may be transferred, e.g., from maize cells to cells of other species, e.g., by protoplast fusion.

[0424] The transgenic plants may have many uses in research or breeding, including creation of new mutant plants through insertional mutagenesis, in order to identify beneficial mutants that might later be created by traditional mutation and selection. An example would be the introduction of a recombinant DNA sequence encoding a transposable element that may be used for generating genetic variation. The methods of the invention may also be used to create plants having unique “signature sequences” or other marker sequences which can be used to identify proprietary lines or varieties.

[0425] Thus, the transgenic plants and seeds according to the invention can be used in plant breeding which aims at the development of plants with improved properties conferred by the expression cassette, such as tolerance of drought, disease, or other stresses. The various breeding steps are characterized by well-defined human intervention such as selecting the lines to be crossed, directing pollination of the parental lines, or selecting appropriate descendant plants. Depending on the desired properties different breeding measures are taken. The relevant techniques are well known in the art and include but are not limited to hybridization, inbreeding, backcross breeding, ultilane breeding, variety blend, interspecific hybridization, aneuploid techniques, etc. Hybridization techniques also include the sterilization of plants to yield male or female sterile plants by mechanical, chemical or biochemical means. Cross pollination of a male sterile plant with pollen of a different line assures that the genome of the male sterile but female fertile plant will uniformly obtain properties of both parental lines. Thus, the transgenic seeds and plants according to the invention can be used for the breeding of improved plant lines which for example increase the effectiveness of conventional methods such as herbicide or pesticide treatment or allow to dispense with said methods due to their modified genetic properties. Alternatively new crops with improved stress tolerance can be obtained which, due to their optimized genetic “equipment”, yield harvested product of better quality than products which were not able to tolerate comparable adverse developmental conditions.

[0426] Polynucleotides derived from nucleotide sequences of the present invention having any of the nucleotide sequences of SEQ ID NOs: 1 to SEQ ID NO: 1597, 5927, 5940, 5941, 5945-5958 are useful to detect the presence in a test sample of at least one copy of a nucleotide sequence containing the same or substantially the same sequence, or a fragment, complement, or variant thereof. The sequence of the probes and/or primers of the instant invention need not be identical to those provided in the Sequence Listing or the complements thereof. Some variation in probe or primer sequence and/or length can allow additional family members to be detected, as well as orthologous genes and more taxonomically distant related sequences. Similarly probes and/or primers of the invention can include additional nucleotides that serve as a label for detecting duplexes, for isolation of duplexed polynucleotides, or for cloning purposes.

[0427] Preferred probes and primers of the invention include isolated, purified, or recombinant polynucleotides containing a contiguous span of between at least 12 to at least 1000 nucleotides of any nucleotid sequence which is substantially similar, and preferably has at least between 70% and 99% sequence identity to any one of SEQ ID NOs: 1 to 1597, 5927, 5940, 5941, 5945-5958 and further of any nucleotide sequence which is substantially similar, and preferably has at least between 70% and 99% sequence identity to any one of SEQ ID NO: 1598 to 2672, 5959, 5972, 5973, 5977-5990 and 6001 representing promoter sequences, or the complements thereof, with each individual number of nucleotides within this range also being part of the invention. Preferred are isolated, purified, or recombinant polynucleotides containing a contiguous span of at least 12, 15, 18, 20, 25, 30, 35, 40, 50, 60, 70, 80, 90, 100, 150, 200, 300, 400, 500, 750, or 1000 nucleotides of any nucleotide sequence which is substantially similar, and preferably has at least between 70% and 99% sequence identity to any one of SEQ ID NOs: 1 to 1597, 5927, 5940, 5941, 5945-5958 and further of any nucleotide sequence which is substantially similar, and preferably has at least between 70% and 99% sequence identity to any one of SEQ ID NO: 1598 to 2672, 5959, 5972, 5973, 5977-5990 and 6001 representing promoter sequences, or the complements thereof. The appropriate length for primers and probes will vary depending on the application. For use as PCR primers, probes are 12-40 nucleotides, preferably 18-30 nucleotides long. For use in mapping, probes are 50 to 500 nucleotides, preferably 100-250 nucleotides long. For use in Southern hybridizations, probes as long as several kilobases can be used. The appropriate length for primers and probes under a particular set of assay conditions may be empirically determined by one of skill in the art.

[0428] The primers and probes can be prepared by any suitable method, including, for example, cloning and restriction of appropriate sequences and direct chemical synthesis by a method such as the phosphodiester method of Narang et al. (Meth Enzymol 68: 90 (1979)), the diethylphosphoramidite method, the triester method of Matteucci et al. (J Am Chem Soc 103: 3185 (1981)), or according to Urdea et al. (Proc Natl Acad 80: 7461 (1981)), the solid support method described in EP 0 707 592, or using commercially available automated oligonucleotide synthesizers.

[0429] Detection probes are generally nucleotide sequences or uncharged nucleotide analogs such as, for example peptide nucleotides which are disclosed in International Patent Application WO 92/20702, morpholino analogs which are described in U.S. Pat. Nos. 5,185,444, 5,034,506 and 5,142,047. The probe may have to be rendered “non-extendable” such that additional dNTPs cannot be added to the probe. Analogs are usually non-extendable, and nucleotide probes can be rendered non-extendable by modifying the 3′ end of the probe such that the hydroxyl group is no longer capable of participating in elongation. For example, the 3′ end of the probe can be functionalized with the capture or detection label to thereby consume or otherwise block the hydroxyl group. Alternatively, the 3′ hydroxyl group simply can be cleaved, replaced or modified so as to render the probe non-extendable.

[0430] Any of the polynucleotides of the present invention can be labeled, if desired, by incorporating a label detectable by spectroscopic, photochemical, biochemical, immunochemical, or chemical means. For example, useful labels include radioactive substances (³²P, ³⁵S, ³H, ¹²⁵I), fluorescent dyes (5-bromodesoxyuridine, fluorescein, acetylaminofluorene, digoxigenin) or biotin. Preferably, polynucleotides are labeled at their 3′ and 5′ ends. Examples of non-radioactive labeling of nucleotide fragments are described in the French patent No. FR-7810975 and by Urdea et al. (Nuc Acids Res 16:4937 (1988)). In addition, the probes according to the present invention may have structural characteristics such that they allow the signal amplification, such structural characteristics being, for example, branched DNA probes as described in EP 0 225 807.

[0431] A label can also be used to capture the primer so as to facilitate the immobilization of either the primer or a primer extension product, such as amplified DNA, on a solid support. A capture label is attached to the primers or probes and can be a specific binding member that forms a binding pair with the solid's phase reagent's specific binding member, for example biotin and streptavidin. Therefore depending upon the type of label carried by a polynucleotide or a probe, it may be employed to capture or to detect the target DNA. Further, it will be understood that the polynucleotides, primers or probes provided herein, may, themselves, serve as the capture label. For example, in the case where a solid phase reagent's binding member is a nucleotide sequence, it may be selected such that it binds a complementary portion of a primer or probe to thereby immobilize the primer or probe to the solid phase. In cases where a polynucleotide probe itself serves as the binding member, those skilled in the art will recognize that the probe will contain a sequence or “tail” that is not complementary to the target. In the case where a polynucleotide primer itself serves as the capture label, at least a portion of the primer will be free to hybridize with a nucleotide on a solid phase. DNA labeling techniques are well known in the art.

[0432] Any of the polynucleotides, primers and probes of the present invention can be conveniently immobilized on a solid support. Solid supports are known to those skilled in the art and include the walls of wells of a reaction tray, test tubes, polystyrene beads, magnetic beads, nitrocellulose strips, membranes, microparticles such as latex particles, sheep (or other animal) red blood cells, duracytes and others. The solid support is not critical and can be selected by one skilled in the art. Thus, latex particles, microparticles, magnetic or non-magnetic beads, membranes, plastic tubes, walls of microtiter wells, glass or silicon chips, sheep (or other suitable animal's) red blood cells and duracytes are all suitable examples. Suitable methods for immobilizing nucleotides on solid phases include ionic, hydrophobic, covalent interactions and the like. A solid support, as used herein, refers to any material that is insoluble, or can be made insoluble by a subsequent reaction. The solid support can be chosen for its intrinsic ability to attract and immobilize the capture reagent. Alternatively, the solid phase can retain an additional receptor that has the ability to attract and immobilize the capture reagent. The additional receptor can include a charged substance that is oppositely charged with respect to the capture reagent itself or to a charged substance conjugated to the capture reagent. As yet another alternative, the receptor molecule can be any specific binding member which is immobilized upon (attached to) the solid support and which has the ability to immobilize the capture reagent through a specific binding reaction. The receptor molecule enables the indirect binding of the capture reagent to a solid support material before the performance of the assay or during the performance of the assay. The solid phase thus can be a plastic, derivatized plastic, magnetic or non-magnetic metal, glass or silicon surface of a test tube, microtiter well, sheet, bead, microparticle, chip, sheep (or other suitable animal's) red blood cells, duracytes and other configurations known to those of ordinary skill in the art. The polynucleotides of the invention can be attached to or immobilized on a solid support individually or in groups of at least 2, 5, 8, 10, 12, 15, 20, or 25 distinct polynucleotides of the invention to a single solid support. hi addition, polynucleotides other than those of the invention may be attached to the same solid support as one or more polynucleotides of the invention.

[0433] The polynucleotides of the invention that are expressed or repressed in response to environmental stimuli such as, for example, stress or treatment with chemicals or pathogens or at different developmental stages can be identified by employing an array of nucleic acid samples, e.g., each sample having a plurality of oligonucleotides, and each plurality corresponding to a different plant gene, on a solid substrate, e.g., a DNA chip, and probes corresponding to nucleic acid expressed in, for example, one or more plant tissues and/or at one or more developmental stages, e.g., probes corresponding to nucleic acid expressed in seed of a plant relative to control nucleic acid from sources other than seed. Thus, genes that are upregulated or downregulated in the majority of tissues at a majority of developmental stages, or upregulated or downregulated in one tissue such as in seed, can be systematically identified. The probes may also correspond to nucleic acid expressed in respone to a defined treatment such as, for example, a treatment with a variety of plant hormones or the exposure to specific environmental conditions involving, for example, an abiotic stress or exposure to light.

[0434] Specifically, labeled rice cRNA probes were hybridized to the rice DNA array, expression levels were determined by laser scanning and then rice genes were identified that had a particular expression pattern. The rice oligonucleotide probe array consists of probes from over 18,000 unique rice genes, which covers approximately 40-50% of the genome. This genome array permits a broader, more complete and less biased analysis of gene expression.

[0435] Consequently, the invention also deals with a method for detecting the presence of a polynucleotide including a nucleotide sequence which is substantially similar to a nucleotide sequence given in SEQ ID NOs: 1 to SEQ ID NO: 6001, or a fragment or a variant thereof, or a complementary sequence thereto, in a sample, the method including the following steps of:

[0436] (a) bringing into contact a nucleotide probe or a plurality of nucleotide probes which can hybridize with a polynucleotide having a nucleotide sequence which is substantially similar to a nucleotide sequence given in SEQ ID NOs: 1 to SEQ ID NO: 6001, a fragment or a variant thereof, or a complementary sequence thereto and the sample to be assayed.

[0437] (b) detecting the hybrid complex formed between the probe and a nucleotide in the sample.

[0438] The invention further concerns a kit for detecting the presence of a polynucleotide including a nucleotide sequence which is substantially similar to a nucleotide sequence given in SEQ ID NOs: 1 to SEQ ID NO: 6001, a fragment or a variant thereof, or a complementary sequence thereto, in a sample, the kit including a nucleotide probe or a plurality of nucleotide probes which can hybridize with a nucleotide sequence included in a polynucleotide, which nucleotide sequence is substantially similar to a nucleotide sequence given in of SEQ ID NOs: 1 to SEQ ID NO: 6001, a fragment or a variant thereof, or a complementary sequence thereto and, optionally, the reagents necessary for performing the hybridization reaction.

[0439] In a first preferred embodiment of this detection method and kit, the nucleotide probe or the plurality of nucleotide probes are labeled with a detectable molecule. In a second preferred embodiment of the method and kit, the nucleotide probe or the plurality of nucleotide probes has been immobilized on a substrate.

[0440] The isolated polynucleotides of the invention can be used to create various types of genetic and physical maps of the genome of rice or other plants. Such maps are used to devise positional cloning strategies for isolating novel genes from the mapped crop species. The sequences of the present invention are also useful for chromosome mapping, chromosome identification, tagging of genes which are tissue-specifically expressed.

[0441] The isolated polynucleotides of the invention can further be used as probes for identifying polymorphisms associated with phenotypes of interest. Briefly, total DNA is isolated from an individual or isogenic line, cleaved with one or more restriction enzymes, separated according to mass, transferred to a solid support, and hybridized with a probe molecule according to the invention. The pattern of fragments hybridizing to a probe molecule is compared for DNA from different individuals or lines, where differences in fragment size signals a polymorphism associated with a particular nucleotide sequence according to the present invention. After identification of polymorphic sequences, linkage studies can be conducted. After identification of many polymorphisms using a nucleotide sequence according to the invention, linkage studies can be conducted by using the individuals showing polymorphisms as parents in crossing programs. Recombinants, F₂ progeny recombinants or recombinant inbreds, can then be analyzed using the same restriction enzyme/hybridization procedure. The order of DNA polymorphisms along the chromosomes can be inferred based on the frequency with which they are inherited together versus inherited independently. The closer together two polymorphisms occur in a chromosome, the higher the probability that they are inherited together. Integration of the relative positions of polymorphisms and associated marker sequences produces a genetic map of the species, where the distances between markers reflect the recombination frequencies in that chromosome segment. Preferably, the polymorphisms and marker sequences are sufficiently numerous to produce a genetic map of sufficiently high resolution to locate one or more loci of interest.

[0442] The use of recombinant inbred lines for such genetic mapping is described for rice (Oh et al., Mol Cells 8:175 (1998); Nandi et al., Mol Gen Genet 255:1 (1997); Wang et al., Genetics 136:1421 (1994)), sorghum (Subudhi et al., Genome 43:240 (2000)), maize (Burr et al., Genetics 118:519 (1998); Gardiner et al., Genetics 134:917 (1993)), and Arabidopsis (Methods in Molecular Biology, Martinez-Zapater and Salinas, eds., 82:137-146, (1998)). However, this procedure is not limited to plants and can be used for other organisms such as yeast or other fungi, or for oomycetes or other protistans.

[0443] The nucleotide sequences of the present invention can also be used for simple sequence repeat identification, also known as single sequence repeat, (SSR) mapping. SSR mapping in rice has been described by Miyao et al. (DNA Res 3:233 (1996)) and Yang et al. (Mol Gen Genet 245:187 (1994)), and in maize by Ahn et al. (Mol Gen Genet 241:483 (1993)). SSR mapping can be achieved using various methods. In one instance, polymorphisms are identified when sequence specific probes flanking an SSR contained within an sequence of the invention are made and used in polymerase chain reaction (PCR) assays with template DNA from two or more individuals or, in plants, near isogenic lines. A change in the number of tandem repeats between the SSR-flanking sequence produces differently sized fragments (U.S. Pat. No. 5,766,847). Alternatively, polymorphisms can be identified by using the PCR fragment produced from the SSR-flanking sequence specific primer reaction as a probe against Southern blots representing different individuals (Refseth et al., Electrophoresis 18:1519 (1997)). Rice SSRs were used to map a molecular marker closely linked to a nuclear restorer gene for fertility in rice as described by Akagi et al. (Genome 39:205 (1996)).

[0444] The nucleotide sequences of the present invention can be used to identify and develop a variety of microsatellite markers, including the SSRs described above, as genetic markers for comparative analysis and mapping of genomes. The nucleotide sequences of the present invention can be used in a variation of the SSR technique known as inter-SSR (ISSR); which uses microsatellite oligonucleotides as primers to amplify genomic segments different from the repeat region itself (Zietkiewicz et al., Genomics 20:176 (1994)). ISSR employs oligonucleotides based on a simple sequence repeat anchored or not at their 5′- or 3′-end by two to four arbitrarily chosen nucleotides, which triggers site-specific annealing and initiates PCR amplification of genomic segments which are flanked by inversely orientated and closely spaced repeat sequences. In one embodiment of the present invention, microsatellite markers derived from the nucleotide sequences disclosed in the Sequence Listing, or substantially similar sequences or allelic variants thereof, may be used to detect the appearance or disappearance of markers indicating genomic instability as described by Leroy et al. (Electron. J Biotechnol, 3(2), at http://www.ejb.org (2000)), where alteration of a fingerprinting pattern indicated loss of a marker corresponding to a part of a gene involved in the regulation of cell proliferation. Microsatellite markers derived from nucleotide sequences as provided in the Sequence Listing will be useful for detecting genomic alterations such as the change observed by Leroy et al. (Electron. J Biotechnol, 3(2), supra (2000)) which appeared to be the consequence of microsatellite instability at the primer binding site or modification of the region between the microsatellites, and illustrated somaclonal variation leading to genomic instability. Consequently, the nucleotide sequences of the present invention are useful for detecting genomic alterations involved in somaclonal variation, which is an important source of new phenotypes.

[0445] In addition, because the genomes of closely related species are largely syntenic (that is, they display the same ordering of genes within the genome), these maps can be used to isolate novel alleles from wild relatives of crop species by positional cloning strategies. This shared synteny is very powerful for using genetic maps from one species to map genes in another. For example, a gene mapped in rice provides information for the gene location in maize and wheat.

[0446] The various types of maps discussed above can be used with the nucleotide sequences of the invention to identify Quantitative Trait Loci (QTLs) for a variety of uses, including marker-assisted breeding. Many important crop traits are quantitative traits and result from the combined interactions of several genes. These genes reside at different loci in the genome, often on different chromosomes, and generally exhibit multiple alleles at each locus. Developing markers, tools, and methods to identify and isolate the QTLs enables marker-assisted breeding to enhance traits of interest or suppress undesirable traits that interfere with a desired effect. The nucleotide sequences as provided in the Sequence Listing can be used to generate markers, including single-sequence repeats (SSRs) and microsatellite markers for QTLs of interest to assist marker-assisted breeding. The nucleotide sequences of the invention can be used to identify QTLs and isolate alleles as described by Li et al. in a study of QTLs involved in resistance to a pathogen of rice. (Li et al., Mol Gen Genet 261:58 (1999)). In addition to isolating QTL alleles in rice, other cereals, and other monocot and dicot crop species, the nucleotide sequences of the invention can also be used to isolate alleles from the corresponding QTL(s) of wild relatives. Transgenic plants having various combinations of QTL alleles can then be created and the effects of the combinations measured. Once an ideal allele combination has been identified, crop improvement can be accomplished either through biotechnological means or by directed conventional breeding programs. (Flowers et al., J Exp Bot 51:99 (2000); Tanksley and McCouch, Science 277:1063 (1997)).

[0447] In another embodiment the nucleotide sequences of the invention can be used to help create physical maps of the genome of maize, Arabidopsis and related species. Where the nucleotide sequences of the invention have been ordered on a genetic map, as described above, then the nucleotide sequences of the invention can be used as probes to discover which clones in large libraries of plant DNA fragments in YACs, PACs, etc. contain the same nucleotide sequences of the invention or similar sequences, thereby facilitating the assignment of the large DNA fragments to chromosomal positions. Subsequently, the large BACs, YACs, etc. can be ordered unambiguously by more detailed studies of their sequence composition and by using their end or other sequence to find the identical sequences in other cloned DNA fragments (Mozo et al., Nat Genet 22:271 (1999)). Overlapping DNA sequences in this way allows assembly of large sequence contigs that, when sufficiently extended, provide a complete physical map of a chromosome. The nucleotide sequences of the invention themselves may provide the means of joining cloned sequences into a contig, and are useful for constructing physical maps.

[0448] In another embodiment, the nucleotide sequences of the present invention may be useful in mapping and characterizing the genomes of other cereals. Rice has been proposed as a model for cereal genome analysis (Havukkala, Curr Opin Genet Devel 6:711 (1996)), based largely on its smaller genome size and higher gene density, combined with the considerable conserved gene order among cereal genomes (Ahn et al., Mol Gen Genet 241:483 (1993)). The cereals demonstrate both general conservation of gene order (synteny) and considerable sequence homology among various cereal gene families. This suggests that studies on the functions of genes or proteins from rice that are tissue-specifically expressed could lead to the identification of orthologous genes or proteins in other cereals, including maize, wheat, secale, sorghum, barley, millet, teff, milo, triticale, flax, gramma grass, Tripsacum sp., and teosinte. The nucleotide sequences according to the invention can also be used to physically characterize homologous chromosomes in other cereals, as described by Sarma et al. (Genome 43:191 (2000)), and their use can be extended to non-cereal monocots such as sugarcane, grasses, and lilies.

[0449] Given the synteny between rice and other cereal genomes, the nucleotide sequences of the present invention can be used to obtain molecular markers for mapping and, potentially, for positional cloning. Kilian et al. described the use of probes from the rice genomic region of interest to isolate a saturating number of polymorphic markers in barley, which were shown to map to syntenic regions in rice and barley, suggesting that the nucleotide sequences of the, invention derived from the rice genome would be useful in positional cloning of syntenic genes of interest from other cereal species. (Kilian, et al, Nucl Acids Res 23:2729 (1995); Kilian, et al., Plant Mol Biol 35:187 (1997)). Synteny between rice and barley has recently been reported in the area of the carrying malting quality QTLs (Han, et al., Genome 41:373 (1998)), and use of synteny between cereals for positional cloning efforts is likely to add considerable value to rice genome analysis. Likewise, mapping of the ligules region of sorghum was facilitated using molecular markers from a syntenic region of the rice genome. (Zwick, et al., Genetics 148:1983 (1998)).

[0450] Rice marker technology utilizing the nucleotide sequences of the present invention can also be used to identify QTL alleles for a trait of interest from a wild relative of cultivated rice, for example as described by Xiao, et al. (Genetics 150:899 (1998)). Wild relatives of domesticated plants represent untapped pools of genetic resources for abiotic and biotic stress resistance, apomixis and other breeding strategies, plant architecture, determinants of yield, secondary metabolites, and other valuable traits. In rice, Xiao et al. (supra) used molecular markers to introduce an average of approximately 5% of the genome of a wild relative, and the resulting plants were scored for phenotypes such as plant height, panicle length and 1000-grain weight. Trait-improving alleles were found for all phenotypes except plant height, where any change is considered negative. Of the 35 trait-improving alleles, Xiao et al. found that 19 had no effect on other phenotypes whereas 16 had deleterious effects on other traits. The nucleotide sequences of the invention such as those provided in the Sequence Listing can be employed as molecular markers to identify QTL alleles for trait of interest from a wild relative, by which these valuable traits can be introgressed from wild relatives using methods including, but not limited to, that described by Xiao et al. ((1998) supra). Accordingly, the nucleotide sequences of the invention can be employed in a variety of molecular marker technologies for yield improvement.

[0451] Following the procedures described above to identify polymorphisms, and using a plurality of the nucleotide sequences of the invention, any individual (or line) can be genotyped. Genotyping a large number of DNA polymorphisms such as single nucleotide polymorphisms (SNPs), in breeding lines makes it possible to find associations between certain polymorphisms or groups of polymorphisms, and certain phenotypes. In addition to sequence polymorphisms, length polymorphisms such as triplet repeats are studied to find associations between polymorphism and phenotype. Genotypes can be used for the identification of particular cultivars, varieties, lines, ecotypes, and genetically modified plants or can serve as tools for subsequent genetic studies of complex traits involving multiple phenotypes.

[0452] The patent publication WO95/35505 and U.S. Pat. Nos. 5,445,943 and 5,410,270 describe scanning multiple alleles of a plurality of loci using hybridization to arrays of oligonucleotides. The nucleotide sequences of the invention are suitable for use in genotyping techniques useful for each of the types of mapping discussed above.

[0453] In a preferred embodiment, the nucleotide sequences of the invention are useful for identifying and isolating a least one unique stretch of protein-encoding nucleotide sequence. The nucleotide sequences of the invention are compared with other coding sequences having sequence similarity with the sequences provided in the Sequence Listing, using a program such as BLAST. Comparison of the nucleotide sequences of the invention with other similar coding sequences permits the identification of one or more unique stretches of coding sequences encoding proteins that are tissue-specifically expressed and that are not identical to the corresponding coding sequence being screened. Preferably, a unique stretch of coding sequence of about 25 base pairs (bp) long is identified, more preferably 25 bp, or even more preferably 22 bp, or 20 bp, or yet even more preferably 18 bp or 16 bp or 14 bp. In one embodiment, a plurality of nucleotide sequences is screened to identify unique coding sequences accroding to the invention. In one embodiment, one or more unique coding sequences accroding to the invention can be applied to a chip as part of an array, or used in a non-chip array system. In a further embodiment, a plurality of unique coding sequences accroding to the invention is used in a screening array. In another embodiment, one or more unique coding sequences accroding to the invention can be used as immobilized or as probes in solution. In yet another embodiment, one or more unique coding sequences accroding to the invention can be used as primers for PCR. In a further embodiment, one or more unique coding sequences accroding to the invention can be used as organism-specific primers for PCR in a solution containing DNA from a plurality of sources.

[0454] In another embodiment unique stretches of nucleotide sequences according to the invention are identified that are preferably about 30 bp, more preferably 50 bp or 75 bp, yet more preferably 100 bp, 150 bp, 200 bp, 250, 500 bp, 750 bp, or 1000 bp. The length of an unique coding sequence may be chosen by one of skill in the art depending on its intended use and on the characteristics of the nucleotide sequence being used. In one embodiment, unique coding sequences accroding to the invention may be used as probes to screen libraries to find homologs, orthologs, or paralogs. In another embodiment, unique coding sequences accroding to the invention may be used as probes to screen genomic DNA or cDNA to find homologs, orthologs, or paralogs. In yet another embodiment, unique coding sequences according to the invention may be used to study gene evolution and genome evolution.

[0455] The invention also provides a computer readable medium having stored thereon a data structure containing nucleic acid sequences having at least 70% sequence identity to a nucleic acid sequence selected from those listed in SEQ ID Nos: 1-6001, as well as complementary, ortholog, and variant sequences thereof Storage and use of nucleic acid sequences on a computer readable medium is well known in the art. See for example U.S. Pat. Nos. 6,023,659; 5,867,402; 5,795,716. Examples of such medium include, but are not limited to, magnetic tape, optical disk, CD-ROM, random access memory, volatile memory, non-volatile memory and bubble memory. Accordingly, the nucleic acid sequences contained on the computer readable medium may be compared through use of a module that receives the sequence information and compares it to other sequence information. Examples of other sequences to which the nucleic acid sequences of the invention may be compared include those maintained by the National Center for Biotechnology Information (NCBI)(http://www.ncbi.nlm.nih.gov/) and the Swiss Protein Data Bank. A computer is an example of such a module that can read and compare nucleic acid sequence information. Accordingly, the invention also provides the method of comparing a nucleic acid sequence of the invention to another sequence. For example, a sequence of the invention may be submitted to the NCBI for a Blast search as described herein where the sequence is compared to sequence information contained within the NCBI database and a comparison is returned. The invention also provides nucleic acid sequence information in a computer readable medium that allows the encoded polypeptide to be optimized for a desired property. Examples of such properties include, but are not limited to, increased or decreased: thermal stability, chemical stability, hydrophylicity, hydrophobicity, and the like. Methods for the use of computers to model polypeptides and polynucleotides having altered activities are well known in the art and have been reviewed. (Lesyng et al., 1993; Surles et al., 1994; Koehl et al., 1996; Rossi et al., 2001).

### EXAMPLE 1

### GeneChip® Standard Protocol

[0456] 1.1 Quantitation of Total RNA

[0457] Total RNA from plant tissue is extracted and quantified.

[0458] 30 Quantify total RNA using GeneQuant

[0459] 1OD₂₆₀=40 mg RNA/ml; A₂₆₀/A₂₈₀=1.9 to about 2.1

[0460] 2. Run gel to check the integrity and purity of the extracted RNA

[0461] 1.2 Synthesis of Double-stranded cDNA

[0462] Gibco/BRL SuperScript Choice System for cDNA Synthesis (Cat#1B090-019) was employed to prepare cDNAs. T7-(dT)₂₄ oligonucleotides were prepared and purified by HPLC. (5′-GGCCAGTGAATTGTAATACGACTCACTATAGGGAGGCGG-(dT)₂₄-3′; SEQ ID NO:4709).

[0463] 1.2.1 Step 1. Primer hybridization:

[0464] Incubate at 70° C. for 10 minutes

[0465] Quick spin and put on ice briefly

[0466] 1.2.2 Step 2. Temperature adjustment:

[0467] Incubate at 42° C. for 2 minutes

[0468] 1.2.3 Step 3. First strand synthesis:

[0469] DEPC-water-1:1

[0470] RNA (10:g final)-10:1

[0471] T7=(dT)₂₄ Primer (100 pmol final)-1:1 pmol

[0472] 5×1^{st} strand cDNA buffer-4:1

[0473] 0.1M DTT (10 mM final)-2:1

[0474] 10 mM dNTP mix (500:M final)-1:1

[0475] Superscript II RT 200 U/:1-1:1

[0476] Total of 20:1

[0477] Mix well

[0478] Incubate at 42° C. for 1 hour

[0479] 1.2.4 Step 4. Second strand synthesis:

[0480] Place reactions on ice, quick spin

[0481] DEPC-water-91:1

[0482] 5×2^{nd} strand cDNA buffer-30:1

[0483] 10 mM dNTP mix (250 mM final)-3:1

[0484] E. coli DNA ligase (10 U/:1)-1:1

[0485] E. coli DNA polymerase 1-10 U/:1-4:1

[0486] RnaseH 2U/:1-1:1

[0487] T4 DNA polymerase 5 U/:1-2:1

[0488] 0.5 M EDTA (0.5 M final)-10:1

[0489] Total 162:1

[0490] Mix/spin down/incubate 16° C. for 2 hours

[0491] 1.2.5 Step 5. Completing the reaction:

[0492] Incubate at 16° C. for 5 minutes

[0493] 1.3 Purification of Double Stranded cDNA

[0494] 1. Centrifuge PLG (Phase Lock Gel, Eppendorf 5 Prime Inc., pI-188233) at 14,000×, transfer 162:1 of cDNA to PLG

[0495] 2. Add 162:1 of Phenol:Chloroform:Isoamyl alcohol (pH 8.0), centrifuge 2 minutes

[0496] 3. Transfer the supernatant to a fresh 1.5 ml tube, add

[0497] Glycogen (5 mg/ml) 2

[0498] 0.5 M NH₄OAC (0.75×Vol) 120

[0499] ETOH (2.5×Vol, −20° C.) 400

[0500] 4. Mix well and centrifuge at 14,000× for 20 minutes

[0501] 5. Remove supernatant, add 0.5 ml 80% EtOH (−20° C.)

[0502] 6. Centrifuge for 5 minutes, air dry or by speed vac for 5-10 minutes

[0503] 7. Add 44:1 DEPC H₂O

[0504] Analyze of quantity and size distribution of cDNA

[0505] Run a gel using 1:1 of the double-stranded synthesis product

[0506] 1.4 Synthesis of Biotinylated cRNA

[0507] (use Enzo BioArray High Yield RNA Transcript Labeling Kit Cat#900182)

| | |
|---|---|
| Purified cDNA | 22:1 |
| 10X Hy buffer | 4:1 |
| 10X biotin ribonucleotides | 4:1 |
| 10X DTT | 4:1 |
| 10X Rnase inhibitor mix | 4:1 |
| 20X T7 RNA polymerase | 2:1 |
| Total | 40:1 |

[0508] Centrifuge 5 seconds, and incubate for 4 hours at 37° C.

[0509] Gently mix every 30-45 minutes

[0510] 1.5 Purification and Quantification of cRNA

[0511] (use Qiagen Rneasy Mini kit Cat# 74103)

| | | |
|---|---|---|
| cRNA | 40:1 | |
| DEPC H₂O | 60:1 | |
| RLT buffer | 350:1 | mix by vortexing |
| EtOH | 250:1 | mix by pipetting |
| Total | 700:1 | |

Wait 1 minute or more for the RNA to stick
Centrifuge at 2000 rpm for 5 minutes

| | |
|---|---|
| RPE buffer | 500:1 |

Centrifuge at 10,000 rpm for 1 minute

| | |
|---|---|
| RPE buffer | 500:1 |

Centrifuge at 10,000 rpm for 1 minute
Centrifuge at 10,000 rpm for 1 minute to dry the column

| | |
|---|---|
| DEPC H₂O | 30:1 |

Wait for 1 minute, then elute cRNA from by centrifugation, 10 K 1 minute

| | |
|---|---|
| DEPC H₂O | 30:1 |

[0512] Repeat previous step

[0513] Determine concentration and dilute to 1:g/:1 concentration

1.6 Fragmentation of cRNA

| | |
|---|---|
| cRNA (1:g/:1) | 15:1 |
| 5X Fragmentation Buffer* | 6:1 |
| DEPC H₂O | 9:1 |
| | 30:1 |

*5x Fragmentation Buffer

| | |
|---|---|
| 1M Tris (pH8.1) | 4.0 ml |
| MgOAc | 0.64 g |
| KOAC | 0.98 g |
| DEPC H₂O | |
| Total | 20 ml |
| Filter Sterilize | |

[0514] 1.7 Array Wash and Staining

[0515] Stringent Wash Buffer**

[0516] Non-Stringent Wash Buffer***

[0517] SAPE Stain****

[0518] Antibody Stain*****

[0519] Wash on fluidics station using the appropriate antibody amplification protocol

[0520] **Stringent Buffer: 12×MES 83.3 ml, 5 M NaCl 5.2 ml, 10% Tween 1.0 ml, H₂O 910 ml, Filter Sterilize

[0521] ***Non-Stringent Buffer: 20×SSPE 300 ml, 10% Tween 1.0 ml, H₂O 698 ml, Filter Sterilize, Antifoam 1.0.

[0522] ****SAPE stain: 2×Stain Buffer 600:1, BSA 48:1, SAPE 12:1, H₂O 540:1.

[0523] *****Antibody Stain: 2×Stain Buffer 300:1, H₂O 266.4:1, BSA 24:1, Goat IgG 6:1, Biotinylated Ab 3.6:1

### EXAMPLE 2

### Characterization of Gene Expression Profiles During Oryza Plant Development

[0524] A rice gene array (proprietary to Affymetrix) and probes derived from rice RNA extracted from different tissues and developmental stages were used to identify the expression profile of genes on the chip. The rice array contains over 23,000 genes (approximately 18,000 unique genes) or roughly 50% of the rice genome and is similar to the Arabidopsis GeneChip® (Affymetrix) with the exception that the 16 oligonucleotide probe sets do not contain mismatch probe sets. The level of expression is therefore determined by internal software that analyzes the intensity level of the 16 probe sets for each gene. The highest and lowest probes are removed if they do not fit into a set of predefined statistical criteria and the remaining sets are averaged to give an expression value. The final expression values are normalized by software, as described below. The advantages of a gene chip in such an analysis include a global gene expression analysis, quantitative results, a highly reproducible system, and a higher sensitivity than Northern blot analyses.

[0525] Total RNA was isolated from 29 samples at different developmental stages (see Table 2).

TABLE 2

germgerminating seed root
germinating seed leaf
3-4 leaf arial
root tillering
leaf tillering
arial tillering
panicle 1-3
panicle 4-7
panicle 8-14
panicle 15-20
Panicle panicle emergence
leaf booting
arial booting
root booting
root panicle emergence
stem panicle emergence
Inflorescence
stem mature
root mature
leaf mature
stem senescence
leaf senescence
Embryo
Endosperm
seed coat
Aleurone
seed milk
seed soft
seed hard

### Example 2.1

### Preparation of RNA

[0526] Total RNA is prepared from the frozen samples using Qiagen RNeasy columns (Valencia, Calif.) and precipitated overnight at −20° C. after the addition of 0.25 volumes of 10M LiCl₂. Pellets are washed with 70% EtOH, air dried and resuspended in RNase-free water.

[0527] Alternatively, total RNA is prepared using the “Pine Tree method” (Chang et al., 1993) where 1 gram of the ground frozen sample is added to 5 ml of extraction buffer (2% hexadectltrimethylamminium bromide, 2% polyvilylpyrrolidone K 30, 100 mM Tris-HCl (pH 8.0), 25 mM EDTA, 2.0 M NaCl, 0.5 g/L spermidine and 2% beta-mercaptoethanol, previously warmed to 65° C.) and mixed by inversion and vortexing. The solution is extracted two times with an equal volume of chloroform:isoamyl alcohol and precipitated overnight at −20° C. after the addition of 0.25 volumes of 10M LiCl₂. Pellets are washed with 70% EtOH, air dried and resuspended in RNase-free water.

### Example 2.2

### Preparation of cDNA

[0528] Total RNA (5 μg) from each sample is reverse transcribed. First strand cDNA synthesis is accomplished at 42° C. for one hour using 5 μg of total RNA from Arabidopsis tissue, 100 pmol of an oligo dT₍₂₄₎ primer containing a 5′ T7 RNA polymerase promoter sequence [5′-GGCCAGTGAATTGTAATACGACTCACTATAGGGAGGCGG-(dT)₂₄-3′; SEQ ID NO:4710] synthesized by Genosys, and SuperScript II reverse transcriptase (RT) (Gibco/BRL).

[0529] First strand cDNA synthesis reactions performed with SuperScript II RT are carried out according to the manufacturer's recommendations using 50 mM Tris-HCl (pH 8.3), 75 mM KCl, 3 mM MgCl₂, 10 mM dithiotreitol (DTT), 0.5 mM dNTPs, and 200 units of RT enzyme.

[0530] The second cDNA strand is synthesized using 40 units of E. coli DNA polymerase I, 10 units of E. coli DNA ligase, and 2 units of RNase H in a reaction containing 25 mM Tris-HCl (pH 7.5), 100 mM KCl, 5 mM MgCl₂, 10 mM (NH₄)SO₄, 0.15 mM β-NAD⁺, 1 mM dNTPs, and 1.2 mM DTT. The reaction proceeded at 16° C. for 2 hours and is terminated using EDTA. Double-stranded cDNA products are purified by phenol/chloroform extraction and ethanol precipitation.

### Example 2.3

### Preparation of Biotinylated cRNA Probes

[0531] Synthesized cDNAs (approximately 0.1 μg) are used as templates to produce biotinylated cRNA probes by in vitro transcription using T7 RNA Polymerase (ENZO BioArray High Yield RNA Transcript Labeling Kit). Labeled cRNAs are purified using affinity resin (Qiagen RNeasy Spin Columns) and randomly fragmented to produce molecules of approximately 35 to 200 bases. Fragmentation is achieved by incubation at 94° C. for 35 minutes in a buffer containing 40 mM Tris-acetate, pH 8.1, 100 mM potassium acetate, and 30 mM magnesium acetate.

### Example 2.4

### Array Hybridization

[0532] The labeled samples are mixed with 0.1 mg/mL sonicated herring sperm DNA in a hybridization buffer containing 100 mM 2-N-Morpholino-ethane-sulfonic acid (MES), 1 M NaCl, 20 mM EDTA, 0.01% Tween 20, denatured at 99° C. for 5 min, and equilibrated at 45° C. for 5 min before hybridization. The hybridization mix is then transferred to the Arabidopsis GeneChip genome array (Affymetrix) cartridge and hybridized at 45° C. for 16 h on a rotisserie at 60 rpm.

[0533] The hybridized arrays are then rinsed and stained in a fluidics station (Affymetrix). They are first rinsed with wash buffer A (6×SSPE (0.9 M NaCl, 0.06 M NaH₂PO₄, 0.006 M EDTA), 0.01% Tween 20, 0.005% Antifoam) at 25° C. for 10 min and incubated with wash buffer B (100 mM MES, 0.1 M NaCl, 0.01% Tween 20) at 50° C. for 20 min, then stained with Streptavidin Phycoerythrin (SAPE) (100 mM MES, 1 M NaCl, 0.05% Tween 20, 0.005% Antifoam, 10 mg/mL SAPE 2 mg/mL BSA) at 25° C. for 10 min, washed with wash buffer A at 25° C. for 20 min and stained with biotinylated anti-streptavidin antibody at 25° C. for 10 min. After staining, arrays are stained with SAPE at 25° C. for 10 min and washed with wash buffer A at 30° C. for 30 min. The probe arrays are scanned twice and the intensities are averaged with a Hewlett-Packard GeneArray Scanner.

[0534] GeneSpring software was used to analyze relative expression levels and compare tissue-specificity of gene expression.

### Example 2.5

### Data Analysis

[0535] GeneChip Suite 3.2 (Affymetrix) is used for data normalization. The overall intensity of all probe sets of each array is scaled to 100 so hybridization intensity of all arrays is equivalent. False positives are defined based on experiments in which samples are split, hybridized to GeneChip expression arrays and the results compared. A false positive is indicated if a probe set is scored qualitatively as an “Increase” or “Decrease” and quantitatively as changing by at least two fold and average difference is greater than 25. A significant change is defined as 2-fold change or above with an expression baseline of 25, which is determined as the threshold level according to the scaling.

[0536] The expression data of selected genes are then normalized. Briefly, the median of the expression level within each chip is calculated, and the difference between the average difference and median average difference is used as new value to measure the gene expression level. The expression data are also adjusted across different chip experiments according to the calculated medium. Normalized data (genes and arrays) are analysed by the self organization map (SOM) method (Tamayo et al., P.N.A.S., 96:2907 (1999), and then subject to heirachy cluster analysis (Eisen et al., P.N.A.S., 95:14863 (1998). By the cluster analysis, genes and chip experiments are clustered according to the expression levels.

[0537] 2.5.1. Promoter Analysis

[0538] Generally, a database with rice contigs and Perl scripts were employed to determine which rice contig contained sequences from the identified genes. Five gene prediction programs were analyzed on these contigs and the rice sequence was blasted to these predictions. The prediction that contained the entire rice sequence within an exon was used to find the promoter that was adjacent to the first exon.

[0539] For Oryza genes that were constitutively expressed, a cut off value of 250 in all samples was used to screen for genes that were expressed in all tissues (range of 250-8638). The background level (gene not expressed) was 50. This analysis resulted in the identification of 618 genes that were constitutively expressed (Table 1A). The ORFs for 398 of those genes are listed in SEQ ID NOs:1-398 and the promoters for some of those genes in SEQ ID NOs:1598-1885 and 5960-5971, respectively. Based on expression analysis, 150 genes were selected (Table 1B) and 120 genes of those considered for further analysis (Table 1C). Primers were prepared to isolate 38 promoters from the 120 genes (Table 12). Preferred constitutively expressed genes include but are not limited to those having SEQ ID NOs:7, 10, 12, 14, 22, 53, 54, 63, 84, 102, 103, 123, 128, and 136, and orthologs thereof, e.g., promoters having SEQ ID NOs:1647, 1634, 1606, 1684, 1631, 1662, 1691, 1630, 1603, 1663, 1604, or an ortholog thereof. Further preferred constitutively expressed genes include but are not limited to those having SEQ ID NOs: 5928, 5929, 5930, 5931, 5932, 5933, 5934, 5935, 5936, 5937, 5938, and 5939, and orthologs thereof, e.g., promoters having SEQ ID NOs: 5960, 5961, 5962, 5963, 5964, 5965, 5966, 5967, 5968, 5969, 5970, and 5971, or an ortholog thereof.

[0540] For Oryza genes expressed primarily in seed tissue, all genes that were expressed at 50 or above in at least one of the 29 tissues (about 13,450 genes) were filtered to be expressed less than 50 in all non-seed related samples, not including aleurone, seed coat, embryo, endosperm and seed milk, soft dough and hard dough. These analyses resulted in the identification of 812 genes that were preferentially expressed in seed tissue (Table 2A). The ORFs for 578 of those genes are listed in SEQ ID NOs: 1020-1567 and the promoters for some of those in SEQ ID NOs:2275-2672. Preferred seed-specific promoters are those from genes having SEQ ID NOs:1021-1023, 1028, 1044, 1033, 1068, 1403, 1081, 1048, 1046, 1097, 1309, 1147, 1038, 1107, 1161, 1162, 1505, and 1026 and the orthologs thereof, e.g., promoters having SEQ ID NOs:2275-2277, 2279, 2289, 2283, 2317, 2293, 2291, 2464, 2364, 2286, 2325, 2376, 2377, and 2586, and an ortholog thereof. Further preferred are those from genes having SEQ ID NOs: 5927, 5940, 5941, and 5945-5958 and the orthologs thereof, e.g., promoters having SEQ ID NOs: , 5959, 5972, 5973, 5977-5990 and 6001, and an ortholog thereof.

[0541] For seed-specific genes that were expressed only in a particular part of a seed, e.g., embryo, endosperm, aleurone, genes that were expressed at 50 or above in the particular sample but less than 50 in all other samples absent that particular tissue sample were selected. Thus, embryo-specific, endosperm-specific and aleurone-specific genes were identified (Tables 3-5). Preferred aleurone-specific promoters are those from genes having SEQ ID NOs:1045, 1165, 1324, 1150, 1547, 1373, and 5927 and the orthologs thereof, e.g., promoters having SEQ ID NOs:2290, 2380, 2366, 2627 and 5959, or an ortholog thereof. Preferred embryo-specific promoters are from genes having SEQ ID NOs:1294, 1346, 1325, 1412, 1079 and the orthologs thereof, e.g., a promoter having SEQ ID NO:2315 or an ortholog thereof. Further preferred embryo-specific promoters are from genes having SEQ ID NOs: 5940 and 5941 and the orthologs thereof, e.g., a promoter having SEQ ID NO: 5972 and 5973, or an ortholog thereof. Preferred endosperm-specific promoters are from genes having SEQ ID NOs:1043 and 1215 and the orthologs thereof, e.g., a promoter having SEQ ID NO:2411 or an ortholog thereof.

[0542] A cut off value of less than 50 in all non-root samples was used to screen for Oryza genes that were expressed in a root-specific manner. The background level (gene not expressed) was 50. Genes that were expressed at greater than 50 in one or more of all root samples were selected. This analysis resulted in the identification of 265 genes that were expressed primarily in root tissue (Table 8A). The ORFs for 219 of these genes is shown in SEQ ID NOs:801-1019 and some of the promoters in SEQ ID NOs:2144-2274.

[0543] For Oryza genes expressed primarily in Oryza panicle tissue (flower and pollen), all genes that were expressed at 50 or above on at least one of the rice panicle chips (about 10,597 genes) were filtered to be expressed less than 50 in (i) leaf samples at germinating seed, tillering, mature and senescence stages; (ii) root samples at germinating seed, tillering, booting, mature and panicle emergence stages; (iii) stem samples at panicle emergence and senescence stages; and (iv) seed hard dough and aleurone samples. These analyses resulted in the identification of 335 genes that were preferentially expressed in panicle tissue (Table 7A). The ORFs for 256 of those genes is listed in SEQ ID NOs:465-720 and some of the promoters in SEQ ID NOs:1919-2085 (for panicle). Preferred panicle-specific promoters are those from genes having SEQ ID NOs:689, 511, 482, 467 and 468, and the orthologs thereof, e.g., promoters having SEQ ID NOs:1920-1921, 2054, or an ortholog thereof.

[0544] Eighty pollen-specific Oryza genes were identified (Table 9A and SEQ ID NOs:721-800) as well some pollen-specific promoters (SEQ ID NOs:2086-2143 Preferred pollen-specific promoter are those from genes having SEQ ID NOs:723-726 and 728 and the orthologs thereof, e.g., promoters having SEQ ID NOs:2088-2090, or an ortholog thereof.

[0545] For Oryza genes expressed primarily in leaf and stem, i.e., green tissue, all genes that were expressed at 50 or above in at least three of the tissues (about 12,563 genes) were filtered to be expressed more than 50 in arial 3-4 leaf stage samples; less than 50 in all seed samples (day 0-19); and less than 50 in aleurone, embryo, endosperm and pollen samples. Analysis revealed 90 genes expressed in arial tissue at tillering stages that were expressed 2 fold greater than in root tissue at tillering stage (Table 6A). The ORFs for 66 of those genes are shown in SEQ ID NOs:399-464 and some of the promoters for those genes in SEQ ID NOs:1886-1918. Preferred green tissue-specific promoters are those from genes having SEQ ID NOs:401, 405, 408, 410, 416, 417, 419, 433, 438, 447 and 454 and orthologs thereof, e.g., promoters having SEQ ID NOs:1903, 1910, 1897, 1890, 1891, or an ortholog thereof.

[0546] Leaf-specific but not fruit-specific genes were determined by filtering the genes as follows: relative expression of less than 50 in all of the seed samples, and greater than 50 in the leaf at tillering stage sample. This analysis resulted in the identification of five rice sequences: 5942/5991 (RF1; OS009452.1), OS012592.1, OS019946, OS001669.1, and OS002989.1. The promoter for one such gene is shown in SEQ ID NOs: 5974 and 5996, respectively.. The promoter sequence for two leaf-specific but not pollen-specific genes is shown in Table 15B.

### EXAMPLE 3

### Promoter Analysis

[0547] The gene chip experiment described above are designed to uncover genes that are constitutively or tissue specifically (tissue-preferentially) expressed. Candidate promoters are identified based upon the expression profiles of the associated transcripts representatives of which are provided in SEQ ID NOs: 1598-1885 and SEQ ID NOs: 1886-2672, respectively and further in SEQ ID Nos: 5960-5971, 5972-5990, and 5996 -6001.

[0548] Candidate promoters are obtained by PCR and fused to a GUS reporter gene containing an intron. Both histochemical and fluormetric GUS assays are carried out on stably transformed rice and maize plants and GUS activity is detected in the transformants.

[0549] Further, transient assays with the promoter::GUS constructs are carried out in rice embryogenic callus and GUS activity is detected by histochemical staining according the protocol described below (see Example 12).

### Example 3.1

### Construction of Binary Promoter::Reporter Plasmids

[0550] To construct a binary promoter::reporter plasmid for rice transformation a vector containing a candidate promoter of interest (i.e., the DNA sequence 5′ of the initiation codon for the gene of interest) is used, which results from recombination in a BP reaction between a PCR product using the promoter of interest as a template and pDONR201™, producing an entry vector. The regulatory/promoter sequence is fused to the GUS reporter gene (Jefferson et al, 1987) by recombination using GATEWAY™ Technology according to manufacturers protocol as described in the Instruction Manual (GATEWAY™ Cloning Technology, GIBCO BRL, Rockville, Md. http://www.lifetech.com/).

[0551] Briefly, the Gateway Gus-intron-Gus (GIG)/NOS expression cassette is ligated into pNOV2117 binary vector in 5′ to 3′ orientation. The 4.1 kB expression cassette is ligated into the Kpn-I site of pNOV2117, then clones are screened for orientation to obtain pNOV2346, a GATEWAY™ adapted binary destination vector.

[0552] The promoter fragment in the entry vector is recombined via the LR reaction with the binary destination vector containing the GUS coding region with an intron that has an attR site 5′ to the GUS reporter, producing a binary vector with a promoter fused to the GUS reporter (pNOVCANDProm). The orientation of the inserted fragment is maintained by the att sequences and the final construct is verified by sequencing. The construct is then transformed into Agrobacterium tumefaciens strains by electroporation as described herein below.

### Example 3.2

### Transient Expression Analysis of Candidate Promoters in Rice Embryogenic Callus

[0553] 3.2.1 Materials

[0554] Embryogenic rice callus (Kaybonett cultivar)

[0555] LBA 4404 Agrobacterium strains

[0556] KCMS liquid media for re-suspending bacterial pellet

[0557] 200 mM stock (40mg/ml) Acetosyringone

[0558] Sterile filter paper discs (8.5 mm in diameter)

[0559] LB spec liquid culture

[0560] MS-CIM media plates

[0561] MS-AS plates (co-cultivation plates)

[0562] MS-Tim plates (recovery plates)

[0563] Gus staining solution

[0564] 3.2.2 Methods

[0565] 3.2.2.1 Induction of Embryogenic Callus

[0566] 1. Sterilize mature Kaybonett rice seeds in 40% ultra Clorox, 1 drop Tween 20, for 40 min.

[0567] 2. Rinse with sterile water and plate on MS-CIM media (12 seeds/plate)

[0568] 3. Grow in dark for four weeks.

[0569] 4. Isolate embryogenic calli from scutellum to MS-CIM

[0570] 5. Let grow in dark 8 days before use for transformation

[0571] 3.2.2.2 Agrobacterium Preparation and Induction

[0572] 1. Start 6 mL shaking cultures of LBA4404 Agrobacterium strains harboring rice promoter binary plasmids.

[0573] 2. Grow the cultures at room temperature for 48 hrs in the rotary shaker.

[0574] 3. Spin down the cultures at 8,000 rpm at 4° C. and re-suspend bacterial pellets in 10 ml of KCMS media supplemented with 100 □M Acetosyringone.

[0575] 4. Place in the shaker at room temp for 1 hr for induction of Agrobacterium virulence genes.

[0576] 5. In a sterile hood dilute Agrobacterium cultures 1:3 in KSMS media and transfer diluted cultures into deep petri dishes.

[0577] 3.2.2.3 Inoculation of Plant Material and Staining

[0578] 6. In a sterile hood transfer embryogenic callus into diluted Agrobacerium solution and incubate for 30 minutes.

[0579] 7. In a sterile hood blot callus tissue on sterile filter paper and transfer on MS-AS plates.

[0580] 8. Co-culture plates in 22° C. growth chamber in the dark for two days.

[0581] 9. In a sterile hood transfer callus tissue to MS-Tim plates for the tissue recovery (the presence of Timentin will prevent Agrobacterium growth).

[0582] 10. Incubate tissue on MS-Tim media for two days at 22° C. in the dark.

[0583] 11. Remove callus tissue from the plates and stain for 48 hrs. in GUS staining solution.

[0584] 12. De-stain tissue in 70% EtOH for 24 hours.

[0585] 3.2.2.4 Recipies

[0586] KCMS media (liquid), pH to 5.5

[0587] 100 ml/l MS Major Salts, 10 ml/l MS Minor Salts, 5 ml/l MS iron stock, 0.5M K₂HPO₄, 0.1 mg/ml Myo-Inositol,

[0588] 1.3 μg/ml Thiamine, 0.2 g/ml 2,4-D (1 mg/ml), 0.1 g/ml Kinetin, 3% Sucrose, 100 □M Acetosyringone

[0589] MS-CIM media, pH 5.8

[0590] MS Basal salt (4.3 g/L), B5 Vitamins (200×) (5 m/L), 2% Sucrose (20 g/L), Proline (500 mg/L), Glutamine (500 mg/L), Casein Hydrolysate (300 mg/L), 2 □g/ml 2,4-D, Phytagel (3 g/L)

[0591] MS-As Medium, pH 5.8

[0592] MS Basal salt (4.3 g/L), B5 Vitamins (200×) (5 m/L), 2% Sucrose (20 g/L), Proline (500 mg/L), Glutamine (500 mg/L), Casein Hydrolysate (300 mg/L), 2 □g/ml 2,4-D, Phytagel (3 g/L), 200 □M Acetosyringone

[0593] MS-Tim media, pH 5.8

[0594] MS Basal salt (4.3 g/L), B5 Vitamins (200×) (5 m/L), 2% Sucrose (20 g/L), Proline (500 mg/L), Glutamine (500 mg/L), Casein Hydrolysate (300 mg/L), 2□g/ml 2,4-D, Phytagel (3 g/L), 400 mg/l Timentin

[0595] Gus staining solution, pH 7

[0596] 0.3M Mannitol; 0.02M EDTA, pH=7.0; 0.04 NaH₂PO₄; 1 mM x-gluc

[0597] The binary Promoter::Reporter Plasmids described in Example 3 above can also be used for stable transformation of rice and maize plants according to the protocols provided in Examples 10.1 and 10.2, respectively.

| Pro- | | | | | | | | | | | | |
|---|---|---|---|---|---|---|---|---|---|---|---|---|
| moter | SEQ | Binary | leaf | leaf-2 | root | root-2 | flower | seed | anther | pollen | | Rice |
| Name | ID | Vector | y leaf | o leaf | stem | root | husk | kernel | silk | pollen | comments | Maize |
| RC11 | | pNOV6043 | − | | − | + | − | − | | | | Rice |
| RC11 | | pNOV6043 | − | | | + | − | +baz, | − | − | | Maize |
| | | | | | | | | e, s | | | | |
| RC2 | 5963 | pNOV6030 | −/+ | + | + | + | + | + | | | | Rice |
| RC2 | 5963 | pNOV6030 | − | − | | −/+ | − | +baz | − | −!′ | | Maize |
| RC26 | 5966 | pNOV6046 | − | + | − | + | − | − | | | | Rice |
| RC26 | 5966 | pNOV6046 | − | | | ++ | − | +baz | − | −! | | Maize |
| RC33 | 5968 | pNOV6044 | − | + | −/+ | + | − | − | | | | Rice |
| RC33 | 5968 | pNOV6044 | − | | | + | − | +baz, | − | −! | | Maize |
| | | | | | | | | s, p | | | | |
| RF1 | 5974 | pNOV6045 | − | + | − | + | − | − | | | | Rice |
| RF1 | 5974 | pNOV6045 | − | | | + | − | +baz | − | − | | Maize |
| RS10 | 5977 | pNOV6034 | − | | −/+ | −/+ | − | ++ | | | | Rice |
| RS10 | 5977 | pNOV6034 | − | | | + | − | ++ e | − | −! | Seed | Maize |
| | | | | | | | | | | | specific | |
| | | | | | | | | | | | root | |
| | | | | | | | | | | | back- | |
| | | | | | | | | | | | ground | |
| RS18 | 6001 | pNOV6035 | −/+ | −/+ | −/+ | −/+ | −/+ | +/− | | | | Rice |
| RS18 | 6001 | pNOV6035 | − | | | −/+ | | | | | | Maize |
| RS3 | 2275 | pNOV6031 | − | −/+ | − | + | ++ | ++ | | | | Rice |
| RS3 | 2275 | pNOV6031 | − | | | + | − | +baz | − | “−!” | Seed | Maize |
| | | | | | | | | | | | specific | |
| RS4 | 2276 | pNOV6032 | − | −/+ | −/+ | − | −/+ | +++ | | | | Rice |
| RS4 | 2276 | pNOV6032 | − | | | − | − | +++ ec | − | −! | Seed | Maize |
| | | | | | | | | | | | specific | |
| RS8 | 2283 | pNOV6033 | +/− | −/+ | − | −/+ | −/+ | +++ | ++ | − | | Rice |
| RS8 | 2283 | pNOV6033 | − | | | −/+ | − | ++ e, p | − | − | Seed | Maize |
| | | | | | | | | | | | specific | |
| ZmU | | pNOV6048 | ++ | | +++ | ++ | ++ | | | | Positive | Rice |
| BIin- | | | | | | | | | | | Control | |
| tron | | | | | | | | | | | | |
| ZmU | | pNOV6048 | ++ | | | +++ | +++ | +++ | ++ | +++ | Positive | Maize |
| BIin- | | | | | | | | | | | Control | |
| tron | | | | | | | | | | | | |

GUS staining scores:
+ = staining observed
++ = strong staining
+++ = very strong staining
− = no staining
“−!” = some pollen grains stained, probably contamination
+/− = some lines showed staining, but not all
−/+ = staining faint or seen in only 1 or 2 lines
blank = not analyzed yet
Note:
many RS seem to stain in kernel and root
Key:
baz − black abscission zone
s - scutellum
p - pedicel
e = endosperm or embryo
sc - seed coat

### EXAMPLE 4

### Rice Orthologs of Arabidopsis Tissue-specifically Expressed Genes Identified by Reverse Genetics

[0598] Understanding the function of every gene is the major challenge in the age of completely sequenced eukaryotic genomes. Sequence homology can be helpful in identifying possible functions of many genes. However, reverse genetics, the process of identifying the function of a gene by obtaining and studying the phenotype of an individual containing a mutation in that gene, is another approach to identify the function of a gene.

[0599] Reverse genetics in Arabidopsis has been aided by the establishment of large publicly available collections of insertion mutants (Krysan et al., (1999) Plant Cell 11, 2283-2290; Tisser et al., (1999) Plant Cell 11, 1841 -1852; Speulman et al., (1999). Plant Cell 11, 1853-1866; Parinov et al., (1999). Plant Cell 11, 2263-2270; Parinov and Sundaresan, 2000; Biotechnology 11, 157-161). Mutations in genes of interest are identified by screening the population by PCR amplification using primers derived from sequences near the insert border and the gene of interest to screen through large pools of individuals. Pools producing PCR products are confirmed by Southern hybridization and further deconvoluted into subpools until the individual is identified (Sussman et al., (2000) Plant Physiology 124, 1465-1467).

[0600] Recently, some groups have begun the process of sequencing insertion site flanking regions from individual plants in large insertion mutant populations, in effect prescreening a subset of lines for genomic insertion sites (Parinov et al., (1999) . Plant Cell 11, 2263-2270; Tisser et al., (1999) . Plant Cell 11, 1841-1852). The advantage to this approach is that the laborious and time-consuming process of PCR-based screening and deconvolution of pools is avoided.

[0601] A large database of insertion site flanking sequences from approximately 100,000 T-DNA mutagenized Arabidopsis plants of the Columbia ecotype (GARLIC lines) is prepared. T-DNA left border sequences from individual plants are amplified using a modified thermal asymmetric interlaced-polymerase chain reaction (TAIL-PCR) protocol (Liu et al., (1995) . Plant J. 8, 457-463). Left border TAIL-PCR products are sequenced and assembled into a database that associates sequence tags with each of the approximately 100,000 plants in the mutant collection. Screening the collection for insertions in genes of interest involves a simple gene name or sequence BLAST query of the insertion site flanking sequence database, and search results point to individual lines. Insertions are confirmed using PCR.

[0602] Analysis of the GARLIC insert lines suggests that there are 76,856 insertions that localize to a subset of the genome representing coding regions and promoters of 22,880 genes. Of these, 49,231 insertions lie in the promoters of over 18,572 genes, and an additional 27,625 insertions are located within the coding regions of 13,612 genes. Approximately 25,000 T-DNA left border mTAIL-PCR products (25% of the total 102,765) do not have significant matches to the subset of the genome representing promoters and coding regions, and are therefore presumed to lie in noncoding and/or repetitive regions of the genome.

[0603] The Arabidopsis T-DNA GARLIC insertion collection is used to investigate the roles of certain genes, which are expressed in specific plant tissues. Target genes are chosen using a variety of criteria, including public reports of mutant phenotypes, RNA profiling experiments, and sequence similarity to tissue-specific genes. Plant lines with insertions in genes of interest are then identified. Each T-DNA insertion line is represented by a seed lot collected from a plant that is hemizygous for a particular T-DNA insertion. Plants homozygous for insertions of interest are identified using a PCR assay. The seed produced by these plants is homozygous for the T-DNA insertion mutation of interest.

[0604] Homozygous mutant plants are tested for altered grain composition. The genes interrupted in these mutants contribute to the observed phenotype.

[0605] Rice orthologs of the Arabidopsis genes are identified by similarity searching of a rice database using the Double-Affine Smith-Waterman algorithm (BLASP with e values better than ⁻¹⁰).

### EXAMPLE 5

### Cloning and Sequencing of Nucleic Acid Molecules from Rice

[0606] 5.1 Genomic DNA. Plant genomic DNA samples are isolated from a collection of tissues which are listed in Table 1. Individual tissues are collected from a minimum of five plants and pooled. DNA can be isolated according to one of the three procedures, e.g., standard procedures described by Ausubel et al. (1995), a quick leaf prep described by Klimyuk et al. (1993), or using FTA paper (Life Technologies).

[0607] For the latter procedure, a piece of plant tissue such as, for example, leaf tissue is excised from the plant, placed on top of the FTA paper and covered with a small piece of parafilm that serves as a barrier material to prevent contamination of the crushing device. In order to drive the sap and cells from the plant tissue into the FTA paper matrix for effective cell lysis and nucleic acid entrapment, a crushing device is used to mash the tissue into the FTA paper. The FTA paper is air dried for an hour. For analysis of DNA, the samples can be archived on the paper until analysis. Two mm punches are removed from the specimen area on the FTA paper using a 2 mm Harris Micro Punch™ and placed into PCR tubes. Two hundred (200) microliters of FTA purification reagent is added to the tube containing the punch and vortexed at low speed for 2 seconds. The tube is then incubated at room temperature for 5 minutes. The solution is removed with a pipette so as to repeat the wash one more time. Two hundred (200) microliters of TE (10 mM Tris, 0.1 mM EDTA, pH 8.0) is added and the wash is repeated two more times. The PCR mix is added directly to the punch for subsequent PCR reactions.

[0608] 5.2 Cloning of Candidate cDNA: A candidate cDNA is amplified from total RNA isolated from rice tissue after reverse transcription using primers designed against the computationally predicted cDNA. Primers designed based on the genomic sequence can be used to PCR amplify the full-length cDNA (start to stop codon) from first strand cDNA prepared from rice cultivar Nipponbare tissue.

[0609] The Qiagen RNeasy kit (Qiagen, Hilden, Germany) is used for extraction of total RNA. The Superscript II kit (Invitrogen, Carlsbad, USA) is used for the reverse transcription reaction. PCR amplification of the candidate cDNA is carried out using the reverse primer sequence located at the translation start of the candidate gene in 5′-3′ direction. This is performed with high-fidelity Taq polymerase (Invitrogen, Carlsbad, USA).

[0610] The PCR fragment is then cloned into pCR2.1-TOPO (Invitrogen) or the pGEM-T easy vector (Promega Corporation, Madison, Wis., USA) per the manufacturer's instructions, and several individual clones are subjected to sequencing analysis.

[0611] 5.3 DNA sequencing: DNA preps for 2-4 independent clones are miniprepped following the manufacturer's instructions (Qiagen). DNA is subjected to sequencing analysis using the BigDye™ Terminator Kit according to manufacturer's instructions (ABI). Sequencing makes use of primers designed to both strands of the predicted gene of interest. DNA sequencing is performed using standard dye-terminator sequencing procedures and automated sequencers (models 373 and 377; Applied Biosystems, Foster City, Calif.). All sequencing data are analyzed and assembled using the Phred/Phrap/Consed software package (University of Washington) to an error ratio equal to or less than 10⁻⁴ at the consensus sequence level.

[0612] The consensus sequence from the sequencing analysis is then to be validated as being intact and the correct gene in several ways. The coding region is checked for being full length (predicted start and stop codons present) and uninterrupted (no internal stop codons). Alignment with the gene prediction and BLAST analysis is used to ascertain that this is intact the right gene.

[0613] The clones are sequenced to verify their correct amplification.

### EXAMPLE 6

### Functional Analysis in Plants

[0614] A plant complementation assay can be used for the functional characterization of the tissue-specifically expressed genes according to the invention.

[0615] Rice and Arabidopsis putative orthologue pairs are identified using BLAST comparisons, TFASTXY comparisons, and Double-Affine Smith-Waterman similarity searches. Constructs containing a rice cDNA or genomic clone inserted between the promoter and terminator of the Arabidopsis orthologue are generated using overlap PCR (Gene 77, 61-68 (1989)) and GATEWAY cloning (Life Technologies Invitrogen). For ease of cloning, rice cDNA clones are preferred to rice genomic clones. A three stage PCR strategy is used to make these constructs.

[0616] (1) In the first stage, primers are used to PCR amplify: (i) 2 Kb upstream of the translation start site of the Arabidopsis orthologue, (ii) the coding region or cDNA of the rice orthologue, and (iii) the 500 bp immediately downstream of the Arabidopsis orthogue's translation stop site. Primers are designed to incorporate onto their 5′ ends at least 16 bases of the 3′ end of the adjacent fragment, except in the case of the most distal primers which flank the gene construct (the forward primer of the promoter and the reverse primer of the terminator). The forward primer of the promoters contains on their 5′ ends partial AttB 1 sites, and the reverse primer of the terminators contains on their 5′ ends partial AttB2 sites, for Gateway cloning.

[0617] (2) In the second stage, overlap PCR is used to join either the promoter and the coding region, or the coding region and the terminator.

[0618] (3) In the third stage either the promoter-coding region product can be joined to the terminator or the coding region-terminator product can be joined to the promoter, using overlap PCR and amplification with full Att site-containing primers, to link all three fragments, and put full Att sites at the construct termini.

[0619] The fused three-fragment piece flanked by Gateway cloning sites are introduced into the LTI donor vector pDONR201 using the BP clonase reaction, for confirmation by sequencing. Confirmed sequenced constructs are introduced into a binary vector containing Gateway cloning sites, using the LR clonase reaction such as, for example, pAS200.

[0620] The pAS200 vector was created by inserting the Gateway cloning cassette RfA into the Acc651 site of pNOV3510.

[0621] pNOV3510 was created by ligation of inverted pNOV2114 VSI binary into pNOV3507, a vector containing a PTX5′ Arab Protox promoter driving the PPO gene with the Nos terminator.

[0622] pNOV2 114 was created by insertion of virGN54D (Pazour et al. 1992, J. Bacteriol. 174:4169-4174) from pAD1289 (Hansen et al. 1994, PNAS 91:7603-7607) into pHiNK085.

[0623] pHiNK085 was created by deleting the 35S:PMI cassette and M13 ori in pVictorHiNK.

[0624] pPVictorHiNK was created by modifying the T-DNA of pVictor (described in WO 97/04112) to delete M13 derived sequences and to improve its cloning versatility by introducing the BIGLINK polylinker.

[0625] The sequence of the pVictor HiNK vector is disclosed in SEQ ID NO: 5 in WO 00/6837, which is incorporated herein by reference. The pVictorHiNK vector contains the following constituents that are of functional importance:

[0626] The origin of replication (ORI) functional in Agrobacterium is derived from the Pseudomonas aeruginosa plasmid pVS1 (Itoh et al. 1984. Plasmid 11: 206-220; Itoh and Haas, 1985. Gene 36: 27-36). The pVS1 ORI is only functional in Agrobacterium and can be mobilised by the helper plasmid pRK2013 from E.coli into A. tumefaciens by means of a triparental mating procedure (Ditta et al., 1980. Proc. Natl. Acad. Sci USA 77: 7347-7351).

[0627] The ColE1 origin of replication functional in E. coli is derived from pUC 19 (Yannisch-Perron et al., 1985. Gene 33: 103-119).

[0628] The bacterial resistance to spectinomycin and streptomycin encoded by a 0.93 kb fragment from transposon Tn7 (Fling et al., 1985. Nucl. Acids Res. 13: 7095) functions as selectable marker for maintenance of the vector in E. coli and Agrobacterium The gene is fused to the tac promoter for efficient bacterial expression (Amman et al., 1983. Gene 25: 167-178).

[0629] The right and left T-DNA border fragments of 1.9 kb and 0.9 kb that comprise the 24 bp border repeats, have been derived from the Ti-plasmid of the nopaline type Agrobacterium tumefaciens strains pTiT37 (Yadav et al., 1982. Proc. Natl. Acad. Sci. USA. 79: 6322-6326).

[0630] The plasmid is introduced into Agrobacterium tumefaciens GV3101 pMP90 by electroporation. The positive bacterial transformants are selected on LB medium containing 50 μg/μl kanamycin and 25 μg/μl gentamycin. Plants are transformed by standard methodology (e.g., by dipping flowers into a solution containing the Agrobacterium) except that 0.02% Silwet-77 (Lehle Seeds, Round Rock, Tex.) is added to the bacterial suspension and the vacuum step omitted. Five hundred (500) mg of seeds are planted per 2 ft² flat of soil and and progeny seeds are selected for transformants using PPO selection.

[0631] Primary transformants are analyzed for complementation. Primary transformants are genotyped for the Arabidopsis mutation and presence of the transgene. When possible, >50 mutants harboring the transgene should be phenotyped to observe variation due to transgene copy number and expression.

### EXAMPLE 7

### Vector Construction for Overexpression and Gene “Knockout” Experiments

[0632] 7.1 Overexpression

[0633] Vectors used for expression of full-length “candidate genes” of interest in plants (overexpression) are designed to overexpress the protein of interest and are of two general types, biolistic and binary, depending on the plant transformation method to be used.

[0634] For biolistic transformation (biolistic vectors), the requirements are as follows:

[0635] 1. a backbone with a bacterial selectable marker (typically, an antibiotic resistance gene) and origin of replication functional in Escherichia coli (E. coli ; eg. ColE1), and

[0636] 2. a plant-specific portion consisting of:

[0637] a. a gene expression cassette consisting of a promoter (eg. ZmUBIint MOD), the gene of interest (typically, a full-length cDNA) and a transcriptional terminator (eg. Agrobacterium tumefaciens nos terminator);

[0638] b. a plant selectable marker cassette, consisting of a promoter (eg. rice Act1D-BV MOD), selectable marker gene (eg. phosphomannose isomerase, PMI) and transcriptional terminator (eg. CaMV terminator).

[0639] Vectors designed for transformation by Agrobacterium tumefaciens (A. tumefaciens; binary vectors) consist of:

[0640] 1. a backbone with a bacterial selectable marker functional in both E. coli and A. tumefaciens (eg. spectinomycin resistance mediated by the aadA gene) and two origins of replication, functional in each of aforementioned bacterial hosts, plus the A. tumefaciens virG gene;

[0641] 2. a plant-specific portion as described for biolistic vectors above, except in this instance this portion is flanked by A. tumefaciens right and left border sequences which mediate transfer of the DNA flanked by these two sequences to the plant.

[0642] 7.2 Knock Out Vectors

[0643] Vectors designed for reducing or abolishing expression of a single gene or of a family or related genes (knockout vectors) are also of two general types corresponding to the methodology used to downregulate gene expression: antisense or double-stranded RNA interference (dsRNAi).

[0644] (a) Anti-sense

[0645] For antisense vectors, a full-length or partial gene fragment (typically, a portion of the cDNA) can be used in the same vectors described for full-length expression, as part of the gene expression cassette. For antisense-mediated down-regulation of gene expression, the coding region of the gene or gene fragment will be in the opposite orientation relative to the promoter; thus, mRNA will be made from the non-coding (antisense) strand in planta.

[0646] (b) dsRNAi

[0647] For dsRNAi vectors, a partial gene fragment (typically, 300 to 500 basepairs long) is used in the gene expression cassette, and is expressed in both the sense and antisense orientations, separated by a spacer region (typically, a plant intron, eg. the OsSH1 intron 1, or a selectable marker, eg. conferring kanamycin resistance). Vectors of this type are designed to form a double-stranded mRNA stem, resulting from the basepairing of the two complementary gene fragments in planta.

[0648] Biolistic or binary vectors designed for overexpression or knockout can vary in a number of different ways, including eg. the selectable markers used in plant and bacteria, the transcriptional terminators used in the gene expression and plant selectable marker cassettes, and the methodologies used for cloning in gene or gene fragments of interest (typically, conventional restriction enzyme-mediated or Gateway™ recombinase-based cloning). An important variant is the nature of the gene expression cassette promoter driving expression of the gene or gene fragment of interest in most tissues of the plants (constitutive, eg. ZmUBIint MOD), in specific plant tissues (eg. maize ADP-gpp for endosperm-specific expression), or in an inducible fashion (eg. GAL4bsBz1 for estradiol-inducible expression in lines constitutively expressing the cognate transcriptional activator for this promoter).

### EXAMPLE 8

### Insertion of a “Candidate Gene” into Expression Vector

[0649] A validated rice cDNA clone in pCR2.1-TOPO or the pGEM-T easy vector is subcloned using conventional restriction enzyme-based cloning into a vector, downstream of the maize ubiquitin promoter and intron, and upstream of the Agrobacterium tumefaciens nos 3′ end transcriptional terminator. The resultant gene expression cassette (promoter, “candidate gene” and terminator) is further subcloned, using conventional restriction enzyme-based cloning, into the pNOV2117 binary vector (Negrotto et al (2000) Plant Cell Reports 19, 798-803; plasmid pNOV117 disclosed in this article corresponds to pNOV2117 described herein), generating pNOVCAND.

[0650] The pNOVCAND binary vector is designed for transformation and over-expression of the “candidate gene” in monocots. It consists of a binary backbone containing the sequences necessary for selection and growth in Escherichia coli DH-5α (Invitrogen) and Agrobacterium tumefaciens LBA4404 (pAL4404; pSB1), including the bacterial spectinomycin antibiotic resistance aadA gene from E. coli transposon Tn7, origins of replication for E. coli (ColE1) and A. tumefaciens (VS1), and the A. tumefaciens virG gene. In addition to the binary backbone, which is identical to that of pNOV2114 described herein previously (see Example 5 above), pNOV2117 contains the T-DNA portion flanked by the right and left border sequences, and including the Positech™ (Syngenta) plant selectable marker (WO 94/20627) and the “candidate gene” gene expression cassette. The Positech™ plant selectable marker confers resistance to mannose and in this instance consists of the maize ubiquitin promoter driving expression of the PMI (phosphomannose isomerase) gene, followed by the cauliflower mosaic virus transcriptional terminator.

[0651] Plasmid pNOV2117 is introduced into Agrobacterium tumefaciens LBA4404 (pAL4404; pSB1) by electroporation. Plasmid pAL4404 is a disarmed helper plasmid (Ooms et al (1982) Plasmid 7, 15-29). Plasmid pSB1 is a plasmid with a wide host range that contains a region of homology to pNOV2117 and a 15.2 kb KpnI fragment from the virulence region of pTiBo542 (Ishida et al (1996) Nat Biotechnol 14, 745-750). Introduction of plasmid pNOV2117 into Agrobacterium strain LBA4404 results in a co-integration of pNOV2117 and pSB1.

[0652] Alternatively, plasmid pCIB7613, which contains the hygromycin phosphotransferase (hpt) gene (Gritz and Davies, Gene 25, 179-188, 1983) as a selectable marker, may be employed for transformation.

[0653] Plasmid pCIB7613 (see WO 98/06860, incorporated herein by reference in its entirety) is selected for rice transformation. In pCIB7613, the transcription of the nucleic acid sequence coding hygromycin-phosphotransferase (HYG gene) is driven by the corn ubiquitin promoter (ZmUbi) and enhanced by corn ubiquitin intron 1. The 3′polyadenylation signal is provided by NOS 3′ nontranslated region.

[0654] Other useful plasmids include pNADII002 (GAL4-ER-VP16) which contains the yeast GAL4 DNA Binding domain (Keegan et al., Science, 231:699 (1986)), the mammalian estrogen receptor ligand binding domain (Greene et al., Science, 231 :1150 (1986)) and the transcriptional activation domain of the HSV VP16 protein (Triezenberg et al.,1988). Both hpt and GAL4-ER-VP16 are constitutively expressed using the maize Ubiquitin promoter, and pSGCDL1 (GAL4BS Bz1 Luciferase), which carries the firefly luciferase reporter gene under control of a minimal maize Bronze1 (Bz1) promoter with 10 upstream synthetic GAL4 binding sites. All constructs use termination signals from the nopaline synthase gene.

### EXAMPLE 9

### Plant Transformation

### Example 9.1

### Rice Transformation

[0655] pNOVCAND is transformed into a rice cultivar (Kaybonnet) using Agrobacterium-mediated transformation, and mannose-resistant calli are selected and regenerated.

[0656] Agrobacterium is grown on YPC solid plates for 2-3 days prior to experiment initiation. Agrobacterial colonies are suspended in liquid MS media to an OD of 0.2 at λ600 nm. Acetosyringone is added to the agrobacterial suspension to a concentration of 200 μM and agro is induced for 30 min.

[0657] Three-week-old calli which are induced from the scutellum of mature seeds in the N6 medium (Chu, C. C. et al., Sci, Sin., 18, 659-668(1975)) are incubated in the agrobacterium solution in a 100×25 petri plate for 30 minutes with occasional shaking. The solution is then, removed with a pipet and the callus transfered to a MSAs medium which is overlayed with sterile filter paper.

[0658] Co-Cultivation is continued for 2 days in the dark at 22° C.

[0659] Calli are then placed on MS-Timetin plates for 1 week. After that they are tranfered to PAA+ mannose selection media for 3 weeks.

[0660] Growing calli (putative events) are picked and transfered to PAA+ mannose media and cultivated for 2 weeks in light.

[0661] Colonies are tranfered to MS20SorbKinTim regeneration media in plates for 2 weeks in light. Small plantlets are transferred to MS20SorbKinTim regeneration media in GA7 containers. When they reach the lid, they are transfered to soil in the greenhouse.

[0662] Expression of the “candidate gene” in transgenic To plants is analyzed. Additional rice cultivars, such as but not limited to, Nipponbare, Taipei 309 and Fuzisaka 2 are also transformed and assayed for expression of the “candidate gene” product and enhanced protein expression.

### Example 9.2

### Maize Transformation

[0663] Transformation of immature maize embryos is performed essentially as described in Negrotto et al., (2000) Plant Cell Reports 19: 798-803. For this example, all media constituents are as described in Negrotto et al., supra. However, various media constituents described in the literature may be substituted.

[0664] 9.2.1. Transformation Plasmids and Selectable Marker

[0665] The genes used for transformation are cloned into a vector suitable for maize transformation as described in Example 17. Vectors used contain the phosphomannose isomerase (PMI) gene (Negrotto et al. (2000) Plant Cell Reports 19: 798-803).

[0666] 9.2.2. Preparation of Agrobacterium tumefaciens

[0667] Agrobacterium strain LBA4404 (pSB1) containing the plant transformation plasmid is grown on YEP (yeast extract (5 g/L), peptone (10 g/L), NaCl (5 g/L),15 g/l agar, pH 6.8) solid medium for 2 to 4 days at 28° C. Approximately 0.8×10⁹ Agrobacteria are suspended in LS-inf media supplemented with 100 □M, acetosyringone (As) (Negrotto et al.,(2000) Plant Cell Rep 19: 798-803). Bacteria are pre-induced in this medium for 30-60 minutes.

[0668] 9.2.3. Inoculation

[0669] Immature embryos from A188 or other suitable maize genotypes are excised from 8-12 day old ears into liquid LS-inf+100 □M As. Embryos are rinsed once with fresh infection medium. Agrobacterium solution is then added and embryos are vortexed for 30 seconds and allowed to settle with the bacteria for 5 minutes. The embryos are then transferred scutellum side up to LSAs medium and cultured in the dark for two to three days. Subsequently, between 20 and 25 embryos per petri plate are transferred to LSDc medium supplemented with cefotaxime (250 mg/l) and silver nitrate (1.6 mg/l) and cultured in the dark for 28° C. for 10 days.

[0670] 9.2.4. Selection of Transformed Cells and Regeneration of Transformed Plants

[0671] Immature embryos producing embryogenic callus are transferred to LSD1M0.5S medium. The cultures are selected on this medium for 6 weeks with a subculture step at 3 weeks. Surviving calli are transferred either to LSD1M0.5S medium to be bulked-up or to Reg1 medium. Following culturing in the light (16 hour light/8 hour dark regiment), green tissues are then transferred to Reg2 medium without growth regulators and incubated for 1-2 weeks. Plantlets are transferred to Magenta GA-7 boxes (Magenta Corp, Chicago Ill.) containing Reg3 medium and grown in the light. Plants that are PCR positive for the promoter-reporter cassette are transferred to soil and grown in the greenhouse.

### EXAMPLE 10

### Chromosomal Markers to Identify the Location of a Nucleic Acid Sequence

[0672] The sequences of the present invention can also be used for SSR mapping. SSR mapping in rice has been described by Miyao et al. (DNA Res 3:233 (1996)) and Yang et al. (Mol Gen Genet 245:187 (1994)), and in maize by Ahn et al. (Mol Gen Genet 241:483 (1993)). SSR mapping can be achieved using various methods. In one instance, polymorphisms are identified when sequence specific probes flanking an SSR contained within a sequence are made and used in polymerase chain reaction (PCR) assays with template DNA from two or more individuals or, in plants, near isogenic lines. A change in the number of tandem repeats between the SSR-flanking sequence produces differently sized fragments (U.S. Pat. No. 5,766,847). Alternatively, polymorphisms can be identified by using the PCR fragment produced from the SSR-flanking sequence specific primer reaction as a probe against Southern blots representing different individuals (Refseth et al., Electrophoresis 18:1519 (1997)). Rice SSRs can be used to map a molecular marker closely linked to functional gene, as described by Akagi et al. (Genome 39:205 (1996)).

[0673] The sequences of the present invention can be used to identify and develop a variety of microsatellite markers, including the SSRs described above, as genetic markers for comparative analysis and mapping of genomes.

[0674] Many of the polynucleotides listed in Tables 2 to 11 contain at least 3 consecutive di-, tri- or tetranucleotide repeat units in their coding region that can potentially be developed into SSR markers. Trinucleotide motifs that can be commonly found in the coding regions of said polynucleotides and easily identified by screening the polynucleotides sequences for said motifs are, for example: CGG; GCC, CGC, GGC, etc. Once such a repeat unit has been found, primers can be designed which are complementary to the region flanking the repeat unit and used in any of the methods described below.

[0675] Sequences of the present invention can also be used in a variation of the SSR technique known as inter-SSR (ISSR), which uses microsatellite oligonucleotides as primers to amplify genomic segments different from the repeat region itself (Zietkiewicz et al., Genomics 20:176 (1994)). ISSR employs oligonucleotides based on a simple sequence repeat anchored or not at their 5′- or 3′-end by two to four arbitrarily chosen nucleotides, which triggers site-specific annealing and initiates PCR amplification of genomic segments which are flanked by inversely orientated and closely spaced repeat sequences. In one embodiment of the present invention, microsatellite markers as disclosed herein, or substantially similar sequences or allelic variants thereof, may be used to detect the appearance or disappearance of markers indicating genomic instability as described by Leroy et al. (Electron. J Biotechnol, 3(2), at http://www.ejb.org (2000)), where alteration of a fingerprinting pattern indicated loss of a marker corresponding to a part of a gene involved in the regulation of cell proliferation. Microsatellite markers are useful for detecting genomic alterations such as the change observed by Leroy et al. (Electron. J Biotechnol, 3(2), supra (2000)) which appeared to be the consequence of microsatellite instability at the primer binding site or modification of the region between the microsatellites, and illustrated somaclonal variation leading to genomic instability. Consequently, sequences of the present invention are useful for detecting genomic alterations involved in somaclonal variation, which is an important source of new phenotypes.

[0676] In addition, because the genomes of closely related species are largely syntenic (that is, they display the same ordering of genes within the genome), these maps can be used to isolate novel alleles from wild relatives of crop species by positional cloning strategies. This shared synteny is very powerful for using genetic maps from one species to map genes in another. For example, a gene mapped in rice provides information for the gene location in maize and wheat.

### EXAMPLE 11

### Quantitative Trait Linked Breeding

[0677] Various types of maps can be used with the sequences of the invention to identify Quantitative Trait Loci (QTLs) for a variety of uses, including marker-assisted breeding. Many important crop traits are quantitative traits and result from the combined interactions of several genes. These genes reside at different loci in the genome, often on different chromosomes, and generally exhibit multiple alleles at each locus. Developing markers, tools, and methods to identify and isolate the QTLs involved in a trait, enables marker-assisted breeding to enhance desirable traits or suppress undesirable traits. The sequences disclosed herein can be used as markers for QTLs to assist marker-assisted breeding. The sequences of the invention can be used to identify QTLs and isolate alleles as described by Li et al. in a study of QTLs involved in resistance to a pathogen of rice. (Li et al., Mol Gen Genet 261:58 (1999)). In addition to isolating QTL alleles in rice, other cereals, and other monocot and dicot crop species, the sequences of the invention can also be used to isolate alleles from the corresponding QTL(s) of wild relatives. Transgenic plants having various combinations of QTL alleles can then be created and the effects of the combinations measured. Once an ideal allele combination has been identified, crop improvement can be accomplished either through biotechnological means or by directed conventional breeding programs. (Flowers et al., J Exp Bot 51:99 (2000); Tanksley and McCouch, Science 277:1063 (1997)).

### EXAMPLE 12

### Marker-Assisted Breeding

[0678] Markers or genes associated with specific desirable or undesirable traits are known and used in marker assisted breeding programs. It is particularly beneficial to be able to screen large numbers of markers and large numbers of candidate parental plants or progeny plants. The methods of the invention allow high volume, multiplex screening for numerous markers from numerous individuals simultaneously.

[0679] Markers or genes associated with specific desirable or undesirable traits are known and used in marker assisted breeding programs. It is particularly beneficial to be able to screen large numbers of markers and large numbers of candidate parental plants or progeny plants. The methods of the invention allow high volume, multiplex screening for numerous markers from numerous individuals simultaneously.

[0680] A multiplex assay is designed providing SSRs specific to each of the markers of interest. The SSRs are linked to different classes of beads. All of the relevant markers may be expressed genes, so RNA or cDNA techniques are appropriate. RNA is extracted from root tissue of 1000 different individual plants and hybridized in parallel reactions with the different classes of beads. Each class of beads is analyzed for each sample using a microfluidics analyzer. For the classes of beads corresponding to qualitative traits, qualitative measures of presence or absence of the target gene are recorded. For the classes of beads corresponding to quantitative traits, quantitative measures of gene activity are recorded. Individuals showing activity of all of the qualitative genes and highest expression levels of the quantitative traits are selected for further breeding steps. In procedures wherein no individuals have desirable results for all the measured genes, individuals having the most desirable, and fewest undesirable, results are selected for further breeding steps. In either case, progeny are screened to further select for homozygotes with high quantitative levels of expression of the quantitative traits.

### EXAMPLE 13

### Method of Modifying the Gene Frequency

[0681] The invention further provides a method of modifying the frequency of a gene in a plant population, including the steps of: identifying an SSR within a coding region of a gene; screening a plurality of plants using the SSR as a marker to determine the presence or absence of the gene in an individual plant; selecting at least one individual plant for breeding based on the presence or absence of the gene; and breeding at least one plant thus selected to produce a population of plants having a modified frequency of the gene. The identification of the SSR within the coding region of a gene can be accomplished based on sequence similarity between the nucleic acid molecules of the invention and the region within the gene of interest flanking the SSR.

TABLE 1
SEQ ID NOs and corresponding description for Oryza genes which are expressed in a constitutive manner
and further SEQ ID NOs for the corresponding homologous sequences found in wheat, banana and maize.

| | | | | | |
|---|---|---|---|---|---|
| ORF | Promo | | Wheat | Bana | Maize |
| (SEQ | (SEQ | | (SEQ | (SEQ | (SEQ |
| ID) | ID) | Description | ID) | ID) | ID) |

Constitutively Expressed

| | | | | | |
|---|---|---|---|---|---|
| 3* | | Similar to gi\|1136122\|emb\|CAA62917.1\|alfa-tubulin | 3336, 4234, | 5016 | 5557 |
| | | [Oryza sativa] | 4233, 2877, | | |
| | | | 4232, 3760, | | |
| | | | 4228, 4229, | | |
| | | | 3144, 3143, | | |
| | | | 3335, 4230, | | |
| | | | 3145, 3215, | | |
| | | | 4231, 2974 | | |
| 6* | 1601 | Similar to YER4_YEAST P40057 | | | |
| | | SACCHAROMYCES CEREVISIAE (BAKER S | | | |
| | | YEAST). HYPOTHETICAL 14.3 KD PROTEIN IN | | | |
| | | PTP3-ILV1 INTERGENIC REGION. | | | |
| 8* | | Similar to V7K_BYDVP P09517 BARLEY YELLOW | | | |
| | | DWARF VIRUS (ISOLATE PAV) (BYDV). 6.7 KD | | | |
| | | PROTEIN (ORF 5). | | | |
| 23* | 1613 | Similar to UL51_HSV11 P10235 HERPES SIMPLEX | | | 5666 |
| | | VIRUS (TYPE 1/STRAIN 17). PROTEIN UL51. | | | |
| 19* | 1610 | Similar to DUAL CHICK Q90830 GALLUS | | | 5735 |
| | | GALLUS (CHICKEN). DUALIN. | | | |
| 15* | 1607 | Open Reading Frame containing a Sage tag sequence | | | 5731 |
| | | near 3 end OS_ORF007907 ST(F) HTC047420- | | | |
| | | A01.R.21 FRAME: −1 ORF: 2 LEN: 555 | | | |
| 17* | 1608 | Similar to ICP0_PRVIF P29129 PSEUDORABIES | | | |
| | | VIRUS (STRAIN INDIANA-FUNKHAUSER / | | | |
| | | BECKER) (PRV). TRANS-ACTING | | | |
| | | TRANSCRIPTIONAL PROTEIN ICP0 (EARLY | | | |
| | | PROTEIN 0) (EP0). | | | |
| 9* | 1602 | Similar to TCTP_MEDSA P28014 Q40370 | 3404, 3104 | 5157 | 5388 |
| | | MEDICAGO SATIVA (ALFALFA). | | | |
| | | TRANSLATIONALLY CONTROLLED TUMOR | | | |
| | | PROTEIN HOMOLOG (TCTP). | | | |
| 22*″ | | Open Reading Frame OS_ORF001266 HTC007198- | | | |
| | | A01.6 FRAME: −2 ORF: 1 LEN: 669 | | | |
| 13* | 1605 | Similar to gi\|166742\|gb\|AAA32811.1\|histone H4 | 4225, 4189, | 5206 | 5654 |
| | | | 4129, 4224, | | |
| | | | 3756, 4274, | | |
| | | | 3725, 3735, | | |
| | | | 3776, 3739, | | |
| | | | 4268, 3743, | | |
| | | | 4242, 4281, | | |
| | | | 4278, 4243, | | |
| | | | 3728, 4279, | | |
| | | | 3748, 3753, | | |
| | | | 4130, 4183, | | |
| | | | 4244, 3750, | | |
| | | | 4261, 4216, | | |
| | | | 4203, 3774, | | |
| | | | 4201, 4245, | | |
| | | | 3746, 3759, | | |
| | | | 3757, 3714, | | |
| | | | 4260, 4250, | | |
| | | | 4280, 4182, | | |
| | | | 4037, 3761, | | |
| | | | 4217, 4202, | | |
| | | | 4190, 4140, | | |
| | | | 4263, 3765, | | |
| | | | 3752, 4096, | | |
| | | | 3737, 3742 | | |
| 5* | | Similar to EF1A_MAIZE Q41803 ZEA MAYS | 3850, 3858, | 5023 | 5610 |
| | | (MAIZE). ELONGATION FACTOR 1-ALPHA (EF-1- | 3852, 3832, | | |
| | | ALPHA). | 3859, 3857, | | |
| | | | 3856, 3853, | | |
| | | | 3855, 3830, | | |
| | | | 3851, 3854, | | |
| | | | 3846, 3860, | | |
| | | | 2963, 3835, | | |
| | | | 3836, 2939, | | |
| | | | 3847, 3845, | | |
| | | | 3831 | | |
| 18* | 1609 | Similar to gi\|8778551\|gb\|AAF79559.1\|AC022464_17 | | | 5632 |
| | | F22G5.35 [Arabidopsis thaliana] | | | |
| 1* | 1598 | Similar to gi\|2145360\|emb\|CAA70105.1\|Hsc70-G8 | 3311, 2923, | 5150 | 5609 |
| | | protein [Arabidopsis thaliana] | 3808, 3806, | | |
| | | | 3494, 3804, | | |
| | | | 3598, 3807, | | |
| | | | 2874, 3805, | | |
| | | | 3596, 3602, | | |
| | | | 2873, 3600, | | |
| | | | 4240, 3439, | | |
| | | | 3597, 4239, | | |
| | | | 3593, 4241, | | |
| | | | 3438, 3592, | | |
| | | | 3459, 3594, | | |
| | | | 3590, 2975, | | |
| | | | 2989 | | |
| 7*″ | | Open Reading Frame containing a Sage tag sequence | | | 5840 |
| | | near 3 end OS_ORF014602 ST(F) HTC094277- | | | |
| | | A01.F.15 FRAME: 3 ORF: 1 LEN: 546 | | | |
| 16*″ | | Similar to VGLI_HSVBS Q08102 BOVINE | | | 5364 |
| | | HERPESVIRUS TYPE 1.2 (STRAIN ST). | | | |
| | | GLYCOPROTEIN I. | | | |
| 12*″ | 1604 | Similar to STRR_STRGR P08076 STREPTOMYCES | | | |
| | | GRISEUS. STREPTOMYCIN BIOSYNTHESIS | | | |
| | | OPERON POSSIBLE REGULATORY PROTEIN. | | | |
| 14*″ | 1606 | Open Reading Frame OS_ORF010093 ST(R) | | 5090 | 5493 |
| | | HTC060970-A01.F.4 FRAME: 1 ORF: 2 LEN: 891 | | | |
| 21*″ | 1612 | Similar to ULC5_HCMVA P16835 HUMAN | | | |
| | | CYTOMEGALOVIRUS (STRAIN AD169). | | | |
| | | HYPOTHETICAL PROTEIN UL125. | | | |
| 24*″ | 1614 | Similar to UL33_HSVEB P28953 EQUINE | | | |
| | | HERPESVIRUS TYPE 1 (STRAIN AB4P) (EHV-1). | | | |
| | | GENE 27 PROTEIN. | | | |
| 4*″ | 1600 | Similar to gi\|303857\|dbj\|BAA02154.1\| | | 5211 | 5480 |
| | | ubiquitin/ribosomal polyprotein [Oryza sativa] | | | |
| 11*″ | | Open Reading Frame containing a Sage tag sequence | | | |
| | | near 3 end OS_ORF019788 ST(F) HTC133660- | | | |
| | | A01.F.18 FRAME: −3 ORF: 3 LEN: 543 | | | |
| 20*″ | 1611 | Similar to gi\|5103822\|gb\|AAD39652.1\|AC007591_17 | | 4954 | 5522 |
| | | ESTs gb\|R30529, gb\|Z48463, gb\|Z48467, | | | |
| | | gb\|AA597369 and gb\|AA394772 come from this gene. | | | |
| | | [Arabidopsis thaliana] | | | |
| 2*″ | 1599 | Similar to gi\|4646220\|gb\|AAD26886.1\|AC007290_5 | | | 5834 |
| | | hypothetical protein [Arabidopsis thaliana] | | | |
| 75*″ | | Similar to H3_ENCAL P08903 ENCEPHALARTOS | 3582, 3564, | 4978 | 5672 |
| | | ALTENSTEINII (ALTENSTEIN S BREAD TREE) | 3560, 3563, | | |
| | | (CYCAD). HISTONE H3. | 3552, 3569, | | |
| | | | 3583, 3578, | | |
| | | | 3580, 3577, | | |
| | | | 3511, 3529, | | |
| | | | 3562, 3515, | | |
| | | | 3585, 3579, | | |
| | | | 3525, 3587, | | |
| | | | 3574, 3567, | | |
| | | | 3544, 3532, | | |
| | | | 3570, 3531, | | |
| | | | 3528, 3559, | | |
| | | | 3588, 3571, | | |
| | | | 3540, 3565, | | |
| | | | 3533, 3573, | | |
| | | | 3572, 3575, | | |
| | | | 3535, 3566, | | |
| | | | 3589, 3584, | | |
| | | | 3576, 3512, | | |
| | | | 3530, 3520, | | |
| | | | 3536, 3568, | | |
| | | | 3521, 3513, | | |
| | | | 3516, 3534, | | |
| | | | 3581, 3537 | | |
| 62*″ | | Similar to SGF3_BOMMO Q17237 BOMBYX MORI | | | |
| | | (SILK MOTH). SILK GLAND FACTOR 3 (POU | | | |
| | | DOMAIN PROTEIN M1). | | | |
| 128*″ | 1684 | Similar to gi\|3406035\|gb\|AAC29139.1\|TINY | | | 5786 |
| | | [Arabidopsis thaliana] | | | |
| 121*″ | 1678 | Open Reading Frame OS_ORF017490 HTC116385- | | | 5616 |
| | | A01.F.8 FRAME: −3 ORF: 1 LEN: 675 | | | |
| 92*″ | 1652 | Similar to gi\|4584540\|emb\|CAB40770.1\|putative | | | |
| | | protein [Arabidopsis thaliana] | | | |
| 136*″ | 1691 | Open Reading Frame OS_ORF013948 HTC089691- | | | |
| | | A01.R.17 FRAME: 2 ORF: 4 LEN: 738 | | | |
| 77*″ | 1644 | Similar to RS23_FRAAN P46297 FRAGARIA | 3792, 3791, | 5181 | |
| | | ANANASSA (STRAWBERRY). 40 S RIBOSOMAL | 3793 | | |
| | | PROTEIN S23 (S12). | | | |
| 28*″ | 1617 | Similar to gi\|829283\|emb\|CAA78738.1\|heat shock | 4697, 4262, | 5000 | 5677 |
| | | protein hsp82 [Oryza sativa] | 3885, 3886, | | |
| | | | 3179, 3733, | | |
| | | | 4219, 4218, | | |
| | | | 4220, 4208, | | |
| | | | 2743, 4207 | | |
| 10*″ | 1603 | Similar to gi\|974605\|gb\|AAA75104.1\|single-stranded | 4253, 3887, | | 5892 |
| | | nucleic acid binding protein | 4248, 3795, | | |
| | | | 3889, 3794 | | |
| 110*″ | | Similar to gi\|2252633\|gb\|AAB65496.1\|hypothetical | | | |
| | | protein [Arabidopsis thaliana] | | | |
| 47*″ | | Similar to YS88_CAEEL Q09384 | | 4943 | 5622 |
| | | CAENORHABDITIS ELEGANS. HYPOTHETICAL | | | |
| | | 12.3 KD PROTEIN ZK945.8 IN CHROMOSOME II. | | | |
| 53*″ | 1630 | Similar to gi\|5006851\|gb\|AAD37696.1\|AF145727_1 | | | 5668 |
| | | homeodomain leucine zipper protein [Oryza sativa] | | | |
| 54*″ | 1631 | Similar to gi\|8096630\|dbj\|BAA96201.1\|hypothetical | | | |
| | | protein [Oryza sativa] | | | |
| 83*″ | | Similar to POU2_BRARE Q90270 Q90483 | | 4916 | 5410 |
| | | BRACHYDANIO RERIO (ZEBRAFISH) (ZEBRA | | | |
| | | DANIO). POU DOMAIN PROTEIN 2. | | | |
| 124*″ | 1680 | Similar to BIOH_ECOLI P13001 ESCHERICHIA | 2830 | | 5281 |
| | | COLI. BIOH PROTEIN. | | | |
| 87*″ | 1648 | Similar to gi\|7629994\|emb\|CAB88336.1\|60 S | | 5218 | 5442 |
| | | RIBOSOMAL PROTEIN L36 homolog [Arabidopsis | | | |
| | | thaliana] | | | |
| 138*″ | 1692 | Open Reading Frame OS_ORF012152 HTC075887- | | | |
| | | A01.26 FRAME: −1 ORF: 4 LEN: 831 | | | |
| 42*″ | 1625 | Similar to gi\|755187\|gb\|AAB07758.1\|glyceraldehyde | | 5066 | 5457 |
| | | 3-phosphate dehydrogenase | | | |
| 81*″ | | Similar to VP3_CAV26 P54095 CHICKEN ANEMIA | | | |
| | | VIRUS (USA ISOLATE 26P4) (CAV). APOPTIN | | | |
| | | (VP3). | | | |
| 25*″ | | Similar to gi\|1100217\|gb\|AAA82697.1\|sucrose | 3447, 3486, | 4807 | 5661 |
| | | synthase | 3155, 3154, | | |
| | | | 4386, 3156, | | |
| | | | 3437, 2840, | | |
| | | | 3485, 3111, | | |
| | | | 3249, 2984 | | |
| 98*″ | 1658 | Open Reading Frame OS_ORF021766 HTC148742- | | | |
| | | A01.R.37 FRAME: −2 ORF: 6 LEN: 663 | | | |
| 60*″ | | Similar to gi\|169793\|gb\|AAA33907.1\|histone 3 | 3563, 3569, | 4977 | 5672 |
| | | | 3515, 3528, | | |
| | | | 3570, 3511, | | |
| | | | 3532, 3584, | | |
| | | | 3580, 3559, | | |
| | | | 3560, 3562, | | |
| | | | 3565, 3583, | | |
| | | | 3552, 3533, | | |
| | | | 3525, 3529, | | |
| | | | 3585, 3579, | | |
| | | | 3582, 3564, | | |
| | | | 3571, 3576, | | |
| | | | 3577, 3578, | | |
| | | | 3574, 3572, | | |
| | | | 3573, 3567, | | |
| | | | 3544, 3531, | | |
| | | | 3587, 3540, | | |
| | | | 3588, 3575, | | |
| | | | 3535, 3536, | | |
| | | | 3530, 3589, | | |
| | | | 3568, 3566, | | |
| | | | 3537, 3513, | | |
| | | | 3521, 3516, | | |
| | | | 3520, 3581, | | |
| | | | 3561, 3512 | | |
| 103*″ | 1663 | Similar to gi\|3080441\|emb\|CAA18758.1\|putative | 2966 | 4938 | 5690 |
| | | protein [Arabidopsis thaliana] | | | |
| 99*″ | 1659 | Open Reading Frame containing a Sage tag sequence | | | |
| | | near 3 end OS_ORF019581 ST(F) HTC132137- | | | |
| | | A01.F.12 FRAME: 3 ORF: 1 LEN: 561 | | | |
| 119*″ | 1677 | Similar to gi\|4262212\|gb\|AAD14506.1\|En/Spm-like | | | |
| | | transposon protein [Arabidopsis thaliana] | | | |
| 112*″ | 1670 | Open Reading Frame OS_ORF011158 HTC068757- | | | |
| | | A01.F.17 FRAME: −3 ORF: 1 LEN: 1224 | | | |
| 111*″ | 1669 | Similar to V18K_MLVAB P03400 ABELSON | | | |
| | | MURINE LEUKEMIA VIRUS. 18 KD PROTEIN. | | | |
| 102*″ | 1662 | Open Reading Frame OS_ORF001938 HTC011169- | | | 5532 |
| | | A01.13 FRAME: 1 ORF: 2 LEN: 1011 | | | |
| 141*″ | 1695 | Similar to NPT2_RAT Q06496 RATTUS | | | |
| | | NORVEGICUS (RAT). RENAL SODIUM- | | | |
| | | DEPENDENT PHOSPHATE TRANSPORT | | | |
| | | PROTEIN 2 | | | |
| | | (SODIUM/PHOSPHATECOTRANSPORTER 2) | | | |
| | | (NA(+)/PI COTRANSPORTER 2) (RENAL | | | |
| | | SODIUM-PHOSPHATETRANSPORT PROTEIN 2) | | | |
| | | (RENAL NA+-DEPENDENT PHOSPHATE | | | |
| | | COTRANSPORTER | | | |
| 46*″ | 1627 | Similar to gi\|7435060\|pir∥T01316 epoxide hydrolase | 3770, 3721 | | 5861 |
| | | homolog T14P8.15 - Arabidopsis thaliana | | | |
| 101*″ | 1661 | Open Reading Frame OS_ORF001719 HTC009782- | | | |
| | | A01.9 FRAME: 2 ORF: 1 LEN: 675 | | | |
| 123*″ | | Open Reading Frame OS_ORF013133 HTC083102- | | | |
| | | A01.R.9 FRAME: −3 ORF: 2 LEN: 684 | | | |
| 57*″ | | Similar to gi\|5730136\|emb\|CAB52470.1\|putative | | | |
| | | protein [Arabidopsis thaliana] | | | |
| 64*″ | 1635 | Similar to gi\|435944\|gb\|AAC49557.1\|DNA-binding | | | |
| | | factor of bZIP class | | | |
| 76*″ | 1643 | Similar to gi\|1107487\|emb\|CAA63025.1\|60 S | 3838, 3840, | 5153 | 5606 |
| | | ribosomal protein L27a [Arabidopsis thaliana] | 3841, 3842 | | |
| 50*″ | 1629 | Similar to RS2_DROME P31009 DROSOPHILA | 3661, 3671, | 5214 | 5884 |
| | | MELANOGASTER (FRUIT FLY). 40 S RIBOSOMAL | 3662, 3670, | | |
| | | PROTEIN S2 (STRINGS OF PEARLS PROTEIN). | 3669, 3658, | | |
| | | | 3084 | | |
| 31*″ | | Similar to gi\|1136120\|emb\|CAA62916.1\|alpha-tubulin | 3336, 4229, | 5016 | 5557 |
| | | [Oryza sativa] | 4234, 4233, | | |
| | | | 3760, 4232, | | |
| | | | 2877, 3144, | | |
| | | | 4228, 3143, | | |
| | | | 3335, 4230, | | |
| | | | 3145, 3215, | | |
| | | | 4231 | | |
| 109*″ | 1668 | Open Reading Frame OS_ORF020205 HTC136407- | | | 5360 |
| | | A01.F.19 FRAME: 2 ORF: 6 LEN: 873 | | | |
| 97*″ | 1657 | Similar to NEU1_RAT PO1179 RATTUS | | | |
| | | NORVEGICUS (RAT). OXYTOCIN- | | | |
| | | NEUROPHYSIN 1 PRECURSOR (OCYTOCIN- | | | |
| | | NEUROPHYSIN 1). | | | |
| 140*″ | 1694 | Open Reading Frame OS_ORF014808 ST(R) | | | |
| | | HTC096028-A01.R.22 FRAME: −1 ORF: 48 LEN: 522 | | | |
| 78*″ | | Similar to gi\|6682246\|gb\|AAF23298.1\|AC016661_23 | 3792, 3791, | 4903 | |
| | | putative 40 S ribosomal protein S23 [Arabidopsis | 3793 | | |
| | | thaliana] | | | |
| 106*″ | | Similar to gi\|4539355\|emb\|CAB40049.1\|putative | | 4800 | 5883 |
| | | protein [Arabidopsis thaliana] | | | |
| 33*″ | | Similar to gi\|6691220\|gb\|AAF24558.1\|AC007508_21 | | | |
| | | F1K23.3 [Arabidopsis thaliana] | | | |
| 63*″ | 1634 | Similar to gi\|8099126\|dbj\|BAA90498.1\|rice ESTs | | 5170 | 5558 |
| | | AA754121, AW155454, D48581 correspond to a | | | |
| | | region of the predicated gene; unknown protein [Oryza | | | |
| | | sativa] | | | |
| 100*″ | 1660 | Similar to YLL2_EBVA8 Q07285 EPSTEIN-BARR | | | |
| | | VIRUS (STRAIN AG876) (HUMAN HERPESVIRUS | | | |
| | | 4), AND EPSTEIN-BARR VIRUS (STRAIN P3HR-1) | | | |
| | | (HUMAN HERPESVIRUS 4). HYPOTHETICAL | | | |
| | | BLLF2 PROTEIN. | | | |
| 55*″ | | Open Reading Frame OS_ORF002688 HTC015682- | | | |
| | | A01.33 FRAME: −2 ORF: 8 LEN: 762 | | | |
| 27*″ | 1616 | Similar to MYOD_PIG P49811 SUS SCROFA (PIG). | | | |
| | | MYOBLAST DETERMINATION PROTEIN 1. | | | |
| 94*″ | 1654 | Open Reading Frame OS_ORF020521 HTC138332- | | | |
| | | A01.F.30 FRAME: −1 ORF: 2 LEN: 894 | | | |
| 126*″ | 1682 | Similar to gi\|3746060\|gb\|AAC63835.1\|unknown | 3819 | 5088 | 5407 |
| | | protein [Arabidopsis thaliana] | | | |
| 132*″ | 1687 | Open Reading Frame OS_ORF003818 ST(R) | | | |
| | | HTC022168-A01.43 FRAME: 2 ORF: 13 LEN: 627 | | | |
| 131*″ | | Similar to Y140_NPVAC P41699 AUTOGRAPHA | | | |
| | | CALIFORNICA NUCLEAR POLYHEDROSIS | | | |
| | | VIRUS (ACMNPV). HYPOTHETICAL 7.1 KD | | | |
| | | PROTEIN IN ME53-IE0 INTERGENIC REGION. | | | |
| 59*″ | 1633 | Similar to gi\|4966370\|gb\|AAD34701.1\|AC006341_29 | | | |
| | | >F3O9.30 [Arabidopsis thaliana] | | | |
| 134*″ | 1689 | Similar to gi\|928896\|emb\|CAA60523.1\|protein kinase | 3801, 3549, | 5022 | 5367 |
| | | catalytic domain (fragment) [Arabidopsis thaliana] | 3543, 4438, | | |
| | | | 3548 | | |
| 84*″ | 1647 | Similar to gi\|3461812\|gb\|AAC32906.1\|putative basic | | 5104 | 5755 |
| | | blue protein (plantacyanin) [Arabidopsis thaliana] | | | |
| 89*″ | 1649 | Similar to gi\|6735331\|emb\|CAB68157.1\|putative | | 5043 | 5248 |
| | | protein [Arabidopsis thaliana] | | | |
| 29 | 1618 | Similar to LCM_LOCMI P80060 P80058 LOCUSTA | | | 5436 |
| | | MIGRATORIA (MIGRATORY LOCUST). | | | |
| | | PROTEASE INHIBITORS PRECURSOR | | | |
| | | (CONTAINS: PROTEASE INHIBITOR LCMI | | | |
| | | I (PARS INTERCEREBRALIS MAJOR PEPTIDE D2) | | | |
| | | (PMP-D2); PROTEASE INHIBITOR LCMI II (PARS | | | |
| | | INTERCEREBRALIS MAJOR PEPTIDE C) | | | |
| 7″ | | Similar to gi\|5852178\|emb\|CAB55416.1\|zhb0008.1 | | | |
| | | [Oryza sativa] | | | |
| 130 | 1686 | Open Reading Frame OS_ORF009113 HTC054673- | | | |
| | | A01.R.12 FRAME: 1 ORE: 6 LEN: 807 | | | |
| 137 | | Similar to gi\|2829868\|gb\|AAC00576.1\|Unknown | | | |
| | | protein [Arabidopsis thaliana] | | | |
| 90 | 1650 | Similar to LIG4_PHACH P11542 P14153 | | | |
| | | PHANEROCHAETE CHRYSOSPORIUM. | | | |
| | | LIGNINASE H2 PRECURSOR (EC 1.11.1.-) (LIGNIN | | | |
| | | PEROXIDASE) (LG4). | | | |
| 105 | 1665 | Similar to ITA3_MOUSE Q62470 Q08441 Q08442 | | | |
| | | MUS MUSCULUS (MOUSE). INTEGRIN ALPHA-3 | | | |
| | | PRECURSOR (GALACTOPROTEIN B3) (GAPB3) | | | |
| | | (VLA-3 ALPHACHAIN) (CD49C). | | | |
| 44 | 1626 | Similar to gi\|3618312\|dbj\|BAA33202.1\|zinc finger | | | 5788 |
| | | protein [Oryza sativa] | | | |
| 66 | 1637 | Similar to gi\|218210\|dbj\|BAA00539.1\|small subunit of | | 5019 | 5718 |
| | | ribulose-1,5-bisphosphate carboxylase (RuBPC) [Oryza | | | |
| | | sativa] | | | |
| 104 | 1664 | Similar to gi\|3668085\|gb\|AAC61817.1\|hypothetical | | | 5329 |
| | | protein [Arabidopsis thaliana] | | | |
| 95 | 1655 | Similar to LFE4_CHICK Q90839 GALLUS GALLUS | | | |
| | | (CHICKEN). UNKNOWN LENS FIBER PROTEIN | | | |
| | | CLFEST4 PRECURSOR. | | | |
| 120 | | Similar to gi\|2827560\|emb\|CAA16568.1\|predicted | | | |
| | | protein [Arabidopsis thaliana] | | | |
| 68 | | Similar to gi\|2293568\|gb\|AAB65433.1\|HvB12D | | 4947 | 5739 |
| | | homolog [Oryza sativa] | | | |
| 74 | 1642 | Similar to gi\|394736\|emb\|CAA40596.1\|basic/leucine | 3262, 4300, | 4961 | 5769 |
| | | zipper protein [Oryza sativa] | 4299, 4298 | | |
| 113 | 1671 | Similar to NT4_RAT P34131 RATTUS | | | 5470 |
| | | NORVEGICUS (RAT). NEUROTROPHIN-4 | | | |
| | | PRECURSOR (NT-4) (NEUROTROPHIN-5) (NT-5). | | | |
| 52 | | Similar to gi\|6006381\|dbj\|BAA84811.1\|hypothetical | | | |
| | | protein [Oryza sativa] | | | |
| 133 | 1688 | Similar to gi\|3193310\|gb\|AAC19293.1\|contains | 4258, 3732, | | 5857 |
| | | similarity to Nicotiana tabacum hin1 (GB: Y07563) | 4264, 3768, | | |
| | | [Arabidopsis thaliana] | 4265, 4266, | | |
| | | | 4257, 3747, | | |
| | | | 3718, 3778 | | |
| 127 | 1683 | Open Reading Frame OS_ORF005639 HTC033693- | | | |
| | | A01.R.7 FRAME: 2 ORF: 1 LEN: 669 | | | |
| 80 | 1646 | Similar to RS26_ORYSA P49216 ORYZA SATIVA | 3821, 3822, | 4959 | 5812 |
| | | (RICE). 40 S RIBOSOMAL PROTEIN S26 (S31). | 3820 | | |
| 93 | 1653 | Similar to NIDO_RAT P08460 RATTUS | | | |
| | | NORVEGICUS (RAT). NIDOGEN (ENTACTIN) | | | |
| | | (FRAGMENT). | | | |
| 38 | | Similar to TBB_TRYCR P08562 TRYPANOSOMA | 3823, 3834, | 4982 | 5546 |
| | | CRUZI. TUBULIN BETA CHAIN (FRAGMENT). | 3618, 3006, | | |
| | | | 4598, 3824, | | |
| | | | 3619, 3826, | | |
| | | | 3827, 3609, | | |
| | | | 3606, 3616, | | |
| | | | 3829, 3610, | | |
| | | | 3608, 3607, | | |
| | | | 3620, 3614, | | |
| | | | 3828, 3612, | | |
| | | | 3613, 3605, | | |
| | | | 3604, 3825, | | |
| | | | 3615, 3611, | | |
| | | | 3617, 3833, | | |
| | | | 4597 | | |
| 129 | 1685 | Similar to GVPO_HALME Q02240 | | | |
| | | HALOBACTERIUM MEDITERRANEI | | | |
| | | (HALOFERAX MEDITERRANEI). GVPO PROTEIN. | | | |
| 35 | | Similar to ACH4_RAT P09483 RATTUS | 3119, 3361, | | 5413 |
| | | NORVEGICUS (RAT). NEURONAL | 3362 | | |
| | | ACETYLCHOLINE RECEPTOR PROTEIN, ALPHA- | | | |
| | | 4 CHAIN PRECURSOR. | | | |
| 91 | 1651 | Similar to ACH2_HUMAN Q15822 HOMO | | | |
| | | SAPIENS (HUMAN). NEURONAL | | | |
| | | ACETYLCHOLINE RECEPTOR PROTEIN, ALPHA- | | | |
| | | 2 CHAIN PRECURSOR. | | | |
| 88 | | Similar to RS21_ORYSA P35687 ORYZA SATIVA | | 4968 | 5909 |
| | | (RICE). 40 S RIBOSOMAL PROTEIN S21. | | | |
| 115 | 1673 | Similar to CLUS_MESAU P14683 MESOCRICETUS | | | |
| | | AURATUS (GOLDEN HAMSTER). CLUSTERIN | | | |
| | | (SULFATED GLYCOPROTEIN 2) (SGP-2) | | | |
| | | (FRAGMENT). | | | |
| 61 | | Similar to RS9_TOBAC P49214 NICOTIANA | 3972, 3971, | 4967 | 5621 |
| | | TABACUM (COMMON TOBACCO). 40 S | 3970, 3965, | | |
| | | RIBOSOMAL PROTEIN S9 (S4) (FRAGMENT). | 3964 | | |
| 40 | | Similar to UL56_HSV2H P28282 HERPES SIMPLEX | | | |
| | | VIRUS (TYPE 2/STRAIN HG52). PROTEIN UL56. | | | |
| 48 | 1628 | Similar to YT55_STRFR P20190 STREPTOMYCES | | | |
| | | FRADIAE. HYPOTHETICAL PROTEIN IN | | | |
| | | TRANSPOSON TN4556 (FRAGMENT). | | | |
| 69 | | Similar to VE2_HPV29 P50772 HUMAN | | | |
| | | PAPILLOMA VIRUS TYPE 29. REGULATORY | | | |
| | | PROTEIN E2. | | | |
| 26 | 1615 | Similar to YRM5_CAEEL Q09601 | | | |
| | | CAENORHABDITIS ELEGANS. HYPOTHETICAL | | | |
| | | 40.4 KD PROTEIN R06F6.5 IN CHROMOSOME II. | | | |
| 86 | | Similar to gi\|9229502\|dbj\|BAB00007.1\| | | | |
| | | gene_id: MIL23.14˜unknown protein [Arabidopsis | | | |
| | | thaliana] | | | |
| 32 | 1620 | Similar to gi\|6466964\|gb\|AAF13099.1\|AC009176_26 | 3368, 3366, | | 5414 |
| | | putative RNA-binding protein, 3 partial [Arabidopsis | 3367, 3248 | | |
| | | thaliana] | | | |
| 107 | 1666 | Similar to CASK RAT P04468 RATTUS | | | |
| | | NORVEGICUS (RAT). KAPPA CASEIN | | | |
| | | PRECURSOR. | | | |
| 116 | 1674 | Similar to gi\|3063713\|emb\|CAA18604.1\|putative | | | |
| | | protein [Arabidopsis thaliana] | | | |
| 114 | 1672 | Similar to E1BS_ADE12 P04492 HUMAN | | | |
| | | ADENOVIRUS TYPE 12. E1B PROTEIN, SMALL T- | | | |
| | | ANTIGEN (E1B 19K). | | | |
| 117 | 1675 | Similar to VGLL_HSV11 P10185 HERPES SIMPLEX | | | |
| | | VIRUS (TYPE 1/STRAIN 17). GLYCOPROTEIN L | | | |
| | | PRECURSOR. | | | |
| 36 | 1622 | Similar to YRS5_CAEEL Q09349 | | | 5923 |
| | | CAENORHABDITIS ELEGANS. HYPOTHETICAL | | | |
| | | 113.2 KD PROTEIN T05H10.5 IN CHROMOSOME | | | |
| | | II. | | | |
| 122 | 1679 | Similar to YFX2_RHILE P14311 RHIZOBIUM | | | |
| | | LEGUMINOSARUM. HYPOTHETICAL 8.8 KD | | | |
| | | PROTEIN IN FIXW 5 REGION. | | | |
| 71 | 1639 | Similar to gi\|967985\|gb\|AAA74960.1\|ribosomal | | 5185 | 5539 |
| | | protein-linked ubiquitin | | | |
| 65 | 1636 | Similar to gi\|2580438\|dbj\|BAA23142.1\|PCF1 [Oryza | | | 5405 |
| | | sativa] | | | |
| 82 | | Similar to gi\|2668748\|gb\|AAB88619.1\|ribosomal | | 5086 | 5900 |
| | | protein L17 [Zea mays] | | | |
| 72 | 1640 | Similar to gi\|445612\|prf∥1909359A ribosomal protein | | 4837 | 5438 |
| | | S19 [Solanum tuberosum] | | | |
| 49 | | Similar to gi\|1709498\|sp\|P50700\|OSL3_ARATH | 3136, 3135, | 5182 | 5297 |
| | | OSMOTIN-LIKE PROTEIN OSM34 PRECURSOR | 4067, 4061 | | |
| 58 | | Similar to gi\|2570507\|gb\|AAB82139.1\|ribosomal | 4272, 4273, | 4842 | 5915 |
| | | protein [Oryza sativa] | 4271, 4254, | | |
| | | | 4255 | | |
| 79 | 1645 | Similar to gi\|7340694\|emb\|CAB82993.1\|hypothetical | | | |
| | | protein [Arabidopsis thaliana] | | | |
| 39 | 1624 | Similar to gi\|9295726\|gb\|AAF87032.1\|AC006535_10 | | | 5595 |
| | | T24P13.16 [Arabidopsis thaliana] | | | |
| 56 | 1632 | Similar to gi\|3738291\|gb\|AAC63633.1\|unknown | 3848, 3849, | | 5423 |
| | | protein [Arabidopsis thaliana] | 3599 | | |
| 96 | 1656 | Similar to gi\|3608141\|gb\|AAC36174.1\|unknown | 4633, 4632 | 4890 | 5781 |
| | | protein [Arabidopsis thaliana] | | | |
| 85 | | Similar to gi\|7413650\|emb\|CAB85998.1\|ribosomal | | 5190 | 5400 |
| | | protein L35-like [Arabidopsis thaliana] | | | |
| 43 | | Similar to gi\|1293784\|gb\|AAA98698.1\|similar to | 3378, 3379, | 4775 | |
| | | human QM protein, a putative tumor supressor, and to | 3171, 2851, | | |
| | | maize ubiquinol-cytochrome C reductase complex | 3172, 2949 | | |
| | | subunit VI requiring protein SC34 | | | |
| 73 | 1641 | Similar to gi\|2995277\|emb\|CAA06224.1\| | | 5186 | 5673 |
| | | ubiquitin/ribosomal fusion protein [Lycopersicon | | | |
| | | esculentum] | | | |
| 67 | 1638 | Similar to gi\|6513935\|gb\|AAF14839.1\|AC011664_21 | | | |
| | | hypothetical protein [Arabidopsis thaliana] | | | |
| 142 | 1696 | Similar to RS25_CAEEL P52821 | | 4912 | |
| | | CAENORHABDITIS ELEGANS. PROBABLE 40 S | | | |
| | | RIBOSOMAL PROTEIN S25. | | | |
| 108 | 1667 | Similar to CHRD_RAT Q63148 RATTUS | | | |
| | | NORVEGICUS (RAT). CHORDIN (FRAGMENT). | | | |
| 30 | 1619 | Similar to gi\|5817301\|gb\|AAD52695.1\|AF087818_1 | | 5138 | 5464 |
| | | auxin transport protein [Arabidopsis thaliana] | | | |
| 45 | | Similar to GALE_BRELA Q45291 | 2710, 2711, | 5047 | 5517 |
| | | BREVIBACTERIUM LACTOFERMENTUM. UDP- | 2709, 3106, | | |
| | | GLUCOSE 4-EPIMERASE (EC 5.1.3.2) | 2782 | | |
| | | (GALACTOWALDENASE) (UDP-GALACTOSE 4- | | | |
| | | EPIMERASE). | | | |
| 135 | 1690 | Similar to gi\|8954065\|gb\|AAF82238.1\|AC069143_14 | | | 5257 |
| | | Contains similarity to an AP2 domain containing | | | |
| | | protein RAP2.10 mRNA from Arabidopsis thaliana | | | |
| | | gb\|AF003103 and contains an AP2 PF\|00847 domain. | | | |
| | | EST gb\|AI996763 comes from this gene. | | | |
| 37 | 1623 | Similar to EF2_CHLKE P28996 CHLORELLA | 3657, 3656, | 4882 | |
| | | KESSLERI. ELONGATION FACTOR 2 (EF-2). | 3654, 3647, | | |
| | | | 3652, 3644, | | |
| | | | 3650, 3651, | | |
| | | | 3653, 3655 | | |
| 41 | | Similar to gi\|8467991\|dbj\|BAA96592.1\|hypothetical | | | 5878 |
| | | protein [Oryza sativa] | | | |
| 34 | 1621 | Similar to CIKA_HUMAN Q14721 HOMO SAPIENS | 2812 | | |
| | | (HUMAN). VOLTAGE-GATED POTASSIUM | | | |
| | | CHANNEL PROTEIN KV2.1 (DHK1). | | | |
| 118 | 1676 | Similar to Y116_ADE02 P03287 HUMAN | | | |
| | | ADENOVIRUS TYPE 2. HYPOTHETICAL 11.6 KD | | | |
| | | EARLY PROTEIN. | | | |
| 139 | 1693 | Similar to gi\|8953729\|dbj\|BAA98092.1\| | | | |
| | | emb\|CAA71173.1˜gene_id: F6N7.23˜similar to | | | |
| | | unknown protein [Arabidopsis thaliana] | | | |
| 125 | 1681 | Similar to gi\|3915825\|sp\|P49227\|RL5_ARATH 60 S | | | 5719 |
| | | RIBOSOMAL PROTEIN L5 | | | |
| 51 | | Similar to gi\|20238\|emb\|CAA36190.1\|GOS2 [Oryza | 4070, 4072, | 4835 | |
| | | sativa] | 4071, 2747, | | |
| | | | 2746, 2748, | | |
| | | | 3409 | | |
| 286 | | Similar to ATP4_IPOBA Q40089 IPOMOEA | 3346, 3345, | | 5608 |
| | | BATATAS (SWEET POTATO) (BATATE). ATP | 3347 | | |
| | | SYNTHASE DELTA CHAIN, MITOCHONDRIAL | | | |
| | | PRECURSOR (EC 3.6.1.34). | | | |
| 175 | 1718 | Similar to gi\|4884522\|dbj\|BAA77779.1\|class III | 3038 | | 5454 |
| | | chitinase homologue (OsChib3H-g) [Oryza sativa] | | | |
| 225 | 1751 | Similar to VE2_HPV2A P25482 HUMAN | | | 5397 |
| | | PAPILLOMA VIRUS TYPE 2A. REGULATORY | | | |
| | | PROTEIN E2. | | | |
| 235 | 1760 | Similar to YFIP_ECOLI Q47319 ESCHERICHIA | | | |
| | | COLI. HYPOTHETICAL 27.0 KD PROTEIN IN | | | |
| | | UNG-PSSA INTERGENIC REGION. | | | |
| 147 | | Similar to gi\|7417426\|gb\|AAF62555.1\|AF249880_1 | 4012, 4011 | 5155 | 5792 |
| | | UDP-glucose pyrophosphorylase [Oryza sativa subsp. | | | |
| | | indica] | | | |
| 283 | 1801 | Similar to VG12_BPPF1 P25132 BACTERIOPHAGE | | | |
| | | PF1. 12.0 KD PROTEIN (ORF 110). | | | |
| 211 | 1740 | Similar to RS17_HUMAN P08708 HOMO SAPIENS | 3175, 3173, | 4901 | 5345 |
| | | (HUMAN). 40 S RIBOSOMAL PROTEIN S17. | 3174 | | |
| 241 | 1766 | Similar to ERFK_ECOLI P39176 ESCHERICHIA | | | 5894 |
| | | COLI. PROTEIN ERFK/SRFK PRECURSOR. | | | |
| 172 | 1717 | Similar to gi\|6002799\|gb\|AAF00148.1\|AF149815_1 | | 5121 | 5639 |
| | | unknown [Oryza sativa] | | | |
| 240 | 1765 | Open Reading Frame OS_ORF021481 ST(R) | | | |
| | | HTC146509-A01.F.1 FRAME: 2 ORF: 2 LEN: 516 | | | |
| 255 | | Open Reading Frame OS_ORF019240 HTC129282- | | | 5443 |
| | | A01.F.45 FRAME: 1 ORF: 1 LEN: 795 | | | |
| 159 | 1706 | Open Reading Frame OS_ORF008660 HTC051956- | | | |
| | | A01.F.25 FRAME: −2 ORF: 1 LEN: 903 | | | |
| 269 | 1787 | Similar to CASK SHEEP P02669 OVIS ARIES | | | |
| | | (SHEEP). KAPPA CASEIN PRECURSOR. | | | |
| 263 | 1781 | Similar to Y14K_PMV P20955 PAPAYA MOSAIC | | | |
| | | POTEXVIRUS (PMV). HYPOTHETICAL 14.1 KD | | | |
| | | PROTEIN IN ORF1 CODING STRAND. | | | |
| 232 | 1757 | Similar to PBP2_ECOLI P08150 ESCHERICHIA | | | |
| | | COLI. PENICILLIN-BINDING PROTEIN 2 (PBP-2). | | | |
| 293 | 1810 | Similar to C551_AZOVI P00104 AZOTOBACTER | | 5167 | |
| | | VINELANDII. CYTOCHROME C-551 (C551). | | | |
| 292 | 1809 | Similar to EST1_PSEFL Q51758 PSEUDOMONAS | | | |
| | | FLUORESCENS. CARBOXYLESTERASE 1 (EC | | | |
| | | 3.1.1.1) (ESTERASE I). | | | |
| 276 | 1794 | Similar to gi\|7529288\|emb\|CAB86640.1\|putative | | 5140 | 5716 |
| | | protein [Arabidopsis thaliana] | | | |
| 278 | 1796 | Similar to gi\|6573781\|gb\|AAF17701.1\|AC009243_28 | | | |
| | | F28K19.4 [Arabidopsis thaliana] | | | |
| 213 | | Similar to gi\|6069647\|dbj\|BAA85423.1\|hypothetical | | | 5450 |
| | | protein [Oryza sativa] | | | |
| 204 | | Similar to ATF4_MOUSE Q06507 MUS MUSCULUS | | | |
| | | (MOUSE). CYCLIC-AMP-DEPENDENT | | | |
| | | TRANSCRIPTION FACTOR ATF-4 (C/EBP- | | | |
| | | RELATED ATF)(C/ATF). | | | |
| 254 | | Open Reading Frame OS_ORF018238 HTC121584- | | | |
| | | A01.F.11 FRAME: −2 ORF: 10 LEN: 663 | | | |
| 260 | 1778 | Similar to ATF6_HUMAN P18850 HOMO SAPIENS | | 5049 | 5528 |
| | | (HUMAN). CYCLIC-AMP-DEPENDENT | | | |
| | | TRANSCRIPTION FACTOR ATF-6 (FRAGMENT). | | | |
| 280 | 1798 | Similar to gi\|7801657\|emb\|CAB91578.1\|putative | | | 5821 |
| | | protein [Arabidopsis thaliana] | | | |
| 250 | 1773 | Similar to VE7_HPV31 P17387 HUMAN | | | |
| | | PAPILLOMA VIRUS TYPE 31. E7 PROTEIN. | | | |
| 214 | | Similar to gi\|2244789\|emb\|CAB10211.1\|ribosomal | 4188, 4187, | 4804 | 5315 |
| | | protein [Arabidopsis thaliana] | 3888, 3890, | | |
| | | | 3891 | | |
| 206 | 1737 | Similar to H2BT_RAT Q00729 RATTUS | 4123, 3744, | 5189 | 5575 |
| | | NORVEGICUS (RAT). HISTONE H2B, TESTIS. | 3771, 4120, | | |
| | | | 4119, 4110, | | |
| | | | 4277, 3772, | | |
| | | | 4066, 4269, | | |
| | | | 4117, 4118, | | |
| | | | 4155, 4105, | | |
| | | | 3754, 3720, | | |
| | | | 3749, 4031, | | |
| | | | 4138, 4109, | | |
| | | | 3773, 3767, | | |
| | | | 4276, 4084, | | |
| | | | 3738, 4206, | | |
| | | | 3736, 3726, | | |
| | | | 4122, 4267, | | |
| | | | 3777, 4192, | | |
| | | | 4170, 4121, | | |
| | | | 4191, 4065, | | |
| | | | 3775, 3769, | | |
| | | | 3712, 4145, | | |
| | | | 3758, 4270, | | |
| | | | 4275, 3723, | | |
| | | | 3763, 4174, | | |
| | | | 3722, 4064, | | |
| | | | 4124, 4146 | | |
| 186 | | Similar to gi\|8778567\|gb\|AAF79575.1\|AC022464_33 | | | 5637 |
| | | F22G5.15 [Arabidopsis thaliana] | | | |
| 202 | 1735 | Similar to IF51_CAEEL P34563 CAENORHABDITIS | | 5195 | 5389 |
| | | ELEGANS. PROBABLE INITIATION FACTOR 5A | | | |
| | | (EIF-5A) (EIF-4D). | | | |
| 189 | | Similar to RDH1_HUMAN Q92781 HOMO SAPIENS | 4661, 4441 | | 5582 |
| | | (HUMAN). 11-CIS RETINOL DEHYDROGENASE | | | |
| | | (EC 1.1.1.105) (11-CIS RDH). | | | |
| 230 | 1756 | Similar to gi\|4106388\|gb\|AAD02829.1\|unknown | | | |
| | | [Arabidopsis thaliana] | | | |
| 154 | 1704 | Similar to MENE_BACSU P23971 BACILLUS | 3996, 3993, | 5092 | 5594 |
| | | SUBTILIS. O-SUCCINYLBENZOIC ACID--COA | 3995, 3994 | | |
| | | LIGASE (EC 6.2.1.26) (OSB-COA | | | |
| | | SYNTHETASE) (O-SUCCINYLBENZOATE-COA | | | |
| | | SYNTHASE). | | | |
| 188 | | Similar to HMZ1_DROSU Q24648 DROSOPHILA | | 4825 | 5866 |
| | | SUBOBSCURA (FRUIT FLY). ZERKNUELLT | | | |
| | | PROTEIN. | | | |
| 208 | 1738 | Similar to gi\|4104058\|gb\|AAD10251.1\|blue copper- | | 5215 | 5692 |
| | | binding protein homolog [Triticum aestivum] | | | |
| 284 | 1802 | Similar to THIO_CLOSG P81108 CLOSTRIDIUM | 4563, 4564 | | 5675 |
| | | SPOROGENES. THIOREDOXIN (FRAGMENT). | | | |
| 185 | | Similar to gi\|1710495\|sp\|P49690\|RL23_ARATH 60 S | 3502, 3501, | 5224 | 5651 |
| | | RIBOSOMAL PROTEIN L23 | 2841, 3219 | | |
| 187 | 1724 | Similar to IM17_HUMAN Q99595 HOMO SAPIENS | | | 5369 |
| | | (HUMAN). MITOCHONDRIAL IMPORT INNER | | | |
| | | MEMBRANE TRANSLOCASE SUBUNIT TIM17 | | | |
| | | HOMOLOG. | | | |
| 144 | 1698 | Similar to gi\|4432862\|gb\|AAD20710.1\|unknown | 3527, 3526, | 5114 | 5629 |
| | | protein [Arabidopsis thaliana] | 3522, 3524, | | |
| | | | 3523 | | |
| 156 | | Similar to OST4_PIG Q29381 SUS SCROFA (PIG). | 4235 | 5033 | 5764 |
| | | DOLICHYL-DIPHOSPHOOLIGOSACCHARIDE- | | | |
| | | PROTEIN GLYCOSYLTRANSFERASE 48 | | | |
| | | KDSUBUNIT (EC 2.4.1.119) (OLIGOSACCHARYL | | | |
| | | TRANSFERASE 48 KD SUBUNIT)(DDOST 48 KD | | | |
| | | SUBUNIT) (FRAGMENT). | | | |
| 155 | | Similar to GS17_XENLA P07733 XENOPUS LAEVIS | | | |
| | | (AFRICAN CLAWED FROG). GASTRULA- | | | |
| | | SPECIFIC PROTEIN 17. | | | |
| 177 | 1720 | Similar to gi\|7573627\|dbj\|BAA94536.1\|hypothetical | | | 5749 |
| | | protein [Oryza sativa] | | | |
| 165 | 1710 | Similar to ALF_ORYSA P17784 ORYZA SATIVA | 3871, 3872, | 5108 | 5819 |
| | | (RICE). FRUCTOSE-BISPHOSPHATE ALDOLASE | 3867, 3873 | | |
| | | (EC 4.1.2.13). | | | |
| 218 | | Similar to BCL2_MOUSE P10417 P10418 MUS | | | |
| | | MUSCULUS (MOUSE). APOPTOSIS REGULATOR | | | |
| | | BCL-2. | | | |
| 201 | | Similar to gi\|5931784\|emb\|CAB56630.1\|SBP-domain | | 5103 | 5416 |
| | | protein 4 [Zea mays] | | | |
| 221 | 1747 | Similar to gi\|9295712\|gb\|AAF87018.1\|AC005292_27 | | | 5387 |
| | | F26F24.11 [Arabidopsis thaliana] | | | |
| 215 | 1742 | Similar to gi\|1668773\|emb\|CAA67922.1\|ubiquitin-like | | 5149 | |
| | | protein [Oryza sativa] | | | |
| 282 | 1800 | Similar to gi\|4582451\|gb\|AAD24835.1\|AC007071_7 | | 4889 | 5262 |
| | | unknown protein [Arabidopsis thaliana] | | | |
| 262 | 1780 | Similar to NEU3_CATCO P17668 CATOSTOMUS | | | 5295 |
| | | COMMERSONI (WHITE SUCKER). VASOTOCIN- | | | |
| | | NEUROPHYSIN VT 1 PRECURSOR (VT). | | | |
| 251 | | Open Reading Frame OS_ORF018254 HTC121717- | | | |
| | | A01.F.7 FRAME: −3 ORF: 1 LEN: 660 | | | |
| 259 | 1777 | Similar to gi\|8885623\|dbj\|BAA97553.1\| | 2758, 2756, | | 5763 |
| | | gb\|AAF32471.1˜gene_id: F24C7.9˜similar to unknown | 2757, 2915 | | |
| | | protein [Arabidopsis thaliana] | | | |
| 271 | 1789 | Similar to gi\|9279763\|dbj\|BAB01389.1\| | | | |
| | | emb\|CAB45833.1˜gene_id: MZN24.24˜similar to | | | |
| | | unknown protein [Arabidopsis thaliana] | | | |
| 166 | 1711 | Similar to YA14_SCHPO Q09686 | 3989 | 5085 | 5920 |
| | | SCHIZOSACCHAROMYCES POMBE (FISSION | | | |
| | | YEAST). HYPOTHETICAL 28.0 KD PROTEIN | | | |
| | | C13C5.04 IN CHROMOSOME I. | | | |
| 258 | | Similar to RL32_THETH P80339 O05480 THERMUS | | | |
| | | AQUATICUS (SUBSP. THERMOPHILUS). 50 S | | | |
| | | RIBOSOMAL PROTEIN L32. | | | |
| 244 | 1768 | Similar to ACM1_PIG P04761 SUS SCROFA (PIG). | | | 5687 |
| | | MUSCARINIC ACETYLCHOLINE RECEPTOR M1 | | | |
| | | (BRAIN). | | | |
| 223 | 1749 | Similar to gi\|3927834\|gb\|AAC79591.1\|unknown | | | |
| | | protein [Arabidopsis thaliana] | | | |
| 199 | 1733 | Similar to gi\|857574\|gb\|AAA68 175.1\|H+-ATPase | 3487, 4197, | 5165 | 5541 |
| | | | 4198, 3488, | | |
| | | | 4196 | | |
| 246 | 1770 | Similar to gi\|9280304\|dbj\|BAB01759.1\| | | | 5871 |
| | | emb\|CAB38961.1˜gene_id: MRP15.18˜similar to | | | |
| | | unknown protein [Arabidopsis thaliana] | | | |
| 239 | 1764 | Similar to gi\|3980377\|gb\|AAC95180.1\|unknown | 3925, 3910, | | 5340 |
| | | protein [Arabidopsis thaliana] | 3924, 3923 | | |
| 161 | 1707 | Similar to LEM3_HUMAN P16109 HOMO SAPIENS | | | |
| | | (HUMAN). P-SELECTIN PRECURSOR (GRANULE | | | |
| | | MEMBRANE PROTEIN 140) (GMP-140) | | | |
| | | (PADGEM) (CD62P) (LEUKOCYTE-ENDOTHELIAL | | | |
| | | CELL ADHESION MOLECULE 3) (LECAM3). | | | |
| 220 | 1746 | Similar to gi\|6579207\|gb\|AAF18250.1\|AC011438_12 | 2765, 2764, | 5099 | 5429 |
| | | T23G18.10 [Arabidopsis thaliana] | 2967 | | |
| 152 | 1703 | Similar to gi\|9294350\|dbj\|BAB02247.1\| | | | |
| | | gb\|AAD03575.1˜gene_id: F3H11.10˜similar to | | | |
| | | unknown protein [Arabidopsis thaliana] | | | |
| 228 | 1754 | Open Reading Frame OS_ORF021536 HTC147061- | | | |
| | | A01.R.7 FRAME: −1 ORF: 1 LEN: 681 | | | |
| 264 | 1782 | Open Reading Frame OS_ORF010347 HTC062980- | 3880, 3881, | | |
| | | A01.R.9 FRAME: −2 ORF: 4 LEN: 678 | 3879 | | |
| 207 | | Similar to RL23_TOBAC Q07760 NICOTIANA | 3502, 3501, | 5224 | |
| | | TABACUM (COMMON TOBACCO). 60 S | 2841, 3219 | | |
| | | RIBOSOMAL PROTEIN L23. | | | |
| 287 | 1804 | Similar to gi\|6382501\|gb\|AAF07787.1\|AC010704_12 | | | 5847 |
| | | unknown protein [Arabidopsis thaliana] | | | |
| 242 | 1767 | Similar to gi\|4586030\|gb\|AAD25648.1\|AC007109_6 | | | |
| | | unknown protein [Arabidopsis thaliana] | | | |
| 229 | 1755 | Similar to HXB9_MOUSE P20615 MUS MUSCULUS | | | |
| | | (MOUSE). HOMEOBOX PROTEIN HOX-B9 (HOX- | | | |
| | | 2.5). | | | |
| 267 | 1785 | Similar to PNTA_ECOLI P07001 P76888 | 3244 | | 5780 |
| | | ESCHERICHIA COLI. NAD(P) | | | |
| | | TRANSHYDROGENASE SUBUNIT ALPHA (EC | | | |
| | | 1.6.1.1) (PYRIDINENUCLEOTIDE | | | |
| | | TRANSHYDROGENASE SUBUNIT ALPHA) | | | |
| | | (NICOTINAMIDE | | | |
| | | NUCLEOTIDETRANSHYDROGENASE SUBUNIT | | | |
| | | ALPHA). | | | |
| 257 | | Similar to gi\|3434971\|dbj\|BAA32420.1\|ethylene | | | 5638 |
| | | responsive element binding factor 3 [Arabidopsis | | | |
| | | thaliana] | | | |
| 182 | | Similar to gi\|8467950\|dbj\|BAA96574.1\|Similar to | | | 5352 |
| | | Arabidopsis thaliana chromosome 4 BAC T15B16; | | | |
| | | hypothetical protein (AF104919) [Oryza sativa] | | | |
| 243 | | Similar to TR11_HUMAN Q15643 HOMO SAPIENS | | | |
| | | (HUMAN). THYROID RECEPTOR INTERACTING | | | |
| | | PROTEIN 11 (TRIP11) (FRAGMENT). | | | |
| 171 | 1716 | Similar to PRSD_ECOLI P42183 ESCHERICHIA | | | |
| | | COLI. CHAPERONE PROTEIN PRSD | | | |
| | | (FRAGMENT). | | | |
| 274 | 1792 | Similar to YT44_STRFR P20188 STREPTOMYCES | | | 5649 |
| | | FRADIAE. HYPOTHETICAL 44.4 KD PROTEIN IN | | | |
| | | TRANSPOSON TN4556. | | | |
| 195 | 1729 | Similar to GSHC_SCHMA Q00277 SCHISTOSOMA | | 5200 | |
| | | MANSONI (BLOOD FLUKE). GLUTATHIONE | | | |
| | | PEROXIDASE (EC 1.11.1.9) (GPX). | | | |
| 146 | 1700 | Similar to gi\|224389\|prf∥110321.8A glycinin A5 | | | |
| | | [Glycine max] | | | |
| 226 | 1752 | Open Reading Frame OS_ORF007080 HTC042461- | | | |
| | | A01.R.20 FRAME: −1 ORF: 1 LEN: 1122 | | | |
| 164 | 1709 | Open Reading Frame OS_ORF011196 HTC069008- | | | 5816 |
| | | A01.F.9 FRAME: 2 ORF: 1 LEN: 747 | | | |
| 222 | 1748 | Open Reading Frame containing a Sage tag sequence | | | |
| | | near 3 end OS_ORF010241 ST(F) HTC062062- | | | |
| | | A01.F.8 FRAME: −3 ORF: 13 LEN: 633 | | | |
| 288 | 1805 | Similar to gi\|6728996\|gb\|AAF26993.1\|AC016827_4 | | 4941 | 5406 |
| | | hypothetical protein [Arabidopsis thaliana] | | | |
| 248 | 1772 | Similar to AMYG_ASPSH P22832 ASPERGILLUS | | | |
| | | SHIROUSAMI. GLUCOAMYLASE PRECURSOR | | | |
| | | (EC 3.2.1.3) (GLUCAN 1,4-ALPHA- | | | |
| | | GLUCOSIDASE) (1,4-ALPHA-D-GLUCAN | | | |
| | | GLUCOHYDROLASE). | | | |
| 227 | 1753 | Similar to PM17_BOVIN Q06154 BOS TAURUS | | | |
| | | (BOVINE). MELANOCYTE PROTEIN PMEL 17 | | | |
| | | (RETINAL PIGMENT EPITHELIAL- | | | |
| | | SPECIFIC PROTEIN) (FRAGMENT). | | | |
| 157 | 1705 | Similar to gi\|3249078\|gb\|AAC24062.1\|Contains | | | 5738 |
| | | similarity to CONSTANS protein gb\|2244883 from A. | | | |
| | | thaliana. [Arabidopsis thaliana] | | | |
| 249 | | Similar to gi\|6729517\|emb\|CAB67673.1\|putative | | | 5489 |
| | | protein [Arabidopsis thaliana] | | | |
| 219 | 1745 | Similar to gi\|7543914\|emb\|CAB87154.1\|putative | | | |
| | | protein [Arabidopsis thaliana] | | | |
| 290 | 1807 | Similar to YD87_SCHPO Q10412 | | | |
| | | SCHIZOSACCHAROMYCES POMBE (FISSION | | | |
| | | YEAST). HYPOTHETICAL 44.6 KD PROTEIN | | | |
| | | C1F3.07C IN CHROMOSOME I. | | | |
| 153 | | Similar to gi\|6539579\|dbj\|BAA88195.1\|Similar to | 3005, 3004 | | 5372 |
| | | human dimethylaniline monooxygenase (AC002376) | | | |
| | | [Oryza sativa] | | | |
| 169 | 1714 | Similar to gi\|4514635\|dbj\|BAA75476.1\|root cap | | | |
| | | protein 1 [Zea mays] | | | |
| 216 | 1743 | Similar to gi\|903689\|gb\|AAB96840.1\|acyl carrier | | 5161 | |
| | | protein precursor [Arabidopsis thaliana] | | | |
| 253 | 1775 | Similar to EFA1_XENLA P52794 XENOPUS | | | 5332 |
| | | LAEVIS (AFRICAN CLAWED FROG). EPHRIN-A1 | | | |
| | | PRECURSOR (EPH-RELATED RECEPTOR | | | |
| | | TYROSINE KINASE LIGAND 1) (LERK-1) (XELF). | | | |
| 237 | 1762 | Similar to COBL_PSEDE P21921 PSEUDOMONAS | | | |
| | | DENITRIFICANS. PRECORRIN-6Y C5,15- | | | |
| | | METHYLTRANSFERASE (DECARBOXYLATING) | | | |
| | | (EC 2.1.1.132) (PRECORRIN-6 | | | |
| | | METHYLTRANSFERASE) (PRECORRIN-6Y | | | |
| | | METHYLASE). | | | |
| 205 | | Similar to gi\|6069651\|dbj\|BAA85427.1\|hypothetical | | | |
| | | protein [Oryza sativa] | | | |
| 289 | 1806 | Similar to gi\|4417269\|gb\|AAD20394.1\|hypothetical | | | |
| | | protein [Arabidopsis thaliana] | | | |
| 183 | | Similar to gi\|4582468\|gb\|AAD24852.1\|AC007071_24 | 2976 | 5183 | |
| | | 40 S ribosomal protein; contains C-terminal domain | | | |
| | | [Arabidopsis thaliana] | | | |
| 273 | 1791 | Similar to LSHB_CANFA P18842 CANIS | | | |
| | | FAMILIARIS (DOG). LUTROPIN BETA CHAIN | | | |
| | | PRECURSOR (LUTEINIZING HORMONE) (LSH-B) | | | |
| | | (LH-B)(FRAGMENT). | | | |
| 192 | 1726 | Similar to CXA3_RAT P29414 RATTUS | | | |
| | | NORVEGICUS (RAT). GAP JUNCTION ALPHA-3 | | | |
| | | PROTEIN (CONNEXIN 46) (CX46). | | | |
| 272 | 1790 | Similar to STCI_EMENI Q00675 EMERICELLA | | | 5653 |
| | | NIDULANS (ASPERGILLUS NIDULANS). | | | |
| | | PUTATIVE STERIGMATOCYSTIN | | | |
| | | BIOSYNTHESIS LIPASE/ESTERASE STCI. | | | |
| 252 | 1774 | Similar to BPHD_PSES1 P17548 PSEUDOMONAS | 4068, 4069 | | |
| | | SP. (STRAIN KKS102). 2-HYDROXY-6-OXO-6- | | | |
| | | PHENYLHEXA-2,4-DIENOATE HYDROLASE (EC3.7.1.-). | | | |
| 180 | | Similar to gi\|1388080\|gb\|AAC49354.1\|thioredoxin h | | | 5754 |
| 173 | | Similar to gi\|8777392\|dbj\|BAA96982.1\|11-beta- | | | 5864 |
| | | hydroxysteroid dehydrogenase-like [Arabidopsis | | | |
| | | thaliana] | | | |
| 291 | 1808 | Open Reading Frame OS_ORF006689 HTC040175- | | | 5506 |
| | | A01.F.19 FRAME: 2 ORF: 7 LEN: 801 | | | |
| 148 | | Similar to gi\|7267933\|emb\|CAB78275.1\|cytochrome | 4089, 4088, | 5217 | 5733 |
| | | P450 homolog [Arabidopsis thaliana] | 3086 | | |
| 145 | 1699 | Open Reading Frame containing a Sage tag sequence | | | 5301 |
| | | near 3 end OS_ORF011358 ST(F) HTC070113- | | | |
| | | A01.F.8 FRAME: 2 ORF: 1 LEN: 534 | | | |
| 174 | | Similar to gi\|166924\|gb\|AAA32903.1\|ubiquitin carrier | | 4932 | 5665 |
| | | protein | | | |
| 234 | 1759 | Similar to YUES_CAEEL P90859 P90852 | 3435 | 5098 | 5695 |
| | | CAENORHABDITIS ELEGANS. HYPOTHETICAL | | | |
| | | 64.7 KD PROTEIN F26E4.11 IN CHROMOSOME I. | | | |
| 160 | | Similar to gi\|246250\|gb\|AAB21538.1\|GmPK4 = protein | 3949, 3948 | 4922 | 5655 |
| | | kinase [Glycine max L. = soybeans, Peptide, 101 aa] | | | |
| 162 | 1708 | Similar to gi\|4678920\|emb\|CAB41311.1\|putative heat | 2880, 3220, | | 5279 |
| | | shock transcription factor [Arabidopsis thaliana] | 3690, 3689, | | |
| | | | 3926, 3688 | | |
| 198 | 1732 | Similar to gi\|8099125\|dbj\|BAA90497.1\|rice EST | | | 5558 |
| | | C27893 corresponds to a region of the predicated gene; | | | |
| | | unknown protein [Oryza sativa] | | | |
| 236 | 1761 | Similar to gi\|8953758\|dbj\|BAA98113.1\| | | | |
| | | gene_id: K15C23.4˜unknown protein [Arabidopsis | | | |
| | | thaliana] | | | |
| 196 | 1730 | Open Reading Frame OS_ORF004409 HTC025875- | | | |
| | | A01.9 FRAME: −1 ORF: 4 LEN: 813 | | | |
| 181 | | Similar to gi\|6478924\|gb\|AAF14029.1\|AC011436_3 | | | |
| | | unknown protein [Arabidopsis thaliana] | | | |
| 224 | 1750 | Similar to gi\|7413567\|emb\|CAB86046.1\|putative | | | |
| | | protein [Arabidopsis thaliana] | | | |
| 143 | 1697 | Similar to YAGT_ECOLI P77165 ESCHERICHIA | | | |
| | | COLI. HYPOTHETICAL 24.3 KD PROTEIN IN | | | |
| | | INTF-EAEH INTERGENIC REGION. | | | |
| 176 | 1719 | Similar to gi\|6983878\|dbj\|BAA90813.1\|hypothetical | | | 5489 |
| | | protein [Oryza sativa] | | | |
| 256 | 1776 | Similar to gi\|8096645\|dbj\|BAA96216.1\|hypothetical | | | |
| | | protein [Oryza sativa] | | | |
| 179 | 1722 | Similar to gi\|7268425\|emb\|CAB78717.1\|apetala2 | | | 5786 |
| | | domain TINY like protein [Arabidopsis thaliana] | | | |
| 184 | 1723 | Similar to gi\|3293561\|gb\|AAC25778.1\|germin-like | 4116, 4075, | 5204 | 5760 |
| | | protein 8 [Oryza sativa] | 4115, 4073, | | |
| | | | 4593, 4074, | | |
| | | | 4592, 4076, | | |
| | | | 4575, 4596, | | |
| | | | 4576 | | |
| 247 | 1771 | Open Reading Frame OS_ORF007879 HTC047180- | | | |
| | | A01.F.9 FRAME: −1 ORF: 3 LEN: 702 | | | |
| 285 | 1803 | Similar to gi\|7329661\|emb\|CAB82758.1\|putative | | | 5290 |
| | | protein [Arabidopsis thaliana] | | | |
| 268 | 1786 | Similar to YOAC_MYCTU Q50742 | | | 5584 |
| | | MYCOBACTERIUM TUBERCULOSIS. | | | |
| | | HYPOTHETICAL 13.9 KD PROTEIN CY9C4.12. | | | |
| 212 | 1741 | Similar to gi\|168540\|gb\|AAA18549.1\|putative, similar | | 4925 | 5910 |
| | | to ribosomal protein S22 | | | |
| 245 | 1769 | Open Reading Frame OS_ORF010851 ST(R) | | | |
| | | HTC066685-A01.R.44 FRAME: −2 ORF: 2 LEN: 738 | | | |
| 217 | 1744 | Similar to gi\|3201971\|gb\|AAC19376.1\|hypothetical | | | |
| | | secretory protein SH27A precursor [Oryza sativa] | | | |
| 203 | 1736 | Similar to gi\|1815662\|gb\|AAC78393.1\|low molecular | 3668, 3677, | 4927 | 5663 |
| | | mass heat shock protein Oshsp18.0 [Oryza sativa] | 3679, 3678, | | |
| | | | 3675, 3676, | | |
| | | | 4029, 3302 | | |
| 209 | | Open Reading Frame OS_ORF020474 HTC137976- | | | |
| | | A01.R.9 FRAME: −1 ORF: 1 LEN: 744 | | | |
| 191 | 1725 | Similar to gi\|3702333\|gb\|AAC62890.1\|hypothetical | 4674 | | |
| | | protein [Arabidopsis thaliana] | | | |
| 163 | | Similar to TPM4_DROME P49455 DROSOPHILA | | | |
| | | MELANOGASTER (FRUIT FLY). TROPOMYOSIN | | | |
| | | 1, FUSION PROTEIN 33. | | | |
| 197 | 1731 | Similar to gi\|7630036\|emb\|CAB88330.1\|putative | | | |
| | | protein [Arabidopsis thaliana] | | | |
| 238 | 1763 | Similar to FRA_DROME P21525 DROSOPHILA | | | |
| | | MELANOGASTER (FRUIT FLY). | | | |
| | | TRANSCRIPTION FACTOR DFRA (FOS-RELATED | | | |
| | | ANTIGEN) (AP-1). | | | |
| 194 | 1728 | Similar to gi\|5596483\|emb\|CAB51421.1\|RING-H2 | | | 5727 |
| | | finger protein RHA1a-like protein [Arabidopsis | | | |
| | | thaliana] | | | |
| 170 | 1715 | Similar to gi\|2586127\|gb\|AAB82766.1\|b-keto acyl | 4701, 4700, | 4867 | |
| | | reductase [Hordeum vulgare] | 4702 | | |
| 231 | | Similar to AMPH_HUMAN P49418 HOMO SAPIENS | | | |
| | | (HUMAN). AMPHIPHYSIN. | | | |
| 233 | 1758 | Similar to DSVB_DESGI P94694 DESULFOVIBRIO | | | |
| | | GIGAS. SULFITE REDUCTASE, DISSIMILATORY- | | | |
| | | TYPE BETA SUBUNIT (EC | | | |
| | | 1.8.99.3) (DESULFOVIRIDIN BETA SUBUNIT) | | | |
| | | (HYDROGENSULFITE REDUCTASE | | | |
| | | BETASUBUNIT) (FRAGMENT). | | | |
| 270 | 1788 | Open Reading Frame containing a Sage tag sequence | | | 5907 |
| | | near 3 end OS_ORF017300 ST(F) HTC115342- | | | |
| | | A01.R.10 FRAME: 1 ORF: 6 LEN: 525 | | | |
| 190 | | Open Reading Frame OS_ORF012115 HTC075620- | | | |
| | | A01.F.7 FRAME: 2 ORF: 8 LEN: 675 | | | |
| 150 | | Similar to gi\|579225\|emb\|CAA01514.1\|unnamed | | 4904 | 5448 |
| | | protein product [Triticum aestivum] | | | |
| 168 | 1713 | Similar to gi\|6751704\|gb\|AAF27686.1\|AC018848_3 | 2922 | | 5479 |
| | | hypothetical protein [Arabidopsis thaliana] | | | |
| 279 | 1797 | Similar to SUT1_YEAST P53032 | | | 5562 |
| | | SACCHAROMYCES CEREVISIAE (BAKER S | | | |
| | | YEAST). PROBABLE STEROL CARRIER. | | | |
| 193 | 1727 | Similar to gi\|6730712\|gb\|AAF27107.1\|AC011809_16 | 4449, 4448 | 4820 | |
| | | Unknown protein [Arabidopsis thaliana] | | | |
| 149 | 1701 | Similar to CRTI_STRSE P54971 STREPTOMYCES | 4602, 2919, | | 5393 |
| | | SETONII. PHYTOENE DEHYDROGENASE (EC | 4601, 2789 | | |
| | | 1.3.-.-) (PHYTOENE DESATURASE). | | | |
| 277 | 1795 | Similar to CILA_ECOLI P75726 P77102 | | | |
| | | ESCHERICHIA COLI. CITRATE LYASE ALPHA | | | |
| | | CHAIN (EC 4.1.3.6) (CITRASE). | | | |
| 261 | 1779 | Similar to MYOD_HUMAN P15172 HOMO | 3091 | | 5570 |
| | | SAPIENS (HUMAN). MYOBLAST | | | |
| | | DETERMINATION PROTEIN 1 (MYOGENIC | | | |
| | | FACTOR MYF-3). | | | |
| 158 | | Similar to gi\|4432834\|gb\|AAD20683.1\|unknown | | 5061 | 5356 |
| | | protein [Arabidopsis thaliana] | | | |
| 167 | 1712 | Similar to gi\|9294462\|dbj\|BAB02681.1\|1-asparaginase | 3909, 3907, | 5050 | 5600 |
| | | (1-asparagine amidohydrolase) [Arabidopsis thaliana] | 3908, 3064, | | |
| | | | 3906, 2901, | | |
| | | | 3905 | | |
| 210 | 1739 | Similar to gi\|3157922\|gb\|AAC17605.1\|Contains | | 5121 | 5488 |
| | | similarity to proline-rich protein, gb\|S68113 from | | | |
| | | Brassica napus. [Arabidopsis thaliana] | | | |
| 266 | 1784 | Open Reading Frame OS_ORF009294 HTC055735- | 2916, 4437, | | |
| | | A01.16 FRAME: −2 ORF: 8 LEN: 885 | 2820 | | |
| 151 | 1702 | Similar to gi\|4416306\|gb\|AAD20311.1\|hypothetical | 4338, 2689, | 5129 | 5624 |
| | | protein [Zea mays] | 2688, 2690 | | |
| 200 | 1734 | Similar to gi\|7340678\|emb\|CAB82977.1\|putative | | 5124 | 5309 |
| | | protein [Arabidopsis thaliana] | | | |
| 275 | 1793 | Similar to gi\|7459220\|pir∥T08447 hypothetical protein | | | |
| | | F22O6.100 - Arabidopsis thaliana | | | |
| 178 | 1721 | Similar to gi\|7340871\|dbj\|BAA92961.1\|hypothetical | | 4771 | |
| | | protein [Oryza sativa] | | | |
| 265 | 1783 | Similar to Y4VG_RHISN Q53215 RHIZOBIUM SP. | 4445 | | 5825 |
| | | (STRAIN NGR234). PROBABLE CYTOCHROME | | | |
| | | P450 Y4VG (EC 1.14.14.-). | | | |
| 281 | 1799 | Similar to gi\|7488315\|pir∥T00933 RNA-binding protein | | | 5871 |
| | | homolog T24P15.15 - Arabidopsis thaliana | | | |
| 361 | 1853 | Similar to ACRO_RAT P29293 RATTUS | | | |
| | | NORVEGICUS (RAT). ACROSIN PRECURSOR (EC 3.4.21.10). | | | |
| 346 | 1840 | Similar to gi\|7267617\|emb\|CAB80929.1\|hypothetical | | | |
| | | protein [Arabidopsis thaliana] | | | |
| 378 | 1869 | Similar to VP3_CAVCI P54094 CHICKEN ANEMIA | | | |
| | | VIRUS (USA ISOLATE CIA-1) (CAV). APOPTIN(VP3). | | | |
| 384 | 1873 | Similar to gi\|6957718\|gb\|AAF32462.1\|unknown | | | 5851 |
| | | protein [Arabidopsis thaliana] | | | |
| 321 | | Similar to VIC2_AGRRA P13460 | | | |
| | | AGROBACTERIUM RHIZOGENES. VIRC2 | | | |
| | | PROTEIN. | | | |
| 308 | 1817 | Similar to PGKH_CHLFU P36232 CHLORELLA | | 5094 | 5249 |
| | | FUSCA. PHOSPHOGLYCERATE KINASE, | | | |
| | | CHLOROPLAST (EC 2.7.2.3) (PERIOD | | | |
| | | CLOCK PROTEIN) (FRAGMENT). | | | |
| 337 | | Similar to gi\|1352427\|sp\|P47815\|IF1A_WHEAT | 3884, 3882, | 5209 | 5324 |
| | | EUKARYOTIC TRANSLATION INITIATION | 3883 | | |
| | | FACTOR 1A (EIF-1A) (EIF-4C) | | | |
| 386 | 1875 | Similar to RBS_OLILU P14961 OLISTHODISCUS | | 5019 | |
| | | LUTEUS (HETEROSIGMA AKASHIWO). | | | |
| | | RIBULOSE BISPHOSPHATE CARBOXYLASE | | | |
| | | SMALL CHAIN (EC 4.1.1.39). | | | |
| 370 | 1862 | Similar to gi\|2760330\|gb\|AAB95243.1\|F1N21.15 | 3920, 3918, | 5045 | 5507 |
| | | [Arabidopsis thaliana] | 3917, 3916, | | |
| | | | 3919, 3921 | | |
| 358 | 1851 | Open Reading Frame containing a Sage tag sequence | | | |
| | | near 3 end OS_ORF001736 ST(F) HTC009976-A01.7 | | | |
| | | FRAME: −3 ORF: 1 LEN: 522 | | | |
| 340 | 1834 | Similar to YOO3_CAEEL P34635 | | | |
| | | CAENORHABDITIS ELEGANS. HYPOTHETICAL | | | |
| | | 25.2 KD PROTEIN ZK507.3 IN CHROMOSOME III. | | | |
| 319 | 1825 | Similar to gi\|4262229\|gb\|AAD14522.1\|unknown | | 5107 | |
| | | protein [Arabidopsis thaliana] | | | |
| 348 | 1842 | Open Reading Frame OS_ORF018077 HTC120520- | | | |
| | | A01.R.35 FRAME: 3 ORF: 1 LEN: 987 | | | |
| 302 | | Similar to YCS0_YEAST P25623 | 4510 | 5207 | |
| | | SACCHAROMYCES CEREVISIAE (BAKER S | | | |
| | | YEAST). HYPOTHETICAL 72.7 KD PROTEIN IN | | | |
| | | RIM1-CRY1 INTERGENIC REGION. | | | |
| 385 | 1874 | Similar to RELX_DASSA P81191 DASYATIS | | | |
| | | SABINA (ATLANTIC STINGRAY). RELAXIN-LIKE | | | |
| | | PROTEIN AGF. | | | |
| 335 | 1831 | Open Reading Frame OS_ORF016871 HTC111915- | | | |
| | | A01.R.5 FRAME: −3 ORF: 1 LEN: 636 | | | |
| 339 | 1833 | Open Reading Frame OS_ORF005335 HTC031718- | | | |
| | | A01.F.21 FRAME: 2 ORF: 18 LEN: 741 | | | |
| 338 | 1832 | Similar to gi\|3193326\|gb\|AAC19308.1\|contains | | 5060 | 5642 |
| | | similarity to transcriptional activators such as Ra-like | | | |
| | | and myc-like regulatory R proteins [Arabidopsis | | | |
| | | thaliana] | | | |
| 333 | 1830 | Similar to RL26_HUMAN Q02877 HOMO SAPIENS | 3951, 3952, | 4898 | |
| | | (HUMAN), AND MUS MUSCULUS (MOUSE). 60 S | 3950 | | |
| | | RIBOSOMAL PROTEIN L26. | | | |
| 310 | | Similar to gi\|7486247\|pir∥T01293 hypothetical protein | | | 5830 |
| | | F27F23.25 - Arabidopsis thaliana | | | |
| 303 | | Similar to LACS_TRAVE Q12717 TRAMETES | 3180, 2942 | | 5255 |
| | | VERSICOLOR (WHITE-ROT FUNGUS). LACCASE | | | |
| | | PRECURSOR (EC 1.10.3.2) | | | |
| | | (BENZENEDIOL: OXYGEN | | | |
| | | OXIDOREDUCTASE) (URISHIOL OXIDASE) | | | |
| | | (DIPHENOL OXIDASE) (LACCASE IV). | | | |
| 350 | 1844 | Similar to SCAD_HUMAN P51172 HOMO SAPIENS | | | |
| | | (HUMAN). AMILORIDE-SENSITIVE SODIUM | | | |
| | | CHANNEL DELTA-SUBUNIT (EPITHELIAL | | | |
| | | NA+ CHANNEL DELTA SUBUNIT) (DELTA ENAC) | | | |
| | | (NONVOLTAGE-GATED SODIUM CHANNEL 1 | | | |
| | | DELTA SUBUNIT) (SCNED) (DELTA NACH). | | | |
| 345 | 1839 | Similar to gi\|4587548\|gb\|AAD25779.1\|AC006577_15 | | 5152 | 5751 |
| | | Contains similarity to gb\|U93273 putative auxin- | | | |
| | | repressed protein from Prunus armenica. EST | | | |
| | | gb\|Z26668 comes from this gene. [Arabidopsis | | | |
| | | thaliana] | | | |
| 367 | 1859 | Similar to gi\|8843817\|dbj\|BAA973.65.1\|contains | 4252, 4251 | | 5618 |
| | | similarity to unknown | | | |
| | | protein˜gene_id: MUL3.10˜pir∥T08554 [Arabidopsis | | | |
| | | thaliana] | | | |
| 347 | 1841 | Similar to COXD_HUMAN Q02221 O00761 HOMO | | | |
| | | SAPIENS (HUMAN). CYTOCHROME C OXIDASE | | | |
| | | POLYPEPTIDE VIA-HEART PRECURSOR (EC | | | |
| | | 1.9.3.1) (COXVIAH). | | | |
| 357 | 1850 | Similar to LSHB_BALAC P33088 BALAENOPTERA | | | 5871 |
| | | ACUTOROSTRATA (MINKE WHALE) (LESSER | | | |
| | | RORQUAL). LUTROPIN BETA CHAIN | | | |
| | | (LUTEINIZING HORMONE) (LSH-B) (LH-B). | | | |
| 313 | 1821 | Similar to gi\|8778280\|gb\|AAF79289.1\|AC068602_12 | 4507 | 4880 | 5702 |
| | | F14D16.19 [Arabidopsis thaliana] | | | |
| 352 | 1846 | Similar to gi\|7594528\|emb\|CAB88053.1\|putative | | | 5230 |
| | | protein [Arabidopsis thaliana] | | | |
| 311 | 1819 | Similar to gi\|3777436\|emb\|CAA04440.1\|DNA binding | | | 5461 |
| | | protein [Hordeum vulgare] | | | |
| 322 | | Similar to YI3C_MYCTU P19773 | | | |
| | | MYCOBACTERIUM TUBERCULOSIS. INSERTION | | | |
| | | ELEMENT IS986 HYPOTHETICAL 13 KD | | | |
| | | PROTEIN (ORFC). | | | |
| 298 | 1813 | Similar to gi\|21481\|emb\|CAA78034.1\|70-kD heat | 3311, 2923, | 5150 | 5753 |
| | | shock protein [Solanum tuberosum] | 3808, 3494, | | |
| | | | 3804, 3806, | | |
| | | | 3598, 3807, | | |
| | | | 2874, 4240, | | |
| | | | 4239, 3439, | | |
| | | | 3596, 2873, | | |
| | | | 3602, 3805, | | |
| | | | 3600, 3597, | | |
| | | | 3593, 3601, | | |
| | | | 4241, 3438, | | |
| | | | 3590, 3592, | | |
| | | | 3459, 3594, | | |
| | | | 2975, 2989 | | |
| 323 | 1826 | Similar to ULC9_HCMVA P16838 HUMAN | | | 5637 |
| | | CYTOMEGALOVIRUS (STRAIN AD169). | | | |
| | | HYPOTHETICAL PROTEIN UL129. | | | |
| 299 | 1814 | Similar to gi\|6633856\|gb\|AAF19715.1\|AC008047_22 | | | |
| | | F2K11.8 [Arabidopsis thaliana] | | | |
| 393 | 1881 | Similar to gi\|3738331\|gb\|AAC63672.1\|unknown | | | 5841 |
| | | protein [Arabidopsis thaliana] | | | |
| 369 | 1861 | Similar to gi\|4063754\|gb\|AAC98462.1\|putative | | | |
| | | chloroplast nucleoid DNA-binding protein | | | |
| | | [Arabidopsis thaliana] | | | |
| 314 | | Similar to gi\|2832700\|emb\|CAA16798.1\|unknown | 4557, 4556 | | 5319 |
| | | protein [Arabidopsis thaliana] | | | |
| 360 | 1852 | Open Reading Frame OS_ORF001954 ST(R) | | | |
| | | HTC011269-A01.9 FRAME: 1 ORF: 7 LEN: 513 | | | |
| 320 | | Similar to gi\|6520161\|dbj\|BAA87939.1\|ZF14 | | | 5855 |
| | | [Arabidopsis thaliana] | | | |
| 342 | 1836 | Similar to E75C_DROME P13055 DROSOPHILA | | | 5809 |
| | | MELANOGASTER (FRUIT FLY). ECDYSONE- | | | |
| | | INDUCIBLE PROTEIN E75-C. | | | |
| 328 | | Open Reading Frame OS_ORF006350 HTC038039- | | | |
| | | A01.R.19 FRAME: 2 ORF: 7 LEN: 795 | | | |
| 398 | 1885 | Similar to gi\|140171\|sp\|P03936\|YAC9_MAIZE | | | 5456 |
| | | TRANSPOSABLE ELEMENT ACTIVATOR | | | |
| | | HYPOTHETICAL 23 KD PROTEIN (AC 23 KD | | | |
| | | PROTEIN) | | | |
| 397 | 1884 | Similar to gi\|8843749\|dbj\|BAA97297.1\| | 4049 | 5210 | 5398 |
| | | emb\|CAB61744.1˜gene_id: MXK3.7˜similar to | | | |
| | | unknown protein [Arabidopsis thaliana] | | | |
| 396 | 1883 | Similar to gi\|6642674\|gb\|AAF20254.1\|AC015450_15 | | | 5478 |
| | | hypothetical protein [Arabidopsis thaliana] | | | |
| 324 | 1827 | Similar to PRF1_LYCES Q00451 LYCOPERSICON | 4302, 3959, | 5044 | 5593 |
| | | ESCULENTUM (TOMATO). 36.4 KD PROLINE- | 3958 | | |
| | | RICH PROTEIN. | | | |
| 300 | | Open Reading Frame OS_ORF010018 HTC060592- | 3051 | | |
| | | A01.F.33 FRAME: −2 ORF: 1 LEN: 696 | | | |
| 306 | | Similar to gi\|2780740\|dbj\|BAA24356.1\|trans-ciinamate | 3876, 4611, | 5028 | 5603 |
| | | 4-hydroxylase [Arabidopsis thaliana] | 3874, 3868, | | |
| | | | 3875, 3869, | | |
| | | | 3870 | | |
| 381 | | Similar to gi\|5823341\|gb\|AAD53109.1\|AF176004_1 | 4610, 4609 | | 5437 |
| | | putative transcription factor [Arabidopsis thaliana] | | | |
| 372 | 1863 | Open Reading Frame OS_ORF019338 HTC129955- | | | |
| | | A01.8 FRAME: −2 ORF: 3 LEN: 663 | | | |
| 364 | 1856 | Similar to DAP1_HUMAN P51397 HOMO SAPIENS | | | 5386 |
| | | (HUMAN). DEATH-ASSOCIATED PROTEIN 1 | | | |
| | | (DAP-1). | | | |
| 379 | 1870 | Similar to INTR_STRAM P1543 5 STREPTOMYCES | 4579 | 4987 | 5730 |
| | | AMBOFACIENS. INTEGRASE. | | | |
| 304 | 1816 | Similar to RNT1_TRIHA P26875 TRICHODERMA | | | 5714 |
| | | HARZIANUM. GUANYL-SPECIFIC | | | |
| | | RIBONUCLEASE TH1 (EC 3.1.27.3). | | | |
| 353 | 1847 | Similar to gi\|7459596\|pir∥T01153 hypothetical protein | | | |
| | | F26B6.29 - Arabidopsis thaliana | | | |
| 394 | | Similar to Y4HN_RHISN P55481 RHIZOBIUM SP. | | | |
| | | (STRAIN NGR234). HYPOTHETICAL 16.0 KD | | | |
| | | PROTEIN Y4HN. | | | |
| 392 | 1880 | Similar to gi\|4539010\|emb\|CAB39631.1\|putative | | 4969 | 5351 |
| | | DNA-directed RNA polymerase [Arabidopsis thaliana] | | | |
| 309 | 1818 | Similar to HV58_MOUSE P18529 MUS MUSCULUS | | | 5822 |
| | | (MOUSE). IG HEAVY CHAIN PRECURSOR V | | | |
| | | REGION (5-76). | | | |
| 331 | | Similar to gi\|6041842\|gb\|AAF02151.1\|AC009853_11 | 4336, 2899 | | |
| | | unknown protein [Arabidopsis thaliana] | | | |
| 315 | | Similar to gi\|9279738\|dbj\|BAB01328.1\| | 3894, 3892, | | 5256 |
| | | gene_id: MWL2.24˜unknown protein [Arabidopsis | 4150 | | |
| | | thaliana] | | | |
| 365 | 1857 | Similar to gi\|3608146\|gb\|AAC36179.1\|unknown | | | 5535 |
| | | protein [Arabidopsis thaliana] | | | |
| 349 | 1843 | Similar to gi\|5262197\|emb\|CAB45794.1\|hypothetical | 2848 | 5173 | |
| | | protein [Arabidopsis thaliana] | | | |
| 382 | | Similar to gi\|3776562\|gb\|AAC64879.1\|Similar to | | | |
| | | gb\|X80472 STS15 gene from Solanum tuberosum. | | | |
| | | [Arabidopsis thaliana] | | | |
| 380 | 1871 | Similar to gi\|245409\|gb\|AAB21424.1\|ATPase subunit | | | |
| | | 6 [corn, C male-sterile cytoplasm, Peptide Partial, 184 | | | |
| | | aa] | | | |
| 327 | | Similar to gi\|4455218\|emb\|CAB36541.1\|putative | | 5110 | 5511 |
| | | protein [Arabidopsis thaliana] | | | |
| 329 | 1829 | Similar to gi\|5281018\|emb\|CAB45991.1\|OBP33pep | | | 5815 |
| | | like protein [Arabidopsis thaliana] | | | |
| 374 | 1865 | Similar to VE2_HPV18 P06790 HUMAN | | | |
| | | PAPILLOMA VIRUS TYPE 18. REGULATORY | | | |
| | | PROTEIN E2. | | | |
| 376 | 1867 | Open Reading Frame OS_ORF005044 HTC029791- | | | |
| | | A01.F.6 FRAME: 1 ORF: 1 LEN: 729 | | | |
| 371 | | Similar to gi\|4966371\|gb\|AAD34702.1\|AC006341_30 | | | 5579 |
| | | Similar to gb\|D14414 Indole-3-acetic acid induced | | | |
| | | protein from Vigna radiata. ESTs gb\|AA712892 and | | | |
| | | gb\|Z17613 come from this gene. [Arabidopsis thaliana] | | | |
| 325 | 1828 | Similar to YKU7_YEAST P36039 | | 4935 | |
| | | SACCHAROMYCES CEREVISIAE (BAKER S | | | |
| | | YEAST). HYPOTHETICAL 29.4 KD PROTEIN IN | | | |
| | | STE6-LOS1 INTERGENIC REGION. | | | |
| 295 | 1811 | Open Reading Frame OS_ORF017345 HTC115523- | 3114, 3115 | | 5305 |
| | | A01.F.13 FRAME: 1 ORF: 22 LEN: 1089 | | | |
| 375 | 1866 | Open Reading Frame OS_ORF001416 HTC008104- | | | |
| | | A01.7 FRAME: 3 ORF: 1 LEN: 765 | | | |
| 351 | 1845 | Similar to CASK_PIG P11841 SUS SCROFA (PIG). | | | |
| | | KAPPA CASEIN PRECURSOR. | | | |
| 307 | | Open Reading Frame OS_ORF010317 HTC062709- | | | |
| | | A01.25 FRAME: −2 ORF: 11 LEN: 699 | | | |
| 318 | 1824 | Similar to gi\|8096605\|dbj\|BAA96177.1\|hypothetical | | | |
| | | protein [Oryza sativa] | | | |
| 305 | | Similar to NRM1_SHEEP P49280 OVIS ARIES | 4647, 4646 | 4892 | 5534 |
| | | (SHEEP). NATURAL RESISTANCE-ASSOCIATED | | | |
| | | MACROPHAGE PROTEIN 1 (NRAMP | | | |
| | | 1) (FRAGMENT). | | | |
| 355 | 1849 | Open Reading Frame OS_ORF015774 HTC103176- | | | |
| | | A01.R.26 FRAME: −2 ORF: 19 LEN: 675 | | | |
| 359 | | Open Reading Frame OS_ORF011279 HTC069461- | | | |
| | | A01.F.14 FRAME: −2 ORF: 21 LEN: 729 | | | |
| 366 | 1858 | Similar to VE2_HPV45 P36794 HUMAN | | | |
| | | PAPILLOMA VIRUS TYPE 45. REGULATORY | | | |
| | | PROTEIN E2. | | | |
| 332 | | Similar to gi\|5042444\|gb\|AAD38281.1\|AC007789_7 | | 4860 | 5708 |
| | | putative low molecular early light-inducible protein | | | |
| | | [Oryza sativa] | | | |
| 362 | 1854 | Similar to gi\|7248410\|dbj\|BAA92733.1\|hypothetical | | | |
| | | protein [Oryza sativa] | | | |
| 368 | 1860 | Similar to PST MOUSE Q64692 MUS MUSCULUS | 2838, 2837 | 5203 | 5823 |
| | | (MOUSE). ALPHA-2,8- | | | |
| | | POLYSIALYLTRANSFERASE (EC 2.4.99.-) | | | |
| | | (ST8SIAIV) (CMP-N-ACETYLNEURAMINATE- | | | |
| | | POLY-ALPHA-2,8-SIALYL TRANSFERASE). | | | |
| 383 | 1872 | Similar to gi\|8809685\|dbj\|BAA97226.1\|contains | | 5035 | 5848 |
| | | similarity to probable DNA binding protein | | | |
| | | PCF1˜gene_id: MJM18.6 [Arabidopsis thaliana] | | | |
| 341 | 1835 | Similar to ICLN_RAT Q04753 RATTUS | 4537 | | |
| | | NORVEGICUS (RAT). CHLORIDE | | | |
| | | CONDUCTANCE REGULATORY PROTEIN ICLN. | | | |
| 316 | 1822 | Similar to YOE2_STRAT Q53684 STREPTOMYCES | | 4871 | 5756 |
| | | ANTIBIOTICUS. HYPOTHETICAL 48.5 KD | | | |
| | | PROTEIN IN OLED 5 REGION PRECURSOR | | | |
| | | (ORF2). | | | |
| 389 | 1878 | Similar to gi\|3927839\|gb\|AAC79596.1\|hypothetical | | | 5349 |
| | | protein [Arabidopsis thaliana] | | | |
| 317 | 1823 | Similar to DMPD_PSESP P19076 PSEUDOMONAS | 3352, 3353 | 5160 | 5725 |
| | | SP. (STRAIN CF600). 2-HYDROXYMUCONIC | | | |
| | | SEMIALDEHYDE HYDROLASE (EC 3.1.1.-) | | | |
| | | (HMSH). | | | |
| 301 | 1815 | Similar to BEL1_SFV1 P29169 SIMIAN FOAMY | | | 5476 |
| | | VIRUS (TYPE 1) (SFV-1). BEL-1 PROTEIN. | | | |
| 330 | | Similar to ST12_KLULA Q08400 | | | |
| | | KLUYVEROMYCES LACTIS (YEAST). STE12 | | | |
| | | PROTEIN. | | | |
| 296 | 1812 | Similar to BEL1_SFV3L P27402 SIMIAN FOAMY | | | |
| | | VIRUS (TYPE 3/STRAIN LK3) (SFV-3). BEL-1 | | | |
| | | PROTEIN. | | | |
| 354 | 1848 | Similar to gi\|6561967\|emb\|CAB62433.1\|putative | | | 5266 |
| | | protein [Arabidopsis thaliana] | | | |
| 334 | | Open Reading Frame OS_ORF004707 HTC027672- | | | |
| | | A01.R.12 FRAME: −3 ORF: 1 LEN: 1401 | | | |
| 294 | | Similar to A2AB_ELEMA O19014 ELEPHAS | | | |
| | | MAXIMUS (INDIAN ELEPHANT). ALPHA-2B | | | |
| | | ADRENERGIC RECEPTOR (ALPHA-2B | | | |
| | | ADRENOCEPTOR) (FRAGMENT). | | | |
| 388 | 1877 | Similar to gi\|6560766\|gb\|AAF16766.1\|AC010155_19 | | | |
| | | F3M18.10 [Arabidopsis thaliana] | | | |
| 343 | 1837 | Similar to YNA8_YEAST P53983 | 4451, 4454, | | 5474 |
| | | SACCHAROMYCES CEREVISIAE (BAKER S | 4450 | | |
| | | YEAST). HYPOTHETICAL 76.7 KD PROTEIN IN | | | |
| | | SPO1-SIS1 INTERGENIC REGION. | | | |
| 336 | | Similar to gi\|3445197\|gb\|AAC32427.1\|homeodomain | | 4825 | 5866 |
| | | transcription factor (HAT9) [Arabidopsis thaliana] | | | |
| 312 | 1820 | Open Reading Frame OS_ORF007081 HTC042461- | | | |
| | | A01.R.20 FRAME: −2 ORF: 1 LEN: 1086 | | | |
| 356 | | Similar to gi\|3776565\|gb\|AAC64882.1\|T22H22.8 | | | |
| | | [Arabidopsis thaliana] | | | |
| 377 | 1868 | Similar to gi\|9280693\|gb\|AAF86562.1\|AC069252_21 | | | 5385 |
| | | F2E2.8 [Arabidopsis thaliana] | | | |
| 387 | 1876 | Similar to gi\|9229979\|dbj\|BAB00670.1\| | | | |
| | | gene_id: MGD8.19˜similar to unknown protein | | | |
| | | (gb\|AAD32889.1) [Arabidopsis thaliana] | | | |
| 297 | | Open Reading Frame OS_ORF015837 HTC103626- | | | |
| | | A01.R.22 FRAME: −1 ORF: 37 LEN: 1164 | | | |
| 344 | 1838 | Similar to V17_BPT3 P07719 BACTERIOPHAGE T3. | | | |
| | | GENE 1.7 PROTEIN. | | | |
| 391 | 1879 | Similar to gi\|6980074\|gb\|AAF34713.1\|AF224762_1 | | 5193 | 5314 |
| | | SigA binding protein [Arabidopsis thaliana] | | | |
| 395 | 1882 | Similar to gi\|8978280\|dbj\|BAA98171.1\| | | | 5647 |
| | | gene_id: K21L13.2˜unknownprotein [Arabidopsis | | | |
| | | thaliana] | | | |
| 390 | | Similar to gi\|2388568\|gb\|AAB71449.1\|YUP8H12.10 | | 5222 | 5611 |
| | | Arabidopsis thaliana] | | | |
| 373 | 1864 | Similar to gi\|7671465\|emb\|CAB89405.1\|putative | 3591, 3603 | | 5826 |
| | | protein [Arabidopsis thaliana] | | | |
| 326 | | Similar to gi\|3582330\|gb\|AAC35227.1\|putative | | | 5386 |
| | | monooxygenase [Arabidopsis thaliana] | | | |
| 363 | 1855 | Similar to gi\|4417302\|gb\|AAD20426.1\|hypothetical | | | |
| | | (protein [Arabidopsis thaliana] | | | |

[0682] TABLE 2
SEQ ID NOs. and corresponding descriptions for Oryza genes which are
expressed in a seed-specific manner and further the SEQ ID NOs for
corresponding homologous sequences found in wheat, banana and maize.

| | | | | | |
|---|---|---|---|---|---|
| ORF | Promo | | | Bana | Maize |
| (SEQ | (SEQ | | Wheat | (SEQ | (SEQ |
| ID) | ID) | Description | (SEQ ID) | ID) | ID) |

seed

| | | | | | |
|---|---|---|---|---|---|
| 1020 | | Similar to gi\|20208\|emb\|CAA38211.1\|glutelin [Oryza | 4346, 2794, | | |
| | | sativa] | 4348, 4347 | | |
| 1021 | 2275 | Similar to gi\|7209261\|emb\|CAB76962.1\|alpha-gliadin | | | |
| | | [Triticum aestivum] | | | |
| 1022 | 2276 | Similar to gi\|226227\|prf\|\|1502200A prolamin [Avena | 4347, 4348 | | |
| | | sativa] | | | |
| 1023 | 2277 | Similar to gi\|4138581\|emb\|CAA67107.1\|mitochondrial | 3974, 3975, | 5164 | 5581 |
| | | energy transfer protein [Solanum tuberosum] | 3973, 3967, | | |
| | | | 3968, 3969, | | |
| | | | 2898 | | |
| 1045 | 2290 | Similar to gi\|3549657\|emb\|CAA20568.1\|putative | | | |
| | | protein [Arabidopsis thaliana] | | | |
| 1027 | | Similar to gi\|4584507\|emb\|CAB40745.1\|starch | 3410, 3480 | | 5563 |
| | | branching enzyme II [Solanum tuberosum] | | | |
| 1030 | 2281 | Similar to gi\|5803247\|dbj\|BAA83557.1\|Similar to | | | |
| | | OsENOD93a gene for early nodulin (AB018375) | | | |
| | | [Oryza sativa] | | | |
| 1028 | 2279 | Similar to gi\|3093462\|gb\|AAC15247.1\|ADP-glucose | | | 5817 |
| | | pyrophosphorylase large subunit [Oryza sativa] | | | |
| 1026 | | Open Reading Frame OS_ORF005803 ST(R) | 3037, 3291 | | 5765 |
| | | HTC034709-A01.26 FRAME: 3 ORF: 12 LEN: 840 | | | |
| 1024 | 2278 | Similar to gi\|4105681\|gb\|AAD02494.1\|unknown | | | 5627 |
| | | [Oryza sativa] | | | |
| 1048 | 2293 | Open Reading Frame OS_ORF019202 ST(R) | | | 5011 |
| | | HTC128990-A01.R.16 FRAME: −1 ORF: 22 LEN: 660 | | | |
| 1025 | | Similar to gi\|218199\|dbj\|BAA01999.1\|allergenic | | | |
| | | protein [Oryza sativa] | | | |
| 1032 | 2282 | Similar to PULA_KLEPN P07206 KLEBSIELLA | 3049 | | |
| | | PNEUMONIAE. PULLULANASE PRECURSOR (EC | | | |
| | | 3.2.1.41) (ALPHA-DEXTRIN ENDO-1,6-ALPHA- | | | |
| | | GLUCOSIDASE) (PULLULAN 6- | | | |
| | | GLUCANOHYDROLASE). | | | |
| 1029 | 2280 | Similar to gi\|944830\|emb\|CAA43183.1\|soybean 24 kDa | 4642 | | 5420 |
| | | oleosin isoform [Glycine max] | | | |
| 1036 | | Similar to gi\|169759\|gb\|AAA33890.1\|ADP-glucose | 4612, 3211 | 5001 | 5817 |
| | | pyrophosphorylase 51 kD subunit (EC 2.7.7.27) | | | |
| 1162 | 2377 | Similar to gi\|5042333\|emb\|CAB44664.1\|BETL4 | | | |
| | | protein [Zea mays] | | | |
| 1033 | 2283 | Similar to gi\|4416304\|gb\|AAD20309.1\|hypothetical | | | |
| | | protein [Zea mays] | | | |
| 1165 | 2380 | Similar to gi\|924624\|gb\|AAA80496.1\|flower-specific | | | |
| | | gamma-thionin-like protein/acidic protein precursor | | | |
| 1044 | 2289 | Similar to gi\|8439904\|gb\|AAF75090.1\|AC007583_26 | | | |
| | | ESTs gb\|Z27026 and gb\|29860 come from this gene. | | | |
| | | [Arabidopsis thaliana] | | | |
| 1088 | | Similar to gi\|4539346\|emb\|CAB37494.1\|putative | | | |
| | | protein [Arabidopsis thaliana] | | | |
| 1034 | 2284 | Open Reading Frame OS_ORF006108 HTC036556- | 4323, 4015, | | |
| | | A01.F.16 FRAME: −1 ORF: 1 LEN: 765 | 4322, 4324, | | |
| | | | 4016 | | |
| 1040 | | Similar to gi\|4996644\|dbj\|BAA78574.1\|Dof zinc finger | | | |
| | | protein [Oryza sativa] | | | |
| 1031 | | Similar to gi\|2252843\|gb\|AAB62842.1\|A_IG005I10.24 | | | |
| | | gene product [Arabidopsis thaliana] | | | |
| 1068 | | Similar to gi\|6016705\|gb\|AAF01531.1\|AC009325_1 | | 5067 | |
| | | unknown protein [Arabidopsis thaliana] | | | |
| 1095 | 2322 | Similar to gi\|6721166\|gb\|AAF26794.1\|AC016829_18 | 3253 | | |
| | | germin-like protein [Arabidopsis thaliana] | | | |
| 1390 | 2497 | Similar to gi\|1345528\|emb\|CAA54682.1\|ES43 | 3896, 3898, | | |
| | | [Hordeum vulgare] | 3897, 3895 | | |
| 1324 | | Similar to gi\|5915837\|sp\|O81974\|C7D8_SOYBN | | | 5724 |
| | | CYTOCHROME P450 71D8 (P450 CP7) | | | |
| 1206 | | Similar to gi\|3142298\|gb\|AAC16749.1\|Strong | | | 5491 |
| | | similarity to protein SBT1 gb\|X98929 from | | | |
| | | Lycopersicum esculentum. [Arabidopsis thaliana] | | | |
| 1133 | 2350 | Similar to ISP_BACSP P29140 BACILLUS SP. | 3023, 3022, | | 5484 |
| | | (STRAIN 221). INTRACELLULAR ALKALINE | 3101 | | |
| | | PROTEASE (EC 3.4.21.—). | | | |
| 1229 | 2420 | Similar to gi\|8778384\|gb\|AAF79392.1\|AC068197_2 | 3432, 2879, | | |
| | | F16A14.2 [Arabidopsis thaliana] | 4588, 3301, | | |
| | | | 3446 | | |
| 1563 | 2642 | Similar to gi\|6539566\|dbj\|BAA88183.1\|Similar to | 4551, 4552 | | |
| | | phosphoribosyl-ATP pyrophosphohydrolase | | | |
| | | (AB006082) [Oryza sativa] | | | |
| 1087 | | Similar to YG3L_YEAST P48236 | 2875, 4422 | | 5827 |
| | | SACCHAROMYCES CEREVISIAE (BAKER S | | | |
| | | YEAST). HYPOTHETICAL 51.6 KD PROTEIN IN | | | |
| | | RPL30B-RSR1 INTERGENIC REGION. | | | |
| 1047 | 2292 | Open Reading Frame OS_ORF003518 HTC020469- | | | |
| | | A01.7 FRAME: −1 ORF: 3 LEN: 657 | | | |
| 1041 | 2288 | Similar to gi\|6729036\|gb\|AAF27032.1\|AC009177_22 | 4659, 4660 | | 5371 |
| | | putative glucose and ribitol dehydrogenase homolog | | | |
| | | [Arabidopsis thaliana] | | | |
| 1414 | | Similar to gi\|7769863\|gb\|AAF69541.1\|AC008007_16 | | 5015 | |
| | | F12M16.29 [Arabidopsis thaliana] | | | |
| 1155 | | Similar to YHJD_ECOLI P37642 ESCHERICHIA | | | |
| | | COLI. HYPOTHETICAL 37.9 KD PROTEIN IN | | | |
| | | TREF-KDGK INTERGENIC REGION (O337). | | | |
| 1108 | 2326 | Open Reading Frame OS_ORF011610 HTC072062- | | | |
| | | A01.F.11 FRAME: 2 ORF: 5 LEN: 738 | | | |
| 1594 | | Similar to gi\|4337176\|gb\|AAD18097.1\|T31J12.4 | 4653, 2811, | | |
| | | [Arabidopsis thaliana] | 4654 | | |
| 1082 | | Similar to gi\|4586037\|gb\|AAD25655.1\|AC007109_13 | 4048, 4549, | | 5796 |
| | | putative heat shock protein [Arabidopsis thaliana] | 4550, 3403, | | |
| | | | 4548, 3402, | | |
| | | | 4043 | | |
| 1141 | 2358 | Open Reading Frame OS_ORF002232 HTC012937- | | | 5770 |
| | | A01.25 FRAME: −2 ORF: 24 LEN: 855 | | | |
| 1126 | | Similar to YP99_CAEEL Q09477 | | | |
| | | CAENORHABDITIS ELEGANS. HYPOTHETICAL | | | |
| | | 22.7 KD PROTEIN C28H8.9 IN CHROMOSOME III. | | | |
| 1125 | 2343 | Similar to ABP1_YEAST P15891 | | | |
| | | SACCHAROMYCES CEREVISIAE (BAKER S | | | |
| | | YEAST). ACTIN BINDING PROTEIN. | | | |
| 1119 | 2337 | Open Reading Frame containing a Sage tag sequence | | | |
| | | near 3 end OS_ORF008102 ST(F) HTC048468- | | | |
| | | A01.F.25 FRAME: 1 ORF: 13 LEN: 546 | | | |
| 1408 | | Similar to gi\|7269842\|emb\|CAB79701.1\|ribosomal | | | 5011 |
| | | protein S15a homolog [Arabidopsis thaliana] | | | |
| 1131 | 2348 | Open Reading Frame OS_ORF019613 HTC132417- | 3648, 3649, | | |
| | | A01.32 FRAME: 3 ORF: 16 LEN: 780 | 2819 | | |
| 1161 | 2376 | Similar to gi\|9081787\|dbj\|BAA99526.1\|hypothetical | | | |
| | | protein [Oryza sativa] | | | |
| 1148 | 2365 | Similar to gi\|3941456\|gb\|AAC83604.1\|putative | 3692, 3694, | 4970 | 5874 |
| | | transcription factor [Arabidopsis thaliana] | 2904, 3915, | | |
| | | | 4427, 3693 | | |
| 1042 | | Similar to gi\|4097100\|gb\|AAD10374.1\|globulin-like | | | 5543 |
| | | protein [Oryza sativa] | | | |
| 1461 | 2551 | Similar to gi\|2245101\|emb\|CAB10523.1\|hypothetical | | 4896 | |
| | | protein [Arabidopsis thaliana] | | | |
| 1145 | 2362 | Similar to gi\|7485867\|pir\|\|T00960 hypothetical protein | 4622 | | 5828 |
| | | F20D22.10 - Arabidopsis thaliana | | | |
| 1134 | 2351 | Open Reading Frame OS_ORF019604 HTC132357- | | | |
| | | A01.R.27 FRAME: 1 ORF: 7 LEN: 639 | | | |
| 1104 | | Similar to YC06_KLEPN Q48452 KLEBSIELLA | | | |
| | | PNEUMONIAE. HYPOTHETICAL 80.4 KD | | | |
| | | PROTEIN IN CPS REGION (ORF6). | | | |
| 1345 | | Similar to gi\|7269851\|emb\|CAB79710.1\|putative | | | 5487 |
| | | protein [Arabidopsis thaliana] | | | |
| 1460 | 2550 | Similar to gi\|4220484\|gb\|AAD12707.1\|hypothetical | 4439, 4440 | | |
| | | protein [Arabidopsis thaliana] | | | |
| 1403 | | Similar to gi\|6957714\|gb\|AAF32458.1\|hypothetical | 3490, 3489 | 4960 | 5520 |
| | | protein [Arabidopsis thaliana] | | | |
| 1072 | 2309 | Similar to gi\|6466941\|gb\|AAF13076.1\|AC009176_3 | | | |
| | | unknown protein [Arabidopsis thaliana] | | | |
| 1316 | 2469 | Similar to gi\|8778754\|gb\|AAF79762.1\|AC009317_21 | 4550, 4048, | | 5644 |
| | | T30E16.34 [Arabidopsis thaliana] | 4549, 4043, | | |
| | | | 4548, 4044, | | |
| | | | 2718, 3403, | | |
| | | | 3402 | | |
| 1038 | 2286 | Similar to gi\|5295941\|dbj\|BAA81842.1\|ESTs | 2788 | 5052 | 5704 |
| | | AU075322(C11109), D22430(C11109) correspond to a | | | |
| | | region of the predicted gene.; Similar to Medicago | | | |
| | | sativa early nodule-specific protein (ENOD8) gene, | | | |
| | | complete cds.(L18899) [Oryza sativa] | | | |
| 1469 | 2558 | Similar to gi\|4204311\|gb\|AAD10692.1\|lcl\|prt_seq No | | | 5876 |
| | | definition line found | | | |
| 1067 | 2305 | Similar to gi\|6714358\|gb\|AAF26048.1\|AC012562_3 | 2994, 2992, | 5123 | |
| | | hypothetical protein [Arabidopsis thaliana] | 4349 | | |
| 1441 | 2533 | Similar to ELI1_PHYCR P41802 PHYTOPHTHORA | | | |
| | | CRYPTOGEA. ACIDIC ELICITIN A1 PRECURSOR. | | | |
| 1100 | | Similar to YAYF_SCHPO Q10222 | | | |
| | | SCHIZOSACCHAROMYCES POMBE (FISSION | | | |
| | | YEAST). HYPOTHETICAL PROTEIN C4H3.15C IN | | | |
| | | CHROMOSOME I (FRAGMENT). | | | |
| 1261 | 2440 | Open Reading Frame OS_ORF011947 ST(R) | | | 5722 |
| | | HTC074509-A01.R.21 FRAME: 3 ORF: 3 LEN: 528 | | | |
| 1142 | 2359 | Similar to VNFG_AZOCH P15333 AZOTOBACTER | | | |
| | | CHROOCOCCUM MCD 1. NITROGENASE | | | |
| | | VANADIUM-IRON PROTEIN DELTA CHAIN (EC | | | |
| | | 1.18.6.1)(NITROGENASE COMPONENT I) | | | |
| | | (DINITROGENASE). | | | |
| 1150 | 2366 | Similar to gi\|1346724\|sp\|P48007\|PIST_ARATH | 3321 | | 5530 |
| | | FLORAL HOMEOTIC PROTEIN PISTILLATA | | | |
| 1287 | 2453 | Open Reading Frame OS_ORF003469 HTC020152- | | | 5693 |
| | | A01.25 FRAME: −2 ORF: 16 LEN: 1140 | | | |
| 1066 | 2304 | Open Reading Frame OS_ORF011792 HTC073334- | | 4778 | 5485 |
| | | A01.F.37 FRAME: −1 ORF: 16 LEN: 966 | | | |
| 1369 | 2488 | Similar to gi\|6721107\|gb\|AAF26761.1\|AC007396_10 | | 5188 | 5238 |
| | | T4O12.17 [Arabidopsis thaliana] | | | |
| 1591 | 2667 | Similar to gi\|4309727\|gb\|AAD15497.1\|putative | 3755, 3766, | 5177 | 5458 |
| | | ribosomal protein L6 [Arabidopsis thaliana] | 3745, 3741, | | |
| | | | 3713 | | |
| 1049 | 2294 | Similar to PGS1_RAT P47853 RATTUS | 2903 | 4917 | 5300 |
| | | NORVEGICUS (RAT). BONE/CARTILAGE | | | |
| | | PROTEOGLYCAN I PRECURSOR (BIGLYCAN) | | | |
| | | (PG-S1). | | | |
| 1111 | 2329 | Open Reading Frame OS_ORF018782 HTC125558- | | | |
| | | A01.F.12 FRAME: −3 ORF: 4 LEN: 729 | | | |
| 1109 | 2327 | Similar to gi\|18583\|emb\|CAA48907.1\|nodulin | | | |
| | | [Glycine max] | | | |
| 1326 | | Similar to gi\|4895230\|gb\|AAD32816.1\|AC007660_17 | 3464 | | 5897 |
| | | unknown protein [Arabidopsis thaliana] | | | |
| 1350 | | Similar to MLO2_SCHPO Q09329 | 3341, 3342 | 5194 | 5425 |
| | | SCHIZOSACCHAROMYCES POMBE (FISSION | | | |
| | | YEAST). MLO2 PROTEIN. | | | |
| 1054 | | Open Reading Frame OS_ORF004775 HTC028124- | 3087 | | |
| | | A01.F.22 FRAME: −1 ORF: 27 LEN: 1044 | | | |
| 1157 | 2372 | Open Reading Frame OS_ORF001203 HTC006819- | | | 5588 |
| | | A01.28 FRAME: −3 ORF: 1 LEN: 777 | | | |
| 1243 | 2430 | Similar to gi\|8778718\|gb\|AAF79726.1\|AC005106_7 | 4318, 4317, | 5135 | |
| | | T25N20.15 [Arabidopsis thaliana] | 4689 | | |
| 1037 | 2285 | Similar to gi\|228454\|prf\|\|1804333B Gln synthetase | | 4980 | 5656 |
| | | [Arabidopsis thaliana] | | | |
| 1425 | 2518 | Similar to VE1_HPV63 Q07847 HUMAN | | | |
| | | PAPILLOMA VIRUS TYPE 63. REPLICATION | | | |
| | | PROTEIN E1. | | | |
| 1094 | | Open Reading Frame OS_ORF019404 HTC130656- | | 4940 | |
| | | A01.F.12 FRAME: −2 ORF: 1 LEN: 678 | | | |
| 1335 | | Similar to gi\|8671775\|gb\|AAF78381.1\|AC069551_14 | | | |
| | | T10O22.22 [Arabidopsis thaliana] | | | |
| 1260 | | Similar to gi\|5881963\|gb\|AAD55139.1\|AF066079_1 | | | 5395 |
| | | dihydrolipoamide S-acetyltransferase [Arabidopsis | | | |
| | | thaliana] | | | |
| 1147 | 2364 | Open Reading Frame containing a Sage tag sequence | | | |
| | | near 3 end OS_ORF000613 ST(F) HTC003481- | | | |
| | | A01.18 FRAME: 1 ORF: 34 LEN: 762 | | | |
| 1062 | | Open Reading Frame OS_ORF002475 HTC014377- | 2786, 4649, | | 5241 |
| | | A01.16 FRAME: −3 ORF: 18 LEN: 693 | 4629, 4648, | | |
| | | | 2882, 4589, | | |
| | | | 4628 | | |
| 1065 | 2303 | Similar to gi\|995619\|emb\|CAA62665.1\|lectin like | 3303, 3232, | | |
| | | protein [Arabidopsis thaliana] | 4027 | | |
| 1504 | 2585 | Similar to YPPG_BACSU P50835 BACILLUS | | | |
| | | SUBTILIS. HYPOTHETICAL 14.5 KD PROTEIN IN | | | |
| | | PONA-COTD INTERGENIC REGION. | | | |
| 1256 | 2438 | Similar to gi\|6682631\|gb\|AAF23352.1\|AC016163_26 | 2729 | 5199 | |
| | | unknown protein [Arabidopsis thaliana] | | | |
| 1079 | 2315 | Similar to NEPU_THEVU Q08751 | 3665, 4214, | 4791 | 5521 |
| | | THERMOACTINOMYCES VULGARIS. | 3702, 3704, | | |
| | | NEOPULLULANASE (EC 3.2.1.135) (ALPHA- | 3663, 3695, | | |
| | | AMYLASE II). | 3701, 3673, | | |
| | | | 3705, 3700, | | |
| | | | 3667, 3703, | | |
| | | | 3698, 3672, | | |
| | | | 3680, 3697, | | |
| | | | 3699, 4215, | | |
| | | | 3682, 3674, | | |
| | | | 3664, 3681, | | |
| | | | 3666, 2978, | | |
| | | | 3181 | | |
| 1135 | 2352 | Similar to gi\|416490\|emb\|CAA51289.1\|GT-2 factor | 2912 | | 5239 |
| | | [Arabidopsis thaliana] | | | |
| 1053 | | Similar to gi\|7573384\|emb\|CAB87688.1\|putative | 3444 | 4957 | |
| | | protein [Arabidopsis thaliana] | | | |
| 1241 | 2428 | Similar to gi\|5295948\|dbj\|BAA81849.1\|hypothetical | | | |
| | | protein [Oryza sativa] | | | |
| 1558 | 2637 | Similar to YQJL_BACSU P54549 BACILLUS | | | |
| | | SUBTILIS. HYPOTHETICAL 28.2 KD PROTEIN IN | | | |
| | | GLNQ-ANSR INTERGENIC REGION. | | | |
| 1093 | | Similar to gi\|2605714\|gb\|AAB84183.1\|beta-tonoplast | 4143, 4144, | 4984 | 5572 |
| | | intrinsic protein [Arabidopsis thaliana] | 4179, 4141, | | |
| | | | 4425, 4178, | | |
| | | | 4423, 4177, | | |
| | | | 4424 | | |
| 1083 | | Open Reading Frame OS_ORF017793 HTC118665- | 3167 | 5202 | 5559 |
| | | A01.F.5 FRAME: −1 ORF: 2 LEN: 780 | | | |
| 1432 | 2525 | Open Reading Frame containing a Sage tag sequence | | | |
| | | near 3 end OS_ORF004912 ST(F) HTC028900- | | | |
| | | A01.F.8 FRAME: −1 ORF: 1 LEN: 1140 | | | |
| 1143 | 2360 | Open Reading Frame OS_ORF018659 HTC124609- | | | |
| | | A01.F.4 FRAME: −3 ORF: 9 LEN: 705 | | | |
| | | Similar to YNZ3_CAEEL P45963 | | | |
| | | CAENORHABDITIS ELEGANS. HYPOTHETICAL | | | |
| | | ACETYLCHOLINE RECEPTOR LIKE PROTEIN | | | |
| | | T09A5.3 INCHROMOSOME III. | | | |
| 1294 | | Similar to gi\|804946\|emb\|CAA85389.1\|acyl-(acyl | 3468, 3467 | 4966 | 5824 |
| | | carrier protein) thioesterase [Arabidopsis thaliana] | | | |
| 1364 | | Open Reading Frame OS_ORF009128 HTC054783- | | | 5899 |
| | | A01.F.13 FRAME: −1 ORF: 8 LEN: 633 | | | |
| 1549 | 2629 | Open Reading Frame containing a Sage tag sequence | | | |
| | | near 3 end OS_ORF010160 ST(F) HTC061531- | | | |
| | | A01.F.19 FRAME: −1 ORF: 1 LEN: 1017 | | | |
| 1211 | | Similar to gi\|4406810\|gb\|AAD20118.1\|unknown | | | 5465 |
| | | protein [Arabidopsis thaliana] | | | |
| 1159 | 2374 | Open Reading Frame OS_ORF011119 ST(R) | | | 5363 |
| | | HTC068485-A01.R.10 FRAME: −3 ORF: 1 LEN: 573 | | | |
| 1596 | 2671 | Similar to 7B2_XENLA P18844 XENOPUS LAEVIS | | | |
| | | (AFRICAN CLAWED FROG). NEUROENDOCRINE | | | |
| | | PROTEIN 7B2 (SECRETOGRANIN V) | | | |
| | | (FRAGMENT). | | | |
| 1510 | 2591 | Open Reading Frame OS_ORF018745 HTC125312- | | | |
| | | A01.R.20 FRAME: −3 ORF: 28 LEN: 795 | | | |
| 1373 | | Similar to gi\|4490708\|emb\|CAB38842.1\|putative | | 5168 | 5776 |
| | | protein [Arabidopsis thaliana] | | | |
| 1291 | 2456 | Similar to YNU6_CAEEL P50444 | | 4780 | |
| | | CAENORHABDITIS ELEGANS. HYPOTHETICAL | | | |
| | | 42.9 KD PROTEIN R74.6 IN CHROMOSOME III. | | | |
| 1163 | 2378 | Similar to gi\|9294354\|dbj\|BAB02251.1\| | 4614, 4613 | | 5427 |
| | | gb\|AAF25994.1˜gene_id: MMF12.4˜similar to | | | |
| | | unknown protein [Arabidopsis thaliana] | | | |
| 1063 | 2302 | Similar to HPI2_ECTVA P38524 | | | |
| | | ECTOTHIORHODOSPIRA VACUOLATA. HIGH | | | |
| | | POTENTIAL IRON-SULFUR PROTEIN, ISOZYME | | | |
| | | 2 (HIPIP 2). | | | |
| 1252 | | Similar to gi\|7413593\|emb\|CAB86083.1\|putative | 3990, 3991 | 4832 | |
| | | protein [Arabidopsis thaliana] | | | |
| 1238 | 2426 | Similar to gi\|7716575\|gb\|AAF68437.1\|putative DNA | 3138, 2887, | | 5852 |
| | | cytosine methyltransferase MET3 [Zea mays] | 3137, 2886, | | |
| | | | 3238, 2950, | | |
| | | | 3128 | | |
| 1338 | 2477 | Similar to gi\|3894216\|dbj\|BAA34599.1\|elongation | 4134, 4135, | | 5550 |
| | | factor 1 beta 2 [Oryza sativa] | 4133 | | |
| 1582 | 2659 | Open Reading Frame OS_ORF008474 HTC051016- | | | |
| | | A01.R.13 FRAME: 2 ORF: 12 LEN: 681 | | | |
| 1436 | 2528 | Open Reading Frame OS_ORF016926 HTC112251- | | 5191 | 5863 |
| | | A01.14 FRAME: 1 ORF: 10 LEN: 654 | | | |
| 1375 | 2491 | Similar to gi\|7340854\|dbj\|BAA92944.1\|hypothetical | | | |
| | | protein [Oryza sativa] | | | |
| 1332 | | Similar to gi\|6017106\|gb\|AAF01589.1\|AC009895_10 | 4039, 4038 | 4797 | 5633 |
| | | hypothetical protein [Arabidopsis thaliana] | | | |
| 1139 | 2356 | Open Reading Frame OS_ORF006860 HTC041127- | | | |
| | | A01.23 FRAME: 1 ORF: 4 LEN: 852 | | | |
| 1092 | | Similar to CC22_PEA P28567 PISUM SATIVUM | 3035, 3092, | | 5926 |
| | | (GARDEN PEA). CELL DIVISION CONTROL | 3431, 3288, | | |
| | | PROTEIN 2 HOMOLOG 2 (EC 2.7.1.—) | 4153 | | |
| | | (FRAGMENT). | | | |
| 1208 | 2407 | Open Reading Frame OS_ORF011285 HTC069506- | 3303, 4027, | | |
| | | A01.R.4 FRAME: −2 ORF: 3 LEN: 786 | 2712, 4028, | | |
| | | | 3232 | | |
| 1351 | | Similar to NXL2_ASTST P01381 ASTROTIA | | | 5607 |
| | | STOKESI (STOKES S SEA SNAKE) (DISTEIRA | | | |
| | | STOKESI). LONG NEUROTOXIN 2 (TOXIN C). | | | |
| 1355 | | Open Reading Frame OS_ORF017900 ST(R) | | | 5667 |
| | | HTC119232-A01.40 FRAME: 2 ORF: 14 LEN: 759 | | | |
| 1140 | 2357 | Open Reading Frame OS_ORF000732 ST(R) | | | |
| | | HTC004214-A01.47 FRAME: −1 ORF: 6 LEN: 813 | | | |
| 1295 | | Similar to gi\|7488260\|pir\|T00673 protein kinase | | | |
| | | homolog F6E13.6 - Arabidopsis thaliana | | | |
| 1099 | 2324 | Similar to gi\|7270031\|emb\|CAB79847.1\|predicted | | | 5565 |
| | | protein [Arabidopsis thaliana] | | | |
| 1589 | 2666 | Open Reading Frame containing a Sage tag sequence | | | |
| | | near 3 end OS_ORF021256 ST(F) HTC144712- | | | |
| | | A01.R.2 FRAME: 2 ORF: 7 LEN: 528 | | | |
| 1545 | 2625 | Open Reading Frame OS_ORF014969 HTC097200- | | | |
| | | A01.R.41 FRAME: −1 ORF: 13 LEN: 876 | | | |
| 1186 | 2396 | Similar to CLCB_BOVIN P04975 BOS TAURUS | | | |
| | | (BOVINE). CLATHRIN LIGHT CHAIN B (BRAIN | | | |
| | | AND LYMPHOCYTE LCB). | | | |
| 1463 | 2552 | Similar to CLCB_HUMAN P09497 HOMO SAPIENS | | | |
| | | (HUMAN). CLATHRIN LIGHT CHAIN B (BRAIN | | | |
| | | AND LYMPHOCYTE LCB). | | | |
| 1296 | 2458 | Similar to gi\|9294401\|dbj\|BAB02482.1\| | 4380 | | |
| | | gene_id: MOE17.5˜unknown protein [Arabidopsis | | | |
| | | thaliana] | | | |
| 1144 | 2361 | Similar to gi\|9294687\|dbj\|BAB03053.1\| | | | |
| | | gene_id: MHC9.8˜unknown protein [Arabidopsis | | | |
| | | thaliana] | | | |
| 1230 | 2421 | Open Reading Frame OS_ORF006541 HTC039204- | | | |
| | | A01.F.15 FRAME: 2 ORF: 7 LEN: 681 | | | |
| 1232 | | Open Reading Frame OS_ORF002127 HTC012268- | | | |
| | | A01.50 FRAME: 1 ORF: 28 LEN: 891 | | | |
| 1077 | 2313 | Similar to COAT_ICMV Q08583 INDIAN CASSAVA | | | 5253 |
| | | MOSAIC VIRUS (ICMV). COAT PROTEIN. | | | |
| 1537 | 2618 | Similar to PDI_CHICK P09102 Q90969 GALLUS | 3507, 3506, | 4911 | 5311 |
| | | GALLUS (CHICKEN). PROTEIN DISULFIDE | 3499, 3498 | | |
| | | ISOMERASE (PDI) (EC 5.3.4.1)/PROLYL 4- | | | |
| | | HYDROXYLASEBETA SUBUNIT (EC 1.14.11.2)/ | | | |
| | | CELLULAR THYROID HORMONE | | | |
| | | BINDINGPROTEIN. | | | |
| 1138 | 2355 | Similar to gi\|82583\|pir\|\|E22364 alpha/beta-gliadin | | | |
| | | precursor (clone A1235) - wheat | | | |
| 1592 | 2668 | Open Reading Frame containing a Sage tag sequence | | | |
| | | near 3 end OS_ORF014275 ST(F) HTC091876- | | | |
| | | A01.49 FRAME: −1 ORF: 42 LEN: 795 | | | |
| 1496 | 2578 | Similar to WAP_CAMDR P09837 CAMELUS | 2815, 2968 | | |
| | | DROMEDARIUS (DROMEDARY) (ARABIAN | | | |
| | | CAMEL). WHEY ACIDIC PROTEIN (WAP). | | | |
| 1105 | | Similar to DPB2_YEAST P24482 Q06622 | 2817 | | |
| | | SACCHAROMYCES CEREVISIAE (BAKER S | | | |
| | | YEAST). DNA POLYMERASE EPSILON, SUBUNIT | | | |
| | | B (EC 2.7.7.7) (DNA POLYMERASE IISUBUNIT B). | | | |
| 1340 | | Open Reading Frame OS_ORF006899 HTC041396- | | | 5327 |
| | | A01.41 Frame: 2 ORF: 2 LEN: 849 | | | |
| 1529 | 2610 | Open Reading Frame containing a Sage tag sequence | | | |
| | | near 3 end OS_ORF020346 ST(F) HTC137170- | | | |
| | | A01.19 FRAME: −2 ORF: 3 LEN: 1437 | | | |
| 1249 | | Similar to gi\|8099244\|gb\|AAF72092.1\|AC025098_26 | | | |
| | | Conserved hypothetical protein, similar to rice | | | |
| | | hypothetical protein AAF34431 [Oryza sativa] | | | |
| 1129 | 2346 | Similar to CASK_ODOHE Q95225 Q95226 | | | |
| | | ODOCOILEUS HEMIONUS (MULE DEER) | | | |
| | | (BLACK-TAILED DEER). KAPPA CASEIN | | | |
| | | (FRAGMENT). | | | |
| 1314 | | Open Reading Frame OS_ORF004164 ST(R) | 3473 | | 5906 |
| | | HTC024228-A01.36 FRAME: 1 ORF: 7 LEN: 549 | | | |
| 1476 | | Similar to YXEP_BACSU P54955 BACILLUS | | | |
| | | SUBTILIS. HYPOTHETICAL 41.6 KD PROTEIN IN | | | |
| | | IDH-DEOR INTERGENIC REGION. | | | |
| 1101 | | Similar to gi\|2961389\|emb\|CAA18136.1\|purple acid | 4062, 4063 | 5112 | 5835 |
| | | phosphatase like protein [Arabidopsis thaliana] | | | |
| 1151 | 2367 | Open Reading Frame OS_ORF002273 HTC013181- | | 4975 | 5674 |
| | | A01.21 FRAME: −2 ORF: 16 LEN: 675 | | | |
| 1380 | | Similar to gi\|6289052\|gb\|AAF06789.1\|AF192975_1 | 4351, 3043, | 4829 | |
| | | unknown [Oryza sativa] | 4350, 3044, | | |
| | | | 3042 | | |
| 1081 | 2317 | Similar to gi\|4510349\|gb\|AAD21438.1\|putative bZIP | 3933, 3935, | | 5583 |
| | | transcription factor [Arabidopsis thaliana] | 3934 | | |
| 1386 | | Similar to gi\|4185501\|gb\|AAD09105.1\|fertilization- | 2870, 2869 | | |
| | | independent seed 2 protein [Arabidopsis thaliana] | | | |
| 1231 | 2422 | Open Reading Frame OS_ORF014200 HTC091206- | | | |
| | | A01.F.14 FRAME: −2 ORF: 5 LEN: 906 | | | |
| 1114 | 2332 | Similar to YEGX_ECOLI P76421 O08480 | | | |
| | | ESCHERICHIA COLI. HYPOTHETICAL 32.0 KD | | | |
| | | PROTEIN IN DHNA-THID INTERGENIC REGION. | | | |
| 1517 | 2598 | Similar to gi\|8843783\|dbj\|BAA97331.1\| | | | |
| | | gb\|AAC80581.1˜gene_id: MZN1.7˜similar to unknown | | | |
| | | protein [Arabidopsis thaliana] | | | |
| 1498 | 2579 | Open Reading Frame OS_ORF013608 HTC087069- | | | 5322 |
| | | A01.R.4 FRAME: 1 ORF: 4 LEN: 663 | | | |
| 1534 | 2615 | Similar to gi\|4140257\|emb\|CAA10352.1\|LEA-like | | | 5805 |
| | | protein [Arabidopsis thaliana] | | | |
| 1259 | | Open Reading Frame containing a Sage tag sequence | 2895, 3493 | | |
| | | near 3 end OS_ORF006433 ST(F) HTC038577- | | | |
| | | A01.35 FRAME: −3 ORF: 29 LEN: 675 | | | |
| 1055 | 2297 | Similar to AMIA_ECOLI P36548 ESCHERICHIA | 3557, 3819, | 5026 | 5846 |
| | | COLI. PROBABLE N-ACETYLMURAMOYL-L- | 3554, 3818, | | |
| | | ALANINE AMIDASE AMIA PRECURSOR(EC | 3550 | | |
| | | 3.5.1.28). | | | |
| 1539 | 2620 | Open Reading Frame OS_ORF012379 ST(R) | | | |
| | | HTC077361-A01.R.25 FRAME: −1 ORF: 6 LEN: 1119 | | | |
| 1127 | 2344 | Similar to UK14_RAT P52759 RATTUS | 2991, 3277 | 5062 | 5246 |
| | | NORVEGICUS (RAT). 14.5 KD TRANSLATIONAL | | | |
| | | INHIBITOR PROTEIN (PERCHROLIC ACID | | | |
| | | SOLUBLEPROTEIN). | | | |
| 1396 | 2502 | Open Reading Frame OS_ORF007652 HTC045616- | | | 5267 |
| | | A01.R.24 FRAME: 2 ORF: 20 LEN: 684 | | | |
| 1123 | 2341 | Open Reading Frame OS_ORF010912 HTC067127- | | | |
| | | A01.F.24 FRAME: 1 ORF: 17 LEN: 675 | | | |
| 1121 | 2339 | Open Reading Frame OS_ORF014277 HTC091891- | | | |
| | | A01.F.5 FRAME: 1 ORF: 4 LEN: 669 | | | |
| 1480 | | Similar to YIA7_YEAST P40555 | 2693 | | |
| | | SACCHAROMYCES CEREVISIAE (BAKER S | | | |
| | | YEAST). HYPOTHETICAL 24.8 KD PROTEIN IN | | | |
| | | FAA3-BET1 INTERGENIC REGION. | | | |
| 1417 | 2510 | Open Reading Frame OS_ORF000206 HTC001182- | | | |
| | | A01.25 FRAME: −3 ORF: 23 LEN: 915 | | | |
| 1477 | 2563 | Open Reading Frame OS_ORF006071 HTC036306- | | | |
| | | A01.27 FRAME: 1 ORF: 7 LEN: 1761 | | | |
| 1312 | 2466 | Similar to gi\|6063552\|dbj\|BAA85412.1\|ESTs | 4545 | | 5540 |
| | | AU065232(E60855), C23624(S1554), | | | |
| | | AU078241(E60855) correspond to a region of the | | | |
| | | predicted gene.; similar to putative adenylate kinase. | | | |
| | | (AC005896) [Oryza sativa] | | | |
| 1359 | | Similar to AEFA_ECOLI P77338 ESCHERICHIA | | | |
| | | COLI. AEFA PROTEIN. | | | |
| 1073 | 2310 | Similar to gi\|5803244\|dbj\|BAA83554.1\|Similar to | 3323, 4292, | 4789 | 5617 |
| | | hexose carrier protein HEX6 &RCCHCP_1 (Q07423) | 3324 | | |
| | | [Oryza sativa] | | | |
| 1146 | 2363 | Similar to UL06_HCMVA P16720 HUMAN | | | 5864 |
| | | CYTOMEGALOVIRUS (STRAIN AD169). | | | |
| | | HYPOTHETICAL PROTEIN UL6. | | | |
| 1218 | 2414 | Similar to gi\|2828295\|emb\|CAA16709.1\|putative | 4604, 3397, | 5038 | |
| | | protein [Arabidopsis thaliana] | 2920, 4605 | | |
| 1164 | 2379 | Open Reading Frame OS_ORF022040 HTC151019- | | | 5361 |
| | | A01.R.15 FRAME: 2 ORF: 7 LEN: 606 | | | |
| 1486 | 2570 | Similar to E321_ADE1P P35770 HUMAN | | | |
| | | ADENOVIRUS TYPE 11 (AD11P) (STRAIN | | | |
| | | SLOBISKI). EARLY E3 20.6 KD GLYCOPROTEIN. | | | |
| 1533 | 2614 | Open Reading Frame OS_ORF002013 HTC011543- | | | |
| | | A01.21 FRAME: 1 ORF: 6 LEN: 1566 | | | |
| 1571 | 2649 | Similar to IM23_YEAST P32897 | | | |
| | | SACCHAROMYCES CEREVISIAE (BAKER S | | | |
| | | YEAST). MITOCHONDRIAL IMPORT INNER | | | |
| | | MEMBRANE TRANSLOCASE SUBUNIT | | | |
| | | TIM23(MITOCHONDRIAL PROTEIN IMPORT | | | |
| | | PROTEIN 3) (MITOCHONDRIAL PROTEIN | | | |
| | | IMPORTPROTEIN MAS6) (MEMBRANE IMPORT | | | |
| | | MACHINERY PROTEIN MIM2 | | | |
| 1090 | | Similar to gi\|6721556\|dbj\|BAA89586. 1\|hypothetical | | | 5542 |
| | | protein [Oryza sativa] | | | |
| 1124 | 2342 | Open Reading Frame OS_ORF010827 HTC066509- | | | |
| | | A01.F.19 FRAME: 2 ORF: 28 LEN: 675 | | | |
| 1190 | 2398 | Similar to UBPT_CAEEL Q17361 | | | |
| | | CAENORHABDITIS ELEGANS. QUEUINE TRNA- | | | |
| | | RIBOSYLTRANSFERASE (EC 2.4.2.29) (TRNA- | | | |
| | | GUANINETRANSGLYCOSYLASE) (GUANINE | | | |
| | | INSERTION ENZYME). | | | |
| 1365 | | Similar to gi\|3249086\|gb\|AAC24070.1\|Contains | 3963, 3960, | 4907 | |
| | | similarity to 21 KD subunit of the Arp2/3 protein | 3962, 3961 | | |
| | | complex (ARC21) gb\|AF006086 from Homo sapiens. | | | |
| | | EST gb\|Z37222 comes [Arabidopsis thaliana] | | | |
| 1051 | | Open Reading Frame OS_ORF016166 HTC106341- | | | |
| | | A01.R.18 FRAME: −3 ORF: 4 LEN: 861 | | | |
| 1521 | 2602 | Similar to gi\|9280680\|gb\|AAF86549.1\|AC069252_8 | 3370, 3408, | 5064 | 5802 |
| | | F2E2.12 [Arabidopsis thaliana] | 3372, 3371 | | |
| 1492 | 2575 | Similar to YD57_SCHPO Q10311 | | | |
| | | SCHIZOSACCHAROMYCES POMBE (FISSION | | | |
| | | YEAST). HYPOTHETICAL 25.9 KD PROTEIN | | | |
| | | C6C3.07 IN CHROMOSOME I. | | | |
| 1450 | | Similar to YAJO_ECOLI P77735 ESCHERICHIA | | | |
| | | COLI. HYPOTHETICAL OXIDOREDUCTASE IN | | | |
| | | PGPA-ISPA INTERGENIC REGION. | | | |
| 1154 | 2370 | Similar to gi\|6581058\|gb\|AAF18438.1\|AF192467_1 | | | 5519 |
| | | Sgt1 [Oryza sativa] | | | |
| 1447 | 2538 | Similar to gi\|7487883\|pir\|\|T00987 hypothetical protein | | 4803 | |
| | | T9J22.21 - Arabidopsis thaliana | | | |
| 1551 | 2631 | Open Reading Frame OS_ORF013836 HTC088733- | | | |
| | | A01.F.19 FRAME: 1 ORF: 19 LEN: 1476 | | | |
| 1046 | 2291 | Similar to gi\|5802240\|gb\|AAD51623.1\|AF169020_1 | | | |
| | | seed maturation protein PM35 [Glycine max] | | | |
| 1546 | 2626 | Open Reading Frame OS_ORF013277 HTC084148- | | | |
| | | A01.5 FRAME: 3 ORF: 1 LEN: 735 | | | |
| 1160 | 2375 | Similar to YJEQ_ECOLI P39286 ESCHERICHIA | | | |
| | | COLI. HYPOTHETICAL 37.7 KD PROTEIN IN PSD- | | | |
| | | AMIB INTERGENIC REGION (F337). | | | |
| 1481 | 2566 | Open Reading Frame containing a Sage tag sequence | | | |
| | | near 3 end OS_ORF013162 ST(F) HTC083361- | | | |
| | | A01.F.40 FRAME: −2 ORE: 1 LEN: 696 | | | |
| 1358 | 2483 | Similar to gi\|7670024\|dbj\|BAA94978.1\|contains | | | 5473 |
| | | similarity to similar to ubiquitin conjugating | | | |
| | | enzyme˜gene_id: K14A17.7 [Arabidopsis thaliana] | | | |
| 1153 | 2369 | Similar to MYBH_DICDI P34127 DICTYOSTELIUM | 4609, 4610 | | 5437 |
| | | DISCOIDEUM (SLIME MOLD). MYB-LIKE | | | |
| | | PROTEIN (FRAGMENT). | | | |
| 1059 | 2300 | Open Reading Frame OS_ORF001606 HTC009227- | | | |
| | | A01.48 FRAME: 2 ORF: 25 LEN: 1299 | | | |
| 1419 | 2512 | Similar to YV23_MYCLE P54580 | | | 5408 |
| | | MYCOBACTERIUM LEPRAE. HYPOTHETICAL | | | |
| | | 27.9 KD PROTEIN B2168_C2_209. | | | |
| 1334 | | Open Reading Frame OS_ORF004663 HTC027383- | | | 5757 |
| | | A01.F.15 FRAME: 1 ORF: 3 LEN: 663 | | | |
| 1339 | | Open Reading Frame OS_ORF013226 ST(R) | | | 5569 |
| | | HTC083788-A01.R.7 FRAME: 3 ORF: 2 LEN: 813 | | | |
| 1547 | 2627 | Similar to gi\|8778731\|gb\|AAF79739.1\|AC005106_20 | | | |
| | | T25N20.6 [Arabidopsis thaliana] | | | |
| 1177 | 2390 | Open Reading Frame containing a Sage tag sequence | 3365, 4159, | 4989 | |
| | | near 3 end OS_ORF001044 ST(F) HTC005847- | 2769, 3364, | | |
| | | A01.28 FRAME: −2 ORF: 3 LEN: 783 | 4496, 4497, | | |
| | | | 2768, 2809, | | |
| | | | 4158, 3271, | | |
| | | | 3109, 4530, | | |
| | | | 2932, 3269, | | |
| | | | 3295, 2707 | | |
| 1385 | 2495 | Similar to gi\|2911041\|emb\|CAA17551.1\|kinetochore | | 5187 | 5238 |
| | | (SKP1p)-like protein [Arabidopsis thaliana] | | | |
| 1300 | 2461 | Similar to gi\|4582787\|emb\|CAB40376.1\|adenosine | 4033, 4034, | 4806 | 5804 |
| | | kinase [Zea mays] | 4035 | | |
| 1451 | 2541 | Similar to gi\|8843778\|dbj\|BAA97326.1\| | | | 5380 |
| | | emb\|CAB85555.1˜gene_id: MZN1.2˜similar to | | | |
| | | unknown protein [Arabidopsis thaliana] | | | |
| 1120 | 2338 | Open Reading Frame OS_ORF010615 HTC065139- | | | |
| | | A01.R.9 FRAME: −2 ORF: 2 LEN: 660 | | | |
| 1433 | 2526 | Similar to gi\|6453867\|gb\|AAF09051.1\|AC011717_18 | | | |
| | | hypothetical protein [Arabidopsis thaliana] | | | |
| 1467 | 2556 | Similar to gi\|3790581\|gb\|AAC69853.1\|RING-H2 | 4303, 4304 | 4857 | |
| | | finger protein RHB1a [Arabidopsis thaliana] | | | |
| 1074 | 2311 | Open Reading Frame containing a Sage tag sequence | | | |
| | | near 3 end OS_ORF021691 ST(F) HTC148178- | | | |
| | | A01.14 FRAME: −2 ORF: 1 LEN: 681 | | | |
| 1258 | | Similar to gi\|4733993\|gb\|AAD28672.1\|AC007188_2 | | 5075 | 5362 |
| | | unknown protein [Arabidopsis thaliana] | | | |
| 1228 | | Similar to gi\|1839244\|gb\|AAB46988.1\|EGF receptor | 2855, 2854, | 4910 | 5869 |
| | | like protein [Arabidopsis thaliana] | 3691, 2959 | | |
| 1445 | 2536 | Open Reading Frame OS_ORF011257 HTC069347- | | | |
| | | A01.F.8 FRAME: −1 ORF: 1 LEN: 786 | | | |
| 1527 | 2608 | Open Reading Frame OS_ORF013101 HTC082889- | | | |
| | | A01.R.9 FRAME: −1 ORF: 7 LEN: 690 | | | |
| 1279 | 2450 | Similar to gi\|2245022\|emb\|CAB10442.1\|hypothetical | | | 5862 |
| | | protein [Arabidopsis thaliana] | | | |
| 1284 | | Similar to HIS8_MYCSM P28735 | | | |
| | | MYCOBACTERIUM SMEGMATIS. HISTIDINOL- | | | |
| | | PHOSPHATE AMINOTRANSFERASE (EC 2.6.1.9) | | | |
| | | (IMIDAZOLE ACETOL-PHOSPHATE | | | |
| | | TRANSAMINASE) (FRAGMENT). | | | |
| 1137 | 2354 | Similar to LECG_ARAHY P02872 ARACHIS | | | |
| | | HYPOGAEA (PEANUT). GALACTOSE-BINDING | | | |
| | | LECTIN PRECURSOR (AGGLUTININ) (PNA). | | | |
| 1176 | 2389 | Similar to gi\|3757521\|gb\|AAC64223.1\|putative | 3134, 3133, | | |
| | | ubiquitin-conjugating enzyme [Arabidopsis thaliana] | 3284 | | |
| 1171 | 2384 | Similar to gi\|9293951\|dbj\|BAB01854.1\|DNA-directed | 2884, 3900, | | |
| | | RNA polymerase, subunit B [Arabidopsis thaliana] | 3904 | | |
| 1110 | 2328 | Open Reading Frame OS_ORF000534 HTC002946- | | | 5858 |
| | | A01.10 FRAME: −3 ORF: 1 LEN: 657 | | | |
| 1511 | 2592 | Similar to gi\|3152568\|gb\|AAC17049.1\|Similar to | 3235, 4493 | 5025 | |
| | | hypothetical protein product gb\|Z97337 from A. | | | |
| | | thaliana. EST gb\|H76597 comes from this gene. | | | |
| | | [Arabidopsis thaliana] | | | |
| 1560 | 2639 | Similar to PHS_PSEAE P43335 PSEUDOMONAS | 3504, 3505, | 4822 | |
| | | AERUGINOSA. PTERIN-4-ALPHA- | 3503, 3500, | | |
| | | CARBINOLAMINE DEHYDRATASE (EC 4.2.1.96) | 3508 | | |
| | | (PHS)(4-ALPHA-HYDROXY- | | | |
| | | TETRAHYDROPTERIN DEHYDRATASE) | | | |
| | | (PHENYLALANINEHYDROXYLASE- | | | |
| | | STIMULATING PROTEIN) (PCD). | | | |
| 1509 | 2590 | Similar to gi\|6553925\|gb\|AAF16590.1\|AC012329_14 | | | |
| | | hypothetical protein [Arabidopsis thaliana] | | | |
| 1353 | | Open Reading Frame OS_ORF008479 HTC051059- | 3493 | | |
| | | A01.11 FRAME: 3 ORF: 6 LEN: 933 | | | |
| 1513 | 2594 | Similar to gi\|9294219\|dbj\|BAB02121.1\| | | 4834 | |
| | | gb\|AAF01563.1˜gene_id: K17E12. 8˜similar to | | | |
| | | unknown protein [Arabidopsis thaliana] | | | |
| 1180 | 2392 | Open Reading Frame OS_ORF007418 HTC044323- | 2953, 3955, | | 5761 |
| | | A01.R.10 FRAME: 1 ORF: 1 LEN: 705 | 3954, 3953 | | |
| 1437 | 2529 | Open Reading Frame OS_ORF020518 HTC138308- | | | 5896 |
| | | A01.F.6 FRAME: −2 ORF: 4 LEN: 1080 | | | |
| 1424 | 2517 | Similar to gi\|4337197\|gb\|AAD18111.1\|AIG2-like | 4699 | 4946 | |
| | | protein [Arabidopsis thaliana] | | | |
| 1315 | 2468 | Similar to gi\|6899895\|emb\|CAB71904.1\|RAV-like | | | 5588 |
| | | protein [Arabidopsis thaliana] | | | |
| 1466 | 2555 | Open Reading Frame containing a Sage tag sequence | | | |
| | | near 3 end OS_ORF001178 ST(F) HTC006675-A01.9 | | | |
| | | FRAME: 3 ORF: 10 LEN: 588 | | | |
| 1057 | | Open Reading Frame OS_ORF008654 ST(R) | 3141, 3121, | | 5872 |
| | | HTC051926-A01.R.21 FRAME: 3 ORF: 16 LEN: 597 | 2918 | | |
| 1470 | | Similar to gi\|482709\|pir\|\|A61062 NADH | | 5058 | |
| | | dehydrogenase (ubiquinone) (EC 1.6.5.3) chain 4 — | | | |
| | | soybean mitochondrion (fragment) | | | |
| 1242 | 2429 | Similar to gi\|6466961\|gb\|AAF13096.1\|AC009176_23 | 2850, 2849 | 4919 | 5486 |
| | | hypothetical protein [Arabidopsis thaliana] | | | |
| 1096 | 2323 | Open Reading Frame OS_ORF013567 HTC086832- | 3731 | | 5548 |
| | | A01.R.10 FRAME: −2 ORF: 6 LEN: 651 | | | |
| 1233 | | Similar to YDB3_SCHPO Q10356 | 4321, 4320 | | 5347 |
| | | SCHIZOSACCHAROMYCES POMBE (FISSION | | | |
| | | YEAST). HYPOTHETICAL 21.1 KD PROTEIN | | | |
| | | C22E12.03C IN CHROMOSOME I. | | | |
| 1130 | 2347 | Open Reading Frame OS_ORF009250 ST(R) | | | 5536 |
| | | HTC055587-A01.R.20 FRAME: −2 ORF: 18 LEN: 609 | | | |
| 1107 | 2325 | Similar to gi\|6069672\|dbj\|BAA85448.1\|hypothetical | 2993 | | |
| | | protein [Oryza sativa] | | | |
| 1454 | 2544 | Similar to KR62_SHEEP P02448 OVIS ARIES | | | |
| | | (SHEEP). KERATIN, HIGH-TYROSINE MATRIX | | | |
| | | PROTEIN (COMPONENT 0.62). | | | |
| 1538 | 2619 | Open Reading Frame OS_ORF012452 HTC077995- | | | 5815 |
| | | A01.R.13 FRAME: 3 ORF: 12 LEN: 666 | | | |
| 1347 | 2479 | Similar to gi\|9294416\|dbj\|BAB02497.1\| | 2750, 2749, | 5074 | 5435 |
| | | gene_id: MOE17.21˜ref\|NP_002083.1˜similar to | 2751 | | |
| | | unknown protein [Arabidopsis thaliana] | | | |
| 1289 | 2455 | Similar to gi\|556902\|emb\|CAA84288.1\|54-kD signal | 4083, 3716, | | |
| | | recognition particle (SRP) specific protein | 4085, 4086 | | |
| | | [Lycopersicon esculentum] | | | |
| 1268 | 2444 | Open Reading Frame containing a Sage tag sequence | | | 5334 |
| | | near 3 end OS_ORF010085 ST(F) HTC060921-A01.3 | | | |
| | | FRAME: −2 ORF: 7 LEN: 582 | | | |
| 1464 | 2553 | Similar to gi\|8096408\|dbj\|BAA95878.1\|EST | | | |
| | | AU062706(C30225) corresponds to a region of the | | | |
| | | predicted gene.˜hypothetical protein [Oryza sativa] | | | |
| 1512 | 2593 | Similar to gi\|6714422\|gb\|AAF26110.1\|AC012328_13 | 2965, 3280 | | |
| | | hypothetical protein [Arabidopsis thaliana] | | | |
| 1235 | 2423 | Open Reading Frame containing a Sage tag sequence | | | 5285 |
| | | near 3 end OS_ORF003649 ST(F) HTC021208- | | | |
| | | A01.22 FRAME: −3 ORF: 14 LEN: 1257 | | | |
| 1213 | 2409 | Similar to gi\|6562257\|emb\|CAB62627.1\|putative | 4453, 4452 | 4914 | 5390 |
| | | protein [Arabidopsis thaliana] | | | |
| 1468 | 2557 | Open Reading Frame OS_ORF006107 HTC036528- | | | |
| | | A01.30 FRAME: −2 ORF: 28 LEN: 795 | | | |
| 1561 | 2640 | Open Reading Frame containing a Sage tag sequence | | | |
| | | near 3 end OS_ORF001814 ST(F) HTC010532-. | | | |
| | | A01.14 FRAME: 3 ORF: 17 LEN: 948 | | | |
| 1203 | | Open Reading Frame OS_ORF017107 HTC113682- | | | |
| | | A01.F.39 FRAME: 1 ORF: 16 LEN: 741 | | | |
| 1578 | 2655 | Similar to gi\|8843728\|dbj\|BAA97276.1\|homeodomain | | 5148 | 5670 |
| | | transcription factor-like [Arabidopsis thaliana] | | | |
| 1381 | | Open Reading Frame OS_ORF004338 HTC025425- | | | 5583 |
| | | A01.19 FRAME: 3 ORF: 4 LEN: 657 | | | |
| 1236 | 2424 | Open Reading Frame OS_ORF003108 HTC018151- | 3255, 4619, | 5065 | 5726 |
| | | A01.14 FRAME: −3 ORF: 3 LEN: 909 | 4618, 3287 | | |
| 1278 | 2449 | Similar to gi\|7485274\|pir\|\|T08864 hypothetical protein | 3348, 3011, | 5117 | |
| | | A_TM017A05.2 - Arabidopsis thaliana | 4378, 2698, | | |
| | | | 3012, 2699, | | |
| | | | 3349 | | |
| 1323 | | Similar to DAPF_HAEIN P44859 HAEMOPHILUS | 4147 | | |
| | | INFLUENZAE. DIAMINOPIMELATE EPIMERASE | | | |
| | | (EC 5.1.1.7). | | | |
| 1429 | 2522 | Open Reading Frame containing a Sage tag sequence | | | |
| | | near 3 end OS_ORF010917 ST(F) HTC067133- | | | |
| | | A01.F.25 FRAME: −1 ORF: 36 LEN: 543 | | | |
| 1443 | 2534 | Open Reading Frame containing a Sage tag sequence | | | |
| | | near 3 end OS_ORF015365 ST(F) HTC100104- | | | |
| | | A01.R.5 FRAME: −3 ORF: 2 LEN: 633 | | | |
| 1039 | 2287 | Similar to CS66_WHEAT P46526 TRITICUM | 3625 | | 5549 |
| | | AESTIVUM (WHEAT). COLD SHOCK PROTEIN | | | |
| | | CS66. | | | |
| 1113 | 2331 | Open Reading Frame containing a Sage tag sequence | | | |
| | | near 3 end OS_ORF016057 ST(F) HTC105401- | | | |
| | | A01.F.20 FRAME: 1 ORF: 20 LEN: 834 | | | |
| 1407 | 2506 | Similar to gi\|7630235\|dbj\|BAA94768.1\|hypothetical | | | |
| | | protein [Oryza sativa] | | | |
| 1220 | 2416 | Open Reading Frame OS_ORF017123 HTC113816- | 3009, 2951 | | 5741 |
| | | A01.28 FRAME: −1 ORF: 4 LEN: 828 | | | |
| 1431 | 2524 | Similar to gi\|6562304\|emb\|CAB62602.1\|putative | | 4848 | |
| | | protein [Arabidopsis thaliana] | | | |
| 1522 | 2603 | Similar to gi\|5734723\|gb\|AAD49988.1\|AC007259_1 | | | |
| | | receptor-like protein kinase [Arabidopsis thaliana] | | | |
| 1084 | 2318 | Similar to gi\|7573432\|emb\|CAB87748.1\|putative | 4534, 4535, | | |
| | | protein [Arabidopsis thaliana] | 4533 | | |
| 1085 | 2319 | Similar to gi\|8467993\|dbj\|BAA96594.1\|ESTs | 4337, 3166, | 4986 | |
| | | AU082600(C11471), C26010(C11471) correspond to a | 3134 | | |
| | | region of the predicted gene.˜Similar to Arabidopsis | | | |
| | | thaliana chromosome 2 BAC clone F12A24; putative | | | |
| | | ubiquitin-conjugating enzyme. (AC005167) [Oryza | | | |
| | | sativa] | | | |
| 1475 | 2562 | Similar to NODB_AZOCA Q07740 | | | |
| | | AZORHIZOBIUM CAULINODANS. | | | |
| | | CHITOOLIGOSACCHARIDE DEACETYLASE (EC | | | |
| | | 3.5.1.—) (NODULATION PROTEIN B). | | | |
| 1288 | 2454 | Open Reading Frame containing a Sage tag sequence | 2814, 2813 | | 5355 |
| | | near 3 end OS_ORF008809 ST(F) HTC052791- | | | |
| | | A01.R.20 FRAME: −2 ORF: 10 LEN: 759 | | | |
| 1183 | | Similar to gi\|9294228\|dbj\|BAB02130.1\| | 2795, 3168, | | 5252 |
| | | gb\|AAD39565.1˜gene_id: MLD15.4˜similar to | 3169, 2796 | | |
| | | unknown protein [Arabidopsis thaliana] | | | |
| 1174 | 2387 | Similar to gi\|7267302\|emb\|CAB81084.1\|UV-damaged | 2881, 4402, | 4893 | |
| | | DNA binding factor-like protein [Arabidopsis thaliana] | 4403, 4401, | | |
| | | | 2798, 4282 | | |
| 1272 | | Similar to gi\|168640\|gb\|AAA66268.1\|mosaic protein | | 5142 | |
| 1406 | | Similar to gi\|7076784\|emb\|CAB75899.1\|2- | | | |
| | | oxoglutarate dehydrogenase, E1 subunit-like protein | | | |
| | | [Arabidopsis thaliana] | | | |
| 1391 | 2498 | Similar to gi\|7248391\|dbj\|BAA92714.1\|hypothetical | | | |
| | | protein [Oryza sativa] | | | |
| 1399 | | Similar to ABP4_MAIZE P33488 ZEA MAYS | | | 5445 |
| | | (MAIZE). AUXIN-BINDING PROTEIN 4 | | | |
| | | PRECURSOR (ABP). | | | |
| 1227 | 2419 | Open Reading Frame OS_ORF014096 HTC090622- | 3291, 3330, | 4847 | 5509 |
| | | A01.F.4 FRAME: 1 ORF: 2 LEN: 663 | 4055, 3292, | | |
| | | | 2964 | | |
| 1427 | 2520 | Open Reading Frame containing a Sage tag sequence | | | |
| | | near 3 end OS_ORF000879 ST(F) HTC004954-A01.4 | | | |
| | | FRAME: −2 ORF: 1 LEN: 501 | | | |
| 1444 | 2535 | Similar to CY2_RHOTE P00098 RHODOCYCLUS | | | |
| | | TENUIS (RHODOSPIRILLUM TENUE). | | | |
| | | CYTOCHROME C2. | | | |
| 1520 | 2601 | Similar to gi\|2828289\|emb\|CAA16703.1\|hypothetical | 4483, 2863 | | 5901 |
| | | protein [Arabidopsis thaliana] | | | |
| 1292 | 2457 | Similar to BZTA_RHOCA Q52663 RHODOBACTER | | | |
| | | CAPSULATUS (RHODOPSEUDOMONAS | | | |
| | | CAPSULATA). | | | |
| | | GLUTAMATE/GLUTAMINE/ASPARTATE/ASPAR | | | |
| | | AGINE-BINDING PROTEIN PRECURSORBZTA. | | | |
| 1557 | 2636 | Open Reading Frame OS_ORF021175 HTC144175- | 4019 | | 5355 |
| | | A01.R.30 FRAME: 3 ORF: 14 LEN: 1191 | | | |
| 1112 | 2330 | Similar to gi\|4510366\|gb\|AAD21454.1\|hypothetical | | 5012 | 5902 |
| | | protein [Arabidopsis thaliana] | | | |
| 1361 | | Similar to gi\|6520227\|dbj\|BAA87955.1\|ZCW7 | | | |
| | | [Arabidopsis thaliana] | | | |
| 1384 | 2494 | Similar to gi\|1345585\|emb\|CAA50062.1\|B | | | |
| | | transcriptional activator [Zea mays] | | | |
| 1544 | 2624 | Similar to gi\|2244832\|emb\|CAB10254.1\|hypothetical | | 4828 | 5856 |
| | | protein [Arabidopsis thaliana] | | | |
| 1374 | | Similar to gi\|1402891\|emb\|CAA66823.1\|unknown | | | |
| | | [Arabidopsis thaliana] | | | |
| 1595 | 2670 | Open Reading Frame containing a Sage tag sequence | | | 5885 |
| | | near 3 end OS_ORF007923 ST(F) HTC047502- | | | |
| | | A01.R.12 FRAME: −2 ORF: 12 LEN: 567 | | | |
| 1152 | 2368 | Similar to gi\|8926755\|emb\|CAB96548.1\|putative rice | 2872, 2871 | | |
| | | bicoid protein [Oryza sativa subsp. japonica] | | | |
| 1370 | 2489 | Open Reading Frame OS_ORF018320 HTC122173- | | | |
| | | A01.11 FRAME: 1 ORF: 9 LEN: 846 | | | |
| 1058 | 2299 | Similar to COMI_DICDI Q03380 DICTYOSTELIUM | 3256, 2682 | | |
| | | DISCOIDEUM (SLIME MOLD). COMITIN (CABP1- | | | |
| | | RELATED PROTEIN P24) (24 KD ACTIN-BINDING | | | |
| | | PROTEIN). | | | |
| 1264 | | Open Reading Frame OS_ORF020840 HTC141053- | | | 5515 |
| | | A01.F.10 FRAME: −2 ORF: 1 LEN: 789 | | | |
| 1204 | 2406 | Similar to CLPB_SYNY3 P74361 SYNECHOCYSTIS | 2859, 2933, | | 5799 |
| | | SP. (STRAIN PCC 6803). CLPB PROTEIN. | 4641, 2858, | | |
| | | | 2857, 2971 | | |
| 1050 | 2295 | Open Reading Frame containing a Sage tag sequence | | | |
| | | near 3 end OS_ORF002649 ST(F) HTC015461- | | | |
| | | A01.45 FRAME: 1 ORF: 4 LEN: 897 | | | |
| 1455 | 2545 | Open Reading Frame OS_ORF004035 HTC023345- | | | |
| | | A01.22 FRAME: 3 ORF: 3 LEN: 852 | | | |
| 1515 | 2596 | Open Reading Frame containing a Sage tag sequence | | | |
| | | near 3 end OS_ORF013547 ST(F) HTC086635- | | | |
| | | A01.R.5 FRAME: −3 ORF: 2 LEN: 738 | | | |
| 1309 | 2464 | Similar to gi\|5302773\|emb\|CAB46061.1\|heat shock | | | 5508 |
| | | protein like [Arabidopsis thaliana] | | | |
| 1580 | 2657 | Similar to gi\|2982457\|emb\|CAA18221.1\|hypothetical | | | 5844 |
| | | protein [Arabidopsis thaliana] | | | |
| 1280 | | Open Reading Frame OS_ORF016729 ST(R) | | | 5891 |
| | | HTC110880-A01.F.12 FRAME: 3 ORF: 15 LEN: 510 | | | |
| 1061 | | Similar to gi\|6437533\|gb\|AAF08565.1\|AC012193_14 | 2852 | 4793 | |
| | | hypothetical protein [Arabidopsis thaliana] | | | |
| 1382 | | Similar to gi\|8778307\|gb\|AAF79316.1\|AC002304_9 | | | |
| | | F14J16.15 [Arabidopsis thaliana] | | | |
| 1507 | 2588 | Open Reading Frame OS_ORF014728 HTC095231- | 3268, 3245 | | |
| | | A01.R.21 FRAME: −2 ORF: 18 LEN: 1038 | | | |
| 1398 | 2504 | Open Reading Frame containing a Sage tag sequence | | | |
| | | near 3 end OS_ORF008116 ST(F) HTC048551- | | | |
| | | A01.42 FRAME: 1 ORF: 4 LEN: 567 | | | |
| 1435 | 2527 | Similar to gi\|4883606\|gb\|AAD31575.1\|AC006922_7 | 4003 | 4965 | 5396 |
| | | putative cis-Golgi SNARE protein [Arabidopsis | | | |
| | | thaliana] | | | |
| 1086 | | Similar to YRBB_ECOLI P45389 ESCHERICHIA | | | |
| | | COLI. HYPOTHETICAL 14.4 KD PROTEIN IN | | | |
| | | MURA-RPON INTERGENIC REGION (F129). | | | |
| 1540 | 2621 | Similar to gi\|685234\|emb\|CAA56426.1\|H1 | | | |
| | | [Arabidopsis thaliana] | | | |
| 1305 | | Similar to YNT1_ANASP Q05067 ANABAENA SP. | | | |
| | | (STRAIN PCC 7120). HYPOTHETICAL ABC | | | |
| | | TRANSPORTER ATP-BINDING PROTEIN IN | | | |
| | | NTCA/BIFA 3 REGION(ORF1) (FRAGMENT). | | | |
| 1377 | 2492 | Similar to gi\|3941414\|gb\|AAC83583.1\|putative | | 5136 | 5303 |
| | | transcription factor [Arabidopsis thaliana] | | | |
| 1576 | 2653 | Similar to P30_TOXGO P13664 TOXOPLASMA | | | |
| | | GONDII. MAJOR SURFACE ANTIGEN P30 | | | |
| | | PRECURSOR. | | | |
| 1193 | | Similar to gi\|3600048\|gb\|AAC35535.1\|similar to | | | |
| | | hypothetical proteins in Schizosaccharomyces pombe | | | |
| | | (GB: Z98533) and C. elegans (GB: Z48334 and Z78419) | | | |
| | | [Arabidopsis thaliana] | | | |
| 1523 | 2604 | Open Reading Frame containing a Sage tag sequence | | | |
| | | near 3 end OS_ORF004361 ST(F) HTC025646-A01.5 | | | |
| | | FRAME: −1 ORF: 3 LEN: 648 | | | |
| 1448 | 2539 | Open Reading Frame OS_ORF007167 HTC042869- | | | |
| | | A01.R.21 FRAME: 3 ORF: 21 LEN: 651 | | | |
| 1411 | | Open Reading Frame containing a Sage tag sequence | | | |
| | | near 3 end OS_ORF012877 ST(F) HTC080961- | | | |
| | | A01.F.19 FRAME: 2 ORF: 1 LEN: 537 | | | |
| 1205 | | Open Reading Frame OS_ORF012677 HTC079731- | | | |
| | | A01.5 FRAME: −2 ORF: 2 LEN: 855 | | | |
| 1076 | | Similar to gi\|4512702\|gb\|AAD21755.1\|putative WD- | 3377, 3376 | | |
| | | 40 repeat protein [Arabidopsis thaliana] | | | |
| 1356 | | Similar to gi\|4768996\|gb\|AAD29711.1\|AF140498_1 | | | |
| | | hypothetical protein [Oryza sativa] | | | |
| 1056 | 2298 | Open Reading Frame OS_ORF014992 ST(R) | 3090, 3148, | | 5908 |
| | | HTC097367-A01.F.13 FRAME: −3 ORF: 6 LEN: 642 | 3147, 3146 | | |
| 1456 | 2546 | Similar to gi\|6041852\|gb\|AAF02161.1\|AC009853_21 | 3360 | | 5426 |
| | | unknown protein, 3 partial [Arabidopsis thaliana] | | | |
| 1530 | 2611 | Similar to gi\|3335347\|gb\|AAC27149.1\|Contains | | | 5426 |
| | | similarity to ARI, RING finger protein gb\|X98309 from | | | |
| | | Drosophila melanogaster. ESTs gb\|T44383, | | | |
| | | gb\|W43120, gb\|N65868, gb\|H36013, gb\|AA042241, | | | |
| | | gb\|T76869 and gb\|AA042359 come from this gene. | | | |
| | | [Arabidopsis thalia] | | | |
| 1559 | 2638 | Similar to gi\|3738091\|gb\|AAC63588.1\|putative bHLH | | | |
| | | transcription factor [Arabidopsis thaliana] | | | |
| 1367 | 2486 | Similar to gi\|435946\|gb\|AAC49558.1\|DNA-binding | | | |
| | | factor of bZIP class | | | |
| 1550 | 2630 | Similar to gi\|8843759\|dbj\|BAA97307.1\| | 3624, 3796, | | |
| | | emb\|CAB62602.1˜gene_id: MXK3.18˜similar to | 3623, 3621, | | |
| | | unknown protein [Arabidopsis thaliana] | 4666, 3622 | | |
| 1069 | 2306 | Similar to gi\|7406405\|emb\|CAB85515.1\|putative | | 5068 | 5411 |
| | | protein [Arabidopsis thaliana] | | | |
| 1115 | 2333 | Open Reading Frame OS_ORF002824 HTC016383- | | | |
| | | A01.16 FRAME: 3 ORF: 18 LEN: 744 | | | |
| 1368 | 2487 | Open Reading Frame OS_ORF013471 HTC085904- | | | 5631 |
| | | A01.R.22 FRAME: 2 ORF: 1 LEN: 657 | | | |
| 1585 | 2662 | Similar to UL34_HCMVA P16812 HUMAN | | | |
| | | CYTOMEGALOVIRUS (STRAIN AD169). | | | |
| | | HYPOTHETICAL PROTEIN UL34. | | | |
| 1078 | 2314 | Open Reading Frame OS_ORF004236 HTC024771- | | | 5478 |
| | | A01.7 FRAME: −1 ORF: 1 LEN: 759 | | | |
| 1394 | | Similar to ADX_CHICK P13216 GALLUS GALLUS | | 4815 | 5357 |
| | | (CHICKEN). ADRENODOXIN PRECURSOR | | | |
| | | (ADRENAL FERREDOXIN) (FRAGMENT). | | | |
| 1330 | 2475 | Similar to gi\|9280689\|gb\|AAF86558.1\|AC069252_17 | 4502 | | |
| | | F2E2.17 [Arabidopsis thaliana] | | | |
| 1506 | 2587 | Similar to I131_MOUSE O09030 MUS MUSCULUS | | | |
| | | (MOUSE). INTERLEUKIN-13 RECEPTOR ALPHA- | | | |
| | | 1 CHAIN PRECURSOR (IL-13R-ALPHA-1) (IL- | | | |
| | | 13RA-1) (INTERLEUKIN-13 BINDING PROTEIN) | | | |
| | | (NR4). | | | |
| 1331 | 2476 | Open Reading Frame OS_ORF013279 HTC084207- | | | |
| | | A01.F.22 FRAME: 3 ORF: 19 LEN: 930 | | | |
| 1484 | 2569 | Open Reading Frame OS_ORF010749 HTC066005- | | | 5859 |
| | | A01.12 FRAME: 1 ORF: 13 LEN: 651 | | | |
| 1179 | | Similar to gi\|4467146\|emb\|CAB37515.1\|galactosidase | 4284 | | |
| | | like protein [Arabidopsis thaliana] | | | |
| 1485 | | Similar to 5HT1_APLCA Q16950 APLYSIA | | | |
| | | CALIFORNICA (CALIFORNIA SEA HARE). 5- | | | |
| | | HYDROXYTRYPTAMINE 1 RECEPTOR (5-HTB1) | | | |
| | | (SEROTONIN RECEPTOR 1). | | | |
| 1265 | 2442 | Similar to CCB2_RABIT P54288 ORYCTOLAGUS | 4082, 4081, | | |
| | | CUNICULUS (RABBIT). DIHYDROPYRIDINE- | 2941, 4056 | | |
| | | SENSITIVE L-TYPE, CALCIUM CHANNEL BETA- | | | |
| | | 2 SUBUNIT(CAB2). | | | |
| 1519 | 2600 | Open Reading Frame OS_ORF002845 HTC016551- | | | |
| | | A01.21 FRAME: −2 ORF: 9 LEN: 1677 | | | |
| 1214 | 2410 | Open Reading Frame containing a Sage tag sequence | 3708 | | |
| | | near 3 end OS_ORF013972 ST(F) HTC089849- | | | |
| | | A01.22 FRAME: 2 ORF: 16 LEN: 537 | | | |
| 1389 | 2496 | Similar to gi\|3941526\|gb\|AAC83639.1\|putative | 3692, 3694, | 4886 | 5531 |
| | | transcription factor [Arabidopsis thaliana] | 2904, 4427, | | |
| | | | 3915, 4428, | | |
| | | | 3693 | | |
| 1240 | | Similar to gi\|1086540\|gb\|AAC49219.1\|Ra | | | |
| 1478 | 2564 | Open Reading Frame OS_ORF018918 ST(R) | | | |
| | | HTC126528-A01.F.14 FRAME: 3 ORF: 17 LEN: 513 | | | |
| 1362 | | Similar to YIHI_ECOLI P32130 ESCHERICHIA | | | |
| | | COLI. HYPOTHETICAL 19.1 KD PROTEIN IN | | | |
| | | POLA-HEMN INTERGENIC REGION (O169). | | | |
| 1132 | 2349 | Similar to gi\|7406435\|emb\|CAB85544.1\|putative | | | |
| | | protein [Arabidopsis thaliana] | | | |
| 1317 | | Open Reading Frame OS_ORF013506 HTC086076- | | | |
| | | A01.R.18 FRAME: −2 ORF: 10 LEN: 753 | | | |
| 1195 | 2400 | Similar to gi\|4455283\|emb\|CAB36819.1\|L1 specific | 2972 | 4821 | 5359 |
| | | homeobox gene ATML1/ovule-specific homeobox | | | |
| | | protein A20 [Arabidopsis thaliana] | | | |
| 1052 | 2296 | Similar to K1CS_RAT Q63279 RATTUS | | | |
| | | NORVEGICUS (RAT). KERATIN, TYPE I | | | |
| | | CYTOSKELETAL 19 (CYTOKERATIN 19) (K19) | | | |
| | | (CK 19)(FRAGMENT). | | | |
| 1526 | 2607 | Open Reading Frame OS_ORF014719 HTC095181- | | | |
| | | A01.R.17 FRAME: 1 ORF: 6 LEN: 930 | | | |
| 1321 | 2472 | Similar to gi\|4895195\|gb\|AAD32782.1\|AC007661_19 | 2781 | 4790 | 5843 |
| | | putative mitochondrial carrier protein [Arabidopsis | | | |
| | | thaliana] | | | |
| 1181 | 2393 | Similar to gi\|7485913\|pir\|\|T00906 hypothetical protein | 4560, 3029, | 4995 | 5829 |
| | | F21B7.20 - Arabidopsis thaliana | 4559, 4607, | | |
| | | | 4606 | | |
| 1548 | 2628 | Similar to gi\|6996252\|emb\|CAB75478.1\|putative | | | |
| | | protein [Arabidopsis thaliana] | | | |
| 1239 | 2427 | Similar to gi\|7362762\|emb\|CAB83132.1\|putative | 3161, 3160, | | 5318 |
| | | protein [Arabidopsis thaliana] | 3936, 3938, | | |
| | | | 3937, 2956 | | |
| 1583 | 2660 | Similar to gi\|4388823\|gb\|AAD19778.1\|hypothetical | | | |
| | | protein [Arabidopsis thaliana] | | | |
| 1404 | | Similar to gi\|7268671\|emb\|CAB78879.1\|myb-like | | | |
| | | protein [Arabidopsis thaliana] | | | |
| 1299 | 2460 | Similar to YR02_CAEEL Q10015 | | | |
| | | CAENORHABDITIS ELEGANS. HYPOTHETICAL | | | |
| | | 45.2 KD PROTEIN T25E4.2 IN CHROMOSOME II. | | | |
| 1500 | 2581 | Similar to gi\|7488434\|pir\|\|T06699 zinc finger protein | 3190, 3100, | | |
| | | T29H11.50 - Arabidopsis thaliana | 3893 | | |
| 1106 | | Open Reading Frame OS_ORF013978 HTC089902- | | | |
| | | A01.R.17 FRAME: −2 ORF: 15 LEN: 846 | | | |
| 1363 | 2484 | Similar to gi\|1695698\|dbj\|BAA13181.1\|C-type cyclin | | | |
| | | [Oryza sativa] | | | |
| 1579 | 2656 | Similar to GREA_MYCLE P46808 | | | |
| | | MYCOBACTERIUM LEPRAE. TRANSCRIPTION | | | |
| | | ELONGATION FACTOR GREA (TRANSCRIPT | | | |
| | | CLEAVAGE FACTORGREA). | | | |
| 1570 | | Open Reading Frame OS_ORF021360 HTC145470- | | | |
| | | A01.R.8 FRAME: 2 ORF: 9 LEN: 660 | | | |
| 1416 | 2509 | Open Reading Frame OS_ORF001739 HTC010017- | | | |
| | | A01.13 FRAME: 1 ORF: 1 LEN: 1221 | | | |
| 1514 | 2595 | Open Reading Frame containing a Sage tag sequence | 3877, 4379, | | |
| | | near 3 end OS_ORF019284 ST(F) HTC129613- | 3406, 3407, | | |
| | | A01.R.5 FRAME: −3 ORF: 2 LEN: 534 | 3405 | | |
| 1372 | | Similar to gi\|7288033\|emb\|CAB81795.1\|putative | | | 5803 |
| | | protein [Arabidopsis thaliana] | | | |
| 1525 | 2606 | Open Reading Frame OS_ORF014843 HTC096188- | | | |
| | | A01.R.23 FRAME: 3 ORF: 4 LEN: 942 | | | |
| 1225 | | Similar to gi\|3927830\|gb\|AAC79587.1\|hypothetical | 4474, 4473 | | 5258 |
| | | protein [Arabidopsis thaliana] | | | |
| 1136 | 2353 | Open Reading Frame OS_ORF006047 HTC036097- | | | |
| | | A01.R.9 FRAME: 3 ORF: 3 LEN: 771 | | | |
| 1342 | | Similar to gi\|6137251\|sp\|O22757\|YML2_ARATH | | | |
| | | HYPOTHETICAL MLO-LIKE PROTEIN F5J6.23 | | | |
| 1401 | | Similar to LAMC_DROME Q03427 DROSOPHILA | | | |
| | | MELANOGASTER (FRUIT FLY). LAMIN C (PG-IF). | | | |
| 1207 | | Similar to gi\|6692109\|gb\|AAF24574.1\|AC007764_16 | | 4844 | 5614 |
| | | F22C12.18 [Arabidopsis thaliana] | | | |
| 1188 | 2397 | Open Reading Frame containing a Sage tag sequence | 3790, 3331, | | |
| | | near 3 end OS_ORF013981 ST(F) HTC089945- | 2943 | | |
| | | A01.R.1 FRAME: 1 ORF: 1 LEN: 540 | | | |
| 1473 | | Similar to UL55_HSVEB P28963 EQUINE | | | |
| | | HERPESVIRUS TYPE 1 (STRAIN AB4P) (EHV-1), | | | |
| | | AND EQUINEHERPESVIRUS TYPE 1 (STRAIN | | | |
| | | KENTUCKY A) (EHV-1). GENE 4 PROTEIN (ORF | | | |
| | | L2). | | | |
| 1173 | 2386 | Similar to gi\|2982442\|emb\|CAA18250.1\|hypothetical | | | |
| | | protein [Arabidopsis thaliana] | | | |
| 1393 | 2500 | Similar to MERC_THIFE P22905 THIO BACILLUS | | | |
| | | FERROOXIDANS. MERCURIC RESISTANCE | | | |
| | | PROTEIN MERC. | | | |
| 1593 | 2669 | Similar to gi\|9294053\|dbj\|BAB02010.1\| | | | |
| | | gb\|AAD03575.1˜gene_id: MOB24.16˜similar to | | | |
| | | unknown protein [Arabidopsis thaliana] | | | |
| 1459 | 2549 | Open Reading Frame OS_ORF011248 HTC069298- | | | |
| | | A01.F.24 FRAME: −1 ORF: 7 LEN: 720 | | | |
| 1168 | | Similar to gi\|4733891\|gb\|AAD17931.2\|unconventional | 3462, 3267, | | |
| | | myosin heavy chain [Zea mays] | 3079 | | |
| 1508 | 2589 | Open Reading Frame OS_ORF006474 HTC038851- | | | |
| | | A01.R.16 FRAME: 2 ORF: 9 LEN: 696 | | | |
| 1542 | 2623 | Open Reading Frame OS_ORF009690 ST(R) | 4113, 4114 | | |
| | | HTC058211-A01.F.15 FRAME: −2 ORF: 2 LEN: 975 | | | |
| 1479 | 2565 | Open Reading Frame OS_ORF016333 HTC107775- | | | |
| | | A01.R.12 FRAME: −1 ORF: 12 LEN: 630 | | | |
| 1311 | 2465 | Similar to gi\|8570063\|dbj\|BAA96768.1\|hypothetical | | | |
| | | protein [Oryza sativa] | | | |
| 1325 | | Similar to GPDA_CUPLA P52425 CUPHEA | | | |
| | | LANCEOLATA. GLYCEROL-3-PHOSPHATE | | | |
| | | DEHYDROGENASE (NAD+) (EC 1.1.1.8). | | | |
| 1553 | 2633 | Similar to gi\|6453896\|gb\|AAF09079.1\|AC011663_15 | | | 5778 |
| | | unknown protein [Arabidopsis thaliana] | | | |
| 1185 | 2395 | Similar to gi\|445137\|prf\|\|1908437A topoisomerase I | 3117, 3315, | 4958 | |
| | | [Arabidopsis thaliana] | 4532, 4531 | | |
| 1283 | 2452 | Similar to gi\|6665551\|gb\|AAF22920.1\|AC013289_14 | 2845, 2843, | | |
| | | hypothetical protein [Arabidopsis thaliana] | 2814, 2813, | | |
| | | | 3259 | | |
| 1422 | 2515 | Open Reading Frame containing a Sage tag sequence | | | |
| | | near 3 end OS_ORF011984 ST(F) HTC074722- | | | |
| | | A01.F.42 FRAME: −1 ORF: 79 LEN: 906 | | | |
| 1117 | 2335 | Open Reading Frame containing a Sage tag sequence | | | |
| | | near 3 end OS_ORF019746 ST(F) HTC133378- | | | |
| | | A01.R.14 FRAME: −1 ORF: 15 LEN: 888 | | | |
| 1302 | | Similar to gi\|3152572\|gb\|AAC17053.1\|Contains | 4126, 4128, | | |
| | | homology to DNAJ heatshock protein gb\|U32803 from | 4127 | | |
| | | Haemophilus influenzae. [Arabidopsis thaliana] | | | |
| 1438 | 2530 | Similar to gi\|2160143\|gb\|AAB60765.1\|F19K23.12 | | | |
| | | gene product [Arabidopsis thaliana] | | | |
| 1494 | 2576 | Similar to gi\|2244963\|emb\|CAB10384.1\|hypothetical | | | |
| | | protein [Arabidopsis thaliana] | | | |
| 1415 | 2508 | Similar to YT19_MYCTU P71555 | | | |
| | | MYCOBACTERIUM TUBERCULOSIS. | | | |
| | | HYPOTHETICAL 46.1 KD PROTEIN CY10D7.19C. | | | |
| 1442 | | Open Reading Frame containing a Sage tag sequence | | | |
| | | near 3 end OS_ORF017606 ST(F) HTC117204- | | | |
| | | A01.18 FRAME: 2 ORF: 5 LEN: 1041 | | | |
| 1532 | 2613 | Similar to GAST_RAT P04563 RATTUS | | | |
| | | NORVEGICUS (RAT). GASTRIN PRECURSOR. | | | |
| 1167 | 2381 | Similar to gi\|4584527\|emb\|CAB40758.1\|putative | 2934, 3436 | | 5698 |
| | | protein [Arabidopsis thaliana] | | | |
| 1199 | 2402 | Similar to Y08F_MYCTU Q11052 | | | |
| | | MYCOBACTERIUM TUBERCULOSIS. PROBABLE | | | |
| | | REGULATORY PROTEIN CY50.15. | | | |
| 1178 | 2391 | Similar to gi\|5852089\|emb\|CAB55396.1\|zwh12.1 | | 5134 | |
| | | [Oryza sativa] | | | |
| 1349 | | Similar to gi\|6498440\|dbj\|BAA87843.1\|hypothetical | | | |
| | | protein [Oryza sativa] | | | |
| 1200 | 2403 | Open Reading Frame OS_ORF001461 HTC008302- | | | |
| | | A01.23 FRAME: 1 ORF: 10 LEN: 2289 | | | |
| 1430 | 2523 | Open Reading Frame OS_ORF018292 HTC121996- | | | |
| | | A01.44 FRAME: −2 ORF: 18 LEN: 1551 | | | |
| 1418 | 2511 | Open Reading Frame OS_ORF020505 ST(R) | | | |
| | | HTC138244-A01.16 FRAME: −3 ORF: 4 LEN: 687 | | | |
| 1246 | 2433 | Similar to gi\|3080410\|emb\|CAA18729.1\|hypothetical | 4568, 4094, | 4854 | 5409 |
| | | protein [Arabidopsis thaliana] | 4095, 4092, | | |
| | | | 2807, 2799, | | |
| | | | 3068, 4307, | | |
| | | | 4699, 4093, | | |
| | | | 4087, 4498, | | |
| | | | 3998, 4567, | | |
| | | | 4499 | | |
| 1564 | 2643 | Similar to gi\|8809705\|dbj\|BAA97246.1\|26S | 3076, 3075 | | 5705 |
| | | proteasome/non-ATPase regulatory subunit | | | |
| | | [Arabidopsis thaliana] | | | |
| 1428 | 2521 | Open Reading Frame OS_ORF003246 HTC018855- | | | |
| | | A01.26 FRAME: −3 ORF: 13 LEN: 993 | | | |
| 1348 | 2480 | Similar to gi\|8099228\|gb\|AAF72076.1\|AC025098_10 | | | |
| | | hypothetical protein [Oryza sativa] | | | |
| 1197 | 2401 | Similar to AG84_MYCLE P46815 | | | |
| | | MYCOBACTERIUM LEPRAE. ANTIGEN 84. | | | |
| 1217 | 2413 | Similar to CYP4_CYNCA P40781 CYNARA | 4623, 2801, | 4883 | 5234 |
| | | CARDUNCULUS (CARDOON). CYPRO4 | 4624 | | |
| | | PROTEIN. | | | |
| 1306 | | Open Reading Frame OS_ORF003828 HTC022181- | | | |
| | | A01.11 FRAME: −2 ORF: 2 LEN: 660 | | | |
| 1531 | 2612 | Open Reading Frame OS_ORF016113 HTC105925- | 2985 | | |
| | | A01.R.13 FRAME: 1 ORF: 12 LEN: 687 | | | |
| 1439 | 2531 | Open Reading Frame containing a Sage tag sequence | | | |
| | | near 3 end OS_ORF007855 ST(F) HTC046991- | | | |
| | | A01.F.4 FRAME: −2 ORF: 2 LEN: 510 | | | |
| 1488 | 2571 | Similar to HSTO_VIBCH Q07425 VIBRIO | | | |
| | | CHOLERAE. HEAT-STABLE ENTEROTOXIN STO | | | |
| | | PRECURSOR (O1-ST). | | | |
| 1569 | 2648 | Open Reading Frame OS_ORF006104 ST(R) | | | |
| | | HTC036523-A01.29 FRAME: 1 ORF: 7 LEN: 543 | | | |
| 1202 | 2405 | Open Reading Frame OS_ORF018301 HTC122064- | | | |
| | | A01.R.12 FRAME: 1 ORF: 5 LEN: 744 | | | |
| 1573 | 2650 | Similar to gi\|8778489\|gb\|AAF79497.1\|AC002328_5 | | | |
| | | F20N2.12 [Arabidopsis thaliana] | | | |
| 1516 | 2597 | Open Reading Frame containing a Sage tag sequence | | | |
| | | near 3 end OS_ORF012764 ST(F) HTC080285- | | | |
| | | A01.26 FRAME: 2 ORF: 22 LEN: 669 | | | |
| 1234 | | Similar to gi\|6041840\|gb\|AAF02149.1\|AC009853_9 | 2946 | | 5341 |
| | | hypothetical protein [Arabidopsis thaliana] | | | |
| 1250 | | Similar to gi\|9294584\|dbj\|BAB02865.1\| | 2846, 4176, | 4824 | |
| | | gb\|AAF08583.1˜gene_id: MFJ20.18˜similar to | 2847, 4175 | | |
| | | unknown protein [Arabidopsis thaliana] | | | |
| 1566 | 2645 | Similar to YOP3_CAEEL Q22695 | | | |
| | | CAENORHABDITIS ELEGANS. HYPOTHETICAL | | | |
| | | 41.0 KD PROTEIN T23F11.3 IN CHROMOSOME III. | | | |
| 1091 | 2321 | Open Reading Frame OS_ORF021003 HTC142458- | | | |
| | | A01.F.9 FRAME: −3 ORF: 1 LEN: 657 | | | |
| 1392 | 2499 | Similar to YSV4_CAEEL Q10010 | | 5176 | 5918 |
| | | CAENORHABDITIS ELEGANS. HYPOTHETICAL | | | |
| | | 26.6 KD PROTEIN T19C3.4 IN CHROMOSOME III. | | | |
| 1103 | | Similar to GDIT_MOUSE Q62160 MUS MUSCULUS | | 4974 | 5921 |
| | | (MOUSE). RHO GDP-DISSOCIATION INHIBITOR 3 | | | |
| | | (RHO GDI 3) (RHO-GDI2). | | | |
| 1536 | 2617 | Open Reading Frame OS_ORF004492 HTC026407- | | | |
| | | A01.7 FRAME: −1 ORF: 5 LEN: 666 | | | |
| 1371 | 2490 | Similar to gi\|7486436\|pir\|\|T02408 hypothetical protein | | 4924 | 5904 |
| | | F4I1.34 - Arabidopsis thaliana | | | |
| 1440 | 2532 | Similar to YPOL_IPNVJ P22931 INFECTIOUS | | | |
| | | PANCREATIC NECROSIS VIRUS (SEROTYPE | | | |
| | | JASPER) (IPNV). HYPOTHETICAL 17.3 KD | | | |
| | | PROTEIN (SMALL ORF). | | | |
| 1196 | | Similar to gi\|7484807\|pir\|\|T01259 AMP deaminase | | 4869 | |
| | | homolog F16M14.21 - Arabidopsis thaliana | | | |
| 1308 | 2463 | Similar to YNX1_YEAST P53860 | | | |
| | | SACCHAROMYCES CEREVISIAE (BAKER S | | | |
| | | YEAST). HYPOTHETICAL 40.7 KD PROTEIN IN | | | |
| | | SIN4-URE2 INTERGENIC REGION. | | | |
| 1554 | 2634 | Similar to gi\|3355466\|gb\|AAC27828.1\|unknown | | | 5916 |
| | | protein [Arabidopsis thaliana] | | | |
| 1320 | | Open Reading Frame OS_ORF006563 ST(R) | 3427 | | 5564 |
| | | HTC039403-A01.F.12 FRAME: 2 ORF: 1 LEN: 600 | | | |
| 1329 | | Similar to gi\|2129707\|pir\|\|S71165 RNA-directed DNA | | | |
| | | polymerase (EC 2.7.7.49) - Arabidopsis thaliana | | | |
| | | retrotransposon 2 (fragment) | | | |
| 1254 | | Similar to CISY_COXBU P18789 COXIELLA | 4387 | 5158 | 5657 |
| | | BURNETII. CITRATE SYNTHASE (EC 4.1.3.7). | | | |
| 1483 | 2568 | Open Reading Frame OS_ORF013069 HTC082606- | | | |
| | | A01.F.5 FRAME: −1 ORF: 7 LEN: 612 | | | |
| 1458 | 2548 | Similar to HB2U_MOUSE P06344 MUS | | | |
| | | MUSCULUS (MOUSE). H-2 CLASS II | | | |
| | | HISTOCOMPATIBILITY ANTIGEN, A-U BETA | | | |
| | | CHAIN PRECURSOR. | | | |
| 1319 | 2471 | Similar to gi\|8778212\|gb\|AAF79221.1\|AC006917_6 | 4691 | | |
| | | F10B6.10 [Arabidopsis thaliana] | | | |
| 1409 | 2507 | Similar to gi\|6815065\|dbj\|BAA90352.1\|hypothetical | | | |
| | | protein [Oryza sativa] | | | |
| 1487 | | Similar to gi\|7670039\|dbj\|BAA94993.1\|invertase | | | 5844 |
| | | inhibitor-like protein [Arabidopsis thaliana] | | | |
| 1156 | 2371 | Similar to gi\|1707016\|gb\|AAC69127.1\|putative AP2 | | | 5424 |
| | | domain transcription factor [Arabidopsis thaliana] | | | |
| 1187 | | Similar to gi\|7523418\|emb\|CAB86437.1\|putative | 3270 | | |
| | | protein [Arabidopsis thaliana] | | | |
| 1502 | 2583 | Similar to FLAW_DESDE P80312 DESULFOVIBRIO | | | |
| | | DESULFURICANS. FLAVODOXIN (FRAGMENT). | | | |
| 1344 | 2478 | Similar to gi\|6728874\|gb\|AAF26947.1\|AC008113_18 | 2679, 2678, | | 5383 |
| | | F12A21.16 [Arabidopsis thaliana] | 2680 | | |
| 1462 | | Similar to gi\|3080386\|emb\|CAA18706.1\|hypothetical | | | 5339 |
| | | protein [Arabidopsis thaliana] | | | |
| 1189 | | Similar to NXS1_ACAAN P01434 ACANTHOPHIS | | | |
| | | ANTARCTICUS (COMMON DEATH ADDER). | | | |
| | | SHORT NEUROTOXIN 1 (TOXIN AA C). | | | |
| 1420 | 2513 | Similar to gi\|3786014\|gb\|AAC67360.1\|hypothetical | | | |
| | | protein [Arabidopsis thaliana] | | | |
| 1400 | | Open Reading Frame OS_ORF021917 HTC150055- | | | |
| | | A01.F.6 FRAME: −1 ORF: 1 LEN: 603 | | | |
| 1588 | 2665 | Similar to gi\|7269937\|emb\|CAB81030.1\|putative | | | 5727 |
| | | protein [Arabidopsis thaliana] | | | |
| 1543 | | Similar to gi\|2827547\|emb\|CAA16555.1\|predicted | | 5046 | 5623 |
| | | protein [Arabidopsis thaliana] | | | |
| 1584 | 2661 | Similar to gi\|2245140\|emb\|CAB10561.1\|SUPERMAN | | | |
| | | like protein [Arabidopsis thaliana] | | | |
| 1298 | | Similar to SYY_HUMAN P54577 HOMO SAPIENS | 3483 | 4814 | 5701 |
| | | (HUMAN). TYROSYL-TRNA SYNTHETASE (EC | | | |
| | | 6.1.1.1) (TYROSYL—TRNA LIGASE) (TYRRS). | | | |
| 1395 | 2501 | Similar to gi\|5091500\|dbj\|BAA78735.1\|Hypothetical | | | |
| | | protein [Oryza sativa] | | | |
| 1555 | | Similar to SWH1_YEAST P39555 P80234 | | | |
| | | SACCHAROMYCES CEREVISIAE (BAKER S | | | |
| | | YEAST). SWH1 PROTEIN. | | | |
| 1102 | | Similar to gi\|4337193\|gb\|AAD18107.1\|hypothetical | | | 5574 |
| | | protein [Arabidopsis thaliana] | | | |
| 1266 | 2443 | Open Reading Frame OS_ORF002545 HTC014886- | | | 5844 |
| | | A01.21 FRAME: 1 ORF: 6 LEN: 1299 | | | |
| 1587 | 2664 | Similar to gi\|7543889\|emb\|CAB87198.1\|putative | | | |
| | | protein [Arabidopsis thaliana] | | | |
| 1452 | 2542 | Similar to gi\|8346561\|emb\|CAB93725.1\|putative | | | 5502 |
| | | protein [Arabidopsis thaliana] | | | |
| 1307 | | Similar to VV_PHODV P35941 PHOCINE | 3429, 3428 | 4979 | 5706 |
| | | DISTEMPER VIRUS (PDV). NONSTRUCTURAL | | | |
| | | PROTEIN V. | | | |
| 1301 | 2462 | Open Reading Frame OS_ORF022234 ST(R) | | | |
| | | HTC153141-A01.F.17 FRAME: −3 ORF: 24 LEN: 525 | | | |
| 1255 | 2437 | Similar to gi\|4508069\|gb\|AAD21413.1\|12246 | 3098 | | |
| 1263 | | Similar to gi\|7019659\|emb\|CAB75760.1\|beta-N- | 2960 | | 5650 |
| | | acetylhexosaminidase-like protein [Arabidopsis | | | |
| | | thaliana] | | | |
| 1245 | 2432 | Similar to ORYB_ORYSA P25777 ORYZA SATIVA | 3319, 3318, | | 5472 |
| | | (RICE). ORYZAIN BETA CHAIN PRECURSOR (EC | 3942, 3943, | | |
| | | 3.4.22.—). | 3939 | | |
| 1277 | 2448 | Similar to gi\|8778457\|gb\|AAF79465.1\|AC022492_9 | 3026 | 5109 | 5330 |
| | | F1L3.17 [Arabidopsis thaliana] | | | |
| 1172 | 2385 | Open Reading Frame OS_ORF016335 HTC107779- | 4005, 4371, | 5142 | 5415 |
| | | A01.F.23 FRAME: 3 ORF: 1 LEN: 783 | 4518, 4108, | | |
| | | | 3032, 4517, | | |
| | | | 4004, 4519, | | |
| | | | 3031, 2977 | | |
| 1581 | 2658 | Similar to gi\|9229298\|dbj\|BAA99601.1\| | 4328, 4327, | | |
| | | gene_id: MDC16.12˜similar to unknown protein | 4325 | | |
| | | (gb\|AAC36161.1) [Arabidopsis thaliana] | | | |
| 1089 | 2320 | Similar to gi\|8810466\|gb\|AAF80127.1\|AC024174_9 | 4223, 4222 | | |
| | | Contains similarity to an unknown protein T1B3.16 | | | |
| | | gi\|4432844 from Arabidopsis thaliana BAC T1B3 | | | |
| | | gb\|AC006283. ESTs gb\|AI992784, gb\|T45131, | | | |
| | | gb\|AA586122 come from this gene. | | | |
| 1552 | 2632 | Open Reading Frame OS_ORF011826 ST(R) | | | |
| | | HTC073567-A01.24 FRAME: −2 ORF: 3 LEN: 540 | | | |
| 1574 | 2651 | Open Reading Frame OS_ORF003772 HTC021944- | | | |
| | | A01.16 FRAME: −1 ORF: 5 LEN: 702 | | | |
| 1271 | 2446 | Similar to THIJ_ECOLI Q46948 ESCHERICHIA | 4319, 4137, | | 5347 |
| | | COLI. 4-METHYL-5(B-HYDROXYETHYL)- | 4321, 3479, | | |
| | | THIAZOLE MONOPHOSPHATE | 4320, 4136, | | |
| | | BIOSYNTHESISENZYME. | 2745 | | |
| 1524 | 2605 | Similar to gi\|2224929\|gb\|AAC49747.1\|ethylene- | | | 5662 |
| | | insensitive3-like2 [Arabidopsis thaliana] | | | |
| 1098 | | Similar to gi\|3319884\|emb\|CAA11891.1\|PRT1 | | 5040 | |
| | | [Arabidopsis thaliana] | | | |
| 1472 | 2560 | Similar to ACH7_BOVIN P54131 BOS TAURUS | | | |
| | | (BOVINE). NEURONAL ACETYLCHOLINE | | | |
| | | RECEPTOR PROTEIN, ALPHA-7 CHAIN | | | |
| | | PRECURSOR. | | | |
| 1216 | 2412 | Similar to gi\|9294631\|dbj\|BAB02970.1\|Na/Ca, K- | 4578, 4577 | | |
| | | exchanger-like protein [Arabidopsis thaliana] | | | |
| 1237 | 2425 | Open Reading Frame OS_ORF009851 ST(R) | 2761 | 4789 | 5732 |
| | | HTC059249-A01.20 FRAME: −1 ORF: 4 LEN: 588 | | | |
| 1565 | 2644 | Open Reading Frame OS_ORF018288 HTC121964- | | | |
| | | A01.12 FRAME: −1 ORF: 9 LEN: 738 | | | |
| 1269 | 2445 | Similar to HIT1_YEAST P46973 | 3099 | | 5878 |
| | | SACCHAROMYCES CEREVISIAE (BAKER S | | | |
| | | YEAST). HIT1 PROTEIN. | | | |
| 1426 | 2519 | Similar to gi\|6572079\|emb\|CAB63022.1\|putative | 3309 | | 5865 |
| | | protein [Arabidopsis thaliana] | | | |
| 1465 | 2554 | Similar to DRNE_AERHY P39658 AEROMONAS | | | |
| | | HYDROPHILA. EXTRACELLULAR | | | |
| | | DEOXYRIBONUCLEASE PRECURSOR (EC | | | |
| | | 3.1.21.—) (DNASE). | | | |
| 1343 | | Open Reading Frame OS_ORF001231 HTC006970- | | | 5734 |
| | | A01.14 FRAME: −1 ORF: 1 LEN: 792 | | | |
| 1313 | 2467 | Open Reading Frame OS_ORF012800 HTC080550- | | | |
| | | A01.R.28 FRAME: −1 ORF: 6 LEN: 936 | | | |
| 1413 | | Similar to gi\|3860275\|gb\|AAC73043.1\|putative CEN | 3078 | 4848 | |
| | | (centroradialis)-like phosphatidylethanolamine-binding | | | |
| | | protein [Arabidopsis thaliana] | | | |
| 1434 | | Similar to gi\|3080367\|emb\|CAA18624.1\|hypothetical | | | |
| | | protein [Arabidopsis thaliana] | | | |
| 1528 | 2609 | Similar to YK67_YEAST P36163 | | | |
| | | SACCHAROMYCES CEREVISIAE (BAKER S | | | |
| | | YEAST). HYPOTHETICAL 35.8 KD PROTEIN IN | | | |
| | | PRP16-SRP40 INTERGENIC REGION. | | | |
| 1297 | 2459 | Similar to PM1_HUMAN P17152 HOMO SAPIENS | 3297 | 4774 | 5463 |
| | | (HUMAN). PUTATIVE RECEPTOR PROTEIN. | | | |
| 1446 | 2537 | Similar to YX28_MYCTU Q10818 | | | |
| | | MYCOBACTERIUM TUBERCULOSIS. | | | |
| | | HYPOTHETICAL 52.9 KD PROTEIN CY274.28C. | | | |
| 1327 | 2474 | Similar to gi\|6899931\|emb\|CAB71881.1\|putative | | | |
| | | protein [Arabidopsis thaliana] | | | |
| 1383 | | Similar to gi\|4538965\|emb\|CAB39789.1\|hypothetical | | | |
| | | protein [Arabidopsis thaliana] | | | |
| 1060 | 2301 | Similar to gi\|7339705\|dbj\|BAA92910.1\|ESTs | | | 5707 |
| | | D23839(R0339),AU082696(E61918) correspond to a | | | |
| | | region of the predicted gene.; Similar to Arabidopsis | | | |
| | | thaliana chromosome 4 BAC clone F28J12; putative | | | |
| | | protein. (AL021710) [Oryza sativa] | | | |
| 1471 | 2559 | Open Reading Frame OS_ORF019456 ST(R) | | | 5747 |
| | | HTC131006-A01.55 FRAME: −1 ORF: 11 LEN: 534 | | | |
| 1423 | 2516 | Similar to CDN7_HUMAN P55273 Q13102 HOMO | | | |
| | | SAPIENS (HUMAN). CYCLIN-DEPENDENT | | | |
| | | KINASE 4 INHIBITOR D (P19-INK4D). | | | |
| 1035 | | Similar to gi\|8468000\|dbj\|BAA96601.1\|Similar to | 3495, 3496, | | |
| | | Arabidopsis thaliana chromosome 2 BAC clone | 3001 | | |
| | | F13A10; putative ubiquitin. (AC006418) [Oryza | | | |
| | | sativa] | | | |
| 1201 | 2404 | Similar to gi\|5803260\|dbj\|BAA83570.1\|Similar to | 2890 | 4913 | 5325 |
| | | wak1 gene (AJ009696) [Oryza sativa] | | | |
| 1495 | 2577 | Open Reading Frame OS_ORF013227 HTC083811- | 2907 | | |
| | | A01.R.24 FRAME: 2 ORF: 4 LEN: 699 | | | |
| 1577 | 2654 | Open Reading Frame OS_ORF001833 HTC010638- | | | |
| | | A01.22 FRAME: 1 ORF: 12 LEN: 618 | | | |
| 1267 | | Similar to gi\|7649363\|emb\|CAB89044.1\|putative | 3724, 3373 | 4782 | |
| | | protein [Arabidopsis thaliana] | | | |
| 1274 | | Similar to MTAB_SYNP2 P34883 | 3430 | | |
| | | SYNECHOCOCCUS SP. (STRAIN PCC 7002) | | | |
| | | (AGMENELLUM QUADRUPLICATUM). | | | |
| | | MODIFICATION METHYLASE AQUI BETA | | | |
| | | SUBUNIT (EC 2.1.1.73) (CYTOSINE-SPECIFIC | | | |
| | | METHYLTRANSFERASE AQUI BETA SUBUNIT) | | | |
| | | (M.AQUI BETA SUBUNIT). | | | |
| 1158 | 2373 | Open Reading Frame OS_ORF006648 ST(R) | | | 5833 |
| | | HTC039909-A01.F.23 FRAME: 2 ORF: 9 LEN: 579 | | | |
| 1080 | 2316 | Similar to gi\|8096314\|dbj\|BAA95817.1\|hypothetical | | | 5761 |
| | | protein [Oryza sativa] | | | |
| 1303 | | Similar to YSX3_CAEEL Q10022 | 4125, 2853 | | 5392 |
| | | CAENORHABDITIS ELEGANS. HYPOTHETICAL | | | |
| | | 39.0 KD PROTEIN T28D9.3 IN CHROMOSOME II. | | | |
| 1405 | | Similar to gi\|7406400\|emb\|CAB85510.1\|putative | | 4936 | 5348 |
| | | protein [Arabidopsis thaliana] | | | |
| 1270 | | Similar to CDS1_HUMAN Q92903 O00163 HOMO | | 4795 | 5317 |
| | | SAPIENS (HUMAN). PHOSPHATIDATE | | | |
| | | CYTIDYLYLTRANSFERASE (EC 2.7.7.41) (CDP- | | | |
| | | DIGLYCERIDESYNTHETASE) (CDP- | | | |
| | | DIGLYCERIDE PYROPHOSPHORYLASE) (CDP- | | | |
| | | DIACYLGLYCEROLSYNTHASE) (CDS) | | | |
| | | (CTP: PHOSPHATIDATE | | | |
| | | CYTIDYLYLTRANSFERASE) (CDP-DAG) | | | |
| 1568 | 2647 | Similar to FER_SYNY3 P27320 SYNECHOCYSTIS | 3710, 3707, | 5130 | 5686 |
| | | SP. (STRAIN PCC 6803). FERREDOXIN I. | 3709, 4495 | | |
| 1397 | 2503 | Similar to PR1_MEDTR Q40374 MEDICAGO | | | 5636 |
| | | TRUNCATULA (BARREL MEDIC). | | | |
| | | PATHOGENESIS-RELATED PROTEIN PR-1 | | | |
| | | PRECURSOR. | | | |
| 1209 | | Similar to gi\|5852181\|emb\|CAB55419.1\|zhb0011.1 | | | |
| | | [Oryza sativa] | | | |
| 1352 | 2481 | Similar to AGI2_WHEAT P02876 TRITICUM | 4566, 4221 | 4879 | 5466 |
| | | AESTIVUM (WHEAT). AGGLUTININ ISOLECTIN | | | |
| | | 2 PRECURSOR (WGA2) (ISOLECTIN D). | | | |
| 1310 | | Similar to TAL1_MOUSE Q93092 P70358 MUS | 3015, 3014, | | |
| | | MUSCULUS (MOUSE). TRANSALDOLASE (EC | 3013 | | |
| | | 2.2.1.2). | | | |
| 1286 | | Similar to YRP3_THEAC Q03021 | 3289 | | 5671 |
| | | THERMOPLASMA ACIDOPHILUM. | | | |
| | | HYPOTHETICAL 21.7 KD PROTEIN IN RPOA2 3 | | | |
| | | REGION (ORF186). | | | |
| 1541 | 2622 | Similar to ENP2_TORCA P14401 TORPEDO | | | 5566 |
| | | CALIFORNICA (PACIFIC ELECTRIC RAY). | | | |
| | | ELECTROMOTOR NEURON-ASSOCIATED | | | |
| | | PROTEIN 2 (FRAGMENT). | | | |
| 1149 | | Similar to gi\|7021732\|gb\|AAF35413.1\|unknown | | 5119 | 5497 |
| | | protein [Arabidopsis thaliana] | | | |
| 1501 | 2582 | Open Reading Frame containing a Sage tag sequence | 4587, 4586 | | 5919 |
| | | near 3 end OS_ORF012155 ST(F) HTC075889- | | | |
| | | A01.R.16 FRAME: 2 ORF: 1 LEN: 573 | | | |
| 1290 | | Open Reading Frame OS_ORF007256 ST(R) | | | |
| | | HTC043276-A01.F.9 FRAME: 3 ORF: 8 LEN: 555 | | | |
| 1285 | | Similar to gi\|7270231\|emb\|CAB80001.1\|putative | 3719, 2897 | | |
| | | pyrophosphate-fructose-6-phosphate 1- | | | |
| | | phosphotransferase [Arabidopsis thaliana] | | | |
| 1366 | 2485 | Similar to VIV_ORYSA P37398 ORYZA SATIVA | | | 5844 |
| | | (RICE). VIVIPAROUS PROTEIN HOMOLOG. | | | |
| 1253 | 2436 | Open Reading Frame OS_ORF002306 HTC013290- | | | |
| | | A01.20 FRAME: −3 ORF: 3 LEN: 807 | | | |
| 1499 | 2580 | Open Reading Frame OS_ORF017188 HTC114338- | | | |
| | | A01.F.19 FRAME: 2 ORF: 2 LEN: 978 | | | |
| 1281 | | Similar to CLPX_HAEIN P44838 HAEMOPHILUS | | | |
| | | INFLUENZAE. ATP-DEPENDENT CLP PROTEASE | | | |
| | | ATP-BINDING SUBUNIT CLPX. | | | |
| 1402 | 2505 | Similar to gi\|2244937\|emb\|CAB10359.1\|hypothetical | | | |
| | | protein [Arabidopsis thaliana] | | | |
| 1535 | 2616 | Similar to gi\|2583128\|gb\|AAB82637.1\|hypothetical | 2722, 2721, | | 5285 |
| | | protein [Arabidopsis thaliana] | 2970, 2995 | | |
| 1575 | 2652 | Open Reading Frame OS_ORF013232 HTC083848- | | | |
| | | A01.22 FRAME: −1 ORF: 8 LEN: 780 | | | |
| 1357 | 2482 | Similar to YNQ8_YEAST P53889 | | 4841 | 5495 |
| | | SACCHAROMYCES CEREVISIAE (BAKER S | | | |
| | | YEAST). HYPOTHETICAL 28.8 KD PROTEIN IN | | | |
| | | PSD1-SKO1 INTERGENIC REGION. | | | |
| 1322 | 2473 | Similar to gi\|6056415\|gb\|AAF02879.1\|AC009525_13 | | | |
| | | Unknown protein [Arabidopsis thaliana] | | | |
| 1453 | 2543 | Similar to gi\|7523667\|gb\|AAF63107.1\|AC006423_8 | 3493 | | |
| | | Hypothetical protein [Arabidopsis thaliana] | | | |
| 1097 | | Similar to gi\|4768982\|gb\|AAD29704.1\|AF140491_1 | | 4838 | |
| | | hypothetical protein [Oryza sativa] | | | |
| 1337 | | Open Reading Frame OS_ORF017842 ST(R) | | | |
| | | HTC119007-A01.R.12 FRAME: 2 ORF: 7 LEN: 513 | | | |
| 1251 | | Similar to gi\|1546055\|gb\|AAB72019.1\|cyclin type B- | | | |
| | | like [Zea mays] | | | |
| 1169 | 2382 | Similar to gi\|4249412\|gb\|AAD13709.1\|hypothetical | 2962 | | |
| | | protein [Arabidopsis thaliana] | | | |
| 1262 | 2441 | Similar to gi\|169775\|gb\|AAA33897.1\|alpha-amylase | 3665, 4214, | | 5521 |
| | | precursor (EC 3.2.1.1) | 3663, 3673, | | |
| | | | 3702, 3695, | | |
| | | | 3704, 3701, | | |
| | | | 3667, 3705, | | |
| | | | 3700, 3703, | | |
| | | | 3698, 3672, | | |
| | | | 3680, 3697, | | |
| | | | 4215, 3699, | | |
| | | | 3664, 3674, | | |
| | | | 3682, 3666, | | |
| | | | 3681 | | |
| 1282 | 2451 | Open Reading Frame OS_ORF019538 HTC131716- | | | 5890 |
| | | A01.11 FRAME: 2 ORF: 1 LEN: 1137 | | | |
| 1224 | | Similar to LDS_DROME P34739 DROSOPHILA | 3426 | 4900 | |
| | | MELANOGASTER (FRUIT FLY). PROBABLE | | | |
| | | HELICASE LODESTAR. | | | |
| 1562 | 2641 | Similar to gi\|8777301\|dbj\|BAA96891.1\|tyrosine | | | |
| | | aminotransferase-like protein [Arabidopsis thaliana] | | | |
| 1221 | | Similar to gi\|7406459\|emb\|CAB85561.1\|myotubularin- | | | |
| | | like protein [Arabidopsis thaliana] | | | |
| 1410 | | Similar to gi\|4586118\|emb\|CAB40954.1\|putative | | | 5358 |
| | | protein [Arabidopsis thaliana] | | | |
| 1275 | 2447 | Open Reading Frame OS_ORF011566 HTC071687- | | | |
| | | A01.30 FRAME: −1 ORF: 21 LEN: 711 | | | |
| 1257 | 2439 | Similar to gi\|5257266\|dbj\|BAA81765.1\|EST | | | |
| | | C99024(E4337) corresponds to a region of the | | | |
| | | predicted gene.; Similar to Silk moth; silkworm final | | | |
| | | instar larvae posterior. (D83241) [Oryza sativa] | | | |
| 1376 | | Similar to gi\|5823323\|gb\|AAD53100.1\|AF175995_1 | | | 5284 |
| | | putative transcription factor [Arabidopsis thaliana] | | | |
| 1198 | | Open Reading Frame OS_ORF002724 HTC015879- | | | |
| | | A01.32 FRAME: 2 ORF: 13 LEN: 1620 | | | |
| 1075 | 2312 | Open Reading Frame OS_ORF019153 ST(R) | | | 5850 |
| | | HTC128490-A01.20 FRAME: 1 ORF: 17 LEN: 555 | | | |
| 1597 | 2672 | Open Reading Frame OS_ORF020403 HTC137549- | | 5091 | 5794 |
| | | A01.F.20 FRAME: −3 ORF: 27 LEN: 741 | | | |
| 1491 | 2574 | Similar to gi\|7523392\|emb\|CAB86450.1\|putative | 4405, 4406 | 5070 | 5361 |
| | | protein [Arabidopsis thaliana] | | | |
| 1226 | | Similar to gi\|3193293\|gb\|AAC19277.1\|contains a short | 3790 | 5145 | 5379 |
| | | region of similarity to another Arabidopsis hypothetical | | | |
| | | protein F19K23.8 (GB: AC000375) [Arabidopsis | | | |
| | | thaliana] | | | |
| 1304 | | Similar to gi\|6520233\|dbj\|BAA87958.1\|CW14 | 4195, 4193, | 5017 | 5590 |
| | | [Arabidopsis thaliana] | 4194 | | |
| 1505 | 2586 | Similar to gi\|4914444\|emb\|CAB43647.1\|hypothetical | 3213 | | |
| | | protein [Arabidopsis thaliana] | | | |
| 1328 | | Open Reading Frame OS_ORF006440 HTC038643- | | | 5271 |
| | | A01.R.16 FRAME: 2 ORF: 11 LEN: 738 | | | |
| 1122 | 2340 | Open Reading Frame OS_ORF009333 ST(R) | | | |
| | | HTC055987-A01.R.26 FRAME: 1 ORF: 21 LEN: 561 | | | |
| 1556 | 2635 | Similar to gi\|3482932\|gb\|AAC33217.1\|AAC33217 | 4676, 3221, | 4810 | |
| | | Hypothetical protein [Arabidopsis thaliana] | 4675, 4157, | | |
| | | | 4503 | | |
| 1586 | 2663 | Similar to gi\|3702336\|gb\|AAC62893.1\|3-methyl-2- | | | 5849 |
| | | oxobutanoate hydroxy-methyl-transferase [Arabidopsis | | | |
| | | thaliana] | | | |
| 1412 | | Similar to gi\|7268365\|emb\|CAB78658.1\|pore protein | 2958 | | |
| | | homolog [Arabidopsis thaliana] | | | |
| 1182 | | Open Reading Frame OS_ORF020271 ST(R) | 4696 | 4773 | 5403 |
| | | HTC136732-A01.14 FRAME: 3 ORF: 2 LEN: 1212 | | | |
| 1222 | 2417 | Similar to gi\|4512698\|gb\|AAD21751.1\|unknown | 4636, 3440, | 4962 | |
| | | protein [Arabidopsis thaliana] | 3033 | | |
| 1175 | 2388 | Open Reading Frame OS_ORF014527 HTC093803- | 3497, 2824, | | |
| | | A01.F.24 FRAME: 1 ORF: 21 LEN: 1272 | 2913 | | |
| 1273 | | Similar to BLA2_BACCE P04190 BACILLUS | | | |
| | | CEREUS. BETA-LACTAMASE PRECURSOR, | | | |
| | | TYPE II (EC 3.5.2.6) | | | |
| | | (PENICILLINASE)(CEPHALOSPORINASE). | | | |
| 1247 | 2434 | Similar to PYR5_DROME Q01637 Q24221 | 4513, 4512, | 5105 | 5585 |
| | | DROSOPHILA MELANOGASTER (FRUIT FLY). | 4511 | | |
| | | URIDINE 5-MONOPHOSPHATE SYNTHASE | | | |
| | | (UMP SYNTHASE) | | | |
| | | (OROTATEPHOSPHORIBOSYLTRANSFERASE | | | |
| | | (EC 2.4.2.10) AND OROTIDINE 5- | | | |
| | | PHOSPHATEDECARBOXYLASE (EC 4.1.1.23)) | | | |
| | | (RUDIMENTARY-LIKE PROTEIN). | | | |
| 1170 | 2383 | Open Reading Frame OS_ORF006653 HTC039934- | 3304, 4631, | 5080 | |
| | | A01.R.8 FRAME: −2 ORF: 1 LEN: 762 | 4630, 3279 | | |
| 1493 | | Open Reading Frame OS_ORF010496 HTC064014- | 3334, 3333, | 4929 | |
| | | A01.6 FRAME: 3 ORF: 3 LEN: 726 | 3474 | | |
| 1457 | 2547 | Similar to gi\|3860249\|gb\|AAC73017.1\|unknown | 4165, 4163, | | 5568 |
| | | protein [Arabidopsis thaliana] | | | |
| 1378 | | Similar to gi\|4581182\|gb\|AAD24665.1\|AC006220_21 | | | |
| | | hypothetical protein [Arabidopsis thaliana] | | | |
| 1070 | 2307 | Similar to gi\|8778386\|gb\|AAF79394.1\|AC068197_4 | 4673, 4672 | | 5492 |
| | | F16A14.6 [Arabidopsis thaliana] | | | |
| 1490 | 2573 | Similar to gi\|2245070\|emb\|CAB10493.1\|hypothetical | 2810, 2878, | | |
| | | protein [Arabidopsis thaliana] | 3246, 3095 | | |
| 1360 | | Similar to gi\|2342691\|gb\|AAB70418.1\|F7G19.26 | | | |
| | | [Arabidopsis thaliana] | | | |
| 1572 | | Similar to TXLA_SYNP7 P35088 | | | |
| | | SYNECHOCOCCUS SP. (STRAIN PCC 7942) | | | |
| | | (ANACYSTIS NIDULANS R2). THIOL: DISULFIDE | | | |
| | | INTERCHANGE PROTEIN TXLA. | | | |
| 1590 | | Similar to gi\|4512686\|gb\|AAD21740.1\|hypothetical | | | 5443 |
| | | protein [Arabidopsis thaliana] | | | |
| 1503 | 2584 | Open Reading Frame OS_ORF010771 ST(R) | 4430, 2930 | 5036 | |
| | | HTC066124-A01.26 FRAME: 3 ORF: 24 LEN: 1098 | | | |
| 1449 | 2540 | Similar to gi\|6996304\|emb\|CAB75465.1\|putative | | | |
| | | protein [Arabidopsis thaliana] | | | |
| 1489 | 2572 | Open Reading Frame OS_ORF011581 ST(R) | | | |
| | | HTC071843-A01.19 FRAME: −3 ORF: 1 LEN: 501 | | | |
| 1336 | | Similar to gi\|6648207\|gb\|AAF21205.1\|AC013483_29 | | | 5589 |
| | | unknown protein [Arabidopsis thaliana] | | | |
| 1215 | 2411 | Open Reading Frame OS_ORF012733 ST(R) | | | 5516 |
| | | HTC080054-A01.8 FRAME: 2 ORF: 1 LEN: 657 | | | |
| 1474 | 2561 | Similar to gi\|13219\|emb\|CAA34122.1\|cytochrome | | | |
| | | oxidase subunit I [Oryza sativa] | | | |
| 1421 | 2514 | Similar to gi\|3582319\|gb\|AAC35216.1\|unknown | | | 5419 |
| | | protein [Arabidopsis thaliana] | | | |
| 1333 | | Similar to gi\|7413597\|emb\|CAB86087.1\|putative | 4542 | | 5591 |
| | | protein [Arabidopsis thaliana] | | | |
| 1244 | 2431 | Similar to gi\|7258378\|emb\|CAB77594.1\|putative | 4301 | | 5681 |
| | | protein [Arabidopsis thaliana] | | | |
| 1194 | | Similar to gi\|3805853\|emb\|CAA21473.1\|putative | 3097, 3110, | 4805 | 5418 |
| | | protein [Arabidopsis thaliana] | 3096 | | |
| 1346 | | Similar to gi\|3550661\|emb\|CAA04670.1\|39 kDa EF- | 4156 | | 5552 |
| | | Hand containing protein [Solanum tuberosum] | | | |
| 1318 | 2470 | Similar to ILVE_METJA Q58414 | 2780, 2779 | | 5836 |
| | | METHANOCOCCUS JANNASCHII. PUTATIVE | | | |
| | | BRANCHED-CHAIN AMINO ACID | | | |
| | | AMINOTRANSFERASE (EC | | | |
| | | 2.6.1.42)(TRANSAMINASE B) (BCAT). | | | |
| 1116 | 2334 | Similar to gi\|4539467\|emb\|CAB39947.1\|putative | | | |
| | | protein [Arabidopsis thaliana] | | | |
| 1191 | | Open Reading Frame OS_ORF017317 HTC115428- | | | 5232 |
| | | A01.3 FRAME: −1 ORF: 3 LEN: 732 | | | |
| 1043 | | Similar to gi\|421918\|pir\|\|PQ0549 acid phosphatase-1 | | | 5316 |
| | | (EC 3.1.3.—) —tomato (fragment) | | | |
| 1219 | 2415 | Similar to gi\|8885579\|dbj\|BAA97509.1\|receptor-like | 3303, 3232 | | |
| | | protein kinase [Arabidopsis thaliana] | | | |
| 1341 | | Similar to gi\|6587806\|gb\|AAF18497.1\|AC010924_10 | | | 5254 |
| | | Contains similarity to gb\|M82916 MRS2 protein from | | | |
| | | Saccharomyces cerivisae. ESTs gb\|N96043, | | | |
| | | gb\|AI998651, gb\|AA585850, gb\|T42027 come from | | | |
| | | this gene. [Arabidopsis thaliana] | | | |
| 1387 | | Similar to gi\|9229506\|dbj\|BAB00011.1\| | 4541 | 5216 | 5811 |
| | | gene_id: MIL23.18˜similar to unknown protein | | | |
| | | (gb\|AAB61516.1) [Arabidopsis thaliana] | | | |
| 1210 | 2408 | Open Reading Frame OS_ORF019147 HTC128421- | | | |
| | | A01.R.36 FRAME: −2 ORF: 8 LEN: 849 | | | |
| 1166 | | Similar to gi\|1247314\|emb\|CAA01765.1\|ACC34 | 3261, 3293 | | 5286 |
| | | ACCase [Zea mays] | | | |
| 1248 | 2435 | Similar to gi\|3176677\|gb\|AAC18800.1\|Similar to S. | 3865, 3866 | 4833 | |
| | | cerevisiae SIK1P protein, A_TM021B04.13 from A. | | | |
| | | thaliana BAC gb\|AF007271. [Arabidopsis thaliana] | | | |
| 1567 | 2646 | Similar to gi\|6091768\|gb\|AAF03478.1\|AC009327_17 | | | 5518 |
| | | hypothetical protein [Arabidopsis thaliana] | | | |
| 1064 | | Similar to SMN1_BOVIN O18870 BOS TAURUS | | | |
| | | (BOVINE). SURVIVAL MOTOR NEURON | | | |
| | | PROTEIN 1 (FRAGMENT). | | | |
| 1518 | 2599 | Open Reading Frame OS_ORF012554 HTC078773- | | | |
| | | A01.17 FRAME: −2 ORF: 7 LEN: 927 | | | |
| 1212 | | Open Reading Frame OS_ORF017514 HTC116489- | 3017, 3205, | | |
| | | A01.F.13 FRAME: −1 ORF: 13 LEN: 1107 | 3018, 3016 | | |
| 1118 | 2336 | Similar to BP4C_BRANA P41506 BRASSICA | | | |
| | | NAPUS (RAPE). BP4C PROTEIN. | | | |
| 1276 | | Similar to YDIB_HAEIN P44774 HAEMOPHILUS | 3359 | 5082 | 5679 |
| | | INFLUENZAE. HYPOTHETICAL PROTEIN HI0607. | | | |
| 1497 | | Similar to gi\|4895168\|gb\|AAD32756.1\|AC007662_1 | | | |
| | | putative replication protein A1 [Arabidopsis thaliana] | | | |
| 1482 | 2567 | Open Reading Frame OS_ORF018605 HTC124146- | | | |
| | | A01.F.10 FRAME: 1 ORF: 10 LEN: 933 | | | |
| 1071 | 2308 | Open Reading Frame containing a Sage tag sequence | | | |
| | | near 3 end OS_ORF018748 ST(F) HTC125352- | | | |
| | | A01.F.9 FRAME: 2 ORF: 7 LEN: 708 | | | |
| 1184 | 2394 | Similar to gi\|508545\|gb\|AAA76580.1\|zein | 3231 | | |
| 1354 | | Similar to gi\|2739000\|gb\|AAB94588.1\|CYP71D10p | 4562, 3780, | | |
| | | [Glycine max] | 3878, 4600, | | |
| | | | 4658, 3130, | | |
| | | | 3080, 3129, | | |
| | | | 4599, 3781, | | |
| | | | 4561, 3779, | | |
| | | | 3142 | | |
| 1128 | 2345 | Open Reading Frame OS_ORF007317 HTC043588- | | | |
| | | A01.30 FRAME: −3 ORF: 9 LEN: 1224 | | | |
| 1388 | | Similar to gi\|7271065\|emb\|CAB80673.1\|putative | 2805, 4543 | 4831 | |
| | | protein [Arabidopsis thaliana] | | | |
| 1379 | 2493 | Similar to gi\|4432835\|gb\|AAD20684.1\|unknown | 3706 | 4972 | 5604 |
| | | protein [Arabidopsis thaliana] | | | |
| 1293 | | Similar to KC21_SCHPO P40231 | 3188 | 5063 | |
| | | SCHLZOSACCHAROMYCES POMBE (FISSION | | | |
| | | YEAST). CASEIN KINASE II, ALPHA CHAIN (CK | | | |
| | | II) (EC 2.7.1.37). | | | |
| 1192 | 2399 | Similar to gi\|2827630\|emb\|CAA16582.1\|putative | 3195, 3194, | | |
| | | protein [Arabidopsis thaliana] | 2888 | | |
| 1223 | 2418 | Similar to gi\|5059025\|gb\|AAD38873.1\|AF110382_1 3- | 2720 | 4850 | 5793 |
| | | hydroxy-3-methylglutaryl-coenzyme A reductase | | | |
| | | [Oryza sativa] | | | |

[0683] TABLE 3
SEQ ID NOs: and corresponding description for Oryza genes which are expressed
in an aleurone-specific manner and further the SEQ ID NOs for the corresponding
homologous sequences found in wheat, banana and maize

| | | | | | |
|---|---|---|---|---|---|
| ORF | Promo | | | Bana | Maize |
| (SEQ | (SEQ | | Wheat | (SEQ | (SEQ |
| ID) | ID) | Description | (SEQ ID) | ID) | ID) |

Aleurone

| | | | | | |
|---|---|---|---|---|---|
| 1324 | | Similar to gi\|5915837\|sp\|O81974\|C7D8_SOYBN | | | 5724 |
| | | CYTOCHROME P450 71D8 (P450 CP7) | | | |
| 1150 | 2366 | Similar to gi\|1346724\|sp\|P48007\|PIST_ARATH | 3321 | | 5530 |
| | | FLORAL HOMEOTIC PROTEIN PISTILLATA | | | |
| 1045 | 2290 | Similar to gi\|3549657\|emb\|CAA20568.1\|putative | | | |
| | | protein [Arabidopsis thaliana] | | | |
| 1354 | | Similar to gi\|2739000\|gb\|AAB94588.1\|CYP71D10p | 4562, 3780, | | |
| | | [Glycine max] | 3878, 4600, | | |
| | | | 4658, 3130, | | |
| | | | 3080, 3129, | | |
| | | | 4599, 3781, | | |
| | | | 4561, 3779, | | |
| | | | 3142 | | |
| 1165 | 2380 | Similar to gi\|924624\|gb\|AAA80496.1\|flower-specific | | | |
| | | gamma-thionin-like protein/acidic protein precursor | | | |
| 1308 | 2463 | Similar to YNX1_YEAST P53860 | | | |
| | | SACCHAROMYCES CEREVISIAE (BAKER S | | | |
| | | YEAST). HYPOTHETICAL 40.7 KD PROTEIN IN | | | |
| | | SIN4-URE2 INTERGENIC REGION. | | | |
| 1547 | 2627 | Similar to gi\|8778731\|gb\|AAF79739.1\|AC005106_20 | | | |
| | | T25N20.6 [Arabidopsis thaliana] | | | |
| 1255 | 2437 | Similar to gi\|4508069\|gb\|AAD21413.1\|12246 | 3098 | | |
| 1373 | | Similar to gi\|4490708\|emb\|CAB38842.1\|putative | | 5168 | 5776 |
| | | protein [Arabidopsis thaliana] | | | |
| 1305 | | Similar to YNT1_ANASP Q05067 ANABAENA SP. | | | |
| | | (STRAIN PCC 7120). HYPOTHETICAL ABC | | | |
| | | TRANSPORTER ATP-BINDING PROTEIN IN | | | |
| | | NTCA/BIFA 3 REGION (ORF1) (FRAGMENT). | | | |
| 1515 | 2596 | Open Reading Frame containing a Sage tag sequence | | | |
| | | near 3 end OS_ORF013547 ST(F) HTC086635- | | | |
| | | A01.R.5 FRAME: −3 ORF: 2 LEN: 738 | | | |
| 1467 | 2556 | Similar to gi\|3790581\|gb\|AAC69853.1\|RING-H2 | 4303, 4304 | 4857 | |
| | | finger protein RHB 1 a [Arabidopsis thaliana] | | | |
| 1390 | 2497 | Similar to gi\|1345528\|emb\|CAA54682.1\|ES43 | 3896, 3898, | | |
| | | [Hordeum vulgare] | 3897, 3895 | | |
| 1520 | 2601 | Similar to gi\|2828289\|emb\|CAA16703.1\|hypothetical | 4483, 2863 | | 5901 |
| | | protein [Arabidopsis thaliana] | | | |
| 1511 | 2592 | Similar to gi\|3152568\|gb\|AAC17049.1\|Similar to | 3235, 4493 | 5025 | |
| | | hypothetical protein product gb\|Z97337 from A. | | | |
| | | thaliana. EST gb\|H76597 comes from this gene. | | | |
| | | [Arabidopsis thaliana] | | | |
| 1432 | 2525 | Open Reading Frame containing a Sage tag sequence | | | |
| | | near 3 end OS_ORF004912 ST(F) HTC028900- | | | |
| | | A01.F.8 FRAME: −1 ORF: 1 LEN: 1140 | | | |
| 1211 | | Similar to gi\|4406810\|gb\|AAD20118.1\|unknown | | | 5465 |
| | | protein [Arabidopsis thaliana] | | | |
| 1213 | 2409 | Similar to gi\|6562257\|emb\|CAB62627.1\|putative | 4453, 4452 | 4914 | 5390 |
| | | protein [Arabidopsis thaliana] | | | |
| 1461 | 2551 | Similar to gi\|2245101\|emb\|CAB10523.1\|hypothetical | | 4896 | |
| | | protein [Arabidopsis thaliana] | | | |
| 1252 | | Similar to gi\|7413593\|emb\|CAB86083.1\|putative | 3990, 3991 | 4832 | |
| | | protein [Arabidopsis thaliana] | | | |
| 1374 | | Similar to gi\|1402891\|emb\|CAA66823.1\|unknown | | | |
| | | [Arabidopsis thaliana] | | | |
| 1338 | 2477 | Similar to gi\|3894216\|dbj\|BAA34599.1\|elongation | 4134, 4135, | | 5550 |
| | | factor 1 beta 2 [Oryza sativa] | 4133 | | |
| 1416 | 2509 | Open Reading Frame OS_ORF001739 HTC010017- | | | |
| | | A01.13 FRAME: 1 ORF: 1 LEN: 1221 | | | |
| 1291 | 2456 | Similar to YNU6_CAEEL P50444 | | 4780 | |
| | | CAENORHABDITIS ELEGANS. HYPOTHETICAL | | | |
| | | 42.9 KD PROTEIN R74.6 IN CHROMOSOME III. | | | |
| 1356 | | Similar to gi\|4768996\|gb\|AAD29711.1\|AF140498_1 | | | |
| | | hypothetical protein [Oryza sativa] | | | |
| 1358 | 2483 | Similar to gi\|7670024\|dbj\|BAA94978.1\|contains | | | 5473 |
| | | similarity to similar to ubiquitin conjugating | | | |
| | | enzyme˜gene_id: K14A17.7 [Arabidopsis thaliana] | | | |
| 1196 | | Similar to gi\|7484807\|pir\|\|T01259 AMP deaminase | | 4869 | |
| | | homolog F16M14.21 - Arabidopsis thaliana | | | |
| 1340 | | Open Reading Frame OS_ORF006899 HTC041396- | | | 5327 |
| | | A01.41 FRAME: 2 ORF: 2 LEN: 849 | | | |
| 1579 | 2656 | Similar to GREA_MYCLE P46808 | | | |
| | | MYCOBACTERIUM LEPRAE. TRANSCRIPTION | | | |
| | | ELONGATION FACTOR GREA (TRANSCRIPT | | | |
| | | CLEAVAGE FACTORGREA). | | | |
| 1470 | | Similar to gi\|482709\|pir\|\|A61062 NADH | | 5058 | |
| | | dehydrogenase (ubiquinone) (EC 1.6.5.3) chain 4 - | | | |
| | | soybean mitochondrion (fragment) | | | |
| 1480 | | Similar to YIA7_YEAST P40555 | 2693 | | |
| | | SACCHAROMYCES CEREVISIAE (BAKER S | | | |
| | | YEAST). HYPOTHETICAL 24.8 KD PROTEIN IN | | | |
| | | FAA3-BET1 INTERGENIC REGION. | | | |
| 1560 | 2639 | Similar to PHS_PSEAE P43335 PSEUDOMONAS | 3504, 3505, | 4822 | |
| | | AERUGINOSA. PTERIN-4-ALPHA- | 3503, 3500, | | |
| | | CARBINOLAMINE DEHYDRATASE (EC 4.2.1.96) | 3508 | | |
| | | (PHS) (4-ALPHA-HYDROXY- | | | |
| | | TETRAHYDROPTERIN DEHYDRATASE) | | | |
| | | (PHENYLALANINEHYDROXYLASE- | | | |
| | | STIMULATING PROTEIN) (PCD). | | | |
| 1332 | | Similar to gi\|6017106\|gb\|AAF01589.1\|AC009895_10 | 4039, 4038 | 4797 | 5633 |
| | | hypothetical protein [Arabidopsis thaliana] | | | |
| 1243 | 2430 | Similar to gi\|8778718\|gb\|AAF79726.1\|AC005106_7 | 4318, 4317, | 5135 | |
| | | T25N20.15 [Arabidopsis thaliana] | 4689 | | |
| 1335 | | Similar to gi\|8671775\|gb\|AAF78381.1\|AC069551_14 | | | |
| | | T10O22.22 [Arabidopsis thaliana] | | | |
| 1185 | 2395 | Similar to gi\|445137\|prf∥908437A topoisomerase I | 3117, 3315, | 4958 | |
| | | [Arabidopsis thaliana] | 4532, 4531 | | |
| 1345 | | Similar to gi\|7269851\|emb\|CAB79710.1\|putative | | | |
| | | protein [Arabidopsis thaliana] | | | |
| 1286 | | Similar to YRP3_THEAC Q03021 | 3289 | | 5671 |
| | | THERMOPLASMA ACIDOPHILUM. | | | |
| | | HYPOTHETICAL 21.7 KD PROTEIN IN RPOA2 3 | | | |
| | | REGION (ORF186). | | | |
| 1537 | 2618 | Similar to PDI_CHICK P09102 Q90969 GALLUS | 3507, 3506, | 4911 | 5311 |
| | | GALLUS (CHICKEN). PROTEIN DISULFIDE | 3499, 3498 | | |
| | | ISOMERASE (PDI) (EC 5.3.4.1)/PROLYL 4- | | | |
| | | HYDROXYLASEBETA SUBUNIT (EC 1.14.11.2)/ | | | |
| | | CELLULAR THYROID HORMONE | | | |
| | | BINDINGPROTEIN. | | | |
| 1363 | 2484 | Similar to gi\|1695698\|dbj\|BAA13181.1\|C-type cyclin | | | |
| | | [Oryza sativa] | | | |
| 1226 | | Similar to gi\|3193293\|gb\|AAC19277.1\|contains a short | 3790 | 5145 | 5379 |
| | | region of similarity to another Arabidopsis hypothetical | | | |
| | | protein F19K23.8 (GB: AC000375) [Arabidopsis | | | |
| | | thaliana] | | | |
| 1372 | | Similar to gi\|7288033\|emb\|CAB81795.1\|putative | | | 5803 |
| | | protein [Arabidopsis thaliana] | | | |
| 1388 | | Similar to gi\|7271065\|emb\|CAB80673.1\|putative | 2805, 4543 | 4831 | |
| | | protein [Arabidopsis thaliana] | | | |
| 1053 | | Similar to gi\|7573384\|emb\|CAB87688.1\|putative | 3444 | 4957 | |
| | | protein [Arabidopsis thaliana] | | | |
| 1216 | 2412 | Similar to gi\|9294631\|dbj\|BAB02970.1\|Na/Ca, K- | 4578, 4577 | | |
| | | exchanger-like protein [Arabidopsis thaliana] | | | |
| 1333 | | Similar to gi\|7413597\|emb\|CAB86087.1\|putative | 4542 | | 5591 |
| | | protein [Arabidopsis thaliana] | | | |
| 1336 | | Similar to gi\|6648207\|gb\|AAF21205.1\|AC013483_29 | | | 5589 |
| | | unknown protein [Arabidopsis thaliana] | | | |
| 1218 | 2414 | Similar to gi\|2828295\|emb\|CAA16709.1\|putative | 4604, 3397, | 5038 | |
| | | protein [Arabidopsis thaliana] | 2920, 4605 | | |
| 1359 | | Similar to AEFA_ECOLI P77338 ESCHERICHIA | | | |
| | | COLI. AEFA PROTEIN. | | | |
| 1274 | | Similar to MTAB_SYNP2 P34883 | 3430 | | |
| | | SYNECHOCOCCUS SP. (STRAIN PCC 7002) | | | |
| | | (AGMENELLUM QUADRUPLICATUM). | | | |
| | | MODIFICATION METHYLASE AQUI BETA | | | |
| | | SUBUNIT (EC 2.1.1.73) (CYTOSINE-SPECIFIC | | | |
| | | METHYLTRANSFERASE AQUI BETA SUBUNIT) | | | |
| | | (M. AQUI BETA SUBUNIT). | | | |
| 1126 | | Similar to YP99_CAEEL Q09477 | | | |
| | | CAENORHABDITIS ELEGANS. HYPOTHETICAL | | | |
| | | 22.7 KD PROTEIN C28H8.9 IN CHROMOSOME III. | | | |
| 1531 | 2612 | Open Reading Frame OS_ORF016113 HTC105925- | 2985 | | |
| | | A01.R.13 FRAME: 1 ORF: 12 LEN: 687 | | | |
| 1424 | 2517 | Similar to gi\|4337197\|gb\|AAD18111.1\|AIG2-like | 4669 | | |
| | | protein [Arabidopsis thaliana] | | | |
| 1260 | | Similar to gi\|5881963\|gb\|AAD55139.1\|AF066079_1 | | | 5395 |
| | | dihydrolipoamide S-acetyltransferase [Arabidopsis | | | |
| | | thaliana] | | | |
| 1329 | | Similar to gi\|2129707\|pir\|\|S71165 RNA-directed DNA | | | |
| | | polymerase (EC 2.7.7.49) - Arabidopsis thaliana | | | |
| | | retrotransposon 2 (fragment) | | | |
| 1439 | 2531 | Open Reading Frame containing a Sage tag sequence | | | |
| | | near 3 end OS_ORF007855 ST(F) HTC046991- | | | |
| | | A01.F.4 FRAME: −2 ORF: 2 LEN: 510 | | | |
| 1513 | 2594 | Similar to gi\|9294219\|dbj\|BAB02121.1\| | | 4834 | |
| | | gb\|AAF01563.1˜gene_id: K17E12.8˜similar to | | | |
| | | unknown protein [Arabidopsis thaliana] | | | |
| 1176 | 2389 | Similar to gi\|3757521\|gb\|AAC64223.1\|putative | 3134, 3133, | | |
| | | ubiquitin-conjugating enzyme [Arabidopsis thaliana] | 3284 | | |
| 1194 | | Similar to gi\|3805853\|emb\|CAA21473.1\|putative | 3097, 3110, | 4805 | 5418 |
| | | protein [Arabidopsis thaliana] | 3096 | | |
| 1490 | 2573 | Similar to gi\|2245070\|emb\|CAB10493.1\|hypothetical | 2810, 2878, | | |
| | | protein [Arabidopsis thaliana] | 3246, 3095 | | |
| 1365 | | Similar to gi\|3249086\|gb\|AAC24070.1\|Contains | 3963, 3960, | 4907 | |
| | | similarity to 21 KD subunit of the Arp2/3 protein | 3962, 3961 | | |
| | | complex (ARC21) gb\|AF006086 from Homo sapiens. | | | |
| | | EST gb\|Z37222 comes [Arabidopsis thaliana] | | | |
| 1183 | | Similar to gi\|9294228\|dbj\|BAB02130.1\| | 2795, 3168, | | 5252 |
| | | gb\|AAD39565.1˜gene_id: MLD15.4˜similar to | 3169, 2796 | | |
| | | unknown protein [Arabidopsis thaliana] | | | |
| 1234 | | Similar to gi\|6041840\|gb\|AAF02149.1\|AC009853_9 | 2946 | | 5341 |
| | | hypothetical protein [Arabidopsis thaliana] | | | |
| 1169 | 2382 | Similar to gi\|4249412\|gb\|AAD13709.1\|hypothetical | 2962 | | |
| | | protein [Arabidopsis thaliana] | | | |
| 1300 | 2461 | Similar to gi\|4582787\|emb\|CAB40376.1\|adenosine | 4033, 4034, | 4806 | 5804 |
| | | kinase [Zea mays] | 4035 | | |
| 1323 | | Similar to DAPF_HAEIN P44859 HAEMOPHILUS | 4147 | | |
| | | INFLUENZAE. DIAMINOPIMELATE EPIMERASE | | | |
| | | (EC 5.1.1.7). | | | |
| 1474 | 2561 | Similar to gi\|13219\|emb\|CAA34122.1\|cytochrome | | | |
| | | oxidase subunit I [Oryza sativa] | | | |
| 1277 | 2448 | Similar to gi\|8778457\|gb\|AAF79465.1\|AC022492_9 | 3026 | 5109 | 5330 |
| | | F1L3.17 [Arabidopsis thaliana] | | | |
| 1435 | 2527 | Similar to gi\|4883606\|gb\|AAD31575.1\|AC006922_7 | 4003 | 4965 | 5396 |
| | | putative cis-Golgi SNARE protein [Arabidopsis | | | |
| | | thaliana] | | | |
| 1456 | 2546 | Similar to gi\|6041852\|gb\|AAF02161.1\|AC009853_21 | 3360 | | 5426 |
| | | unknown protein, 3 partial [Arabidopsis thaliana] | | | |
| 1270 | | Similar to CDS1_HUMAN Q92903 O00163 HOMO | | 4795 | 5317 |
| | | SAPIENS (HUMAN). PHOSPHATIDATE | | | |
| | | CYTIDYLYLTRANSFERASE (EC 2.7.7.41) (CDP- | | | |
| | | DIGLYCERIDESYNTHETASE) (CDP- | | | |
| | | DIGLYCERIDE PYROPHOSPHORYLASE) (CDP- | | | |
| | | DIACYLGLYCEROLSYNTHASE) (CDS) | | | |
| | | (CTP: PHOSPHATIDATE | | | |
| | | CYTIDYLYLTRANSFERASE) (CDP- | | | |
| | | DAGSYNTHASE). | | | |
| 1170 | 2383 | Open Reading Frame OS_ORF006653 HTC039934- | 3304, 4631, | 5080 | |
| | | A01.R.8 FRAME: −2 ORF: 1 LEN: 762 | 4630, 3279 | | |
| 1281 | | Similar to CLPX_HAEIN P44838 HAEMOPHILUS | | 4802 | 5736 |
| | | INFLUENZAE. ATP-DEPENDENT CLP PROTEASE | | | |
| | | ATP-BINDING SUBUNIT CLPX. | | | |
| 1167 | 2381 | Similar to gi\|4584527\|emb\|CAB40758.1\|putative | 2934, 3436 | | 5698 |
| | | protein [Arabidopsis thaliana] | | | |
| 1402 | 2505 | Similar to gi\|2244937\|emb\|CAB10359.1\|hypothetical | | | |
| | | protein [Arabidopsis thaliana] | | | |
| 1482 | 2567 | Open Reading Frame OS_ORF018605 HTC124146- | | | |
| | | A01.F.10 FRAME: 1 ORF: 10 LEN: 933 | | | |
| 1327 | 2474 | Similar to gi\|6899931\|emb\|CAB71881.1\|putative | | | |
| | | protein [Arabidopsis thaliana] | | | |
| 1493 | | Open Reading Frame OS_ORF010496 HTC064014- | 3334, 3333, | 4929 | |
| | | A01.6 FRAME: 3 ORF: 3 LEN: 726 | 3474 | | |
| 1298 | | Similar to SYY_HUMAN P54577 HOMO SAPIENS | 3483 | 4814 | 5701 |
| | | (HUMAN). TYROSYL-TRNA SYNTHETASE (EC | | | |
| | | 6.1.1.1) (TYROSYL-TRNA LIGASE) (TYRRS). | | | |
| 1341 | | Similar to gi\|6587806\|gb\|AAF18497.1\|AC010924_10 | | | 5254 |
| | | Contains similarity to gb\|M82916 MRS2 protein from | | | |
| | | Saccharomyces cerivisae. ESTs gb\|N96043, | | | |
| | | gb\|AI998651, gb\|AA585850, gb\|T42027 come from | | | |
| | | this gene. [Arabidopsis thaliana] | | | |
| 1357 | 2482 | Similar to YNQ8_YEAST P53889 | | 4841 | 5495 |
| | | SACCHAROMYCES CEREVISIAE (BAKER S | | | |
| | | YEAST). HYPOTHETICAL 28.8 KD PROTEIN IN | | | |
| | | PSD1-SKO1 INTERGENIC REGION. | | | |
| 1242 | 2429 | Similar to gi\|6466961\|gb\|AAF13096.1\|AC009176_23 | 2850, 2849 | 4919 | 5486 |
| | | hypothetical protein [Arabidopsis thaliana] | | | |
| 1172 | 2385 | Open Reading Frame OS_ORF016335 HTC107779- | 4005, 4371, | 5142 | 5415 |
| | | A01.F.23 FRAME: 3 ORF: 1 LEN: 783 | 4518, 4108, | | |
| | | | 3032, 4517, | | |
| | | | 4004, 4519, | | |
| | | | 3031, 2977 | | |
| 1553 | 2633 | Similar to gi\|6453896\|gb\|AAF09079.1\|AC011663_15 | | | 5778 |
| | | unknown protein [Arabidopsis thaliana] | | | |
| 1420 | 2513 | Similar to gi\|3786014\|gb\|AAC67360.1\|hypothetical | | | |
| | | protein [Arabidopsis thaliana] | | | |
| 1174 | 2387 | Similar to gi\|7267302\|emb\|CAB81084.1\|UV-damaged | 2881, 4402, | | |
| | | DNA binding factor-like protein [Arabidopsis thaliana] | 4403, 4401, | | |
| | | | 2798, 4282 | | |
| 1347 | 2479 | Similar to gi\|9294416\|dbj\|BAB02497.1\| | 2750, 2749, | 5074 | 5435 |
| | | gene_id: MOE17.21˜ref\|NP_002083.1˜similar to | 2751 | | |
| | | unknown protein [Arabidopsis thaliana] | | | |
| 1391 | 2498 | Similar to gi\|7248391\|dbj\|BAA92714.1\|hypothetical | | | |
| | | protein [Oryza sativa] | | | |
| 1265 | 2442 | Similar to CCB2_RABIT P54288 ORYCTOLAGUS | 4082, 4081, | 5146 | 5660 |
| | | CUNICULUS (RABBIT). DIHYDROPYRIDINE- | 2941, 4056 | | |
| | | SENSITIVE L-TYPE, CALCIUM CHANNEL BETA- | | | |
| | | 2 SUBUNIT (CAB2). | | | |
| 1297 | 2459 | Similar to PM1_HUMAN P17152 HOMO SAPIENS | 3297 | 4774 | 5463 |
| | | (HUMAN). PUTATIVE RECEPTOR PROTEIN. | | | |
| 1562 | 2641 | Similar to gi\|8777301\|dbj\|BAA96891.1\|tyrosine | | | |
| | | aminotransferase-like protein [Arabidopsis thaliana] | | | |
| 1574 | 2651 | Open Reading Frame OS_ORF003772 HTC021944- | | | |
| | | A01.16 FRAME: −1 ORF: 5 LEN: 702 | | | |
| 1224 | | Similar to LDS_DROME P34739 DROSOPHILA | 3426 | 4900 | |
| | | MELANOGASTER (FRUIT FLY). PROBABLE | | | |
| | | HELICASE LODESTAR. | | | |
| 1503 | 2584 | Open Reading Frame OS_ORF010771 ST (R) | 4430, 2930 | 5036 | |
| | | HTC066124-A01.26 FRAME: 3 ORF: 24 LEN: 1098 | | | |
| 1295 | | Similar to gi\|7488260\|pir\|\|T00673 protein kinase | | | |
| | | homolog F6E13.6 - Arabidopsis thaliana | | | |
| 1481 | 2566 | Open Reading Frame containing a Sage tag sequence | | | |
| | | near 3 end OS_ORF013162 ST(F) HTC083361- | | | |
| | | A01.F.40 FRAME: −2 ORF: 1 LEN: 696 | | | |

[0684] TABLE 4
SEQ ID NOs and corresponding description for Oryza genes which are expressed
in an endosperm-specific manner and further the SEQ ID NOs for the corresponding
homologous sequences found in wheat, banana and maize

| | | | | | |
|---|---|---|---|---|---|
| ORF | Promo | | | Bana | Maize |
| (SEQ | (SEQ | | Wheat | (SEQ | (SEQ |
| ID) | ID) | Description | (SEQ ID) | ID) | ID) |

Endosperm

| | | | | | |
|---|---|---|---|---|---|
| 1088 | | Similar to gi\|4539346\|emb\|CAB37494.1\|putative | | | |
| | | protein [Arabidopsis thaliana] | | | |
| 1155 | | Similar to YHJD_ECOLI P37642 ESCHERICHIA | | | |
| | | COLI. HYPOTHETICAL 37.9 KD PROTEIN IN | | | |
| | | TREF-KDGK INTERGENIC REGION (O337). | | | |
| 1082 | | Similar to gi\|4586037\|gb\|AAD25655.1\|AC007109_13 | 4048, 4549, | | 5796 |
| | | putative heat shock protein [Arabidopsis thaliana] | 4550, 3403, | | |
| | | | 4548, 3402, | | |
| | | | 4043 | | |
| 1141 | 2358 | Open Reading Frame OS_ORF002232 HTC012937- | | | 5770 |
| | | A01.25 FRAME: −2 ORF: 24 LEN: 855 | | | |
| 1125 | 2343 | Similar to ABP1_YEAST P15891 | | | |
| | | SACCHAROMYCES CEREVISIAE (BAKER S | | | |
| | | YEAST). ACTIN BINDING PROTEIN. | | | |
| 1161 | 2376 | Similar to gi\|9081787\|dbj\|BAA99526.1\|hypothetical | | | |
| | | protein [Oryza sativa] | | | |
| 1104 | | Similar to YC06_KLEPN Q48452 KLEBSIELLA | | | |
| | | PNEUMONIAE. HYPOTHETICAL 80.4 KD | | | |
| | | PROTEIN IN CPS REGION (ORF6). | | | |
| 1072 | 2309 | Similar to gi\|6466941\|gb\|AAF13076.1\|AC009176_3 | | | |
| | | unknown protein [Arabidopsis thaliana] | | | |
| 1469 | 2558 | Similar to gi\|4204311\|gb\|AAD10692.1\|lcl\|prt_seq No | | | 5876 |
| | | definition line found | | | |
| 1441 | 2533 | Similar to ELI1_PHYCR P41802 PHYTOPHTHORA | | | |
| | | CRYPTOGEA. ACIDIC ELICITIN A1 PRECURSOR. | | | |
| 1261 | 2440 | Open Reading Frame OS_ORF011947 ST (R) | | | 5722 |
| | | HTC074509-A01.R.21 FRAME: 3 ORF: 3 LEN: 528 | | | |
| 1142 | 2359 | Similar to VNFG_AZOCH PI 5333 AZOTOBACTER | | | |
| | | CHROOCOCCUM MCD 1. NITROGENASE | | | |
| | | VANADIUM-IRON PROTEIN DELTA CHAIN (EC | | | |
| | | 1.18.6.1) (NITROGENASE COMPONENT I) | | | |
| | | (DINITROGENASE). | | | |
| 1287 | 2453 | Open Reading Frame OS_ORF003469 HTC020152- | | | 5693 |
| | | A01.25 FRAME: −2 ORF: 16 LEN: 1140 | | | |
| 1111 | 2329 | Open Reading Frame OS_ORF018782 HTC125558- | | | |
| | | A01.F.12 FRAME: −3 ORF: 4 LEN: 729 | | | |
| 1109 | 2327 | Similar to gi\|18583\|emb\|CAA48907.1\|nodulin | | | |
| | | [Glycine max] | | | |
| 1157 | 2372 | Open Reading Frame OS_ORF001203 HTC006819- | | | 5588 |
| | | A01.28 FRAME: −3 ORF: 1 LEN: 777 | | | |
| 1425 | 2518 | Similar to VE1_HPV63 Q07847 HUMAN | | | |
| | | PAPILLOMAVIRUS TYPE 63. REPLICATION | | | |
| | | PROTEIN E1. | | | |
| 1094 | | Open Reading Frame OS_ORF019404 HTC130656- | | 4940 | |
| | | A01.F.12 FRAME: −2 ORF: 1 LEN: 678 | | | |
| 1062 | | Open Reading Frame OS_ORF002475 HTC014377- | 2786, 4649, | | 5241 |
| | | A01.16 FRAME: −3 ORF: 18 LEN: 693 | 4629, 4648, | | |
| | | | 2882, 4589, | | |
| | | | 4628 | | |
| 1065 | 2303 | Similar to gi\|995619\|emb\|CAA62665.1\|lectin like | 3303, 3232, | | |
| | | protein [Arabidopsis thaliana] | 4027 | | |
| 1504 | 2585 | Similar to YPPG_BACSU P50835 BACILLUS | | | |
| | | SUBTILIS. HYPOTHETICAL 14.5 KD PROTEIN IN | | | |
| | | PONA-COTD INTERGENIC REGION. | | | |
| 1241 | 2428 | Similar to gi\|5295948\|dbj\|BAA81849.1\|hypothetical | | | |
| | | protein [Oryza sativa] | | | |
| 1558 | 2637 | Similar to YQJL_BACSU P54549 BACILLUS | | | |
| | | SUBTILIS. HYPOTHETICAL 28.2 KD PROTEIN IN | | | |
| | | GLNQ-ANSR INTERGENIC REGION. | | | |
| 1549 | 2629 | Open Reading Frame containing a Sage tag sequence | | | |
| | | near 3 end OS_ORF010160 ST(F) HTC061531- | | | |
| | | A01.F.19 FRAME: −1 ORF: 1 LEN: 1017 | | | |
| 1596 | 2671 | Similar to 7B2_XENLA P18844 XENOPUS LAEVIS | | | |
| | | (AFRICAN CLAWED FROG), NEUROENDOCRINE | | | |
| | | PROTEIN 7B2 (SECRETOGRANIN V) | | | |
| | | (FRAGMENT). | | | |
| 1510 | 2591 | Open Reading Frame OS_ORF018745 HTC125312- | | | |
| | | A01.R.20 FRAME: −3 ORF: 28 LEN: 795 | | | |
| 1063 | 2302 | “““ Similar to HPI2_ECTVA P38524 | | | |
| | | ECTOTHIORHODOSPIRA VACUOLATA. HIGH | | | |
| | | POTENTIAL IRON-SULFUR PROTEIN, ISOZYME | | | |
| | | 2 (HIPIP 2). ””” | | | |
| 1238 | 2426 | Similar to gi\|7716575\|gb\|AAF68437.1\|putative DNA | 3138, 2887, | | 5852 |
| | | cytosine methyltransferase MET3 [Zea mays] | 3137, 2886, | | |
| | | | 3238, 2950, | | |
| | | | 3128 | | |
| 1582 | 2659 | Open Reading Frame OS_ORF008474 HTC051016- | | | |
| | | A01.R.13 FRAME: 2 ORF: 12 LEN: 681 | | | |
| 1436 | 2528 | Open Reading Frame OS_ORF016926 HTC112251- | | 5191 | 5863 |
| | | A01.14 FRAME: 1 ORF: 10 LEN: 654 | | | |
| 1375 | 2491 | Similar to gi\|7340854\|dbj\|BAA92944.1\|hypothetical | | | |
| | | protein [Oryza sativa] | | | |
| 1208 | 2407 | Open Reading Frame OS_ORF011285 HTC069506- | 3303, 4027, | | |
| | | A01.R.4 FRAME: −2 ORF: 3 LEN: 786 | 2712, 4028, | | |
| | | | 3232 | | |
| 1589 | 2666 | Open Reading Frame containing a Sage tag sequence | | | |
| | | near 3 end OS_ORF021256 ST(F) HTC144712- | | | |
| | | A01.R.2 FRAME: 2 ORF: 7 LEN: 528 | | | |
| 1545 | 2625 | Open Reading Frame OS_ORF014969 HTC097200- | | | |
| | | A01.R.41 FRAME: −1 ORF: 13 LEN: 876 | | | |
| 1296 | 2458 | Similar to gi\|9294401\|dbj\|BAB02482.1\| | 4380 | | |
| | | gene_id: MOE17.5˜unknown protein [Arabidopsis | | | |
| | | thaliana] | | | |
| 1138 | 2355 | Similar to gi\|82583\|pir\|\|E22364 alpha/beta-gliadin | | | |
| | | precursor (clone A1235) - wheat | | | |
| 1496 | 2578 | Similar to WAP_CAMDR P09837 CAMELUS | 2815, 2968 | | |
| | | DROMEDARIUS (DROMEDARY) (ARABIAN | | | |
| | | CAMEL). WHEY ACIDIC PROTEIN (WAP). | | | |
| 1529 | 2610 | Open Reading Frame containing a Sage tag sequence | | | |
| | | near 3 end OS_ORF020346 ST(F) HTC137170- | | | |
| | | A01.19 FRAME: −2 ORF: 3 LEN: 1437 | | | |
| 1129 | 2346 | Similar to CASK_ODOHE Q95225 Q95226 | | | |
| | | ODOCOILEUS HEMIONUS (MULE DEER) | | | |
| | | (BLACK-TAILED DEER). KAPPA CASEIN | | | |
| | | (FRAGMENT). | | | |
| 1314 | | Open Reading Frame OS_ORF004164 ST(R) | 3473 | | 5906 |
| | | HTC024228-A01.36 FRAME: 1 ORF: 7 LEN: 549 | | | |
| 1476 | | Similar to YXEP_BACSU P54955 BACILLUS | | | |
| | | SUBTILIS. HYPOTHETICAL 41.6 KD PROTEIN IN | | | |
| | | IDH-DEOR INTERGENIC REGION. | | | |
| 1101 | | Similar to gi\|2961389\|emb\|CAA18136.1\|purple acid | 4062, 4063 | 5112 | 5835 |
| | | phosphatase like protein [Arabidopsis thaliana] | | | |
| 1380 | | Similar to gi\|6289052\|gb\|AAF06789.1\|AF192975_1 | 4351, 3043, | 4829 | |
| | | unknown [Oryza sativa] | 4350, 3044, | | |
| | | | 3042 | | |
| 1386 | | Similar to gi\|4185501\|gb\|AAD09105.1\|fertilization- | 2870, 2869 | | |
| | | independent seed 2 protein [Arabidopsis thaliana] | | | |
| 1231 | 2422 | Open Reading Frame OS_ORF014200 HTC091206- | | | |
| | | A01.F.14 FRAME: −2 ORF: 5 LEN: 906 | | | |
| 1517 | 2598 | Similar to gi\|8843783\|dbj\|BAA97331.1\| | | | |
| | | gb\|AAC80581.1˜gene_id: MZN1.7˜similar to unknown | | | |
| | | protein [Arabidopsis thaliana] | | | |
| 1539 | 2620 | Open Reading Frame OS_ORF012379 ST(R) | | | |
| | | HTC077361-A01.R.25 FRAME: −1 ORF: 6 LEN: 1119 | | | |
| 1123 | 2341 | Open Reading Frame OS_ORF010912 HTC067127- | | | |
| | | A01.F.24 FRAME: 1 ORF: 17 LEN: 675 | | | |
| 1121 | 2339 | Open Reading Frame OS_ORF014277 HTC091891- | | | |
| | | A01.F.5 FRAME: 1 ORF: 4 LEN: 669 | | | |
| 1417 | 2510 | Open Reading Frame OS_ORF000206 HTC001182- | | | |
| | | A01.25 FRAME: −3 ORF: 23 LEN: 915 | | | |
| 1477 | 2563 | Open Reading Frame OS_ORF006071 HTC036306- | | | |
| | | A01.27 FRAME: 1 ORF: 7 LEN: 1761 | | | |
| 1073 | 2310 | Similar to gi\|5803244\|dbj\|BAA83554.1\|Similar to | 3323, 4292, | 4789 | 5617 |
| | | hexose carrier protein HEX6 &RCCHCP_1 (Q07423) | 3324 | | |
| | | [Oryza sativa] | | | |
| 1486 | 2570 | Similar to E321_ADE1P P35770 HUMAN | | | |
| | | ADENOVIRUS TYPE 11 (AD11P) (STRAIN | | | |
| | | SLOBISKI). EARLY E3 20.6 KD GLYCOPROTEIN. | | | |
| 1571 | 2649 | Similar to IM23_YEAST P32897 | | | |
| | | SACCHAROMYCES CEREVISIAE (BAKER S | | | |
| | | YEAST). MITOCHONDRIAL IMPORT INNER | | | |
| | | MEMBRANE TRANSLOCASE SUBUNIT | | | |
| | | TIM23(MITOCHONDRIAL PROTEIN IMPORT | | | |
| | | PROTEIN 3) (MITOCHONDRIAL PROTEIN | | | |
| | | IMPORTPROTEIN MAS6) (MEMBRANE IMPORT | | | |
| | | MACHINERY PROTEIN MIM2 | | | |
| 1124 | 2342 | Open Reading Frame OS_ORF010827 HTC066509- | | | |
| | | A01.F.19 FRAME: 2 ORF: 28 LEN: 675 | | | |
| 1521 | 2602 | Similar to gi\|9280680\|gb\|AAF86549.1\|AC069252_8 | 3370, 3408, | 5064 | 5802 |
| | | F2E2.12 [Arabidopsis thaliana] | 3372, 3371 | | |
| 1492 | 2575 | Similar to YD57_SCHPO Q10311 | | | |
| | | SCHIZOSACCHAROMYCES POMBE (FISSION | | | |
| | | YEAST). HYPOTHETICAL 25.9 KD PROTEIN, | | | |
| | | C6C3.07 IN CHROMOSOME I. | | | |
| 1450 | | Similar to YAJO_ECOLI P77735 ESCHERICHIA | | | |
| | | COLI. HYPOTHETICAL OXIDOREDUCTASE IN | | | |
| | | PGPA-ISPA INTERGENIC REGION. | | | |
| 1154 | 2370 | Similar to gi\|6581058\|gb\|AAF18438.1\|AF192467_1 | | | 5519 |
| | | Sgt1 [Oryza sativa] | | | |
| 1447 | 2538 | Similar to gi\|7487883\|pir\|\|T00987 hypothetical protein | | 4803 | |
| | | T9J22.21 - Arabidopsis thaliana | | | |
| 1551 | 2631 | Open Reading Frame OS_ORF013836 HTC088733- | | | |
| | | A01.F.19 FRAME: 1 ORF: 19 LEN: 1476 | | | |
| 1546 | 2626 | Open Reading Frame OS_ORF013277 HTC084148- | | | |
| | | A01.5 FRAME: 3 ORF: 1 LEN: 735 | | | |
| 1160 | 2375 | Similar to YJEQ_ECOLI P39286 ESCHERICHIA | | | |
| | | COLI. HYPOTHETICAL 37.7 KD PROTEIN IN PSD- | | | |
| | | AMIB INTERGENIC REGION (F337). | | | |
| 1059 | 2300 | Open Reading Frame OS_ORF001606 HTC009227- | | | |
| | | A01.48 FRAME: 2 ORF: 25 LEN: 1299 | | | |
| 1419 | 2512 | Similar to YV23_MYCLE P54580 | | | 5408 |
| | | MYCOBACTERIUM LEPRAE. HYPOTHETICAL | | | |
| | | 27.9 KD PROTEIN B2168_C2_209. | | | |
| 1334 | | Open Reading Frame OS_ORF004663 HTC027383- | | | 5757 |
| | | A01.F.15 FRAME: 1 ORF: 3 LEN: 663 | | | |
| 1177 | 2390 | Open Reading Frame containing a Sage tag sequence | 3365, 4159, | 4989 | |
| | | near 3 end OS_ORF001044 ST(F) HTC005847- | 2769, 3364, | | |
| | | A01.28 FRAME: −2 ORF: 3 LEN: 783 | 4496, 4497, | | |
| | | | 2768, 2809, | | |
| | | | 4158, 3271, | | |
| | | | 3109, 4530, | | |
| | | | 2932, 3269, | | |
| | | | 3295, 2707 | | |
| 1385 | 2495 | Similar to gi\|2911041\|emb\|CAA17551.1\|kinetochore | | 5187 | 5238 |
| | | (SKP1p)-like protein [Arabidopsis thaliana] | | | |
| 1433 | 2526 | Similar to gi\|6453867\|gb\|AAF09051.1\|AC011717_18 | | | |
| | | hypothetical protein [Arabidopsis thaliana] | | | |
| 1527 | 2608 | Open Reading Frame OS_ORF013101 HTC082889- | | | |
| | | A01.R.9 FRAME: −1 ORF: 7 LEN: 690 | | | |
| 1279 | 2450 | Similar to gi\|2245022\|emb\|CAB10442.1\|hypothetical | | | 5862 |
| | | protein [Arabidopsis thaliana] | | | |
| 1284 | | Similar to HIS8_MYCSM P28735 | | | |
| | | MYCOBACTERIUM SMEGMATIS. HISTIDINOL- | | | |
| | | PHOSPHATE AMINOTRANSFERASE (EC 2.6.1.9) | | | |
| | | (IMIDAZOLE ACETOL-PHOSPHATE | | | |
| | | TRANSAMINASE) (FRAGMENT). | | | |
| 1137 | 2354 | Similar to LECG_ARAHY P02872 ARACHIS | | | |
| | | HYPOGAEA (PEANUT). GALACTOSE-BINDING | | | |
| | | LECTIN PRECURSOR (AGGLUTININ) (PNA). | | | |
| 1171 | 2384 | “““ Similar to gi\|9293951\|dbj\|BAB01854.1\|DNA- | 2884, 3900, | | |
| | | directed RNA polymerase, subunit B [Arabidopsis | 3904 | | |
| | | thaliana] ””” | | | |
| 1509 | 2590 | Similar to gi\|6553925\|gb\|AAF16590.1\|AC012329_14 | | | |
| | | hypothetical protein [Arabidopsis thaliana] | | | |
| 1353 | | Open Reading Frame OS_ORF008479 HTC051059- | 3493 | | |
| | | A01.11 FRAME: 3 ORF: 6 LEN: 933 | | | |
| 1180 | 2392 | Open Reading Frame OS_ORF007418 HTC044323- | 2953, 3955, | | 5813 |
| | | A01.R.10 FRAME: 1 ORF: 1 LEN: 705 | 3954, 3953 | | |
| 1437 | 2529 | Open Reading Frame OS_ORF020518 HTC138308- | | | 5896 |
| | | A01.F.6 FRAME: −2 ORF: 4 LEN: 1080 | | | |
| 1315 | 2468 | Similar to gi\|6899895\|emb\|CAB71904.1\|RAV-like | | | 5588 |
| | | protein [Arabidopsis thaliana] | | | |
| 1057 | | Open Reading Frame OS_ORF008654 ST(R) | 3141, 3121, | | 5872 |
| | | HTC051926-A01.R.21 FRAME: 3 ORF: 16 LEN: 597 | 2918 | | |
| 1096 | 2323 | Open Reading Frame OS_ORF013567 HTC086832- | 3731 | | 5548 |
| | | A01.R.10 FRAME: −2 ORF: 6 LEN: 651 | | | |
| 1130 | 2347 | Open Reading Frame OS_ORF009250 ST(R) | | | 5536 |
| | | HTC055587-A01.R.20 FRAME: −2 ORF: 18 LEN: 609 | | | |
| 1454 | 2544 | “““ Similar to KR62_SHEEP P02448 OVIS ARIES | | | |
| | | (SHEEP). KERATIN, HIGH-TYROSINE MATRIX | | | |
| | | PROTEIN (COMPONENT 0.62). ””” | | | |
| 1538 | 2619 | Open Reading Frame OS_ORF012452 HTC077995- | | | 5815 |
| | | A01.R.13 FRAME: 3 ORF: 12 LEN: 666 | | | |
| 1289 | 2455 | Similar to gi\|556902\|emb\|CAA84288.1\|54-kD signal | 4083, 3716, | | 5251 |
| | | recognition particle (SRP) specific protein | 4085, 4086 | | |
| | | [Lycopersicon esculentum] | | | |
| 1268 | 2444 | Open Reading Frame containing a Sage tag sequence | | | 5334 |
| | | near 3 end OS_ORF010085 ST(F) HTC060921-A013 | | | |
| | | FRAME: −2 ORF: 7 LEN: 582 | | | |
| 1464 | 2553 | Similar to gi\|8096408\|dbj\|BAA95878.1\|EST | | | |
| | | AU062706 (C30225) corresponds to a region of the | | | |
| | | predicted gene. ˜hypothetical protein [Oryza sativa] | | | |
| 1512 | 2593 | Similar to gi\|6714422\|gb\|AAF26110.1\|AC012328_13 | 2965, 3280 | | |
| | | hypothetical protein [Arabidopsis thaliana] | | | |
| 1235 | 2423 | Open Reading Frame containing a Sage tag sequence | | | 5285 |
| | | near 3 end OS_ORF003649 ST(F) HTC021208- | | | |
| | | A01.22 FRAME: −3 ORF: 14 LEN: 1257 | | | |
| 1468 | 2557 | Open Reading Frame OS_ORF006107 HTC036528- | | | |
| | | A01.30 FRAME: −2 ORF: 28 LEN: 795 | | | |
| 1561 | 2640 | Open Reading Frame containing a Sage tag sequence | | | |
| | | near 3 end OS_ORF001814 ST(F) HTC010532- | | | |
| | | A01.14 FRAME: 3 ORF: 17 LEN: 948 | | | |
| 1203 | | Open Reading Frame OS_ORF017107 HTC113682- | | | |
| | | A01.F.39 FRAME: 1 ORF: 16 LEN: 741 | | | |
| 1381 | | Open Reading Frame OS_ORF004338 HTC025425- | | | 5583 |
| | | A01.1 9 FRAME: 3 ORF: 4 LEN: 657 | | | |
| 1236 | 2424 | Open Reading Frame OS_ORF003108 HTC018151- | 3255, 4619, | 5065 | 5726 |
| | | A01.14 FRAME: −3 ORF: 3 LEN: 909 | 4618, 3287 | | |
| 1429 | 2522 | Open Reading Frame containing a Sage tag sequence | | | |
| | | near 3 end OS_ORF010917 ST(F) HTC067133- | | | |
| | | A01.F.25 FRAME: −1 ORF: 36 LEN: 543 | | | |
| 1443 | 2534 | Open Reading Frame containing a Sage tag sequence | | | |
| | | near 3 end OS_ORF015365 ST(F) HTC100104- | | | |
| | | A01.R.5 FRAME: −3 ORF: 2 LEN: 633 | | | |
| 1113 | 2331 | Open Reading Frame containing a Sage tag sequence | | | |
| | | near 3 end OS_ORF016057 ST(F) HTC105401- | | | |
| | | A01.F.20 FRAME: 1 ORF: 20 LEN: 834 | | | |
| 1407 | 2506 | Similar to gi\|7630235\|dbj\|BAA94768.1\|hypothetical | | | |
| | | protein [Oryza sativa] | | | |
| 1220 | 2416 | Open Reading Frame OS_ORF017123 HTC113816- | 3009, 2951 | | 5741 |
| | | A01.28 FRAME: −1 ORF: 4 LEN: 828 | | | |
| 1431 | 2524 | Similar to gi\|6562304\|emb\|CAB62602.1\|putative | | | 5522 |
| | | protein [Arabidopsis thaliana] | | | |
| 1522 | 2603 | Similar to gi\|5734723\|gb\|AAD49988.1\|AC007259_1 | | | |
| | | receptor-like protein kinase [Arabidopsis thaliana] | | | |
| 1084 | 2318 | Similar to gi\|7573432\|emb\|CAB87748.1\|putative | 4534, 4535, | | |
| | | protein [Arabidopsis thaliana] | 4533 | | |
| 1475 | 2562 | Similar to NODB_AZOCA Q07740 | | | |
| | | AZORHIZOBIUM CAULINODANS. | | | |
| | | CHITOOLIGOSACCHARIDE DEACETYLASE (EC | | | |
| | | 3.5.1.-) (NODULATION PROTEIN B). | | | |
| 1288 | 2454 | Open Reading Frame containing a Sage tag sequence | 2814, 2813 | | 5355 |
| | | near 3 end OS_ORF008809 ST(F) HTC052791- | | | |
| | | A01.R.20 FRAME: −2 ORF: 10 LEN: 759 | | | |
| 1227 | 2419 | Open Reading Frame OS_ORF014096 HTC090622- | 3291, 3330, | 4847 | 5509 |
| | | A01.F.4 FRAME: 1 ORF: 2 LEN: 663 | 4055, 3292, | | |
| | | | 2964 | | |
| 1444 | 2535 | Similar to CY2_RHOTE P00098 RHODOCYCLUS | | | |
| | | TENUIS (RHODOSPIRILLUM TENUE). | | | |
| | | CYTOCHROME C2. | | | |
| 1292 | 2457 | Similar to BZTA_RHOCA Q52663 RHODOBACTER | | | |
| | | CAPSULATUS (RHODOPSEUDOMONAS | | | |
| | | CAPSULATA). | | | |
| | | GLUTAMATE/GLUTAMINE/ASPARTATE/ASPAR- | | | |
| | | AGINE-BINDING PROTEIN PRECURSORBZTA. | | | |
| 1557 | 2636 | Open Reading Frame OS_ORF021175 HTC144175- | 4019 | | 5355 |
| | | A01.R.30 FRAME: 3 ORF: 14 LEN: 1191 | | | |
| 1361 | | Similar to gi\|6520227\|dbj\|BAA87955.1\|ZCW7 | | | |
| | | [Arabidopsis thaliana] | | | |
| 1595 | 2670 | Open Reading Frame containing a Sage tag sequence | | | 5885 |
| | | near 3 end OS_ORF007923 ST(F) HTC047502- | | | |
| | | A01.R.12 FRAME: −2 ORF: 12 LEN: 567 | | | |
| 1370 | 2489 | Open Reading Frame OS_ORF018320 HTC122173- | | | |
| | | A01.11 FRAME: 1 ORF: 9 LEN: 846 | | | |
| 1058 | 2299 | Similar to COMI_DICDI Q03380 DICTYOSTELIUM | 3256, 2682 | | |
| | | DISCOIDEUM (SLIME MOLD). COMITIN (CABP1- | | | |
| | | RELATED PROTEIN P24) (24 KD ACTIN-BINDING | | | |
| | | PROTEIN). | | | |
| 1050 | 2295 | Open Reading Frame containing a Sage tag sequence | | | |
| | | near 3 end OS_ORF002649 ST(F) HTC015461 - | | | |
| | | A01.45 FRAME: 1 ORF: 4 LEN: 897 | | | |
| 1455 | 2545 | Open Reading Frame OS_ORF004035 HTC023345- | | | |
| | | A01.22 FRAME: 3 ORF: 3 LEN: 852 | | | |
| 1280 | | Open Reading Frame OS_ORF016729 ST(R) | | | 5891 |
| | | HTC110880-A01.F.12 FRAME: 3 ORF: 15 LEN: 510 | | | |
| 1061 | | Similar to gi\|6437533\|gb\|AAF08565.1\|AC012193_14 | 2852 | 4793 | |
| | | hypothetical protein [Arabidopsis thaliana] | | | |
| 1398 | 2504 | Open Reading Frame containing a Sage tag sequence | | | |
| | | near 3 end OS_ORF008116 ST(F) HTC048551- | | | |
| | | A01.42 FRAME: 1 ORF: 4 LEN: 567 | | | |
| 1086 | | Similar to YRBB_ECOLI P45389 ESCHERICHIA | | | |
| | | COLI. HYPOTHETICAL 14.4 KD PROTEIN IN | | | |
| | | MURA-RPON INTERGENIC REGION (F129). | | | |
| 1576 | 2653 | Similar to P30_TOXGO P13664 TOXOPLASMA | | | |
| | | GONDII. MAJOR SURFACE ANTIGEN P30 | | | |
| | | PRECURSOR. | | | |
| 1523 | 2604 | Open Reading Frame containing a Sage tag sequence | | | |
| | | near 3 end OS_ORF004361 ST(F) HTC025646-A01.5 | | | |
| | | FRAME: −1 ORF: 3 LEN: 648 | | | |
| 1448 | 2539 | Open Reading Frame OS_ORF007167 HTC042869- | | | |
| | | A01.R.21 FRAME: 3 ORF: 21 LEN: 651 | | | |
| 1411 | | Open Reading Frame containing a Sage tag sequence | | | |
| | | near 3 end OS_ORF012877 ST(F) HTC080961- | | | |
| | | A01.F.19 FRAME: 2 ORF: 1 LEN: 537 | | | |
| 1205 | | Open Reading Frame OS_ORF012677 HTC079731- | | | |
| | | A01.5 FRAME: −2 ORF: 2 LEN: 855 | | | |
| 1076 | | Similar to gi\|4512702\|gb\|AAD21755.1\|putative WD- | 3377, 3376 | | |
| | | 40 repeat protein [Arabidopsis thaliana] | | | |
| 1056 | 2298 | Open Reading Frame OS_ORF014992 ST(R) | 3090, 3148, | | 5908 |
| | | HTC097367-A01.F.13 FRAME: −3 ORF: 6 LEN: 642 | 3147, 3146 | | |
| 1530 | 2611 | “““ Similar to gi\|3335347\|gb\|AAC27149.1\|Contains | | | 5831 |
| | | similarity to ARI, RING finger protein gb\|X98309 from | | | |
| | | Drosophila melanogaster. ESTs gb\|T44383, | | | |
| | | gb\|W43120, gb\|N65868, gb\|H36013, gb\|AA042241, | | | |
| | | gb\|T76869 and gb\|AA042359 come from this gene. | | | |
| | | [Arabidopsis tha | | | |
| 1559 | 2638 | Similar to gi\|3738091\|gb\|AAC63588.1\|putative bHLH | | | |
| | | transcription factor [Arabidopsis thaliana] | | | |
| 1550 | 2630 | Similar to gi\|8843759\|dbj\|BAA97307.1\| | 3624, 3796, | | |
| | | emb\|CAB62602.1˜gene_id: MXK3.18˜similar to | 3623, 3621, | | |
| | | unknown protein [Arabidopsis thaliana] | 4666, 3622 | | |
| 1115 | 2333 | Open Reading Frame OS_ORF002824 HTC016383- | | | |
| | | A01.16 FRAME: 3 ORF: 18 LEN: 744 | | | |
| 1368 | 2487 | Open Reading Frame OS_ORF013471 HTC085904- | | | 5631 |
| | | A01.R.22 FRAME: 2 ORF: 1 LEN: 657 | | | |
| 1585 | 2662 | Similar to UL34_HCMVA P16812 HUMAN | | | |
| | | CYTOMEGALOVIRUS (STRAIN AD169). | | | |
| | | HYPOTHETICAL PROTEIN UL34. | | | |
| 1331 | 2476 | Open Reading Frame OS_ORF013279 HTC084207- | | | |
| | | A01.F.22 FRAME: 3 ORF: 19 LEN: 930 | | | |
| 1485 | | Similar to 5HT1_APLCA Q16950 APLYSIA | | | |
| | | CALIFORNICA (CALIFORNIA SEA HARE). 5- | | | |
| | | HYDROXYTRYPTAMINE 1 RECEPTOR (5-HTB1) | | | |
| | | (SEROTONIN RECEPTOR 1). | | | |
| 1214 | 2410 | Open Reading Frame containing a Sage tag sequence | 3708 | 4878 | 5231 |
| | | near 3 end OS_ORF013972 ST(F) HTC089849- | | | |
| | | A01.22 FRAME: 2 ORF: 16 LEN: 537 | | | |
| 1389 | 2496 | Similar to gi\|3941526\|gb\|AAC83639.1\|putative | 3692, 3694, | 4886 | |
| | | transcription factor [Arabidopsis thaliana] | 2904, 4427, | | |
| | | | 3915, 4428, | | |
| | | | 3693 | | |
| 1240 | | Similar to gi\|1086540\|gb\|AAC49219.1\|Ra | | | |
| 1478 | 2564 | Open Reading Frame OS_ORF018918 ST(R) | | | |
| | | HTC126528-A01.F.14 FRAME: 3 ORF: 17 LEN: 513 | | | |
| 1362 | | Similar to YIHI_ECOLI P32130 ESCHERICHIA | | | |
| | | COLI. HYPOTHETICAL 19.1 KD PROTEIN IN | | | |
| | | POLA-HEMN INTERGENIC REGION (O169). | | | |
| 1195 | 2400 | Similar to gi\|4455283\|emb\|CAB36819.1\|L1 specific | 2972 | 4821 | 5359 |
| | | homeobox gene ATML1/ovule-specific homeobox | | | |
| | | protein A20 [Arabidopsis thaliana] | | | |
| 1526 | 2607 | Open Reading Frame OS_ORF014719 HTC095181- | | | |
| | | A01.R.17 FRAME: 1 ORF: 6 LEN: 930 | | | |
| 1548 | 2628 | Similar to gi\|6996252\|emb\|CAB75478.1\|putative | | | |
| | | protein [Arabidopsis thaliana] | | | |
| 1239 | 2427 | Similar to gi\|7362762\|emb\|CAB83132.1\|putative | 3161, 3160, | | 53 |
| | | protein [Arabidopsis thaliana] | 3936, 3938, | | |
| | | | 3937, 2956 | | |
| 1404 | | Similar to gi\|7268671\|emb\|CAB78879.1\|myb-like | | | |
| | | protein [Arabidopsis thaliana] | | | |
| 1570 | | Open Reading Frame OS_ORF021360 HTC145470- | | | |
| | | A01.R.8 FRAME: 2 ORF: 9 LEN: 660 | | | |
| 1514 | 2595 | Open Reading Frame containing a Sage tag sequence | 3877, 4379, | 5208 | |
| | | near 3 end OS_ORF019284 ST(F) HTC129613- | 3406, 3407, | | |
| | | A01.R.5 FRAME: −3 ORF: 2 LEN: 534 | 3405 | | |
| 1525 | 2606 | Open Reading Frame OS_ORF014843 HTC096188- | | | 5258 |
| | | A01.R.23 FRAME: 3 ORF: 4 LEN: 942 | | | |
| 1225 | | Similar to gi\|3927830\|gb\|AAC79587.1\|hypothetical | 4474, 4473 | | |
| | | protein [Arabidopsis thaliana] | | | |
| 1342 | | Similar to gi\|6137251\|sp\|O22757\|YML2_ARATH | | | |
| | | HYPOTHETICAL MLO-LIKE PROTEIN F5J6.23 | | | |
| 1188 | 2397 | Open Reading Frame containing a Sage tag sequence | 3790, 3331, | | |
| | | near 3 end OS_ORF013981 ST(F) HTC089945- | 2943 | | |
| | | A01.R.1 FRAME: 1 ORF: 1 LEN: 540 | | | |
| 1473 | | “““ Similar to UL55_HSVEB P28963 EQUINE | | | |
| | | HERPES VIRUS TYPE 1 (STRAIN AB4P) (EHV-1), | | | |
| | | AND EQUINE HERPES VIRUS TYPE 1 (STRAIN | | | |
| | | KENTUCKY A) (EHV-1). GENE 4 PROTEIN (ORF | | | |
| | | L2). ””” | | | |
| 1173 | | Similar to gi\|2982442\|emb\|CAA18250.1\|hypothetical | | | |
| | | protein [Arabidopsis thaliana] | | | |
| 1393 | 2500 | Similar to MERC_THIFE P22905 THIOBACILLUS | | | |
| | | FERROOXIDANS. MERCURIC RESISTANCE | | | |
| | | PROTEIN MERC. | | | |
| 1593 | 2669 | Similar to gi\|9294053\|dbj\|BAB02010.1\| | | | |
| | | gb\|AAD03575.1˜gene_id: MOB24.16˜similar to | | | |
| | | unknown protein [Arabidopsis thaliana] | | | |
| 1168 | | Similar to gi\|4733891\|gb\|AAD17931.2\|unconventional | 3462, 3267, | | |
| | | myosin heavy chain [Zea mays] | 3079 | | |
| | | Similar to SG12_CAEEL P46564 | | | |
| | | CAENORHABDITIS ELEGANS. SRG-12 PROTEIN. | | | |
| 1542 | 2623 | Open Reading Frame OS_ORF009690 ST(R) | 4113, 4114 | | |
| | | HTC058211-A01.F.15 FRAME: −2 ORF: 2 LEN: 975 | | | |
| 1479 | 2565 | Open Reading Frame OS_ORF016333 HTC107775- | | | |
| | | A01.R.12 FRAME: −1 ORF: 12 LEN: 630 | | | |
| 1311 | 2465 | Similar to gi\|8570063\|dbj\|BAA96768.1\|hypothetical | | | |
| | | protein [Oryza sativa] | | | |
| 1283 | 2452 | Similar to gi\|6665551\|gb\|AAF22920.1\|AC013289_14 | 2845, 2843, | | |
| | | hypothetical protein [Arabidopsis thaliana] | 2814, 2813, | | |
| | | | 3259 | | |
| 1422 | 2515 | Open Reading Frame containing a Sage tag sequence | | | |
| | | near 3 end OS_ORF011984 ST(F) HTC074722- | | | |
| | | A01.F.42 FRAME: −1 ORF: 79 LEN: 906 | | | |
| 1302 | | Similar to gi\|3152572\|gb\|AAC17053.1\|Contains | 4126, 4128, | | |
| | | homology to DNAJ heatshock protein gb\|U32803 from | 4127 | | |
| | | Haemophilus influenzae. [Arabidopsis thaliana] | | | |
| 1438 | 2530 | Similar to gi\|2160143\|gb\|AAB60765.1\|F19K23.12 | | | |
| | | gene product [Arabidopsis thaliana] | | | |
| 1494 | 2576 | Similar to gi\|2244963\|emb\|CAB10384.1\|hypothetical | | | |
| | | protein [Arabidopsis thaliana] | | | |
| 1415 | 2508 | Similar to YT19_MYCTU P71555 | | | |
| | | MYCOBACTERIUM TUBERCULOSIS. | | | |
| | | HYPOTHETICAL 46.1 KD PROTEIN CY10D7.19C. | | | |
| 1442 | | Open Reading Frame containing a Sage tag sequence | | | |
| | | near 3 end OS_ORF017606 ST(F) HTC117204- | | | |
| | | A01.18 FRAME: 2 ORF: 5 LEN: 1041 | | | |
| 1532 | 2613 | Similar to GAST_RAT P04563 RATTUS | | | |
| | | NORVEGICUS (RAT). GASTRIN PRECURSOR. | | | |
| 1199 | 2402 | Similar to Y08F_MYCTU Q11052 | | | |
| | | MYCOBACTERIUM TUBERCULOSIS. PROBABLE | | | |
| | | REGULATORY PROTEIN CY50.15. | | | |
| 1349 | | Similar to gi\|6498440\|dbj\|BAA87843.1\|hypothetical | | | |
| | | protein [Oryza sativa] | | | |
| 1418 | 2511 | Open Reading Frame OS_ORF020505 ST(R) | | | |
| | | HTC138244-A01.16 FRAME: −3 ORF: 4 LEN: 687 | | | |
| 1246 | 2433 | Similar to gi\|3080410\|emb\|CAA18729.1\|hypothetical | 4568, 4094, | 4854 | 5409 |
| | | protein [Arabidopsis thaliana] | 4095, 4092, | | |
| | | | 2807, 2799, | | |
| | | | 3068, 4307, | | |
| | | | 4699, 4093, | | |
| | | | 4087, 4498, | | |
| | | | 3998, 4567, | | |
| | | | 4499 | | |
| 1564 | 2643 | Similar to gi\|8809705\|dbj\|BAA97246.1\|26S | 3076, 3075 | | |
| | | proteasome/non-ATPase regulatory subunit | | | |
| | | [Arabidopsis thaliana] | | | |
| 1348 | 2480 | Similar to gi\|8099228\|gb\|AAF72076.1\|AC025098_10 | | | |
| | | hypothetical protein [Oryza sativa] | | | |
| 1217 | 2413 | Similar to CYP4_CYNCA P40781 CYNARA | 4623, 2801, | | |
| | | CARDUNCULUS (CARDOON). CYPRO4 | 4624 | | |
| | | PROTEIN. | | | |
| 1306 | | Open Reading Frame OS_ORF003828 HTC022181- | | | |
| | | A01.11 FRAME: −2 ORF: 2 LEN: 660 | | | |
| 1488 | 2571 | Similar to HSTO_VIBCH Q07425 VIBRIO | | | |
| | | CHOLERAE. HEAT-STABLE ENTEROTOXIN STO | | | |
| | | PRECURSOR (O1-ST). | | | |
| 1202 | 2405 | Open Reading Frame OS_ORF018301 HTC122064- | | | |
| | | A01.R.12 FRAME: 1 ORF: 5 LEN: 744 | | | |
| 1566 | 2645 | Similar to YOP3_CAEEL Q22695 | | | |
| | | CAENORHABDITIS ELEGANS. HYPOTHETICAL | | | |
| | | 41.0 KD PROTEIN T23F11.3 IN CHROMOSOME III. | | | |
| 1536 | 2617 | Open Reading Frame OS_ORF004492 HTC026407- | | | |
| | | A01.7 FRAME: −1 ORF: 5 LEN: 666 | | | |
| 1554 | 2634 | Similar to gi\|3355466\|gb\|AAC27828.1\|unknown | | | 5705 |
| | | protein [Arabidopsis thaliana] | | | |
| 1320 | | Open Reading Frame OS_ORF006563 ST(R) | 3427 | | 5564 |
| | | HTC039403-A01.F.12 FRAME: 2 ORF: 1 LEN: 600 | | | |
| 1254 | | Similar to CISY_COXBU P18789 COXIELLA | 4387 | 5158 | 5657 |
| | | BURNETII. CITRATE SYNTHASE (EC 4.1.3.7). | | | |
| 1483 | 2568 | Open Reading Frame OS_ORF013069 HTC082606- | | | |
| | | A01.F.5 FRAME: −1 ORF: 7 LEN: 612 | | | |
| 1458 | 2548 | “““ Similar to HB2U_MOUSE P06344 MUS | | | |
| | | MUSCULUS (MOUSE). H-2 CLASS II | | | |
| | | HISTOCOMPATIBILITY ANTIGEN, A-U BETA | | | |
| | | CHAIN PRECURSOR. ””” | | | |
| 1319 | 2471 | Similar to gi\|8778212\|gb\|AAF79221.1\|AC006917_6 | 4691 | | |
| | | F10B6.10 [Arabidopsis thaliana] | | | |
| 1409 | 2507 | Similar to gi\|6815065\|dbj\|BAA90352.1\|hypothetical | | | |
| | | protein [Oryza sativa] | | | |
| 1487 | | Similar to gi\|7670039\|dbj\|BAA94993.1\|invertase | | | 5844 |
| | | inhibitor-like protein [Arabidopsis thaliana] | | | |
| 1187 | | Similar to gi\|7523418\|emb\|CAB86437.1\|putative | 3270 | | |
| | | protein [Arabidopsis thaliana] | | | |
| 1502 | 2583 | Similar to FLAW_DESDE P80312 DESULFOVIBRIO | | | |
| | | DESULFURICANS. FLAVODOXIN (FRAGMENT). | | | |
| 1344 | 2478 | Similar to gi\|6728874\|gb\|AAF26947.1\|AC008113_18 | 2679, 2678, | | 5383 |
| | | F12A21.16 [Arabidopsis thaliana] | 2680 | | |
| | | Similar to gi\|549885\|gb\|AAA56900.1\|homeobox | | | |
| | | protein | | | |
| 1462 | | Similar to gi\|3080386\|emb\|CAA18706.1\|hypothetical | | | 5339 |
| | | protein [Arabidopsis thaliana] | | | |
| 1189 | | Similar to NXS1_ACAAN P01434 ACANTHOPHIS | | | |
| | | ANTARCTICUS (COMMON DEATH ADDER). | | | |
| | | SHORT NEUROTOXIN 1 (TOXIN AA C). | | | |
| 1400 | | Open Reading Frame OS_ORF021917 HTC150055- | | | |
| | | A01.F.6 FRAME: −1 ORF: 1 LEN: 603 | | | |
| 1543 | | Similar to gi\|2827547\|emb\|CAA16555.1\|predicted | | 5046 | 5623 |
| | | protein [Arabidopsis thaliana] | | | |
| 1395 | 2501 | Similar to gi\|5091500\|dbj\|BAA78735.1\|Hypothetical | | | |
| | | protein [Oryza sativa] | | | |
| 1555 | | Similar to SWH1_YEAST P39555 P80234 | | | |
| | | SACCHAROMYCES CEREVISIAE (BAKER S | | | |
| | | YEAST). SWH1 PROTEIN. | | | |
| 1102 | | Similar to gi\|4337193\|gb\|AAD18107.1\|hypothetical | | | 5574 |
| | | protein [Arabidopsis thaliana] | | | |
| 1266 | 2443 | Open Reading Frame OS_ORF002545 HTC014886- | | | 5844 |
| | | A01.21 FRAME: 1 ORF: 6 LEN: 1299 | | | |
| 1587 | 2664 | Similar to gi\|7543889\|emb\|CAB87198.1\|putative | | | |
| | | protein [Arabidopsis thaliana] | | | |
| 1452 | 2542 | Similar to gi\|8346561\|emb\|CAB93725.1\|putative | | | |
| | | protein [Arabidopsis thaliana] | | | |
| 1301 | 2462 | Open Reading Frame OS_ORF022234 ST(R) | | | |
| | | HTC153141-A01.F.17 FRAME: −3 ORF: 24 LEN: 525 | | | |
| 1581 | 2658 | Similar to gi\|9229298\|dbj\|BAA99601.1\| | 4328, 4327, | | |
| | | gene_id: MDC16.12˜similar to unknown protein | 4325 | | |
| | | (gb\|AAC36161.1) [Arabidopsis thaliana] | | | |
| 1089 | 2320 | “““ Similar to gi\|8810466\|gb\|AAF80127.1\|AC024174_9 | 4223, 4222 | | |
| | | Contains similarity to an unknown protein T1B3.16 | | | |
| | | gi\|4432844 from Arabidopsis thaliana BAC T1B3 | | | |
| | | gb\|AC006283. ESTs gb\|AI992784, gb\|T45131, | | | |
| | | gb\|AA586122 come from this gene. ””” | | | |
| 1552 | 2632 | Open Reading Frame OS_ORF011826 ST(R) | | | 5502 |
| | | HTC073567-A01.24 FRAME: −2 ORF: 3 LEN: 540 | | | |
| 1524 | 2605 | Similar to gi\|2224929\|gb\|AAC49747.1\|ethylene- | | | 5662 |
| | | insensitive3-like2 [Arabidopsis thaliana] | | | |
| 1098 | | Similar to gi\|3319884\|emb\|CAA11891.1\|PRT1 | | 5040 | |
| | | [Arabidopsis thaliana] | | | |
| 1472 | 2560 | “““ Similar to ACH7_BOVIN P54131 BOS TAURUS | | | |
| | | (BOVINE). NEURONAL ACETYLCHOLINE | | | |
| | | RECEPTOR PROTEIN, ALPHA-7 CHAIN | | | |
| | | PRECURSOR. ””” | | | |
| 1237 | 2425 | Open Reading Frame OS_ORF009851 ST(R) | 2761 | 4789 | 5732 |
| | | HTC059249-A01.20 FRAME: −1 ORF: 4 LEN: 588 | | | |
| | | Open Reading Frame containing a Sage tag sequence | | | |
| | | near 3 end OS_ORF013696 ST(F) HTC087783- | | | |
| | | A01.F.16 FRAME: 2 ORF: 9 LEN: 564 | | | |
| 1565 | 2644 | Open Reading Frame OS_ORF018288 HTC121964- | | | |
| | | A01.12 FRAME: −1 ORF: 9 LEN: 738 | | | |
| 1269 | 2445 | Similar to HIT1_YEAST P46973 | 3099 | | 5878 |
| | | SACCHAROMYCES CEREVISIAE (BAKER S | | | |
| | | YEAST). HIT1 PROTEIN. | | | |
| 1343 | | Open Reading Frame OS_ORF001231 HTC006970- | | | 5734 |
| | | A01.14 FRAME: −1 ORF: 1 LEN: 792 | | | |
| 1313 | 2467 | Open Reading Frame OS_ORF012800 HTC080550- | | | |
| | | A01.R.28 FRAME: −1 ORF: 6 LEN: 936 | | | |
| 1413 | | Similar to gi\|3860275\|gb\|AAC73043.1\|putative CEN | 3078 | 4848 | |
| | | (centroradialis)-like phosphatidylethanolamine-binding | | | |
| | | protein [Arabidopsis thaliana] | | | |
| 1446 | 2537 | Similar to YX28_MYCTU Q10818 | | | |
| | | MYCOBACTERIUM TUBERCULOSIS. | | | |
| | | HYPOTHETICAL 52.9 KD PROTEIN CY274.28C. | | | |
| 1471 | 2559 | Open Reading Frame OS_ORF019456 ST(R) | | | 5747 |
| | | HTC131006-A01.55 FRAME: −1 ORF: 11 LEN: 534 | | | |
| 1423 | 2516 | Similar to CDN7_HUMAN P55273 Q13102 HOMO | | | |
| | | SAPIENS (HUMAN). CYCLIN-DEPENDENT | | | |
| | | KINASE 4 INHIBITOR D (P19-INK4D). | | | |
| 1201 | 2404 | Similar to gi\|5803260\|dbj\|BAA83570.1\|Similar to | 2890 | 4913 | 5325 |
| | | wak1 gene (AJ009696) [Oryza sativa] | | | |
| 1495 | 2577 | Open Reading Frame OS_ORF013227 HTC083811- | 2907 | | |
| | | A01.R.24 FRAME: 2 ORF: 4 LEN: 699 | | | |
| 1267 | | Similar to gi\|7649363\|emb\|CAB89044.1\|putative | 3724, 3373 | 4782 | |
| | | protein [Arabidopsis thaliana] | | | |
| 1080 | 2316 | Similar to gi\|8096314\|dbj\|BAA95817.1\|hypothetical | | | 5761 |
| | | protein [Oryza sativa] | | | |
| 1405 | | Similar to gi\|7406400\|emb\|CAB85510.1\|putative | | | |
| | | protein [Arabidopsis thaliana] | | | |
| 1397 | 2503 | Similar to PR1_MEDTR Q40374 MEDICAGO | | | 5636 |
| | | TRUNCATULA (BARREL MEDIC). | | | |
| | | PATHOGENESIS-RELATED PROTEIN PR-1 | | | |
| | | PRECURSOR. | | | |
| 1209 | | Similar to gi\|5852181\|emb\|CAB55419.1\|zhb0011.1 | | | |
| | | [Oryza sativa] | | | |
| 1253 | 2436 | Open Reading Frame OS_ORF002306 HTC013290- | | | 5676 |
| | | A01.20 FRAME: −3 ORF: 3 LEN: 807 | | | |
| 1499 | 2580 | Open Reading Frame OS_ORF017188 HTC114338- | | | |
| | | A01.F.19 FRAME: 2 ORF: 2 LEN: 978 | | | |
| | | Similar to gi\|4928753\|gb\|AAD33717.1\|AF136540_1 | | | |
| | | YABBY3 [Arabidopsis thaliana] | | | |
| 1575 | 2652 | Open Reading Frame OS_ORF013232 HTC083848- | | | |
| | | A01.22 FRAME: −1 ORF: 8 LEN: 780 | | | |
| 1322 | 2473 | Similar to gi\|6056415\|gb\|AAF02879.1\|AC009525_13 | | | |
| | | Unknown protein [Arabidopsis thaliana] | | | |
| 1453 | 2543 | Similar to gi\|7523667\|gb\|AAF63107.1\|AC006423_8 | 3493 | | |
| | | Hypothetical protein [Arabidopsis thaliana] | | | |
| 1337 | | Open Reading Frame OS_ORF017842 ST(R) | | | |
| | | HTC119007-A01.R.12 FRAME: 2 ORF: 7 LEN: 513 | | | |
| 1251 | | Similar to gi\|1546055\|gb\|AAB72019.1\|cyclin type B- | | | |
| | | like [Zea mays] | | | |
| 1221 | | Similar to gi\|7406459\|emb\|CAB85561.1\|myotubularin- | | | |
| | | like protein [Arabidopsis thaliana] | | | |
| 1275 | 2447 | Open Reading Frame OS_ORF011566 HTC071687- | | | |
| | | A01. 30 FRAME: −1 ORF: 21 LEN: 711 | | | |
| 1257 | 2439 | Similar to gi\|5257266\|dbj\|BAA81765.1\|EST | | | |
| | | C99024 (E4337) corresponds to a region of the | | | |
| | | predicted gene.; Similar to Silk moth; silkworm final | | | |
| | | instar larvae posterior. (D83241) [Oryza sativa] | | | |
| 1376 | | Similar to gi\|5823323\|gb\|AAD53100.1\|AF175995_1 | | | 5284 |
| | | putative transcription factor [Arabidopsis thaliana] | | | |
| 1198 | | Open Reading Frame OS_ORF002724 HTC015879- | | | |
| | | A01.32 FRAME: 2 ORF: 13 LEN: 1620 | | | |
| 1075 | 2312 | Open Reading Frame OS_ORF019153 ST(R) | | | 5850 |
| | | HTC128490-A01.20 FRAME: 1 ORF: 17 LEN: 555 | | | |
| 1304 | | Similar to gi\|6520233\|dbj\|BAA87958.1\|CW14 | 4195, 4193, | 5017 | 5590 |
| | | [Arabidopsis thaliana] | 4194 | | |
| 1505 | 2586 | Similar to gi\|4914444\|emb\|CAB43647.1\|hypothetical | 3213 | | |
| | | protein [Arabidopsis thaliana] | | | |
| 1328 | | Open Reading Frame OS_ORF006440 HTC038643- | | | 5271 |
| | | A01.R.16 FRAME: 2 ORF: 11 LEN: 738 | | | |
| 1556 | 2635 | Similar to gi\|3482932\|gb\|AAC33217.1\|AAC33217 | 4676, 3221, | 4810 | |
| | | Hypothetical protein [Arabidopsis thaliana] | 4675, 4157, | | |
| | | | 4503 | | |
| 1182 | | Open Reading Frame OS_ORF020271 ST(R) | 4696 | 4773 | 5403 |
| | | HTC136732-A01.14 FRAME: 3 ORF: 2 LEN: 1212 | | | |
| 1273 | | “““ Similar to BLA2_BACCE P04190 BACILLUS | | | |
| | | CEREUS. BETA-LACTAMASE PRECURSOR, | | | |
| | | TYPE H (EC 3.5.2.6) | | | |
| | | (PENICILLINASE) (CEPHALOSPORINASE). ””” | | | |
| 1457 | 2547 | Similar to gi\|3860249\|gb\|AAC73017.1\|unknown | 4165, 4163, | | 5568 |
| | | protein [Arabidopsis thaliana] | 4164 | | |
| 1070 | 2307 | Similar to gi\|8778386\|gb\|AAF79394.1\|AC068197_4 | 4673, 4672 | | 5492 |
| | | F16A14.6 [Arabidopsis thaliana] | | | |
| 1360 | | Similar to gi\|2342691\|gb\|AAB70418.1\|F7G19.26 | | | |
| | | [Arabidopsis thaliana] | | | |
| 1572 | | Similar to TXLA_SYNP7 P35088 | | | |
| | | SYNECHOCOCCUS SP. (STRAIN PCC 7942) | | | |
| | | (ANACYSTIS NIDULANS R2). THIOL: DISULFIDE | | | |
| | | INTERCHANGE PROTEIN TXLA. | | | |
| 1590 | | Similar to gi\|4512686\|gb\|AAD21740.1\|hypothetical | | | 5443 |
| | | protein [Arabidopsis thaliana] | | | |
| 1489 | 2572 | Open Reading Frame OS_ORF011581 ST(R) | | | |
| | | HTC071843-A01.19 FRAME: −3 ORF: 1 LEN: 501 | | | |
| 1215 | 2411 | Open Reading Frame OS_ORF012733 ST(R) | | | 5516 |
| | | HTC080054-A01.8 FRAME: 2 ORF: 1 LEN: 657 | | | |
| 1244 | 2431 | Similar to gi\|7258378\|emb\|CAB77594.1\|putative | 4301 | | 5681 |
| | | protein [Arabidopsis thaliana] | | | |
| 1043 | | Similar to gi\|421918\|pir\|\|PQ0549 acid phosphatase-1 | | | 5316 |
| | | (EC 3.1.3.-) - tomato (fragment) | | | |
| 1219 | 2415 | Similar to gi\|8885579\|dbj\|BAA97509.1\|receptor-like | 3303, 3232 | | |
| | | (protein kinase [Arabidopsis thaliana] | | | |
| 1387 | | Similar to gi\|9229506\|dbj\|BAB00011.1\| | 4541 | 5216 | 5811 |
| | | gene id: MIL23.18˜similar to unknown protein | | | |
| | | (gb\|AAB61516.1) [Arabidopsis thaliana] | | | |
| 1210 | 2408 | Open Reading Frame OS_ORF019147 HTC128421- | | | |
| | | A01.R.36 FRAME: −2 ORF: 8 LEN: 849 | | | |
| 1212 | | Open Reading Frame OS_ORF017514 HTC116489- | 3017, 3205, | | |
| | | A01.F.13 FRAME: −1 ORF: 13 LEN: 1107 | 3018, 3016 | | |
| 1497 | | Similar to gi\|4895168\|gb\|AAD32756.1\|AC007662_1 | | | |
| | | putative replication protein A1 [Arabidopsis thaliana] | | | |
| 1184 | | Similar to gi\|508545\|gb\|AAA76580.1\|zein | 3231 | | |
| 1128 | | Open Reading Frame OS_ORF007317 HTC043588- | | | |
| | | A01.30 FRAME: −3 ORF: 9 LEN: 1224 | | | |
| 1192 | 2399 | Similar to gi\|2827630\|emb\|CAA16582.1\|putative | 3195, 3194, | | |
| | | protein [Arabidopsis thaliana] | 2888 | | |

[0685] TABLE 5
SEQ ID NOs and corresponding description for Oryza genes which are expressed
in an embryo-specific manner and further the SEQ ID NOs for the corresponding
homologous sequences found in wheat, banana and maize.

| | | | | | |
|---|---|---|---|---|---|
| ORF | Promo | | | Bana | Maize |
| (SEQ | (SEQ | | Wheat | (SEQ | (SEQ |
| ID) | ID) | Description | (SEQ ID) | ID) | ID) |

Embryo

| | | | | | |
|---|---|---|---|---|---|
| 1079 | 2315 | Similar to NEPU_THEVU Q08751 | 3665, 4214, | 4972 | 5604 |
| | | THERMOACTINOMYCES VULGARIS. | 3702, 3704, | | |
| | | NEOPULLULANASE (EC 3.2.1.135) (ALPHA- | 3663, 3695, | | |
| | | AMYLASE II). | 3701, 3673, | | |
| | | | 3705, 3700, | | |
| | | | 3667, 3703, | | |
| | | | 3698, 3672, | | |
| | | | 3680, 3697, | | |
| | | | 3699, 4215, | | |
| | | | 3682, 3674, | | |
| | | | 3664, 3681, | | |
| | | | 3666, 2978, | | |
| | | | 3181 | | |
| 1412 | | Similar to gi\|7268365\|emb\|CAB78658.1\| pore protein | 2958 | | |
| | | homolog [Arabidopsis thaliana] | | | |
| 1294 | | Similar to gi\|804946\|emb\|CAA85389.1\| acyl-(acyl | 3468, 3467 | 4966 | 5824 |
| | | carrier protein) thioesterase [Arabidopsis thaliana] | | | |
| 1346 | | Similar to gi\|3550661\|emb\|CAA04670.1\| 39 kDa EF- | 4156 | | 5552 |
| | | Hand containing protein [Solanum tuberosum] | | | |
| 1534 | 2615 | Similar to gi\|4140257\|emb\|CAA10352.1\| LEA-like | | | 5805 |
| | | protein [Arabidopsis thaliana] | | | |
| 1325 | | Similar to GPDA_CUPLA P52425 CUPHEA | | | |
| | | LANCEOLATA. GLYCEROL-3-PHOSPHATE | | | |
| | | DEHYDROGENASE (NAD+) (EC 1.1.1.8). | | | |
| 1276 | | Similar to YDIB_HAEIN P44774 HAEMOPHILUS | 3359 | 5082 | 5679 |
| | | INFLUENZAE. HYPOTHETICAL PROTEIN HI0607. | | | |
| 1352 | 2481 | Similar to AGI2_WHEAT P02876 TRITICUM | 4566, 4221 | 4879 | 5466 |
| | | AESTIVUM (WHEAT). AGGLUTININ ISOLECTIN | | | |
| | | 2 PRECURSOR (WGA2) (ISOLECTIN D). | | | |
| 1285 | | Similar to gi\|7270231\|emb\|CAB80001.1\| putative | 3719, 2897 | | |
| | | pyrophosphate-fructose-6-phosphate 1- | | | |
| | | phosphotransferase [Arabidopsis thaliana] | | | |
| 1233 | | Similar to YDB3_SCHPO Q10356 | 4321, 4320 | | |
| | | SCHIZOSACCHAROMYCES POMBE (FISSION | | | |
| | | YEAST). HYPOTHETICAL 21.1 KD PROTEIN | | | |
| | | C22E12.03C IN CHROMOSOME I. | | | |
| 1588 | 2665 | Similar to gi\|7269937\|emb\|CAB81030.1\| putative | | | |
| | | protein [Arabidopsis thaliana] | | | |
| 1223 | 2418 | Similar to gi\|5059025\|gb\|AAD38873.1\|AF110382_1 3- | 2720 | | 5347 |
| | | hydroxy-3-methylglutaryl-coenzyme A reductase | | | |
| | | [Oryza sativa] | | | |
| 1207 | | Similar to gi\|6692109\|gb\|AAF24574.1\|AC007764_16 | | 4844 | 5614 |
| | | F22C12.18 [Arabidopsis thaliana] | | | |
| 1166 | | Similar to gi\|1247314\|emb\|CAA01765.1\| ACC34 | 3261, 3293 | | 5286 |
| | | ACCase [Zea mays] | | | |
| 1568 | 2647 | Similar to PER_SYNY3 P27320 SYNECHOCYSTIS | 3710, 3707, | | |
| | | SP. (STRAIN PCC 6803). FERREDOXIN I. | 3709, 4495 | | |
| 1567 | 2646 | Similar to gi\|6091768\|gb\|AAF03478.1\|AC009327_17 | | | 5518 |
| | | hypothetical protein [Arabidopsis thaliana] | | | |
| 1307 | | Similar to VV_PHODV P35941 PHOCINE | 3429, 3428 | 4979 | 5706 |
| | | DISTEMPER VIRUS (PDV). NONSTRUCTURAL | | | |
| | | PROTEIN V. | | | |
| 1293 | | “““ Similar to KC21_SCHPO P40231 | 3188 | 5063 | |
| | | SCHIZOSACCHAROMYCES POMBE (FISSION | | | |
| | | YEAST). CASEIN KINASE II, ALPHA CHAIN (CK | | | |
| | | II) (EC 2.7.1.37). ””” | | | |
| 1310 | | Similar to TAL1_MOUSE Q93092 P70358 MUS | 3015, 3014, | | |
| | | MUSCULUS (MOUSE). TRANSALDOLASE (EC | 3013 | | |
| | | 2.2.1.2). | | | |
| 1518 | 2599 | Open Reading Frame OS_ORF012554 HTC078773- | | | |
| | | A01.17 FRAME: −2 ORF: 7 LEN: 927 | | | |
| 1222 | 2417 | Similar to gi\|4512698\|gb\|AAD21751.1\| unknown | 4636, 3440, | 4962 | |
| | | protein [Arabidopsis thaliana] | 3033 | | |
| 1586 | 2663 | Similar to gi\|3702336\|gb\|AAC62893.1\| 3-methyl-2- | | | 5849 |
| | | oxobutanoate hydroxy-methyl-transferase [Arabidopsis | | | |
| | | thaliana] | | | |
| 1250 | | Similar to gi\|9294584\|dbj\|BAB02865.1\| | 2846, 4176, | 4824 | |
| | | gb\|AAF08583.1˜gene_id: MFJ20.18˜similar to | 2847, 4175 | | |
| | | unknown protein [Arabidopsis thaliana] | | | |
| 1382 | | Similar to gi\|8778307\|gb\|AAF79316.1\|AC002304_9 | | | |
| | | F14J16.15 [Arabidopsis thaliana] | | | |
| 1197 | 2401 | Similar to AG84_MYCLE P46815 | | | |
| | | MYCOBACTERIUM LEPRAE. ANTIGEN 84. | | | |
| 1394 | | Similar to ADX_CHICK P13216 GALLUS GALLUS | | 4815 | 5357 |
| | | (CHICKEN). ADRENODOXIN PRECURSOR | | | |
| | | (ADRENAL FERREDOXIN) (FRAGMENT). | | | |
| 1584 | 2661 | Similar to gi\|2245140\|emb\|CAB10561.1\| SUPERMAN | | | |
| | | like protein [Arabidopsis thaliana] | | | |
| 1421 | 2514 | Similar to gi\|3582319\|gb\|AAC35216.1\| unknown | | | 5419 |
| | | protein [Arabidopsis thaliana] | | | |
| 1271 | 2446 | Similar to THIJ_ECOLI Q46948 ESCHERICHIA | 4319, 4137, | | 5347 |
| | | COLI. 4-METHYL-5(B-HYDROXYETHYL)- | 4321, 3479, | | |
| | | THIAZOLE MONOPHOSPHATE | 4320, 4136, | | |
| | | BIOSYNTHESISENZYME. | 2745 | | |
| 1434 | | Similar to gi\|3080367\|emb\|CAA18624.1\| hypothetical | | | |
| | | protein [Arabidopsis thaliana] | | | |
| 1399 | | Similar to ABP4_MAIZE P33488 ZEA MAYS | | | 5445 |
| | | (MAIZE). AUXIN-BINDING PROTEIN 4 | | | |
| | | PRECURSOR (ABP). | | | |
| 1410 | | Similar to gi\|4586118\|emb\|CAB40954.1\| putative | | | 5358 |
| | | protein [Arabidopsis thaliana] | | | |
| 1191 | | Open Reading Frame OS_ORF017317 HTC115428- | | | 5232 |
| | | A01.3 FRAME: −1 ORF: 3 LEN: 732 | | | |
| 1563 | 2642 | Similar to gi\|6539566\|dbj\|BAA88183.1\| Similar to | 4551, 4552 | | |
| | | phosphoribosyl-ATP pyrophosphohydrolase | | | |
| | | (AB006082) [Oryza sativa] | | | |
| 1181 | 2393 | Similar to gi\|7485913\|pir\|\|T00906 hypothetical protein | 4560, 3029, | 4995 | 5829 |
| | | F21B7.20 - Arabidopsis thaliana | 4559, 4607, | | |
| | | | 4606 | | |
| 1491 | 2574 | Similar to gi\|7523392\|emb\|CAB86450.1\| putative | 4405, 4406 | 5070 | 5361 |
| | | protein [Arabidopsis thaliana] | | | |
| 1378 | | Similar to gi\|4581182\|gb\|AAD24665.1\|AC006220_21 | | | |
| | | hypothetical protein [Arabidopsis thaliana] | | | |
| 1535 | 2616 | Similar to gi\|2583128\|gb\|AAB82637.1\| hypothetical | 2722, 2721, | | |
| | | protein [Arabidopsis thaliana] | 2970, 2995 | | |
| 1204 | 2406 | Similar to CLPB_SYNY3 P74361 SYNECHOCYSTIS | 2859, 2933, | | 5799 |
| | | SP. (STRAIN PCC 6803). CLPB PROTEIN. | 4641, 2858, | | |
| | | | 2857, 2971 | | |
| 1406 | | “““ Similar to gi\|7076784\|emb\|CAB75899.1\| 2- | | | |
| | | oxoglutarate dehydrogenase, E1 subunit-like protein | | | |
| | | [Arabidopsis thaliana] “““ | | | |
| 1541 | 2622 | Similar to ENP2_TORCA P14401 TORPEDO | | | 5566 |
| | | CALIFORNICA (PACIFIC ELECTRIC RAY). | | | |
| | | ELECTROMOTOR NEURON-ASSOCIATED | | | |
| | | PROTEIN 2 (FRAGMENT). | | | |
| 1282 | 2451 | Open Reading Frame OS_ORF019538 HTC131716- | | | 5890 |
| | | A01.11 FRAME: 2 ORF: 1 LEN: 1137 | | | |
| 1228 | | Similar to gi\|1839244\|gb\|AAB46988.1\| EGF receptor | 2855, 2854, | 4910 | 5869 |
| | | like protein [Arabidopsis thaliana] | 3691, 2959 | | |
| 1290 | | Open Reading Frame OS_ORF007256 ST(R) | | | |
| | | HTC043276-A01.F.9 FRAME: 3 ORF: 8 LEN: 555 | | | |
| 1573 | 2650 | Similar to gi\|8778489\|gb\|AAF79497.1\|AC002328_5 | | | |
| | | F20N2.12 [Arabidopsis thaliana] | | | |
| 1500 | 2581 | Similar to gi\|7488434\|pir\|\|T06699 zinc finger protein | 3190, 3100, | | |
| | | T29H11.50 - Arabidopsis thaliana | 3893 | | |
| 1193 | | Similar to gi\|3600048\|gb\|AAC35535.1\| similar to | | | |
| | | hypothetical proteins in Schizosaccharomyces pombe | | | |
| | | (GB: Z98533) and C. elegans (GB: Z48334 and Z78419) | | | |
| | | [Arabidopsis thaliana] | | | |
| 1594 | | Similar to gi\|4337176\|gb\|AAD18097.1\| T31J12.4 | 4653, 2811, | | |
| | | [Arabidopsis thaliana] | 4654 | | |
| 1392 | 2499 | Similar to YSV4_CAEEL Q10010 | | 5176 | 5918 |
| | | CAENORHABDITIS ELEGANS. HYPOTHETICAL | | | |
| | | 26.6 KD PROTEIN T19C3.4 IN CHROMOSOME III. | | | |
| 1445 | 2536 | Open Reading Frame OS_ORF011257 HTC069347- | | | |
| | | A01.F.8 FRAME: −1 ORF: 1 LEN: 786 | | | |
| 1259 | | Open Reading Frame containing a Sage tag sequence | 2895, 3493 | | |
| | | near 3 end OS_ORF006433 ST(F) HTC038577- | | | |
| | | A01.35 FRAME: −3 ORF: 29 LEN: 675 | | | |
| 1501 | 2582 | Open Reading Frame containing a Sage tag sequence | 4587, 4586 | | 5919 |
| | | near 3 end OS_ORF012155 ST(F) HTC075889- | | | |
| | | A01.R.16 FRAME: 2 ORF: 1 LEN: 573 | | | |
| 1321 | 2472 | Similar to gi\|4895195\|gb\|AAD32782.1\|AC007661_19 | 2781 | 4790 | 5843 |
| | | putative mitochondrial carrier protein [Arabidopsis | | | |
| | | thaliana] | | | |
| 1440 | 2532 | Similar to YPOL_IPNVJ P22931 INFECTIOUS | | | |
| | | PANCREATIC NECROSIS VIRUS (SEROTYPE | | | |
| | | JASPER) (IPNV). HYPOTHETICAL 17.3 KD | | | |
| | | PROTEIN (SMALL ORF). | | | |
| 1179 | | Similar to gi\|4467146\|emb\|CAB37515.1\| galactosidase | 4284 | 4784 | 5691 |
| | | like protein [Arabidopsis thaliana] | | | |
| 1262 | 2441 | Similar to gi\|169775\|gb\|AAA33897.1\|alpha-amylase | 3665, 4214, | | 5521 |
| | | precursor (EC 3.2.1.1) | 3663, 3673, | | |
| | | | 3702, 3695, | | |
| | | | 3704, 3701, | | |
| | | | 3667, 3705, | | |
| | | | 3700, 3703, | | |
| | | | 3698, 3672, | | |
| | | | 3680, 3697, | | |
| | | | 4215, 3699, | | |
| | | | 3664, 3674, | | |
| | | | 3682, 3666, | | |
| | | | 3681 | | |
| 1175 | 2388 | Open Reading Frame OS_ORF014527 HTC093803- | 3497, 2824, | | |
| | | A01.F.24 FRAME: 1 ORF: 21 LEN: 1272 | 2913 | | |
| 1426 | 2519 | Similar to gi\|6572079\|emb\|CAB63022.1\|putative | 3309 | | 5865 |
| | | protein [Arabidopsis thaliana] | | | |
| 1190 | 2398 | Similar to UBPT_CAEEL Q17361 | | | |
| | | CAENORHABDITIS ELEGANS. QUEUINE TRNA- | | | |
| | | RIBOSYLTRANSFERASE (EC 2.4.2.29) (TRNA- | | | |
| | | GUANINETRANSGLYCOSYLASE) (GUANINE | | | |
| | | INSERTION ENZYME). | | | |
| 1540 | 2621 | Similar to gi\|685234\|emb\|CAA56426.1\|H1 | | | |
| | | [Arabidopsis thaliana] | | | |
| 1366 | 2485 | Similar to VIV_ORYSA P37398 ORYZA SATIVA | | | 5844 |
| | | (RICE). VIVIPAROUS PROTEIN HOMOLOG. | | | |
| 1318 | 2470 | Similar to ILVE_METJA Q58414 | 2780, 2779 | | 5836 |
| | | METHANOCOCCUS JANNASCHII. PUTATIVE | | | |
| | | BRANCHED-CHAIN AMINO ACID | | | |
| | | AMINOTRANSFERASE (EC | | | |
| | | 2.6.1.42)(TRANSAMINASE B) (BCAT). | | | |
| 1248 | 2435 | “““ Similar to gi\|3176677\|gb\|AAC18800.1\| Similar to S. | 3865, 3866 | 4833 | |
| | | cerevisiae SIK1P protein, A_TM021B04.13 from A. | | | |
| | | thaliana BAC gb\|AF007271. [Arabidopsis thaliana] ””” | | | |
| 1371 | 2490 | Similar to gi\|7486436\|pir\|\|T02408 hypothetical protein | | 4924 | 5904 |
| | | F4I1.34 - Arabidopsis thaliana | | | |
| 1247 | 2434 | Similar to PYR5_DROME Q01637 Q24221 | 4513, 4512, | 5105 | 5585 |
| | | DROSOPHILA MELANOGASTER (FRUIT FLY). | 4511 | | |
| | | URIDINE 5-MONOPHOSPHATE SYNTHASE | | | |
| | | (UMP SYNTHASE) | | | |
| | | (OROTATEPHOSPHORIBOSYLTRANSFERASE | | | |
| | | (EC 2.4.2.10) AND OROTIDINE 5 - | | | |
| | | PHOSPHATEDECARBOXYLASE (EC 4.1.1.23)) | | | |
| | | (RUDIMENTARY-LIKE PROTEIN). | | | |
| 1245 | 2432 | Similar to ORYB_ORYSA P25777 ORYZA SATIVA | 3319, 3318, | | 5472 |
| | | (RICE). ORYZAIN BETA CHAIN PRECURSOR (EC | 3942, 3943, | | |
| | | 3.4.22.-). | 3939 | | |
| 1312 | 2466 | “““ Similar to gi\|6063552\|dbj\|BAA85412.1\| ESTs | 4545 | | 5540 |
| | | AU065232(E60855), C23624(S1554), | | | |
| | | AU078241(E60855) correspond to a region of the | | | |
| | | predicted gene.; similar to putative adenylate kinase. | | | |
| | | (AC005896) [Oryza sativa] ””” | | | |
| 1577 | 2654 | Open Reading Frame OS_ORF001833 HTC010638- | | | |
| | | A01.22 FRAME: 1 ORF: 12 LEN: 618 | | | |
| 1430 | 2523 | Open Reading Frame OS_ORF018292 HTC121996- | | | |
| | | A01.44 FRAME: −2 ORF: 18 LEN: 1551 | | | |
| | | Similar to ADX_SHEEP P29330 OVIS ARIES | | | |
| | | (SHEEP). ADRENODOXIN (ADRENAL | | | |
| | | FERREDOXIN). | | | |
| 1451 | 2541 | Similar to gi\|8843778\|dbj\|BAA97326.1\| | | | 5380 |
| | | emb\|CAB85555.1˜gene_id: MZN1.2˜similar to | | | |
| | | unknown protein [Arabidopsis thaliana] | | | |
| 1401 | | Similar to LAMC_DROME Q03427 DROSOPHILA | | | |
| | | MELANOGASTER (FRUIT FLY). LAMIN C (PG-IF). | | | |
| 1528 | 2609 | Similar to YK67_YEAST P36163 | | | |
| | | SACCHAROMYCES CEREVISIAE (BAKER S | | | |
| | | YEAST). HYPOTHETICAL 35.8 KD PROTEIN IN | | | |
| | | PRP16-SRP40 INTERGENIC REGION. | | | |

[0686] TABLE 6
SEQ ID NOs and corresponding description for Oryza genes which are expressed
in a leaf- and stem-specific manner and further the SEQ ID NOs for the corresponding
homologous sequences found in wheat, banana and maize.

| | | | | | |
|---|---|---|---|---|---|
| ORF | Promo | | | Bana | Maize |
| (SEQ | (SEQ | | Wheat | (SEQ | (SEQ |
| ID) | ID) | Description | (SEQ ID) | ID) | ID) |

Leaf/stem (green-tissue)

| | | | | | |
|---|---|---|---|---|---|
| 402 | | Similar to gi\|6633822\|gb\|AAF19681.1\|AC009519_15 | | | 5446 |
| | | F1N19.25 [Arabidopsis thaliana] | | | |
| 404 | 1887 | Similar to gi\|4567284\|gb\|AAD23697.1\|AC006841_30 | 4382, 4381 | | |
| | | unknown protein [Arabidopsis thaliana] | | | |
| 400 | | Similar to EFG_THEMA P38525 THERMOTOGA | 3164, 3420, | 4973 | |
| | | MARITIMA. ELONGATION FACTOR G (EF-G). | 3421 | | |
| 399 | | Similar to gi\|4164416\|emb\|CAA10640.1\| ferredoxin | 3355, 3294, | 4942 | |
| | | dependent-glutamate synthase Fd-Gogat [Oryza sativa] | 3356, 3354 | | |
| 401 | | Similar to gi\|2331139\|gb\|AAB66888.1\| 2- | 4237, 3069, | 5027 | 5525 |
| | | oxoglutarate/malate translocator [Oryza sativa] | 4238, 4236 | | |
| 403 | 1886 | Similar to gi\|9247022\|gb\|AAF86253.1\|AF272040_1 | | 5222 | 5417 |
| | | timing of CAB expression 1-like protein [Arabidopsis | | | |
| | | thaliana] | | | |
| 413 | | Similar to gi\|2160148\|gb\|AAB60770.1\| EST gb\|H37044 | | | 5772 |
| | | comes from this gene. [Arabidopsis thaliana] | | | |
| 411 | | Similar to gi\|9293944\|dbj\|BAB01847.1\| contains | | | |
| | | similarity to 30s ribosomal protein | | | |
| | | s1˜gene_id: MYM9.4 [Arabidopsis thaliana] | | | |
| 414 | | Similar to gi\|1323698\|gb\|AAC49434.1\| DCL | 3310 | | 5759 |
| 415 | 1889 | Similar to gi\|2317900\|gb\|AAB66369.1\| Sali3-2 | | | |
| | | [Glycine max] | | | |
| 407 | | Similar to gi\|5903052\|gb\|AAD55611.1\|AC008016_21 | | | 5275 |
| | | Contains PF\|00561 alpha/beta hydrolase fold. | | | |
| | | [Arabidopsis thaliana] | | | |
| 410 | | Similar to gi\|6573763\|gb\|AAF17683.1\|AC009243_10 | | | |
| | | F28K19.14 [Arabidopsis thaliana] | | | |
| 416 | 1890 | Similar to gi\|7572943\|emb\|CAA60774.1\| ribosomal | 3390 | 4931 | 5880 |
| | | protein L35 [Arabidopsis thaliana] | | | |
| 409 | | Similar to gi\|4454459\|gb\|AAD20906.1\| unknown | 4703, 4705, | 4899 | |
| | | protein [Arabidopsis thaliana] | 4704 | | |
| 408 | | Similar to RK1_PORPU P51338 PORPHYRA | 3152 | 4849 | 5628 |
| | | PURPUREA. CHLOROPLAST 50S RIBOSOMAL | | | |
| | | PROTEIN L1. | | | |
| 412 | 1888 | Similar to YAAE_BACSU P37528 BACILLUS | | 5042 | 5292 |
| | | SUBTILIS. HYPOTHETICAL 21.4 KD PROTEIN IN | | | |
| | | DACA-SERS INTERGENIC REGION. | | | |
| 405 | | Similar to gi\|437020\|gb\|AAA34187.1\| phytoene | 4668, 4667, | 5219 | 5669 |
| | | synthase | 4227 | | |
| 406 | | Similar to gi\|6006360\|dbj\|BAA84790.1\| Similar to 1- | | | 5451 |
| | | aminocyclopropane-1-carboxylate synthase (U35779) | | | |
| | | [Oryza sativa] | | | |
| 439 | | Similar to gi\|4512678\|gb\|AAD21732.1\| unknown | | 4953 | |
| | | protein [Arabidopsis thaliana] | | | |
| 421 | | Open Reading Frame containing a Sage tag sequence | 3313, 3000, | 4861 | 5274 |
| | | near 3 end OS_ORF009925 ST(F) HTC059815- | 3312, 3980, | | |
| | | A01.R.6 FRAME: −1 ORF: 3 LEN: 513 | 3977, 4544, | | |
| | | | 3979, 3976, | | |
| | | | 2999, 3978 | | |
| 446 | 1902 | Open Reading Frame OS_ORF005313 HTC031638- | | | |
| | | A01.6 FRAME: 1 ORF: 3 LEN: 1050 | | | |
| 448 | 1904 | Similar to gi\|7267268\|emb\|CAB81051.1\| 3 (2 ), 5 - | | | |
| | | BISPHOSPHATE NUCLEOTIDASE-like protein | | | |
| | | [Arabidopsis thaliana] | | | |
| 419 | | Similar to gi\|5734746\|gb\|AAD50011.1\|AC007651_6 | 2896, 4426 | 4994 | |
| | | Similar to translation initiation factor IF2 [Arabidopsis | | | |
| | | thaliana] | | | |
| 431 | | Similar to gi\|5903095\|gb\|AAD55653.1\|AC008017_26 | | | |
| | | Unknown protein [Arabidopsis thaliana] | | | |
| 424 | | Similar to gi\|7209640\|dbj\|BAA92288.1\| SigF | 4571, 4570 | | 5777 |
| | | [Arabidopsis thaliana] | | | |
| 451 | 1907 | Similar to gi\|6646755\|gb\|AAF21067.1\|AC013258_5 | 3265 | | |
| | | unknown protein [Arabidopsis thaliana] | | | |
| 428 | | Similar to YX11_MYCTU Q10806 Q10805 | | | |
| | | MYCOBACTERIUM TUBERCULOSIS. | | | |
| | | HYPOTHETICAL 29.6 KD PROTEIN | | | |
| | | CY274.11C/10C. | | | |
| 430 | | Similar to gi\|8954044\|gb\|AAF82218.1\|AC067971_26 | | 4794 | |
| | | Contains similarity to serine-threonine protein | | | |
| | | phosphatase - fission yeast from Schizosaccharomyces | | | |
| | | pombe gb\|AL031179. ESTs gb\|T88261, gb\|T04457, | | | |
| | | gb\|AA585938, gb\|AA650911 and gb\|AA598061 come | | | |
| | | from this ge | | | |
| 450 | 1906 | Similar to gi\|8778304\|gb\|AAF79313.1\|AC002304_6 | 3019, 3209, | | 5523 |
| | | F14J16.9 [Arabidopsis thaliana] | 3210 | | |
| 438 | | Similar to gi\|7770346\|gb\|AAF69716.1\|AC016041_21 | 4265 | | |
| | | F27J15.15 [Arabidopsis thaliana] | | | |
| 436 | | Similar to PILB_NEIGO P14930 NEISSERIA | 2771, 2772, | 5079 | 5605 |
| | | GONORRHOEAE. PILB PROTEIN. | 2770 | | |
| 422 | 1893 | Open Reading Frame OS_ORF008685 HTC052101- | 4017, 4018 | 5077 | 5268 |
| | | A01.R.17 FRAME: −3 ORF: 9 LEN: 1035 | | | |
| 417 | 1891 | Similar to gi\|4455367\|emb\|CAB36777.1\| putative | | | |
| | | protein [Arabidopsis thaliana] | | | |
| 433 | 1897 | Similar to gi\|7981380\|emb\|CAB91874.1\| myb-related | | 4786 | |
| | | protein [Lycopersicon esculentum] | | | |
| 456 | 1912 | Similar to RL34_MYCGE P47704 MYCOPLASMA | 4688, 4687 | | |
| | | GENITALIUM. 50S RIBOSOMAL PROTEIN L34. | | | |
| 453 | 1909 | Similar to gi\|6642665\|gb\|AAF20245.1\|AC015450_6 | 3932 | | 5370 |
| | | putative cinnamoyl-CoA reductase [Arabidopsis | | | |
| | | thaliana] | | | |
| 426 | 1895 | Similar to gi\|3386548\|gb\|AAC28391.1\| H-protein | 3509, 3510 | | 5482 |
| | | promoter binding factor-2b [Arabidopsis thaliana] | | | |
| 418 | 1892 | Similar to gi\|7141304\|gb\|AAF37281.1\|RSH1 | | | |
| | | [Arabidopsis thaliana] | | | |
| 435 | 1899 | Similar to gi\|6358779\|gb\|AAF07360.1\|AC010852_1 | 4525, 4526, | 5175 | 5499 |
| | | unknown protein [Arabidopsis thaliana] | 4523 | | |
| 447 | 1903 | Open Reading Frame OS_ORF019640 HTC132705- | 4057, 2760, | 5229 | |
| | | A01.R.14 FRAME: −3 ORF: 3 LEN: 888 | 2759 | | |
| 437 | | Similar to gi\|2462839\|gb\|AAB72174.1\|unknown | 4172, 4171 | 5021 | 5615 |
| | | protein [Arabidopsis thaliana] | | | |
| 429 | | Similar to gi\|8777302\|dbj\|BAA96892.1\|translation | 4615, 4616 | 4817 | |
| | | releasing factor RF-2 [Arabidopsis thaliana] | | | |
| 449 | 1905 | Similar to SYT_HELPY P56071 HELICOBACTER | 2687, 2741 | 5059 | 5444 |
| | | PYLORI (CAMPYLOBACTER PYLORI). | | | |
| | | THREONYL-TRNA SYNTHETASE (EC 6.1.1.3) | | | |
| | | (THREONINE--TRNA LIGASE)(THRRS). | | | |
| 455 | 1911 | Open Reading Frame OS_ORF002259 HTC013114- | | | |
| | | A01.10 FRAME: 1 ORF: 7 LEN: 792 | | | |
| 423 | | Similar to gi\|3746964\|gb\|AAC64139.1\| signal | 2744 | 4950 | |
| | | recognition particle 54 kDa subunit precursor | | | |
| | | [Arabidopsis thaliana] | | | |
| 427 | | Similar to gi\|6016707\|gb\|AAF01533.1\|AC009325_3 | 2732, 2730, | | |
| | | putative thylakoid lumen rotamase [Arabidopsis | 2731 | | |
| | | thaliana] | | | |
| 432 | 1896 | Open Reading Frame OS_ORF014047 HTC090350- | 4316, 4314, | 5180 | |
| | | A01.F.8 FRAME: −3 ORF: 3 LEN: 633 | 4315 | | |
| 441 | | Similar to gi\|4531443\|gb\|AAD22128.1\|AC006224_10 | 3126, 3127 | 5139 | 5551 |
| | | 50S ribosomal protein L3 [Arabidopsis thaliana] | | | |
| 425 | 1894 | Similar to ENO1_MAIZE P26301 ZEA MAYS | 3798, 3797 | 5137 | 5567 |
| | | (MAIZE). ENOLASE 1 (EC 4.2.1.11) (2- | | | |
| | | PHOSPHOGLYCERATE DEHYDRATASE 1) (2- | | | |
| | | PHOSPHO-D-GLYCERATE HYDRO-LYASE 1). | | | |
| 452 | 1908 | Similar to gi\|6041833\|gb\|AAF02142.1\|AC009853_2 | | | |
| | | unknown protein [Arabidopsis thaliana] | | | |
| 442 | | Similar to gi\|133028\|sp\|P25864\|RK9_ARATH 50S | | | |
| | | RIBOSOMAL PROTEIN L9, CHLOROPLAST | | | |
| | | PRECURSOR (CL9) | | | |
| 434 | 1898 | Similar to gi\|3157934\|gb\|AAC17617.1\| Similar to | | 4776 | 5800 |
| | | hypothetical protein F09E5.8 gb\|U37429 from C. | | | |
| | | elegans. ESTs gb\|T42019 and gb\|N97000 come from | | | |
| | | this gene. [Arabidopsis thaliana] | | | |
| 443 | 1900 | Open Reading Frame OS_ORF003358 HTC019440- | | | |
| | | A01.13 FRAME: −2 ORF: 3 LEN: 702 | | | |
| 440 | | Similar to YC37_PORPU P51191 PORPHYRA | 3036 | | 5346 |
| | | PURPUREA. HYPOTHETICAL 20.0 KD PROTEIN | | | |
| | | YCF37 (ORF173). | | | |
| 445 | 1901 | Open Reading Frame OS_ORF018286 HTC121926- | | | |
| | | A01.R.44 FRAME: 3 ORF: 5 LEN: 1557 | | | |
| 444 | | Open Reading Frame OS_ORF000886 ST(R) | | | |
| | | HTC005025-A01.4 FRAME: −1 ORF: 3 LEN: 648 | | | |
| 454 | 1910 | Similar to RK24_PEA P11893 PISUM SATIVUM | 3159, 3158, | 4945 | |
| | | (GARDEN PEA). 50S RIBOSOMAL PROTEIN L24, | 3157 | | |
| | | CHLOROPLAST PRECURSOR (CL24). | | | |
| 420 | | Similar to gi\|3775987\|emb\|CAA09196.1\| RNA helicase | 2954 | | 5326 |
| | | [Arabidopsis thaliana] | | | |
| 458 | 1913 | Similar to YCB1_PSEDE P29943 PSEUDOMONAS | 2677 | | 5404 |
| | | DENITRIFICANS. HYPOTHETICAL 10.3 KD | | | |
| | | PROTEIN IN COBS 5 REGION (ORF1). | | | |
| 460 | 1914 | Similar to gi\|4732091\|gb\|AAD28599.1\|AF126742_1 | | 4918 | |
| | | bundle sheath defective protein 2 [Zea mays] | | | |
| 461 | 1915 | Similar to RK25_PEA P11892 PISUM SATIVUM | | | 5431 |
| | | (GARDEN PEA). 50S RIBOSOMAL PROTEIN CL25, | | | |
| | | CHLOROPLAST PRECURSOR. | | | |
| 464 | 1918 | Similar to ESL2_MYCPN P75311 MYCOPLASMA | | | 5494 |
| | | PNEUMONIAE. PUTATIVE ESTERASE/LIPASE 2 | | | |
| | | (EC 3.1.-.-). | | | |
| 463 | 1917 | Similar to gi\|22349\|emb\|CAA78772.1\| putative iojap | 4508, 4509, | 4920 | |
| | | protein [Zea mays] | 2894 | | |
| 457 | | Similar to gi\|4263509\|gb\|AAD15335.1\| hypothetical | | 5083 | |
| | | protein [Arabidopsis thaliana] | | | |
| 462 | 1916 | Similar to gi\|4468817\|emb\|CAB38218.1\| putative | 4079, 4077, | 4934 | |
| | | protein [Arabidopsis thaliana] | 4078, 4210, | | |
| | | | 4209 | | |
| 459 | | Similar to gi\|2244889\|emb\|CAB10310.1\| cytochrome | | 5131 | |
| | | P450 like protein [Arabidopsis thaliana] | | | |

[0687] TABLE 7
SEQ ID NOs and corresponding description for Oryza genes which are expressed
in a panicle-specific manner and further the SEQ ID NOs for the corresponding
homologous sequences found in wheat, banana and maize.

| | | | | | |
|---|---|---|---|---|---|
| ORF | Prom | | | Bana | Maize |
| SEQ | SEQ | | Wheat | (SEQ | (SEQ |
| ID | ID | Description | (SEQ ID) | ID) | ID) |

Panicle

| | | | | | |
|---|---|---|---|---|---|
| 503 | 1944 | Similar to gi\|6002797\|gb\|AAF00147.1\|AF149814_1 | 3260 | | 5783 |
| | | unknown [Oryza sativa] | | | |
| 737 | 2098 | Similar to gi\|7339700\|dbj\|BAA92905.1\| hypothetical | | | |
| | | protein [Oryza sativa] | | | |
| 689 | 2054 | Similar to gi\|6002790\|gb\|AAF00143.1\|AF149811_1 | 4480, 4680, | | |
| | | hypothetical protein [Oryza sativa] | 4681, 4310, | | |
| | | | 4311, 2733, | | |
| | | | 2734, 4309, | | |
| | | | 4479, 3240, | | |
| | | | 4478 | | |
| 514 | 1948 | Similar to H2B1_MAIZE P30755 ZEA MAYS | 3772, 3771, | 5189 | 5575 |
| | | (MAIZE). HISTONE H2B.1. | 4277, 4066, | | |
| | | | 3775, 4110, | | |
| | | | 4269, 4155, | | |
| | | | 3754, 4105, | | |
| | | | 3720, 4191, | | |
| | | | 4118, 3773, | | |
| | | | 4117, 3767, | | |
| | | | 4174, 4109, | | |
| | | | 3726, 3712, | | |
| | | | 4267, 3777, | | |
| | | | 4276, 4206, | | |
| | | | 3738, 3749, | | |
| | | | 4205, 4031, | | |
| | | | 3734, 4173, | | |
| | | | 3769, 4145, | | |
| | | | 3727, 4192, | | |
| | | | 4051, 4032, | | |
| | | | 4084, 4064, | | |
| | | | 3736, 4138, | | |
| | | | 4122, 4123, | | |
| | | | 4065, 4275, | | |
| | | | 3744, 4120, | | |
| | | | 4119, 4270, | | |
| | | | 3722, 4121 | | |
| 511 | | Similar to gi\|736716\|dbj\|BAA04695.1\| rice anther | | | 5889 |
| | | specific protein [Oryza sativa] | | | |
| 482 | | Similar to gi\|5679840\|emb\|CAB51833.1\|11332.4 | 3442, 3443, | 5106 | 5613 |
| | | [Oryza sativa] | 3441 | | |
| 723 | | Similar to gi\|1778444\|gb\|AAB40728.1\| putative protein | 3646, 3322, | 4878 | 5263 |
| | | kinase PK9 [Arabidopsis thaliana] | 4433, 3645, | | |
| | | | 3643, 3660, | | |
| | | | 3641, 3642, | | |
| | | | 3659, 3387, | | |
| | | | 3539, 2692, | | |
| | | | 3816, 2793 | | |
| 635 | | Similar to gi\|1771734\|emb\|CAA61106.1\| GB1 protein | | 4948 | 5713 |
| | | [Solanum tuberosum] | | | |
| 592 | | “““ Similar to gi\|1836024\|gb\|AAB46825.1\| | 3470, 3276, | | 5682 |
| | | Cel2 = cellulase 2 [Lycopersicon esculentum = tomatoes, | 3899 | | |
| | | Mill., cv. Castlemart, flower abscission zones, Peptide | | | |
| | | Partial, 169 aa] ””” | | | |
| 673 | 2040 | Similar to gi\|5852174\|emb\|CAB55412.1\| zhb0004.1 | | | |
| | | [Oryza sativa] | | | |
| 639 | | Similar to RECA_SPIME Q54428 SPIROPLASMA | 4360 | | |
| | | MELLIFERUM. RECA PROTEIN (FRAGMENT). | | | |
| 683 | 2049 | Similar to THGF_TOBAC P32026 NICOTIANA | | | |
| | | TABACUM (COMMON TOBACCO). FLOWER- | | | |
| | | SPECIFIC GAMMA-THIONIN PRECURSOR. | | | |
| 526 | 1959 | Similar to ZN85_HUMAN Q03923 HOMO SAPIENS | 3102, 3100 | | |
| | | (HUMAN). ZINC FINGER PROTEIN 85 (ZINC | | | |
| | | FINGER PROTEIN HPF4) (HTF1). | | | |
| | | Similar to gi\|3643596\|gb\|AAC42243.1\|hypothetical | | | |
| | | protein [Arabidopsis thaliana] | | | |
| 524 | 1957 | Similar to gi\|5430759\|gb\|AAD43159.1\|AC007504_14 | | | |
| | | Unknown Protein [Arabidopsis thaliana] | | | |
| 719 | 2084 | Similar to gi\|4007852\|emb\|CAA10349.1\|pollen | | | |
| | | allergen (group II) [Triticum aestivum] | | | |
| 770 | 2116 | Similar to LA52_LYCES P13447 LYCOPERSICON | | | 5441 |
| | | ESCULENTUM (TOMATO). ANTHER SPECIFIC | | | |
| | | LAT52 PROTEIN PRECURSOR. | | | |
| 616 | | Similar to gi\|2645170\|dbj\|BAA23618.1\| YY2 protein | | | |
| | | [Oryza sativa] | | | |
| 720 | 2085 | Similar to gi\|972513\|emb\|CAA90746.1\| pollen | | | |
| | | allergen-like protein [Triticum aestivum] | | | |
| 731 | 2094 | Similar to gi\|4105160\|gb\|AAD02278.1\| cell wall | 3120 | | 5560 |
| | | invertase Incw3 [Zea mays] | | | |
| 585 | | Similar to gi\|2894378\|emb\|CAA74910.1\| putative | 4383, 4385, | 4852 | |
| | | ribophorin I homologue [Hordeum vulgare] | 4384 | | |
| 497 | 1939 | Similar to gi\|1694892\|emb\|CAA57556.1\| cyclin [Oryza | | | |
| | | sativa] | | | |
| 509 | | Similar to gi\|6646756\|gb\|AAF21068.1\|AC013258_6 | | 4859 | |
| | | putative DNA-3-methyladenine glycosylase I | | | |
| | | [Arabidopsis thaliana] | | | |
| 688 | 2053 | Similar to V07K_PMV P20954 PAPAYA MOSAIC | 2725, 2866, | | 5860 |
| | | POTEXVIRUS (PMV). 7 KD PROTEIN (ORF 4). | 2865, 2724, | | |
| | | | 2973 | | |
| 670 | 2037 | Similar to YEA3_YEAST P40005 | 4041, 4040, | 4887 | |
| | | SACCHAROMYCES CEREVISIAE (BAKER S | 4042 | | |
| | | YEAST). HYPOTHETICAL 14.3 KD PROTEIN IN | | | |
| | | GCN4-WBP1 INTERGENIC REGION. | | | |
| 622 | | Similar to gi\|3695392\|gb\|AAC62794.1\| T2L5.6 gene | | | 5700 |
| | | product [Arabidopsis thaliana] | | | |
| 721 | 2086 | Similar to gi\|6728866\|gb\|AAF26939.1\|AC008113_10 | 3495, 3496 | | 5302 |
| | | F12A21.21 [Arabidopsis thaliana] | | | |
| 615 | 2015 | Similar to AROB_PSEAE P34002 PSEUDOMONAS | 4434, 4436, | 4939 | |
| | | AERUGINOSA. 3-DEHYDROQUINATE | 4435 | | |
| | | SYNTHASE (EC 4.6.1.3) (FRAGMENT). | | | |
| 472 | 1924 | Similar to gi\|2129665\|pir\|\|S65571 pattern formation | 4295, 4293, | 4858 | |
| | | protein GNOM - Arabidopsis thaliana | 4294 | | |
| 575 | 1995 | Similar to gi\|6002784\|gb\|AAF00140.1\|AF149808_1 | 2735, 2736, | 4988 | |
| | | hypothetical protein [Oryza sativa] | 2737 | | |
| 567 | 1990 | Similar to gi\|4468193\|emb\|CAB38030.1\| inosine | 4521, 4522, | 4872 | 5365 |
| | | monophosphate dehydrogenase [Glycine max] | 4520, 2980 | | |
| 577 | | “““ Similar to gi\|6498438\|dbj\|BAA87841.1\| EST | | | |
| | | C93513(C53164) corresponds to a region of the | | | |
| | | predicted gene.; Similar to Arabidopsis thaliana | | | |
| | | chromosome II BAC F5H14 genomic | | | |
| | | sequence, hypothetical protein. (AC006234) [Oryza | | | |
| | | sativa] ””” | | | |
| 718 | 2083 | Similar to gi\|7269452\|emb\|CAB79456.1\| putative | | | |
| | | peroxidase [Arabidopsis thaliana] | | | |
| 646 | 2028 | Similar to HCD2_MOUSE O08756 MUS | 3785, 3784, | | |
| | | MUSCULUS (MOUSE). 3-HYDROXYACYL-COA | 3786, 3783, | | |
| | | DEHYDROGENASE TYPE II (EC 1.1.1.35) | 3258, 3788, | | |
| | | (ENDOPLASMICRETICULUM-ASSOCIATED | 3782, 3787 | | |
| | | AMYLOID BETA-PEPTIDE BINDING PROTEIN). | | | |
| 584 | | Similar to gi\|4490341\|emb\|CAB38623.1\| putative | | 4840 | 5694 |
| | | protein [Arabidopsis thaliana] | | | |
| 518 | 1951 | Similar to gi\|4056436\|gb\|AAC98009.1\| EST | | | 5801 |
| | | gb\|AA650912 comes from this gene. [Arabidopsis | | | |
| | | thaliana] | | | |
| 583 | 2000 | Similar to gi\|7960739\|emb\|CAB92061.1\| putative | | 4862 | |
| | | protein [Arabidopsis thaliana] | | | |
| 552 | 1981 | “““ Similar to gi\|7630236\|dbj\|BAA94769.1\| Similar to | 2891, 3264 | | |
| | | Arabidopsis thaliana chromosome 4, BAC clone | | | |
| | | F4D11; putative myb-protein. (AL022537) [Oryza | | | |
| | | sativa] ””” | | | |
| 668 | 2036 | Similar to gi\|20310\|emb\|CAA78897.1\| pollen specific | 3178, 3177, | | 5441 |
| | | gene [Oryza sativa] | 3176 | | |
| 659 | 2032 | Similar to gi\|1167557\|gb\|AAA85863.1\| glycine-rich | | | 5468 |
| | | protein | | | |
| 539 | 1972 | Similar to DDX8_HUMAN Q14562 HOMO SAPIENS | 2947, 2691, | 5024 | |
| | | (HUMAN). PROBABLE ATP-DEPENDENT RNA | 3306 | | |
| | | HELICASE HRH1 (DEAH BOX PROTEIN 8). | | | |
| 487 | | Similar to DCP3_ORYSA P51849 ORYZA SATIVA | 4009, 4008, | 5184 | 5685 |
| | | (RICE). PYRUVATE DECARBOXYLASE | 4010, 4007, | | |
| | | ISOZYME 3 (EC 4.1.1.1) (PDC). | 4006, 3751, | | |
| | | | 3711, 3715, | | |
| | | | 3586 | | |
| 663 | | Similar to CB20_HUMAN P52298 HOMO SAPIENS | | | 5845 |
| | | (HUMAN). 20 KD NUCLEAR CAP BINDING | | | |
| | | PROTEIN (NCBP 20 KD SUBUNIT) (CBP20). | | | |
| 601 | | “““ Similar to TCPB_MOUSE P80314 MUS | 3966 | 5156 | |
| | | MUSCULUS (MOUSE). T-COMPLEX PROTEIN 1, | | | |
| | | BETA SUBUNIT (TCP-1-BETA) (CCT-BETA). ””” | | | |
| 608 | | Similar to gi\|940383\|dbj\|BAA08113.1\| GTP | 3030, 2752, | 4813 | 5925 |
| | | cyclohydrolase II [Arabidopsis thaliana] | 3463, 4400 | | |
| 544 | | Similar to gi\|7594515\|emb\|CAB88040.1\| putative | 3469, 4683, | | |
| | | protein [Arabidopsis thaliana] | 4682 | | |
| 612 | 2014 | Similar to gi\|3860247\|gb\|AAC73015.1\| putative dTDP- | 3844, 3839, | 5005 | 5370 |
| | | glucose 4-6-dehydratase [Arabidopsis thaliana] | 3595, 3837, | | |
| | | | 3843 | | |
| 641 | | Similar to gi\|4874313\|gb\|AAD31375.1\|AC006053_17 | 4468, 4469, | 4798 | |
| | | putative protein phosphatase 2C [Arabidopsis thaliana] | 4467 | | |
| 621 | | Similar to gi\|3128234\|gb\|AAC26714.1\| hypothetical | 2783 | 5126 | |
| | | protein [Arabidopsis thaliana] | | | |
| 609 | 2013 | Similar to AP47_MOUSE P35585 MUS MUSCULUS | 3800, 3799 | 4813 | 5925 |
| | | (MOUSE). CLATHRIN COAT ASSEMBLY | | | |
| | | PROTEIN AP47 (CLATHRIN COAT ASSOCIATED | | | |
| | | PROTEINAP47) (GOLGI ADAPTOR AP-1 47 KD | | | |
| | | PROTEIN) (HA1 47 KD SUBUNIT) | | | |
| | | (CLATHRINASSEMBLY PROTEIN ASSEMBLY | | | |
| | | PROTEIN COMPLEX 1 MEDIUM CHAIN). | | | |
| 551 | 1980 | “““ Similar to gi\|5091526\|dbj\|BAA78761.1\| ESTs | 4481, 4664, | | |
| | | C27722(C52692), AU058088(S0509) correspond to a | 4404, 4482 | | |
| | | region of the predicted gene.; Similar to Arabidopsis | | | |
| | | thaliana ribonucleoside-diphosphate reductase large | | | |
| | | subunit mRNA, complete cds. (AF092841) [Oryza | | | |
| | | sativa] ””” | | | |
| 712 | 2077 | Similar to gi\|4726112\|gb\|AAD28312.1\|AC006436_3 | 4553, 4555, | | 5373 |
| | | hypothetical protein [Arabidopsis thaliana] | 4554 | | |
| 695 | 2060 | Similar to gi\|2245128\|emb\|CAB10549.1\| peroxidase | | 5172 | 5596 |
| | | like protein [Arabidopsis thaliana] | | | |
| 636 | | Similar to gi\|6715737\|gb\|AAF26498.1\|AC016447_21 | | | 5333 |
| | | putative zinc linger protein [Arabidopsis thaliana] | | | |
| 629 | 2021 | Similar to AAPC_PENCL Q40784 PENNISETUM | 4283, 3458 | 4812 | 5320 |
| | | CILIARE (BUFFELGRASS). POSSIBLE | | | |
| | | APOSPORY-ASSOCIATED PROTEIN C. | | | |
| 499 | 1940 | Similar to gi\|2961437\|gb\|AAC05723.1\| MADS box | | 5225 | 5530 |
| | | protein [Oryza sativa] | | | |
| 574 | 1994 | Similar to PRVA_ESOLU P02628 ESOX LUCIUS | 4565, 3981, | 5048 | 5509 |
| | | (NORTHERN PIKE). PARVALBUMIN ALPHA. | 3517, 2914, | | |
| | | | 3170, 3518, | | |
| | | | 2864, 4055, | | |
| | | | 3292, 4620, | | |
| | | | 3369, 4621 | | |
| 505 | 1946 | Similar to gi\|3831445\|gb\|AAC69928.1\| putative rac | 3242, 3320 | | 5720 |
| | | GTPase activating protein [Arabidopsis thaliana] | | | |
| 658 | | Similar to gi\|7488300\|pir\|\|T01457 rho protein GDP- | | | 5504 |
| | | dissociation inhibitor homolog F24O1.19 - Arabidopsis | | | |
| | | thaliana | | | |
| 512 | | Similar to gi\|4741186\|emb\|CAB41852.1\| putative | | | |
| | | protein [Arabidopsis thaliana] | | | |
| 529 | 1962 | Similar to gi\|4454006\|emb\|CAA23059.1\| hypothetical | 3388, 3389 | | 5790 |
| | | protein [Arabidopsis thaliana] | | | |
| 680 | 2047 | Similar to gi\|4678204\|gb\|AAD26950.1\|AC007134_8 | 4617 | | 5278 |
| | | hypothetical protein [Arabidopsis thaliana] | | | |
| 642 | | Similar to gi\|8072394\|gb\|AAF71982.1\|AC013453_7 | 4447, 4446 | | |
| | | Putative cyclin [Arabidopsis thaliana] | | | |
| 664 | | Similar to gi\|6691219\|gb\|AAF24557.1\|AC007508_20 | 3789 | | 5553 |
| | | F1K23.4 [Arabidopsis thaliana] | | | |
| 533 | 1966 | Similar to gi\|2832357\|emb\|CAA74400.1\| HMG protein | | | 5533 |
| | | [Arabidopsis thaliana] | | | |
| 508 | | Similar to gi\|6553913\|gb\|AAF16578.1\|AC012329_2 | 4366 | | |
| | | unknown protein [Arabidopsis thaliana] | | | |
| 569 | 1992 | Similar to gi\|6630542\|gb\|AAF19561.1\|AC011708_4 | 3202, 2906, | | |
| | | hypothetical protein [Arabidopsis thaliana] | 3203, 4367, | | |
| | | | 3204 | | |
| 520 | 1953 | Similar to gi\|6642648\|gb\|AAF20229.1\|AC012395_16 | 4060 | | 5587 |
| | | unknown protein [Arabidopsis thaliana] | | | |
| 589 | 2002 | Similar to gi\|7363275\|dbj\|BAA93019.1\| hypothetical | 2827 | | 5917 |
| | | protein [Oryza sativa] | | | |
| 579 | 1997 | Similar to gi\|8247759\|dbj\|BAA96421.1\| GAMyb | 4428, 4698 | | 5269 |
| | | protein [Triticum aestivum] | | | |
| 623 | 2017 | Similar to gi\|3420299\|gb\|AAC33765.1\| jab1 protein | | 4949 | 5705 |
| | | [Oryza sativa subsp. indica] | | | |
| 602 | 2010 | Similar to gi\|3892045\|gb\|AAC78253.1\|AAC78253 | | 4785 | 5683 |
| | | putative zinc finger protein [Arabidopsis thaliana] | | | |
| 656 | | Similar to RL15_BACST P04452 BACILLUS | 2727, 2726 | 4819 | 5728 |
| | | STEAROTHERMOPHILUS. 50S RIBOSOMAL | | | |
| | | PROTEIN L15. | | | |
| 573 | 1993 | Similar to AMPE_RAT P50123 RATTUS | 3299 | | |
| | | NORVEGICUS (RAT). GLUTAMYL | | | |
| | | AMINOPEPTIDASE (EC 3.4.1 1.7) (EAP) | | | |
| | | (AMINOPEPTIDASE A) (APA)(FRAGMENT). | | | |
| 679 | 2046 | Similar to T2AG_DROME P52656 DROSOPHILA | | 5166 | 5496 |
| | | MELANOGASTER (FRUIT FLY). | | | |
| | | TRANSCRIPTION INITIATION FACTOR IIA | | | |
| | | GAMMA CHAIN (TFIIA P14 SUBUNIT)(TFIIA-14) | | | |
| | | (DTFIIA-S) (TFIIA-GAMMA). | | | |
| 678 | 2045 | Similar to gi\|9293905\|dbj\|BAB01808.1\| | | | 5791 |
| | | gene_id: MVE11.18˜unknown protein [Arabidopsis | | | |
| | | thaliana] | | | |
| 559 | 1984 | Similar to gi\|6573708\|gb\|AAF17628.1\|AC009978_4 | 3340 | 4783 | 5264 |
| | | T23E18.8 [Arabidopsis thaliana] | | | |
| 596 | 2007 | Similar to gi\|5734743\|gb\|AAD50008.1\|AC007651_3 | 3085 | 4870 | |
| | | Hypothetical Protein [Arabidopsis thaliana] | | | |
| 690 | 2055 | Similar to gi\|6957509\|gb\|AAF32431.1\| hypothetical | | | |
| | | protein [Arabidopsis thaliana] | | | |
| 591 | 2004 | Similar to gi\|4581047\|gb\|AAD24584.1\|AF134807_1 | 3332 | | |
| | | putative dihydroflavonol reductase [Oryza sativa] | | | |
| 638 | | Similar to FABB_HORVU P23902 HORDEUM | | 5113 | 5748 |
| | | VULGARE (BARLEY). 3-OXOACYL-[ACYL- | | | |
| | | CARRIER-PROTEIN] SYNTHASE I PRECURSOR | | | |
| | | (EC 2.3.1.41)(BETA-KETOACYL-ACP SYNTHASE | | | |
| | | I) (KAS I). | | | |
| 735 | | Similar to gi\|1890352\|emb\|CAA62744.1\| transcription | | 4830 | 5774 |
| | | factor L2 [Arabidopsis thaliana] | | | |
| 536 | 1969 | Similar to ARNO_HUMAN Q99418 HOMO | 3492, 2702, | 5221 | |
| | | SAPIENS (HUMAN). ARF NUCLEOTIDE-BINDING | 3491, 3281 | | |
| | | SITE OPENER (ARNO PROTEIN) (ARF | | | |
| | | EXCHANGEFACTOR). | | | |
| | | Similar to RL4_MYCBO O06045 | | | |
| | | MYCOBACTERIUM BOVIS. 50S RIBOSOMAL | | | |
| | | PROTEIN L4. | | | |
| 488 | 1934 | Similar to MIP_TRYCR Q09734 TRYPANOSOMA | 4097, 4101, | 5041 | 5453 |
| | | CRUZI. MACROPHAGE INFECTIVITY | 2674, 2675, | | |
| | | POTENTIATOR PRECURSOR (PEPTIDYL- | 2676, 4100, | | |
| | | PROLYLCIS-TRANS ISOMERASE) (EC 5.2.1.8) | 2961 | | |
| | | (PPIASE) (ROTAMASE). | | | |
| 521 | 1954 | Similar to gi\|6523046\|emb\|CAB62314.1\| hypothetical | | | 5602 |
| | | protein [Arabidopsis thaliana] | | | |
| 631 | | Similar to gi\|2864614\|emb\|CAA16961.1\| putative | 4339, 2828, | | |
| | | protein [Arabidopsis thaliana] | 2829 | | |
| 640 | 2025 | Similar to gi\|7485445\|pir\|\|T05519 hypothetical protein | | | 5378 |
| | | F13M23.120 - Arabidopsis thaliana (fragment) | | | |
| 628 | | “““ Similar to gi\|3176691\|gb\|AAC18814.1\| Contains | | | 5235 |
| | | homology to serine/threonine protein kinase gb\|X99618 | | | |
| | | from Mycobacterium tuberculosis. ESTs gb\|F14403, | | | |
| | | gb\|F14404, and gb\|N96730 come from this gene. | | | |
| | | [Arabidopsis thaliana] ””” | | | |
| 610 | | Similar to gi\|4490311\|emb\|CAB38802.1\| putative | | 4796 | 5752 |
| | | protein [Arabidopsis thaliana] | | | |
| 661 | 2034 | Similar to gi\|4966372\|gb\|AAD34703.1\|AC006341_31 | | | 5280 |
| | | ESTs gb\|N38586 and gb\|N38613 come from this gene. | | | |
| | | [Arabidopsis thaliana] | | | |
| 713 | 2078 | Similar to CAH4_MOUSE Q64444 MUS | | | 5746 |
| | | MUSCULUS (MOUSE). CARBONIC ANHYDRASE | | | |
| | | IV PRECURSOR (EC 4.2.1.1) (CARBONATE | | | |
| | | DEHYDRATASEIV). | | | |
| 648 | | Similar to RL25_HELPY P56078 HELICOBACTER | 3201, 3200, | | 5697 |
| | | PYLORI (CAMPYLOBACTER PYLORI). | 3199 | | |
| | | PROBABLE 50S RIBOSOMAL PROTEIN L25. | | | |
| 550 | | Similar to gi\|9295705\|gb\|AAF87011.1\|AC005292_20 | | | |
| | | F26F24.21 [Arabidopsis thaliana] | | | |
| 792 | 2135 | Similar to gi\|9293898\|dbj\|BAB01801.1\| MAP (mitogen | 2929, 2806 | | 5350 |
| | | activated protein) kinase-like protein [Arabidopsis | | | |
| | | thaliana] | | | |
| 681 | 2048 | Similar to gi\|5123936\|emb\|CAB45494.1\| hypothetical | | | |
| | | protein [Arabidopsis thaliana] | | | |
| 655 | 2031 | Similar to gi\|4263510\|gb\|AAD15336.1\| hypothetical | | | |
| | | protein [Arabidopsis thaliana] | | | |
| 701 | 2066 | Similar to gi\|6573734\|gb\|AAF17654.1\|AC009398_3 | | | 5798 |
| | | F20B24.4 [Arabidopsis thaliana] | | | |
| 549 | 1979 | Similar to gi\|5295966\|dbj\|BAA81867.1\| Similar to | | 4894 | |
| | | Glycine max gmsti mRNA.(X79770) [Oryza sativa] | | | |
| 614 | | Similar to gi\|4006898\|emb\|CAB16828.1\| splicing | 3189, 3815, | 4853 | 5338 |
| | | factor-like protein [Arabidopsis thaliana] | 2816 | | |
| 649 | | Similar to gi\|7573353\|emb\|CAB87659.1\| putative | 4594 | | |
| | | protein [Arabidopsis thaliana] | | | |
| 736 | 2097 | Similar to gi\|6983874\|dbj\|BAA90809.1\| hypothetical | | | 5709 |
| | | protein [Oryza sativa] | | | |
| 717 | 2082 | Similar to gi\|2660676\|gb\|AAC79147.1\| Dreg-2 like | 4370, 4369, | 5030 | |
| | | protein [Arabidopsis thaliana] | 4368 | | |
| 587 | | Similar to gi\|9294227\|dbj\|BAB02129.1\| P-glycoprotein; | 3365, 4159, | 4964 | 5312 |
| | | multi-drug resistance related; ABC transporter-like | 2769, 3364, | | |
| | | protein [Arabidopsis thaliana] | 4496, 4497, | | |
| | | | 2809, 2768, | | |
| | | | 3269, 4580, | | |
| | | | 3271, 4530, | | |
| | | | 4158, 3295, | | |
| | | | 3109, 2932, | | |
| | | | 2707 | | |
| 652 | 2029 | Similar to gi\|5051937\|gb\|AAD38371.1\| MADS-box | | 5226 | 5837 |
| | | protein FDRMADS2 [Oryza sativa] | | | |
| 630 | | Similar to gi\|9279658\|dbj\|BAB01174.1\| | 3131 | | |
| | | emb\|CAA18710.1˜gene_id: MIE15.3˜strong similarity | | | |
| | | to unknown protein [Arabidopsis thaliana] | | | |
| 726 | 2090 | Similar to PRO2_MAIZE P35082 ZEA MAYS | 3941, 4030, | 4792 | 5514 |
| | | (MAIZE). PROFILIN 2. | 3940, 4665 | | |
| 478 | 1927 | Similar to gi\|4038491\|emb\|CAA10482.1\| poly(ADP- | | | |
| | | ribose) polymerase [Arabidopsis thaliana] | | | |
| 576 | | Similar to 4CL1_SOYBN P31686 GLYCINE MAX | 3996, 3993 | 5092 | 5594 |
| | | (SOYBEAN). 4-COUMARATE--COA LIGASE 1 (EC | | | |
| | | 6.2.1.12) (4CL) (CLONE 4CL14)(FRAGMENT). | | | |
| 708 | 2073 | Similar to gi\|6630873\|gb\|AAF19609.1\|AF182953_1 | | 4926 | |
| | | Surfeit 1 [Arabidopsis thaliana] | | | |
| 657 | | Similar to gi\|6715648\|gb\|AAF26475.1\|AC007323_16 | | 4921 | |
| | | T25K16.5 [Arabidopsis thaliana] | | | |
| 586 | 2001 | Similar to gi\|5931661\|emb\|CAB56584.1\| squamosa | 2988 | | 5529 |
| | | (promoter binding protein-like 4 [Arabidopsis thaliana] | | | |
| 588 | | Similar to gi\|5903086\|gb\|AAD55644.1\|AC008017_17 | 2797, 2705, | 4777 | 5867 |
| | | ACE [Arabidopsis thaliana] | 2706, 3008 | | |
| 538 | 1971 | Similar to gi\|3785995\|gb\|AAC67341.1\| unknown | 2808, 2825, | | |
| | | protein [Arabidopsis thaliana] | 2833 | | |
| 582 | 1999 | Similar to gi\|7486938\|pir\|\|T00395 hypothetical protein | | | |
| | | T13E15.1 - Arabidopsis thaliana (fragment) | | | |
| 672 | 2039 | “““ Similar to gi\|7269834\|emb\|CAB79694.1\| beta-1, 3- | | | |
| | | glucanase-like protein [Arabidopsis thaliana] ””” | | | |
| 580 | | Similar to gi\|4544386\|gb\|AAD22296.1\|AC007047_5 | | | 5680 |
| | | putative CDC21 protein [Arabidopsis thaliana] | | | |
| 691 | 2056 | Similar to gi\|4096103\|gb\|AAD10483.1\| p34cdc2 | 3035, 3092, | | 5818 |
| | | [Triticum aestivum] | 2839, 3431, | | |
| | | | 3282, 4407, | | |
| | | | 2957, 3288, | | |
| | | | 4153, 4154, | | |
| | | | 4408 | | |
| 605 | 2012 | Similar to gi\|3834307\|gb\|AAC83023.1\|Strong | 3314, 3927, | 4788 | |
| | | similarity to gene T10I14.120 gi\|2832679 putative | 3929, 3928 | | |
| | | protein from Arabidopsis thaliana BAC gb\|AL021712. | | | |
| | | ESTs gb\|N65887 and gb\|N65627 come from this gene. | | | |
| 555 | 1983 | Similar to gi\|5725522\|gb\|AAD48088.1\| replication | 3132, 3283 | | 5272 |
| | | origin activator 4 [Zea mays] | | | |
| 634 | 2023 | Similar to gi\|7801686\|emb\|CAB91606.1\| transporter- | | 4992 | |
| | | like protein [Arabidopsis thaliana] | | | |
| 632 | | Similar to gi\|3080448\|emb\|CAA18765.1\| putative | 2831 | | |
| | | protein [Arabidopsis thaliana] | | | |
| | | Similar to gi\|4218115\|emb\|CAA22969.1\| putative | | | |
| | | protein [Arabidopsis thaliana] | | | |
| 578 | 1996 | Similar to gi\|7270014\|emb\|CAB79830.1\| kinase | 4650 | | |
| | | binding protein-like [Arabidopsis thaliana] | | | |
| 669 | | Similar to gi\|5931645\|emb\|CAB56576.1\|squamosa | | | |
| | | promoter binding protein-like 2 [Arabidopsis thaliana] | | | |
| 598 | 2008 | Similar to gi\|6017111\|gb\|AAF01594.1\|AC009895_15 | 3425 | | 5244 |
| | | unknown protein [Arabidopsis thaliana] | | | |
| 654 | 2030 | Similar to CSR2_RAT Q62908 RATTUS | | | 5774 |
| | | NORVEGICUS (RAT). SMOOTH MUSCLE CELL | | | |
| | | LIM PROTEIN (CYSTEINE-RICH PROTEIN 2) | | | |
| | | (CRP2). | | | |
| 698 | 2063 | Similar to KDSA_CHLTR P77849 CHLAMYDIA | 2826, 3039 | | |
| | | TRACHOMATIS. 2-DEHYDRO-3- | | | |
| | | DEOXYPHOSPHOOCTONATE ALDOLASE (EC | | | |
| | | 4.1.2.16) (PHOSPHO-2-DEHYDRO-3- | | | |
| | | DEOXYOCTONATE ALDOLASE) (3-DEOXY-D- | | | |
| | | MANNO-OCTULOSONIC ACID8-PHOSPHATE | | | |
| | | SYNTHETASE) (KDO 8-P SYNTHASE). | | | |
| 674 | 2041 | Similar to IFEA_ASCSU P23730 ASCARIS SUUM | 3327, 3326, | | 5233 |
| | | (PIG ROUNDWORM) (ASCARIS | 3325 | | |
| | | LUMBRICOIDES). INTERMEDIATE FILAMENT | | | |
| | | PROTEIN A (IF-A) (FRAGMENT). | | | |
| 703 | 2068 | Similar to SUBT_BACS9 P28842 BACILLUS SP. | | | |
| | | (STRAIN TA39). SUBTILISIN PRECURSOR (EC | | | |
| | | 3.4.21.62). | | | |
| 554 | 1982 | Similar to SYT3_MOUSE O35681 MUS MUSCULUS | 3052, 4663, | | 5626 |
| | | (MOUSE). SYNAPTOTAGMIN III (SYTIII). | 3546, 4662, | | |
| | | | 4637, 3547, | | |
| | | | 4297, 4306, | | |
| | | | 3556, 3434, | | |
| | | | 4296, 3433, | | |
| | | | 4305, 3545 | | |
| 707 | 2072 | Similar to VT3A_CAPVI P18387 CAPRIPOXVIRUS | | | |
| | | (STRAIN INS-1). PROTEIN T3A. | | | |
| 682 | | Similar to YZ06_MYCTU Q10540 | | 5154 | 5789 |
| | | MYCOBACTERIUM TUBERCULOSIS. | | | |
| | | HYPOTHETICAL 43.6 KD PROTEIN CY31.06C. | | | |
| 603 | 2011 | Similar to gi\|7269674\|emb\|CAB79622.1\| putative | 3273 | | |
| | | protein [Arabidopsis thaliana] | | | |
| 716 | 2081 | Similar to gi\|3912930\|gb\|AAC78714.1\| hypothetical | | | 5838 |
| | | protein [Arabidopsis thaliana] | | | |
| 627 | 2020 | Similar to gi\|3080363\|emb\|CAA18620.1\| puatative | 3416, 3415 | 5071 | |
| | | protein [Arabidopsis thaliana] | | | |
| 597 | | Similar to gi\|4263047\|gb\|AAD15316.1\| hypothetical | 2818 | | |
| | | protein [Arabidopsis thaliana] | | | |
| 700 | 2065 | Similar to gi\|2935575\|gb\|AAC32818.1\| KNOX class | 3686, 3685, | 5127 | 5412 |
| | | homeodomain protein [Oryza sativa] | 3683, 3687, | | |
| | | | 3684 | | |
| 645 | 2027 | Similar to gi\|3142292\|gb\|AAC16743.1\| Contains | 4595 | 5133 | 5620 |
| | | similarity to tetratricopeptide repeat protein gb\|U46571 | | | |
| | | from homo sapiens. EST gb\|Z47802 and gb\|Z48402 | | | |
| | | come from this gene. [Arabidopsis thaliana] | | | |
| 619 | 2016 | Similar to gi\|5852183\|emb\|CAB55421.1\| zhb0013.1 | | | 5771 |
| | | [Oryza sativa] | | | |
| 507 | 1947 | Similar to gi\|7485636\|pir\|\|T00886 hypothetical protein | | | |
| | | F17K2.26 - Arabidopsis thaliana | | | |
| 710 | 2075 | Similar to gi\|3688170\|emb\|CAA21198.1\| putative | 4547, 4546, | 5089 | 5641 |
| | | protein [Arabidopsis thaliana] | 4014, 4013 | | |
| 502 | 1943 | Similar to gi\|1172441\|sp\|Q04088\|PF21_ARATH | | | |
| | | POSSIBLE TRANSCRIPTION FACTOR POSF21 | | | |
| 532 | 1965 | Similar to gi\|8927660\|gb\|AAF82151.1\|AC034256_15 | 2767, 2766 | 4839 | |
| | | Contains similarity to an unknown protein T21F11.5 | | | |
| | | gi\|6730725 from Arabidopsis thaliana BAC T21F11 | | | |
| | | gb\|AC018849 and contains a Ribosomal Protein S15 | | | |
| | | PF\|00312 domain. | | | |
| 543 | 1974 | Similar to SCII_CHICK Q90988 GALLUS GALLUS | 4112, 4111 | | |
| | | (CHICKEN). CHROMOSOME SCAFFOLD | | | |
| | | PROTEIN SCII. | | | |
| 540 | | Similar to gi\|4885026\|gb\|AAD31926.1\|AF147738_1 | 3082, 4288 | | 5287 |
| | | myosin VIII ZMM3 [Zea mays] | | | |
| 504 | 1945 | Similar to RB46_HUMAN Q16576 HOMO SAPIENS | | 4963 | 5402 |
| | | (HUMAN). HISTONE ACETYLTRANSFERASE | | | |
| | | TYPE B SUBUNIT 2 (RETINOBLASTOMA | | | |
| | | BINDINGPROTEIN P46). | | | |
| 665 | 2035 | Similar to gi\|3193331\|gb\|AAC19313.1\| F6N15.22 gene | | 4971 | 5592 |
| | | product [Arabidopsis thaliana] | | | |
| 692 | 2057 | Similar to gi\|4567265\|gb\|AAD23678.1\|AC006841_7 | 2740, 2739, | | 5343 |
| | | putative kinesin heavy chain [Arabidopsis thaliana] | 3476, 3475, | | |
| | | | 3113, 3089 | | |
| 625 | 2019 | Similar to gi\|9294284\|dbj\|BAB02186.1\| vacuolar ATP | | | |
| | | synthase subunit AC39 [Arabidopsis thaliana] | | | |
| 671 | 2038 | Similar to gi\|8809704\|dbj\|BAA97245.1\| contains | | | |
| | | similarity to unknown | | | |
| | | protein˜emb\|CAA22897.1˜gene_id: MQM1.18 | | | |
| | | [Arabidopsis thaliana] | | | |
| 626 | | Similar to gi\|6862912\|gb\|AAF30301.1\|AC018907_1 | 4679 | 5201 | 5439 |
| | | unknown protein [Arabidopsis thaliana] | | | |
| 571 | | Similar to gi\|6692677\|gb\|AAF24811.1\|AC007592_4 | 4686 | | |
| | | F12K11.7 [Arabidopsis thaliana] | | | |
| 557 | | Similar to gi\|5262166\|emb\|CAB45809.1\| putative | 3236, 4591, | | |
| | | serine proteinase [Arabidopsis thaliana] | 4590 | | |
| 556 | | Similar to gi\|1816588\|gb\|AAC50021.1\| LON2 [Zea | 2902, 3045 | | 5881 |
| | | mays] | | | |
| 566 | 1989 | Similar to gi\|2244894\|emb\|CAB10316.1\| lupeol | | 5132 | |
| | | synthase like protein [Arabidopsis thaliana] | | | |
| 466 | | Similar to P5CS_CAEEL P54889 | 3317, 3278 | 4888 | 5797 |
| | | CAENORHABDITIS ELEGANS: PROBABLE | | | |
| | | DELTA 1-PYRROLINE-5-CARBOXYLATE | | | |
| | | SYNTHETASE (P5CS) (CONTAINS: GLUTAMATE | | | |
| | | 5-KINASE (EC 2.7.2.11) (GAMMA-GLUTAMYL | | | |
| | | KINASE) (GK)/GAMMA-GLUTAMYL | | | |
| | | PHOSPHATE REDUCTASE (GPR) (EC 1.2.1.41) | | | |
| | | (GLUTAMATE-5-S | | | |
| 660 | 2033 | “““ Similar to KITH_RAT P27158 RATTUS | 4023, 4022 | 4877 | |
| | | NORVEGICUS (RAT). THYMIDINE KINASE, | | | |
| | | CYTOSOLIC (EC 2.7.1.21) (FRAGMENT). ””” | | | |
| 527 | 1960 | Similar to NODH_RHITR P52994 RHIZOBIUM | 3266, 3448, | 5007 | 5467 |
| | | TROPICI. NODULATION PROTEIN H (EC 2.8.2.-). | 2823 | | |
| 542 | 1973 | Similar to SKIW_HUMAN Q15477 Q12902 O15005 | 3386, 3385 | 5031 | 5888 |
| | | Q15476 HOMO SAPIENS (HUMAN). HELICASE | | | |
| | | SKI2W (HELICASE-LIKE PROTEIN HLP). | | | |
| 624 | 2018 | Similar to UBPX_CAEEL P34547 | 3048, 3046, | | 5807 |
| | | CAENORHABDITIS ELEGANS. PROBABLE | 3047, 3861, | | |
| | | UBIQUITIN CARBOXYL-TERMINAL | 3863, 3862 | | |
| | | HYDROLASE R10E11.3 (EC 3.1.2.15)(UBIQUITIN | | | |
| | | THIOLESTERASE) (UBIQUITIN-SPECIFIC | | | |
| | | PROCESSING PROTEASE)(DEUBIQUITINATING | | | |
| | | ENZYME). | | | |
| 541 | | Similar to gi\|3913525\|sp\|O48901\|DPOD_SOYBN | | | 5903 |
| | | DNA POLYMERASE DELTA CATALYTIC CHAIN | | | |
| 546 | 1976 | “““ Similar to gi\|8493583\|gb\|AAF75806.1\|AC011000_9 | 3375, 3374 | | |
| | | Contains strong similarity to CLV1 receptor kinase | | | |
| | | from Arabidopsis thaliana gb\|U96879, and contains a | | | |
| | | Eukaryotic Kinase PF\|00069 domain and multiple | | | |
| | | Leucine Rich Repeats PF\|00560. ””” | | | |
| 562 | 1985 | Similar to gi\|6523034\|emb\|CAB62302.1\| receptor | 4627 | | 5241 |
| | | protein kinase-like protein [Arabidopsis thaliana] | | | |
| 600 | | Similar to gi\|7263554\|emb\|CAB81591.1\| putative | | | 5742 |
| | | protein [Arabidopsis thaliana] | | | |
| 607 | | Similar to gi\|3738319\|gb\|AAC63660.1\| hypothetical | 2842 | 5125 | |
| | | protein [Arabidopsis thaliana] | | | |
| 515 | | Similar to gi\|4406763\|gb\|AAD20074.1\| unknown | | 4845 | 5538 |
| | | protein [Arabidopsis thaliana] | | | |
| 667 | | Similar to gi\|7573319\|emb\|CAB87637.1\| cinnamoyl | 4329, 3094 | | 5475 |
| | | CoA reductase-like protein [Arabidopsis thaliana] | | | |
| 637 | 2024 | Similar to gi\|2583126\|gb\|AAB82635.1\| putative | 3105 | | |
| | | RAD51C-like DNA repair protein [Arabidopsis | | | |
| | | thaliana] | | | |
| 568 | 1991 | Similar to gi\|2583120\|gb\|AAB82629.1\| putative | 3118, 3471 | | 5922 |
| | | receptor-like protein kinase [Arabidopsis thaliana] | | | |
| 519 | 1952 | Similar to gi\|4584352\|gb\|AAD25146.1\|AC006420_1 | | | |
| | | putative retroelement pol polyprotein [Arabidopsis | | | |
| | | thaliana] | | | |
| 666 | | Similar to gi\|4337210\|gb\|AAD18124.1\| unknown | | | |
| | | protein [Arabidopsis thaliana] | | | |
| 644 | 2026 | Similar to gi\|4337206\|gb\|AAD18120.1\| putative | | | |
| | | replication protein A1 [Arabidopsis thaliana] | | | |
| 647 | | Similar to gi\|3757522\|gb\|AAC64224.1\| putative | 3363 | 5008 | 5601 |
| | | splicing factor [Arabidopsis thaliana] | | | |
| 528 | 1961 | Similar to gi\|6850858\|emb\|CAB71097.1\| putative | 3478, 4584, | | 5908 |
| | | protein [Arabidopsis thaliana] | 3148 | | |
| 558 | | Similar to gi\|7485434\|pir\|\|T02536 hypothetical protein | 4470, 2893 | 4768 | 5750 |
| | | F13M22.20 - Arabidopsis thaliana | | | |
| 604 | | Similar to gi\|7485872\|pir\|\|T00952 hypothetical protein | | | |
| | | F20D22.2 - Arabidopsis thaliana | | | |
| 537 | 1970 | Similar to gi\|4006911\|emb\|CAB16841.1\| trichohyalin | 4472, 4471, | 5032 | |
| | | like protein [Arabidopsis thaliana] | 3186, 3185, | | |
| | | | 4485, 3187 | | |
| 572 | | Similar to gi\|6681327\|gb\|AAF23244.1\|AC015985_2 | 3957 | 4928 | |
| | | putative phosphatidylinositol-4-phosphate 5-kinase | | | |
| | | [Arabidopsis thaliana] | | | |
| 570 | | Similar to gi\|7021723\|gb\|AAF35404.1\| hypothetical | 3062, 4376, | | |
| | | protein [Arabidopsis thaliana] | 3103, 4375 | | |
| 696 | 2061 | Similar to gi\|6562267\|emb\|CAB62637.1\| putative | 2739, 2740, | | 5512 |
| | | protein [Arabidopsis thaliana] | 4181, 4398, | | |
| | | | 4180 | | |
| 595 | 2006 | Similar to gi\|6862936\|gb\|AAF30324.1\|AC019018_2 | 3901, 3902, | | |
| | | unknown protein [Arabidopsis thaliana] | 3903 | | |
| 506 | | Similar to gi\|6751691\|gb\|AAF27674.1\|AC018908_13 | | | |
| | | unknown protein [Arabidopsis thaliana] | | | |
| 498 | | Similar to gi\|2462753\|gb\|AAB71972.1\| putative | 2714 | | |
| | | polygalacturonase [Arabidopsis thaliana] | | | |
| 484 | 1931 | Similar to gi\|5932543\|gb\|AAD56998.1\|AC009465_12 | 2929, 3466 | | |
| | | putative mitogen activated protein kinase kinase | | | |
| | | [Arabidopsis thaliana] | | | |
| 475 | | Similar to gi\|1149569\|emb\|CAA90703.1\| HD-zip | 4432 | 4997 | 5237 |
| | | [Arabidopsis thaliana] | | | |
| 491 | 1935 | Similar to gi\|4107009\|dbj\|BAA36298.1\| OSK1 [Oryza | 3050 | 4930 | |
| | | sativa] | | | |
| 560 | | Similar to gi\|8570051\|dbj\|BAA96756.1\| Similar to | | | |
| | | Drosophila melanogaster shuttle craft protein (U09306) | | | |
| | | [Oryza sativa] | | | |
| 467 | 1920 | Similar to gi\|4249575\|dbj\|BAA74947.1\| thymidylate | | | |
| | | synthase [Oryza sativa] | | | |
| 715 | 2080 | “““ Similar to gi\|9049453\|dbj\|BAA99418.1\| contains | | | |
| | | ESTs AU090583(S3043), D40865(S3043)˜unknown | | | |
| | | protein [Oryza sativa] ””” | | | |
| 643 | | Similar to CTPT_PLAFK P49587 PLASMODIUM | | 4770 | 5447 |
| | | FALCIPARUM (ISOLATE K1/THAILAND). | | | |
| | | CHOLINEPHOSPHATE | | | |
| | | CYTIDYLYLTRANSFERASE (EC 2.7.7.15) | | | |
| | | (PHOSPHORYLCHOLINETRANSFERASE) (CT). | | | |
| 677 | 2044 | Similar to MDM2_MOUSE P23804 Q64330 Q61040 | 3207, 3206 | | |
| | | MUS MUSCULUS (MOUSE). MDM2 PROTEIN | | | |
| | | (P53-ASSOCIATED PROTEIN). | | | |
| 704 | 2069 | “““ Similar to LIPG_CANFA P80035 O02857 CANIS | 3234 | | |
| | | FAMILIARIS (DOG). TRIACYLGLYCEROL | | | |
| | | LIPASE PRECURSOR (EC 3.1.1.3) (LIPASE, | | | |
| | | GASTRIC). ””” | | | |
| 495 | 1937 | Similar to PMS2_MOUSE P54279 MUS MUSCULUS | | 4863 | |
| | | (MOUSE). PMS1 PROTEIN HOMOLOG 2 (DNA | | | |
| | | MISMATCH REPAIR PROTEIN PMS2). | | | |
| 611 | | Similar to PCP1_MOUSE P20943 MUS MUSCULUS | 4693, 4692, | 5134 | |
| | | (MOUSE). PURKINJE CELL PROTEIN 1 (PROTEIN | 3225 | | |
| | | PCD-6) (FRAGMENT). | | | |
| 725 | 2089 | “““ Similar to T2FB_HUMAN P13984 HOMO | 4488, 4487, | 5213 | |
| | | SAPIENS (HUMAN). TRANSCRIPTION | 4486 | | |
| | | INITIATION FACTOR IIF, BETA SUBUNIT (TFIIF- | | | |
| | | BETA)(TRANSCRIPTION INITIATION FACTOR | | | |
| | | RAP30). ””” | | | |
| 697 | 2062 | Similar to TRF1_HUMAN P54274 HOMO SAPIENS | | | |
| | | (HUMAN). TELOMERIC REPEAT BINDING | | | |
| | | FACTOR 1. | | | |
| 477 | | Similar to YE0K_SCHPO O13816 | | 5081 | 5712 |
| | | SCHIZOSACCHAROMYCES POMBE (FISSION | | | |
| | | YEAST). HYPOTHETICAL PROTEIN C17H9.20 IN | | | |
| | | CHROMOSOME I (FRAGMENT). | | | |
| 525 | 1958 | Similar to YCB6_PSEDE P29939 PSEUDOMONAS | | | |
| | | DENITRIFICANS. HYPOTHETICAL 15.0 KD | | | |
| | | PROTEIN IN COBO 3 REGION (ORF6). | | | |
| 479 | 1928 | Similar to gi\|4510342\|gb\|AAD21431.1\| putative protein | 3381, 3228, | 5144 | |
| | | kinase [Arabidopsis thaliana] | 3949, 3380, | | |
| | | | 3456, 3948, | | |
| | | | 2856, 3165 | | |
| 633 | 2022 | Similar to gi\|6714278\|gb\|AAF25974.1\|AC017118_11 | | 4874 | 5375 |
| | | F6N18.17 [Arabidopsis thaliana] | | | |
| 617 | | Similar to gi\|3738297\|gb\|AAC63639.1\| unknown | | | 5503 |
| | | protein [Arabidopsis thaliana] | | | |
| 510 | | Similar to gi\|7486478\|pir\|\|T00684 hypothetical protein | 3740 | | 5842 |
| | | F6E13.17 - Arabidopsis thaliana | | | |
| 485 | 1932 | Similar to gi\|7435675\|pir\|\|T01351 subtilisin-like | | | 5684 |
| | | proteinase homolog F6N15.3 - Arabidopsis thaliana | | | |
| 476 | | Similar to gi\|4220529\|emb\|CAA23002.1\| putative | | | |
| | | protein [Arabidopsis thaliana] | | | |
| 501 | 1942 | Similar to gi\|7269445\|emb\|CAB79449.1\| predicted | | 5034 | |
| | | protein destination factor [Arabidopsis thaliana] | | | |
| 471 | 1923 | Similar to gi\|5732072\|gb\|AAD48971.1\|AF162444_3 | 2921, 3112, | 4855 | |
| | | contains similarity to glucan synthases [Arabidopsis | 2908, 3243, | | |
| | | thaliana] | 2979 | | |
| 545 | 1975 | Similar to gi\|7267253\|emb\|CAB81036.1\| putative WD- | 3010 | | |
| | | repeat membrane protein [Arabidopsis thaliana] | | | |
| 500 | 1941 | Similar to gi\|5902378\|gb\|AAD55480.1\|AC009322_20 | | | 5586 |
| | | Unknown protein [Arabidopsis thaliana] | | | |
| 469 | | Similar to gi\|5103819\|gb\|AAD39649.1\|AC007591_14 | 2998, 2997 | | 5321 |
| | | EST gb\|H77143 comes from this gene. [Arabidopsis | | | |
| | | thaliana] | | | |
| 486 | 1933 | Similar to gi\|6006864\|gb\|AAF00640.1\|AC009540_17 | | | 5648 |
| | | hypothetical protein [Arabidopsis thaliana] | | | |
| 474 | 1926 | Similar to gi\|3093294\|emb\|CAA73320.1\|putative villin | 3992 | 4991 | |
| | | [Arabidopsis thaliana] | | | |
| 561 | | Similar to AC15_MOUSE P35601 MUS MUSCULUS | 2938 | | |
| | | (MOUSE). ACTIVATOR 1 140 KD SUBUNIT | | | |
| | | (REPLICATION FACTOR C LARGE SUBUNIT) | | | |
| | | (A1140 KD SUBUNIT) (RF-C 140 KD SUBUNIT) | | | |
| | | (ACTIVATOR 1 LARGE SUBUNIT)(A1-P145) | | | |
| | | (DIFFERENTIATION SPECIFIC ELEMENT | | | |
| | | BINDING PROTEIN)(ISRE-BINDIN | | | |
| 613 | | Similar to CAP_SCHPO P36621 | | | 5394 |
| | | SCHIZOSACCHAROMYCES POMBE (FISSION | | | |
| | | YEAST). ADENYLYL CYCLASE-ASSOCIATED | | | |
| | | PROTEIN (CAP). | | | |
| 760 | | Similar to CAP_YEAST P17555 | | | 5328 |
| | | SACCHAROMYCES CEREVISIAE (BAKER S | | | |
| | | YEAST). ADENYLYL CYCLASE-ASSOCIATED | | | |
| | | PROTEIN (CAP). | | | |
| 714 | 2079 | Similar to DPA4_BPT4 P04526 BACTERIOPHAGE | 4184, 4185, | 5076 | |
| | | T4. DNA POLYMERASE ACCESSORY PROTEIN | 4186 | | |
| | | 44 (PROTEIN GP44). | | | |
| 470 | 1922 | Similar to GDS1_BOVIN Q04173 BOS TAURUS | 3455, 3257, | | |
| | | (BOVINE). RAP1 GTPASE-GDP DISSOCIATION | 3454 | | |
| | | STIMULATOR 1 (SMG P21 STIMULATORY | | | |
| | | GDP/GTPEXCHANGE PROTEIN) (SMG GDS | | | |
| | | PROTEIN). | | | |
| 523 | 1956 | “““ Similar to HA15_MOUSE P06339 MUS | | | |
| | | MUSCULUS (MOUSE). H-2 CLASS I | | | |
| | | HISTOCOMPATIBILITY ANTIGEN, D-37 ALPHA | | | |
| | | CHAIN PRECURSOR. ””” | | | |
| 489 | | Similar to GRK5_RAT Q62833 RATTUS | 3228, 3381, | 4876 | 5261 |
| | | NORVEGICUS (RAT). G PROTEIN-COUPLED | 3949, 3165, | | |
| | | RECEPTOR KINASE GRK5 (EC 2.7.1.-). | 2856, 3948, | | |
| | | | 3947, 3380 | | |
| 724 | 2088 | Similar to MTBS_BPSPR P00476 BACTERIOPHAGE | | | |
| | | SPR. MODIFICATION METHYLASE BSU SPRI (EC | | | |
| | | 2.1.1.73) (CYTOSINE- | | | |
| | | SPECIFICMETHYLTRANSFERASE BSU SPRI) | | | |
| | | (M. SPRI). | | | |
| 593 | 2005 | Similar to OLED_STRAT Q53685 STREPTOMYCES | | 4891 | 5737 |
| | | ANTIBIOTICUS. OLEANDOMYCIN | | | |
| | | GLYCOSYLTRANSFERASE (EC 2.4.1.-). | | | |
| 653 | | Similar to NFI_ECOLI P32679 ESCHERICHIA COLI. | | | |
| | | ENDONUCLEASE V (EC 3.1.-.-) (DEOXYINOSINE | | | |
| | | 3 ENDONUCLEASE). | | | |
| 618 | | Similar to PAN1_RAT P21676 RATTUS | 3398 | | |
| | | NORVEGICUS (RAT). TRANSCRIPTIONAL | | | |
| | | REGULATORY PROTEIN PAN-1 (FRAGMENT). | | | |
| 564 | 1987 | Similar to RBTR_KLEAE P07760 KLEBSIELLA | | | 5696 |
| | | AEROGENES. RIBITOL (RBT) OPERON | | | |
| | | REPRESSOR. | | | |
| 687 | | Similar to YCGN_ECOLI P76005 ESCHERICHIA | | | |
| | | COLI. HYPOTHETICAL 18.6 KD PROTEIN IN | | | |
| | | MINC-SHEA INTERGENIC REGION. | | | |
| 662 | | Similar to YJO5_YEAST P47008 | | | 5382 |
| | | SACCHAROMYCES CEREVISIAE (BAKER S | | | |
| | | YEAST). HYPOTHETICAL 34.4 KD PROTEIN IN | | | |
| | | IDS2-MPI2 INTERGENIC REGION. | | | |
| 684 | 2050 | Similar to ATH1_ARATH P48731 ARABIDOPSIS | | | 5469 |
| | | THALIANA (MOUSE-EAR CRESS). HOMEOBOX | | | |
| | | PROTEIN ATH1. | | | |
| 483 | 1930 | Similar to gi\|9294575\|dbj\|BAB02856.1\| contains | 4536, 2910 | 4897 | |
| | | similarity to Ac-like | | | |
| | | transposase˜gb\|AAC61291.1˜gene_id: MFJ20.8 | | | |
| | | [Arabidopsis thaliana] | | | |
| 480 | | Similar to gi\|8809655\|dbj\|BAA97206.1\| beta- | | 4875 | 5554 |
| | | galactosidase [Arabidopsis thaliana] | | | |
| 685 | 2051 | Similar to gi\|4914365\|gb\|AAD32902.1\|AC007289_9 | | | |
| | | hypothetical protein [Arabidopsis thaliana] | | | |
| 676 | 2043 | Similar to gi\|4006876\|emb\|CAB16794.1\| hypothetical | 4420, 2952, | | 5743 |
| | | protein [Arabidopsis thaliana] | 4421 | | |
| 513 | | Similar to gi\|6642679\|gb\|AAF20259.1\|AC015450_20 | | | 5354 |
| | | unknown protein [Arabidopsis thaliana] | | | |
| 768 | | Similar to gi\|6522538\|emb\|CAB61981.1\| putative | | | |
| | | protein [Arabidopsis thaliana] | | | |
| 468 | 1921 | Similar to gi\|5263313\|gb\|AAD41415.1\|AC007727_4 | | | 5782 |
| | | Contains similarity to gb\|U07707 epidermal growth | | | |
| | | factor receptor substrate (eps15) from Homo sapiens | | | |
| | | and contains 2 PF\|00036 EF hand domains. ESTs | | | |
| | | gb\|T44428 and gb\|AA395440 come from this gene. | | | |
| | | [Arabidopsis | | | |
| 705 | 2070 | Similar to gi\|2443889\|gb\|AAB71482.1\| similar to S- | | | |
| | | linalool synthase gp\|U58314\|1491939 [Arabidopsis | | | |
| | | thaliana] | | | |
| 702 | 2067 | Open Reading Frame OS_ORF000472 HTC002653- | | 5073 | 5471 |
| | | A01.19 FRAME: 1 ORF: 11 LEN: 813 | | | |
| 693 | 2058 | Open Reading Frame containing a Sage tag sequence | 3275, 4684, | | |
| | | near 3 end OS_ORF002835 ST(F) HTC016439- | 4685 | | |
| | | A01.22 FRAME: 2 ORF: 25 LEN: 591 | | | |
| 651 | | Open Reading Frame OS_ORF003267 HTC018975- | | | |
| | | A01.29 FRAME: −1 ORF: 3 LEN: 729 | | | |
| 530 | 1963 | Open Reading Frame OS_ORF003351 HTC019414- | | | 5304 |
| | | A01.6 FRAME: −1 ORF: 3 LEN: 1146 | | | |
| 711 | 2076 | Open Reading Frame containing a Sage tag sequence | 4098, 4655, | | 5310 |
| | | near 3 end OS_ORF003748 ST(F) HTC021811- | 4099 | | |
| | | A01.17 FRAME: 3 ORF: 5 LEN: 795 | | | |
| 675 | 2042 | Open Reading Frame OS_ORF003935 HTC022845- | | | |
| | | A01.8 FRAME: −2 ORF: 3 LEN: 960 | | | |
| 516 | 1949 | Open Reading Frame OS_ORF005303 HTC031545- | 3218, 3216, | 5147 | 5711 |
| | | A01.F.6 FRAME: 3 ORF: 2 LEN: 654 | 3418, 3419, | | |
| | | | 3417, 3217 | | |
| 492 | | Open Reading Frame containing a Sage tag sequence | 2705, 2706, | | 5887 |
| | | near 3 end OS_ORF005327 ST(F) HTC031694- | 2797, 3008 | | |
| | | A01.R.34 FRAME: 2 ORF: 40 LEN: 765 | | | |
| 481 | 1929 | Open Reading Frame OS_ORF005936 HTC035449- | 2948 | 4915 | 5384 |
| | | A01.R.36 FRAME: 1 ORF: 20 LEN: 795 | | | |
| 548 | 1978 | Open Reading Frame OS_ORF006462 HTC038737- | 2835, 2836, | | 5898 |
| | | A01.R.26 FRAME: −3 ORF: 4 LEN: 1695 | 2834 | | |
| 465 | 1919 | Open Reading Frame OS_ORF007748 HTC046412- | 4335, 4151, | | 5391 |
| | | A01.R.17 FRAME: 3 ORF: 9 LEN: 663 | 3387, 4152 | | |
| 563 | 1986 | Open Reading Frame OS_ORF008766 HTC052601- | | | |
| | | A01.R.17 FRAME: −3 ORF: 5 LEN: 918 | | | |
| 517 | 1950 | Open Reading Frame OS_ORF009548 HTC057155- | | | 5422 |
| | | A01.F.7 FRAME: 3 ORF: 3 LEN: 735 | | | |
| 494 | | Open Reading Frame OS_ORF010156 HTC061467- | 3247, 2921, | | 5307 |
| | | A01.19 FRAME: 1 ORF: 6 LEN: 690 | 2804, 2803, | | |
| | | | 3243, 2802 | | |
| 535 | 1968 | Open Reading Frame OS_ORF010961 HTC067473- | | | 5775 |
| | | A01.F.46 FRAME: −1 ORF: 2 LEN: 603 | | | |
| 473 | 1925 | Open Reading Frame containing a Sage tag sequence | 3423, 3308, | | 5717 |
| | | near 3 end OS_ORF011018 ST(F) HTC067863- | 3422 | | |
| | | A01.F.16 FRAME: 3 ORF: 10 LEN: 930 | | | |
| 493 | 1936 | Open Reading Frame OS_ORF011099 HTC068383- | 4014, 4013 | 5089 | 5641 |
| | | A01.F.28 FRAME: 2 ORF: 3 LEN: 882 | | | |
| 706 | 2071 | Open Reading Frame OS_ORF011137 HTC068634- | | | 5500 |
| | | A01.F.2 FRAME: 1 ORF: 1 LEN: 651 | | | |
| 650 | | Open Reading Frame OS_ORF011630 HTC072195- | 3322, 3646, | 5014 | 5306 |
| | | A01.R.11 FRAME: 1 ORF: 3 LEN: 678 | 4433, 3642, | | |
| | | | 3660, 3641, | | |
| | | | 3539, 3816 | | |
| 599 | 2009 | Open Reading Frame containing a Sage tag sequence | 2784 | | 5619 |
| | | near 3 end OS_ORF012797 ST(F) HTC080541- | | | |
| | | A01.F.1 FRAME: −1 ORF: 1 LEN: 732 | | | |
| 522 | 1955 | Open Reading Frame OS_ORF013410 ST(R) | | | |
| | | HTC085428-A01.F.6 FRAME: 1 ORF: 8 LEN: 501 | | | |
| 534 | 1967 | Open Reading Frame OS_ORF013411 ST(R) | | | |
| | | HTC085428-A01.F.6 FRAME: 2 ORF: 1 LEN: 534 | | | |
| 722 | 2087 | Open Reading Frame containing a Sage tag sequence | 3214, 4389, | 5096 | |
| | | near 3 end OS_ORF014631 ST(F) HTC094453- | 2868, 4390, | | |
| | | A01.F.22 FRAME: 2 ORF: 19 LEN: 546 | 4388, 2940 | | |
| 496 | 1938 | Open Reading Frame OS_ORF015055 HTC097923- | | 5102 | 5313 |
| | | A01.R.15 FRAME: 2 ORF: 9 LEN: 1218 | | | |
| 594 | | Open Reading Frame containing a Sage tag sequence | 4574, 4363, | 4827 | 5537 |
| | | near 3 end OS_ORF016056 ST(F) HTC105399-A01.5 | 4362 | | |
| | | FRAME: 2 ORF: 2 LEN: 531 | | | |
| 490 | | Open Reading Frame OS_ORF016360 HTC108019- | 3484, 4330, | | 5873 |
| | | A01.28 FRAME: −2 ORF: 1 LEN: 861 | 4002, 4001 | | |
| 531 | 1964 | Open Reading Frame OS_ORF017250 HTC114893- | | | |
| | | A01.R.22 FRAME: −2 ORF: 4 LEN: 963 | | | |
| 699 | 2064 | Open Reading Frame OS_ORF017431 HTC116001- | | | |
| | | A01.F.44 FRAME: −3 ORF: 11 LEN: 2058 | | | |
| 590 | 2003 | Open Reading Frame OS_ORF018615 HTC124258- | 4413, 3465, | | 5483 |
| | | A01.R.18 FRAME: 2 ORF: 14 LEN: 960 | 4414, 4412 | | |
| 694 | 2059 | Open Reading Frame OS_ORF018734 ST(R) | | | |
| | | HTC125171-A01.F.33 FRAME: 3 ORF: 21 LEN: 1134 | | | |
| 606 | | Open Reading Frame OS_ORF018897 HTC126208- | 3901, 3903, | | |
| | | A01.R.39 FRAME: 1 ORF: 3 LEN: 771 | 3902 | | |
| 547 | 1977 | Open Reading Frame OS_ORF018926 HTC126702- | 4558, 2981, | 4895 | 5634 |
| | | A01.F.22 FRAME: 2 ORF: 2 LEN: 885 | 3307, 4204, | | |
| | | | 2800 | | |
| 686 | 2052 | Open Reading Frame containing a Sage tag sequence | | | |
| | | near 3 end OS_ORF018967 ST(F) HTC127058- | | | |
| | | A01.F.21 FRAME: 3 ORF: 7 LEN: 573 | | | |
| 565 | 1988 | Open Reading Frame containing a Sage tag sequence | 4000 | 5138 | 5337 |
| | | near 3 end OS_ORF019436 ST(F) HTC130824- | | | |
| | | A01.R.4 FRAME: −1 ORF: 4 LEN: 552 | | | |
| 709 | 2074 | Open Reading Frame OS_ORF019785 HTC133657- | | | |
| | | A01.F.8 FRAME: 1 ORF: 3 LEN: 669 | | | |
| 581 | 1998 | Open Reading Frame OS_ORF020319 HTC137006- | 3074, 3073, | | 5870 |
| | | A01.F.12 FRAME: 1 ORF: 2 LEN: 789 | 2797 | | |
| 620 | | Open Reading Frame OS_ORF020341 HTC137133- | | | |
| | | A01.R.7 FRAME: −1 ORF: 1 LEN: 657 | | | |
| 788 | 2132 | Open Reading Frame OS_ORF021355 HTC145457- | | | |
| | | A01.R.6 FRAME: 1 ORF: 1 LEN: 663 | | | |
| 553 | | Open Reading Frame OS_ORF021918 HTC150081- | 3229, 3412, | 4905 | |
| | | A01.F.16 FRAME: 2 ORF: 3 LEN: 654 | 3411, 2785, | | |
| | | | 4527, 4528, | | |
| | | | 4524 | | |

[0688] TABLE 8
SEQ ID NOs and corresponding description for Oryza genes which are expressed
in a root-specific manner and further the SEQ ID NOs for the corresponding
homologous sequences found in wheat, banana and maize.

| | | | | | |
|---|---|---|---|---|---|
| ORF | Promo | | Wheat | Bana | Maize |
| (SEQ | (SEQ | | (SEQ | (SEQ | (SEQ |
| ID) | ID) | Description | ID) | ID) | ID) |

Root

| | | | | | |
|---|---|---|---|---|---|
| 838 | 2164 | Similar to gi\|6979322\|gb\|AAF34415.1\|AF172282_4 | | | |
| | | unknown protein [Oryza sativa] | | | |
| 821 | 2156 | Similar to gi\|2696223\|dbj\|BAA23807.1\| chitinase | | | 5454 |
| | | [Oryza sativa] | | | |
| | | Similar to gi\|1621493\|dbj\|BAA12902.1\| reverse | | | |
| | | transcriptase [Oryza sativa] | | | |
| 917 | 2210 | Similar to gi\|6539565\|dbj\|BAA88182.1\| EST | 4460, 4459, | | 5832 |
| | | AU058092(S1536) corresponds to a region of the | 4458, 4603 | | |
| | | predicted gene.; Similar to presenilin (AC003981) | | | |
| | | [Oryza sativa] | | | |
| | | Similar to gi\|7442171\|pir\|\|T04166 thaumatin-like | | | |
| | | protein - rice | | | |
| 1013 | 2269 | Similar to gi\|312290\|emb\|CAA46022.1\| ORF [Oryza | 3997 | 5095 | 5879 |
| | | sativa] | | | |
| | | Similar to gi\|902266\|emb\|CAA60331.1\| ORF46 [Zea | | | |
| | | mays] | | | |
| 835 | 2163 | Similar to gi\|18782\|emb\|CAA78030.1\| wound-induced | | 5228 | 5376 |
| | | protein [Glycine max] | | | |
| 890 | | Similar to gi\|5139503\|emb\|CAB45558.1\| sucrose- | 4354, 3445, | 5101 | 5914 |
| | | phosphate synthase 1 [Hordeum vulgare] | 4352, 4353 | | |
| 907 | 2205 | Similar to C861_ARATH P48422 ARABIDOPSIS | 4608, 2911 | | 5599 |
| | | THALIANA (MOUSE-EAR CRESS). | | | |
| | | CYTOCHROME P450 LXXXVI (EC 1.14.-.-). | | | |
| 946 | 2224 | Similar to PP1_PHAVU P48490 PHASEOLUS | 4308, 4504, | 5198 | 5785 |
| | | VULGARIS (KIDNEY BEAN) (FRENCH BEAN). | 3227, 3070, | | |
| | | SERINE/THREONINE PROTEIN PHOSPHATASE | 2821, 3226 | | |
| | | PP1 (EC 3.1.3.16). | | | |
| 874 | 2187 | Similar to gi\|349211\|gb\|AAA32894.1\| ubiquitin | 4634, 4635, | 5151 | 5323 |
| | | conjugating enzyme | 3061, 3401, | | |
| | | | 3400, 3399, | | |
| | | | 4167, 4166, | | |
| | | | 4419, 4418, | | |
| | | | 4417, 4168, | | |
| | | | 3066, 3067, | | |
| | | | 3065, 3059, | | |
| | | | 3305, 3060, | | |
| | | | 3192, 3457, | | |
| | | | 3191, 2738, | | |
| | | | 4415, 4416 | | |
| 919 | | Similar to gi\|893406\|dbj\|BAA04612.1\| enolase [Oryza | 3551, 3063, | | 5240 |
| | | sativa] | 3797 | | |
| | | Similar to LOX2_ORYSA P29250 ORYZA SATIVA | | | |
| | | (RICE). LIPOXYGENASE L-2 (EC 1.13.11.12). | | | |
| 831 | | Similar to gi\|7267519\|emb\|CAB78002.1\| peroxidase C2 | | | 5678 |
| | | precursor like protein [Arabidopsis thaliana] | | | |
| 850 | 2174 | Similar to gi\|8927669\|gb\|AAF82160.1\|AC068143_2 | 4678, 4677 | | 5652 |
| | | Contains similarity to an acyl-CoA oxidase (ASX2) | | | |
| | | mRNA from Arabidopsis thaliana gb\|AF057043 and | | | |
| | | contains an acyl-CoA oxidase PF\|01756 domain. | | | |
| 980 | | Similar to gi\|5042458\|gb\|AAD38295.1\|AC007789_21 | 4226 | 5020 | 5762 |
| | | putative geranylgeranyl pyrophosphate synthase [Oryza | | | |
| | | sativa] | | | |
| 931 | | Similar to gi\|2129705\|pir\|\|S71183 RNA-directed DNA | 2928 | | |
| | | Polymerase (EC 2.7.7.49) (clone NING8) - Arabidopsis | | | |
| | | thaliana retrotransposon Ta16 (fragment) | | | |
| 820 | 2155 | Similar to gi\|1890323\|emb\|CAA72490.1\| peroxidase | | | |
| | | ATP29a [Arabidopsis thaliana] | | | |
| 972 | 2237 | Similar to gi\|8096589\|dbj\|BAA96162.1\| Similar to | | | 5905 |
| | | Oryza sativa bZIP transcriptional activator RF2a | | | |
| | | (AF005492) | | | |
| 971 | 2236 | Similar to gi\|5360178\|gb\|AAD42895.1\|AF159882_1 | 4131, 3078, | 4848 | |
| | | Cen-like protein FDR2 [Oryza sativa] | 4132 | | |
| 903 | 2202 | Similar to gi\|533707\|gb\|AAA67356.1\|3- | 3764, 4036 | | 5374 |
| | | methylcrotonyl-CoA carboxylase precursor | | | |
| 973 | 2238 | Similar to gi\|4337192\|gb\|AAD18106.1\| unknown | | 5039 | 5689 |
| | | protein [Arabidopsis thaliana] | | | |
| 997 | 2254 | Similar to gi\|4972062\|emb\|CAB43930.1\| putative | 4024, 2889, | 4985 | 5260 |
| | | protein [Arabidopsis thaliana] | 3931, 3930 | | |
| 912 | | Similar to gi\|6686410\|gb\|AAF23844.1\|AC007234_16 | 4148, 4149 | 4846 | |
| | | F1E22.4 [Arabidopsis thaliana] | | | |
| 854 | 2178 | Similar to gi\|928925\|emb\|CAA60516.1\| protein kinase | 3196, 3251 | | 5808 |
| | | catalytic domain (fragment) [Arabidopsis thaliana] | | | |
| 807 | 2147 | Similar to gi\|2920839\|gb\|AAC04628.1\| Os-FIERG2 | 3627, 3626 | | |
| | | gene product [Oryza sativa] | | | |
| 969 | | Similar to gi\|3264600\|gb\|AAC24571.1\| hypoxically | 2696, 2694, | | 5598 |
| | | induced transcript 2 [Zea mays] | 2695, 3298 | | |
| 893 | | Similar to COPP_HELPY Q48271 Q48257 O07682 | 2716, 3233, | 4811 | 5740 |
| | | HELICOBACTER PYLORI (CAMPYLOBACTER | 2717, 2715, | | |
| | | PYLORI). COP ASSOCIATED PROTEIN (COPPER | 2996, 4670 | | |
| | | ION BINDING PROTEIN). | | | |
| 1003 | 2259 | Similar to F4ST_FLACH P52837 FLAVERIA | | | 5710 |
| | | CHLORAEFOLIA. FLAVONOL 4 - | | | |
| | | SULFOTRANSFERASE (EC 2.8.2.-) (F4-ST). | | | |
| | | Similar to gi\|5733875\|gb\|AAD49763.1\|AC007932_11 | | | |
| | | F11A17.11 [Arabidopsis thaliana] | | | |
| | | Similar to gi\|8920602\|gb\|AAF81324.1\|AC007767_4 | | | |
| | | F5D14.4 [Arabidopsis thaliana] | | | |
| 950 | | Similar to gi\|5734731\|gb\|AAD49996.1\|AC007259_9 | | | |
| | | bifunctional nuclease bfh1 [Arabidopsis thaliana] | | | |
| 994 | 2252 | Similar to gi\|3549676\|emb\|CAA20587.1\| putative | | | |
| | | protein [Arabidopsis thaliana] | | | |
| 1010 | 2266 | Similar to gi\|4558683\|gb\|AAD22700.1\|AC006586_9 | | | |
| | | putative retroelement pol polyprotein [Arabidopsis | | | |
| | | thaliana] | | | |
| 804 | | Similar to gi\|6224924\|gb\|AAF06016.1\|AF194171_1 | 4331, 2822, | 5051 | |
| | | putative serine/threonine kinase [Hordeum vulgare] | 3254, 3239 | | |
| 1012 | 2268 | Similar to gi\|1755176\|gb\|AAB51577.1\| germin-like | 4115, 4075, | 5205 | 5760 |
| | | protein [Arabidopsis thaliana] | 4073, 4575, | | |
| | | | 4074, 4592, | | |
| | | | 4593, 4076, | | |
| | | | 4576 | | |
| 948 | 2225 | Similar to gi\|3925235\|gb\|AAC79955.1\| peroxidase K | | 5120 | 5640 |
| | | [Zea mays] | | | |
| 977 | 2239 | Similar to gi\|3941500\|gb\|AAC83626.1\| putative | | 4886 | 5658 |
| | | transcription factor [Arabidopsis thaliana] | | | |
| 959 | 2230 | Similar to gi\|5042456\|gb\|AAD38293.1\|AC007789_19 | 3922, 4050 | 4956 | 5481 |
| | | putative pathogenesis related protein [Oryza sativa] | | | |
| 808 | 2148 | Similar to gi\|7487384\|pir\|\|T13003 hypothetical protein | | | |
| | | T24C20.20 - Arabidopsis thaliana | | | |
| 864 | | Similar to gi\|7939506\|dbj\|BAA95709.1\| | 3208 | | |
| | | gene_id: K1G2.5˜similar to unknown protein | | | |
| | | (gb\|AAB61497.1) [Arabidopsis thaliana] | | | |
| 1002 | 2258 | Similar to gi\|6729546\|emb\|CAB67631.1\| putative | 3453, 3452 | | 5498 |
| | | protein [Arabidopsis thaliana] | | | |
| 960 | 2231 | Similar to gi\|6581046\|gb\|AAF18432.1\|AF192261_1 | | 5069 | 5882 |
| | | Rar1 [Hordeum vulgare] | | | |
| 928 | 2215 | Similar to gi\|6728960\|gb\|AAF26958.1\|AC018363_3 | 3003, 3351, | 4769 | |
| | | unknown protein [Arabidopsis thaliana] | 3350, 2990 | | |
| 870 | 2185 | Similar to gi\|2245139\|emb\|CAB10560.1\| hypothetical | | | 5440 |
| | | protein [Arabidopsis thaliana] | | | |
| 915 | 2209 | Similar to KAPC_YEAST P05986 | 4392, 2905, | 5179 | |
| | | SACCHAROMYCES CEREVISIAE (BAKER S | 4695, 3163, | | |
| | | YEAST). CAMP-DEPENDENT PROTEIN KINASE | 4694, 2944, | | |
| | | TYPE 3 (EC 2.7.1.37) (PKA 3). | 4394, 3263, | | |
| | | | 3449, 4393, | | |
| | | | 4080, 3088, | | |
| | | | 3237, 2754, | | |
| | | | 2753, 2987 | | |
| 968 | 2235 | Similar to SUHA_RAT P22789 RATTUS | | | |
| | | NORVEGICUS (RAT). ALCOHOL | | | |
| | | SULFOTRANSFERASE A (EC 2.8.2.2) | | | |
| | | (HYDROXYSTEROIDSULFOTRANSFERASE A) | | | |
| | | (STA) (ANDROSTERONE-SULFATING | | | |
| | | SULFOTRANSFERASE)(AD-ST) (ST-40). | | | |
| 894 | 2199 | Similar to TPS1_SCHPO P40387 | | 5029 | |
| | | SCHIZOSACCHAROMYCES POMBE (FISSION | | | |
| | | YEAST). ALPHA, ALPHA-TREHALOSE- | | | |
| | | PHOSPHATE SYNTHASE (UDP-FORMING) (EC | | | |
| | | 2.4.1.15)(TREHALOSE-6-PHOSPHATE | | | |
| | | SYNTHASE) (UDP-GLUCOSE- | | | |
| | | GLUCOSEPHOSPHATEGLUCOSYL- | | | |
| | | TRANSFERASE). | | | |
| 987 | 2246 | Similar to YYBP_BACSU P37488 BACILLUS | | | 5688 |
| | | SUBTILIS. HYPOTHETICAL 16.0 KD PROTEIN IN | | | |
| | | COTF-TETB INTERGENIC REGION. | | | |
| 829 | | Similar to gi\|8885556\|dbj\|BAA97486.1\| zinc | 4103, 4102, | 5174 | |
| | | transporter [Arabidopsis thaliana] | 3286, 3002 | | |
| 983 | 2242 | Similar to gi\|8468030\|dbj\|BAA96630.1\| hypothetical | | | |
| | | protein [Oryza sativa] | | | |
| 843 | 2169 | Similar to gi\|9294101\|dbj\|BAB01953.1\| contains | 3813, 3817, | 4933 | 5459 |
| | | similarity to AAA-type ATPase˜gene_id: T20D4.2 | 3812 | | |
| | | [Arabidopsis thaliana] | | | |
| | | Similar to SUI1_SALBA O48650 SALIX BAKKO | | | |
| | | (JAPANESE WILLOW). PROTEIN TRANSLATION | | | |
| | | FACTOR SUI1 HOMOLOG. | | | |
| 937 | | Similar to gi\|8920562\|gb\|AAF81284.1\|AC027656_1 | | 5227 | 5703 |
| | | Contains similarity to LAG1 homolog 1 from | | | |
| | | Arabidopsis thaliana gb\|AF198179. | | | |
| 863 | 2183 | Similar to gi\|2245131\|emb\|CAB10552.1\| hypothetical | 4443, 4442, | 5100 | 5282 |
| | | protein [Arabidopsis thaliana] | 3338, 3337, | | |
| | | | 3339 | | |
| 914 | | Similar to gi\|3550985\|dbj\|BAA32704.1\| OsS5a [Oryza | | 4864 | 5895 |
| | | sativa] | | | |
| 891 | | Similar to gi\|4768998\|gb\|AAD29712.1\|AF140499_1 | 3241, 4326, | 5162 | 5399 |
| | | chloroplast envelope calcium ATPase precursor [Oryza | 3250, 3007, | | |
| | | sativa] | 2885, 2986 | | |
| 828 | 2160 | Similar to gi\|4894182\|emb\|CAB43506.1\| 12- | 2876, 2742, | 4908 | 5432 |
| | | oxophytodienoate reductase [Lycopersicon esculentum] | 4690, 3223, | | |
| | | | 3224, 2700, | | |
| | | | 2701, 4657, | | |
| | | | 4246, 4247, | | |
| | | | 4644, 4249, | | |
| | | | 4656, 4643 | | |
| 836 | | Similar to gi\|230252\|pdb\|1PI2\|Bowman-Birk | | | |
| | | Proteinase Inhibitor PI-Ii | | | |
| | | Similar to gi\|8778336\|gb\|AAF79344.1\|AC007887_3 | | | |
| | | F15O4.6 [Arabidopsis thaliana] | | | |
| 846 | 2172 | Similar to gi\|7487145\|pir\|\|T02706 hypothetical protein | | | 5547 |
| | | T18E12.13 - Arabidopsis thaliana | | | |
| 927 | 2214 | Similar to gi\|3152556\|gb\|AAC17037.1\| Contains | 4340, 4341, | | 5556 |
| | | similarity to S. cerevisiae hypothetical protein | 4342 | | |
| | | YOR197w, gb\|Z75105. [Arabidopsis thaliana] | | | |
| 898 | 2200 | Similar to gi\|3687656\|gb\|AAC62209.1\| putative | 4356, 4355 | | 5236 |
| | | ethylene receptor; ERS2 [Arabidopsis thaliana] | | | |
| 817 | | Similar to PUR2_SALTY P26977 SALMONELLA | 3987, 3985, | | |
| | | TYPHIMURIUM. PHOSPHORIBOSYLAMINE-- | 3986 | | |
| | | GLYCINE LIGASE (EC 6.3.4.13) (GARS) | | | |
| | | (GLYCINAMIDERIBONUCLEOTIDE | | | |
| | | SYNTHETASE) | | | |
| | | (PHOSPHORIBOSYLGLYCINAMIDE | | | |
| | | SYNTHETASE). | | | |
| | | Similar to RNP_CHESE P04061 CHELYDRA | | | |
| | | SERPENTINA (SNAPPING TURTLE). | | | |
| | | RIBONUCLEASE (EC 3.1.27.5). | | | |
| | | Similar to gi\|9049462\|dbj\|BAA99427.1\| hypothetical | | | |
| | | protein [Oryza sativa] | | | |
| 814 | | Similar to gi\|2792202\|gb\|AAB96976.1\| NBS-LRR type | | | |
| | | resistance protein [Hordeum vulgare] | | | |
| 995 | 2253 | Similar to gi\|2605625\|dbj\|BAA23341.1\| OSMYB5 | 4463, 3481, | 4998 | 5296 |
| | | [Oryza sativa] | 3482, 4428, | | |
| | | | 3692, 3694 | | |
| 837 | | Similar to gi\|7340917\|dbj\|BAA92989.1\| ESTs | | | |
| | | AU083020(S13622), AU083021(S13622) correspond to | | | |
| | | a region of the predicted gene.; hypothetical protein | | | |
| | | [Oryza sativa] | | | |
| 909 | 2207 | Similar to gi\|6682234\|gb\|AAF23286.1\|AC016661_11 | 3184, 3183, | 4772 | 5577 |
| | | putative ankyrin [Arabidopsis thaliana] | 4259, 2969 | | |
| 862 | | Similar to HBPB_ARATH P43273 ARABIDOPSIS | 3162, 3450, | 4781 | |
| | | THALIANA (MOUSE-EAR CRESS). | 4516 | | |
| | | TRANSCRIPTION FACTOR HBP-1B. | | | |
| 857 | | Similar to gi\|4966357\|gb\|AAD34688.1\|AC006341_16 | 2926, 2925, | 4799 | 5490 |
| | | > F3O9.16 [Arabidopsis thaliana] | 2723, 2924 | | |
| 905 | | Similar to gi\|2262105\|gb\|AAB63613.1\| unknown | 3140, 3316, | 5128 | |
| | | protein | 3139, 3296, | | |
| | | | 4059, 4058, | | |
| | | | 4569 | | |
| 934 | | Similar to gi\|5903043\|gb\|AAD55602.1\|AC008016_12 | | | |
| | | Similar to gb\|X80301 auxin-independent growth | | | |
| | | promoter (axi 1) from Nicotiana tabacum. EST | | | |
| | | gb\|AA605466 comes from this gene. [Arabidopsis | | | |
| | | thaliana] | | | |
| 872 | 2186 | Similar to gi\|6723432\|emb\|CAB66925.1\| ADP- | | 4816 | 5377 |
| | | RIBOSYLATION FACTOR-like protein [Arabidopsis | | | |
| | | thaliana] | | | |
| 923 | 2213 | Similar to gi\|6681341\|gb\|AAF23258.1\|AC015985_16 | 4542 | | 5591 |
| | | putative RING zinc finger protein [Arabidopsis | | | |
| | | thaliana] | | | |
| 920 | 2211 | Similar to gi\|6911848\|emb\|CAB72148.1\| n- | | | 5298 |
| | | acetylglucosaminyl-phosphatidylinositol-like protein | | | |
| | | [Arabidopsis thaliana] | | | |
| | | Similar to gi\|1353266\|gb\|AAB01678.1\| Fe(II) transport | | | |
| | | protein | | | |
| 855 | 2179 | Similar to MSK_MOUSE Q60670 MUS MUSCULUS | 3163, 2905, | | |
| | | (MOUSE). PUTATIVE SERINE/THREONINE- | 4694, 3263, | | |
| | | PROTEIN KINASE MSK (EC 2.7.1.-) (HRT- | 2944, 4639, | | |
| | | 20) (MYOCARDIAL SNF1-LIKE KINASE) | 4213, 3088, | | |
| | | (FRAGMENT). | 3237, 4392, | | |
| | | | 3449, 4638 | | |
| 979 | 2240 | Similar to LDHH_RABIT P13490 ORYCTOLAGUS | 3057, 3056, | 4779 | 5745 |
| | | CUNICULUS (RABBIT). L-LACTATE | 2728 | | |
| | | DEHYDROGENASE H CHAIN (EC 1.1.1.27) (LDH- | | | |
| | | B) (FRAGMENT). | | | |
| 1019 | | Similar to gi\|8885533\|dbj\|BAA97463.1\| | 4107, 4106, | | 5810 |
| | | gene_id: F17P19.10˜unknown protein [Arabidopsis | 4104 | | |
| | | thaliana] | | | |
| | | Similar to gi\|3786001\|gb\|AAC67347.1\|unknown | | | |
| | | protein [Arabidopsis thaliana] | | | |
| 1011 | 2267 | Similar to gi\|3928079\|gb\|AAC79605.1\| hypothetical | | | |
| | | protein [Arabidopsis thaliana] | | | |
| 884 | 2196 | Similar to gi\|5262790\|emb\|CAB45895.1\| carbonic | | | 5773 |
| | | anhydrase-like protein [Arabidopsis thaliana] | | | |
| 844 | 2170 | Similar to gi\|7485276\|pir\|\|T08859 hypothetical protein | | | 5265 |
| | | A_TM017A05.4 - Arabidopsis thaliana | | | |
| 810 | | Similar to gi\|2072727\|emb\|CAA73170.1\| Fd-GOGAT | | | 5460 |
| | | protein [Oryza sativa] | | | |
| 824 | 2157 | Similar to gi\|5672692\|dbj\|BAA82696.1\| nuclease I | 3762, 3696 | | 5715 |
| | | [Hordeum vulgare] | | | |
| 981 | 2241 | Similar to gi\|6143866\|gb\|AAF04413.1\|AC010927_6 | 3803, 3802 | 5003 | |
| | | hypothetical protein [Arabidopsis thaliana] | | | |
| 830 | 2161 | Similar to GTT1_HUMAN P30711 O00226 HOMO | 4465, 4464, | 4836 | |
| | | SAPIENS (HUMAN). GLUTATHIONE S- | 4466 | | |
| | | TRANSFERASE THETA 1 (EC 2.5.1.18) (CLASS- | | | |
| | | THETA). | | | |
| 1009 | 2265 | Similar to gi\|6566348\|dbj\|BAA88269.1\| RNA binding | 2763 | 5111 | 5259 |
| | | protein [Arabidopsis thaliana] | | | |
| | | Similar to RPB8_HUMAN P52434 P53802 HOMO | | | |
| | | SAPIENS (HUMAN). DNA-DIRECTED RNA | | | |
| | | POLYMERASES I, II, AND III 17.1 KD | | | |
| | | POLYPEPTIDE (EC 2.7.7.6) (RPB17) (RPB8). | | | |
| 989 | 2248 | Similar to VPR2_MOUSE P13373 MUS MUSCULUS | | | |
| | | (MOUSE). IMMUNOGLOBULIN OMEGA CHAIN | | | |
| | | PRECURSOR (V(PREB)2 PROTEIN). | | | |
| 840 | 2166 | Similar to TPMB_RABIT P02560 ORYCTOLAGUS | | | |
| | | CUNICULUS (RABBIT), MUS MUSCULUS | | | |
| | | (MOUSE), AND RATTUS NORVEGICUS (RAT). | | | |
| | | TROPOMYOSIN BETA CHAIN, SKELETAL | | | |
| | | MUSCLE. | | | |
| 834 | 2162 | Similar to YR81_CAEEL Q09566 | | 5178 | 5893 |
| | | CAENORHABDITIS ELEGANS. HYPOTHETICAL | | | |
| | | 35.0 KD PROTEIN F48E8.1 IN CHROMOSOME III. | | | |
| 805 | 2146 | Similar to VA5_POLAN Q05109 POLISTES | | 5178 | 5893 |
| | | ANNULARIS (PAPER WASP). VENOM | | | |
| | | ALLERGEN 5 PRECURSOR (ANTIGEN 5) (AG5) | | | |
| | | (ALLERGEN POL A 5) (POL AV) (FRAGMENT). | | | |
| | | Similar to YGI0_YEAST P53157 | | | |
| | | SACCHAROMYCES CEREVISIAE (BAKER S | | | |
| | | YEAST). HYPOTHETICAL 15.0 KD PROTEIN IN | | | |
| | | SCY1-DBP3 INTERGENIC REGION. | | | |
| | | Similar to gi\|8778631\|gb\|AAF79639.1\|AC025416_13 | | | |
| | | F5O11.20 [Arabidopsis thaliana] | | | |
| 1006 | 2262 | Similar to gi\|7487595\|pir\|\|T00816 hypothetical protein | | | |
| | | T32G6.12 - Arabidopsis thaliana | | | |
| 873 | | Similar to gi\|4314355\|gb\|AAD15566.1\| unknown | | 4955 | |
| | | protein [Arabidopsis thaliana] | | | |
| | | Similar to gi\|3201616\|gb\|AAC20723.1\| hypothetical | | | |
| | | protein [Arabidopsis thaliana] | | | |
| 984 | 2243 | Similar to gi\|2558660\|gb\|AAB81674.1\| unknown | | | 5630 |
| | | protein [Arabidopsis thaliana] | | | |
| 826 | 2158 | Similar to gi\|5823325\|gb\|AAD53101.1\|AF175996_1 | | 4886 | 5381 |
| | | putative transcription factor [Arabidopsis thaliana] | | | |
| 986 | 2245 | Similar to gi\|6453890\|gb\|AAF09073.1\|AC011663_9 | | 4981 | 5646 |
| | | hypothetical protein [Arabidopsis thaliana] | | | |
| 806 | | Similar to gi\|20242\|emb\|CAA36189.1\| GOS9 [Oryza | | | |
| | | sativa] | | | |
| 875 | 2188 | Similar to gi\|4056457\|gb\|AAC98030.1\| ESTs | | 5013 | 5505 |
| | | gb\|234051 and gb\|F13722 come from this gene. | | | |
| | | [Arabidopsis thaliana] | | | |
| 868 | 2184 | Similar to gi\|5042453\|gb\|AAD38290.1\|AC007789_16 | 3922, 4050 | | |
| | | putative pathogenesis related protein [Oryza sativa] | | | |
| | | Similar to gi\|7228462\|dbj\|BAA92422.1\| ESTs | | | |
| | | AU081576(R0541), AU032412(R4029) correspond to a | | | |
| | | region of the predicted gene.; Similar to A. thaliana | | | |
| | | mRNA for peroxidase ATP18a. (X98804) [Oryza | | | |
| | | sativa] | | | |
| 954 | | Similar to gi\|5852096\|emb\|CAB55403.1\| zwh19.1 | | 5122 | 5513 |
| | | [Oryza sativa] | | | |
| 1016 | 2272 | Similar to HAP5_YEAST Q02516 Q08827 | 3034, 3988, | 5037 | 5625 |
| | | SACCHAROMYCES CEREVISIAE (BAKER S | 3344, 3343 | | |
| | | YEAST). HAP5 TRANSCRIPTIONAL ACTIVATOR. | | | |
| | | Similar to gi\|8778406\|gb\|AAF79414.1\|AC068197_24 | | | |
| | | F16A14.11 [Arabidopsis thaliana] | | | |
| 860 | 2181 | Similar to gi\|6729039\|gb\|AAF27035.1\|AC009177_25 | 4396, 4397, | 4866 | 5353 |
| | | unknown protein [Arabidopsis thaliana] | 4395 | | |
| 996 | | Similar to gi\|6006895\|gb\|AAF00670.1\|AC008153_22 | 2892 | | 5439 |
| | | hypothetical protein [Arabidopsis thaliana] | | | |
| 962 | 2232 | Similar to gi\|5295986\|dbj\|BAA81884.1\| MADS box- | | 5225 | 5545 |
| | | like protein [Oryza sativa] | | | |
| 974 | | Similar to gi\|9279651\|dbj\|BAB01151.1\| flavonol 3-O- | | | |
| | | glucosyltransferase-like protein [Arabidopsis thaliana] | | | |
| | | Similar to gi\|7670036\|dbj\|BAA94990.1\| | | | |
| | | gb\|AAD22658.1˜gene_id: K14A17.19˜similar to | | | |
| | | unknown protein [Arabidopsis thaliana] | | | |
| 976 | | Similar to gi\|3786011\|gb\|AAC67357.1\| putative RNA- | 4645 | | 5273 |
| | | binding protein [Arabidopsis thaliana] | | | |
| 832 | | Similar to gi\|6503288\|gb\|AAF14664.1\|AC011713_12 | | | |
| | | Similar to gb\|D17443 major intrinsic protein from | | | |
| | | Oryza sativa. EST gb\|AI998369 comes from this gene. | | | |
| | | [Arabidopsis thaliana] | | | |
| 963 | | Similar to gi\|4204294\|gb\|AAD10675.1\| lcl\|prt_seq No | 3125, 3123, | 4823 | 5768 |
| | | definition line found | 3124, 3122 | | |
| 1005 | 2261 | Similar to gi\|6041850\|gb\|AAF02159.1\|AC009853_19 | 4537, 4572 | | |
| | | unknown protein [Arabidopsis thaliana] | | | |
| 913 | | Similar to INB1_CAEEL Q09626 | 3876, 4583, | 5028 | 5924 |
| | | CAENORHABDITIS ELEGANS. PROBABLE | 4582, 4611 | | |
| | | INSULIN-LIKE PEPTIDE BETA-TYPE 1 | | | |
| | | PRECURSOR. | | | |
| | | Similar to VMT2_INBAD P13882 INFLUENZA B | | | |
| | | VIRUS (STRAIN B/ANN ARBOR/1/66 [WILD- | | | |
| | | TYPE]). PROBABLE MATRIX (M2) PROTEIN. | | | |
| 1007 | 2263 | Similar to gi\|6227004\|gb\|AAF06040.1\|AC009360_5 | | | |
| | | F16G16.5 [Arabidopsis thaliana] | | | |
| 910 | 2208 | Similar to gi\|6409176\|gb\|AAF07875.1\| nitrate | 3451, 4444, | 5143 | |
| | | transporter [Oryza sativa] | 2778 | | |
| 896 | | Similar to gi\|2300156\|emb\|CAA02837.1\| unnamed | 3081, 4706, | 5084 | 5814 |
| | | protein product [Arabidopsis thaliana] | 4707, 2982, | | |
| | | | 4708, 2900, | | |
| | | | 4492, 4491, | | |
| | | | 2792, 2791, | | |
| | | | 4490 | | |
| 943 | 2222 | Similar to gi\|7573456\|emb\|CAB87770.1\| putative | 3072, 3071 | 5055 | 5729 |
| | | protein [Arabidopsis thaliana] | | | |
| 867 | | Similar to gi\|3258570\|gb\|AAC24380.1\| Unknown | 3358, 3357 | | |
| | | protein [Arabidopsis thaliana] | | | |
| 940 | 2220 | Similar to gi\|6562002\|emb\|CAB62491.1\| hypothetical | | | 5455 |
| | | protein [Arabidopsis thaliana] | | | |
| 878 | 2191 | Similar to gi\|1871177\|gb\|AAB63537.1\| unknown | | 4873 | 5342 |
| | | protein [Arabidopsis thaliana] | | | |
| 1014 | 2270 | Similar to gi\|2065013\|emb\|CAA72363.1\| cyclic | 2755 | 5009 | 5886 |
| | | phosphodiesterase [Arabidopsis thaliana] | | | |
| 947 | | Similar to gi\|3687230\|gb\|AAC62128.1\| unknown | | 4990 | |
| | | protein [Arabidopsis thaliana] | | | |
| 818 | 2153 | Similar to gi\|6689924\|gb\|AAF23902.1\|AF194415_1 | 3107, 2787, | | 5501 |
| | | MAP kinase homolog [Oryza sativa] | 3272, 3116 | | |
| 881 | 2193 | Similar to DHCA_RABIT P47844 ORYCTOLAGUS | 4027, 3382, | | 5779 |
| | | CUNICULUS (RABBIT). CARBONYL | 3383, 4026, | | |
| | | REDUCTASE (NADPH) (EC 1.1.1.184) (NADPH- | 3384, 4025, | | |
| | | DEPENDENT CARBONYLREDUCTASE). | 3303, 3285, | | |
| | | | 2955, 3232, | | |
| | | | 4671, 4585, | | |
| | | | 2712, 2673 | | |
| 882 | 2194 | Similar to S111_PIG P31950 SUS SCROFA (PIG). | 2713, 3419, | 5169 | 5711 |
| | | CALGIZZARIN (S100C PROTEIN). | 3417, 3418, | | |
| | | | 2937, 3639, | | |
| | | | 3631, 3633, | | |
| | | | 4200, 3632, | | |
| | | | 2936, 3637, | | |
| | | | 3638, 3629, | | |
| | | | 3635, 3640, | | |
| | | | 3216, 3217, | | |
| | | | 3218, 3636, | | |
| | | | 3630, 3634, | | |
| | | | 3628, 4199 | | |
| 869 | | Similar to NODQ_RHIME P13442 RHIZOBIUM | | 4843 | 5283 |
| | | MELILOTI. PROBABLE SULFATE ADENYLATE | | | |
| | | TRANSFERASE SUBUNIT 1 (EC 2.7.7.4) (ATP- | | | |
| | | SULFURYLASE) (MODULATION PROTEIN Q). | | | |
| 801 | | Similar to PPCK_TRYCR P51058 TRYPANOSOMA | 3300, 4461, | | |
| | | CRUZI. PHOSPHOENOLPYRUVATE | 4462 | | |
| | | CARBOXYKINASE (ATP), GLYCOSOMAL (EC | | | |
| | | 4.1.1.49). | | | |
| 941 | | Similar to gi\|9295687\|gb\|AAF86993.1\|AC005292_2 | 3274 | 5054 | 5344 |
| | | F26F24.2 [Arabidopsis thaliana] | | | |
| 942 | 2221 | Similar to gi\|8886993\|gb\|AAF80653.1\|AC012190_9 | | 5116 | |
| | | Similar to a dnaJ-like protein from Arabidopsis | | | |
| | | thaliana gb\|Y11969. It contains a DnaJ domain | | | |
| | | PF\|00226. EST gb\|H37613 comes from this gene. | | | |
| 957 | | Similar to gi\|4539295\|emb\|CAB39598.1\| putative | | | |
| | | protein [Arabidopsis thaliana] | | | |
| 812 | | Similar to gi\|4741195\|emb\|CAB41861.1\| ABC | 3024 | | |
| | | transporter-like protein [Arabidopsis thaliana] | | | |
| 865 | | Similar to gi\|4490316\|emb\|CAB38807.1\| nucellin-like | | | 5366 |
| | | protein [Arabidopsis thaliana] | | | |
| 906 | 2204 | Similar to gi\|5732059\|gb\|AAD48958.1\|AF149414_7 | 3330, 3037, | 4865 | 5645 |
| | | similar to Pfam families PF00069 (Eukaryotic protein | 2681, 3291, | | |
| | | kinase domain; score = 180.8, E = 2.2e−50, N = 2) and | 3329, 3292, | | |
| | | PF00036 (EF hand; score = 123.5, E = 4e−33, N = 1) | 4431, 2964, | | |
| | | [Arabidopsis thaliana] | 2686, 3328, | | |
| | | | 4621 | | |
| 1018 | 2274 | Similar to gi\|6017109\|gb\|AAF01592.1\|AC009895_13 | 4358, 3198, | | 5913 |
| | | hypothetical protein [Arabidopsis thaliana] | 3197, 4357, | | |
| | | | 4359 | | |
| 856 | | Similar to ALAT_HUMAN P24298 P78398 Q93076 | | 4801 | 5784 |
| | | HOMO SAPIENS (HUMAN). ALANINE | | | |
| | | AMINOTRANSFERASE (EC 2.6.1.2) (GLUTAMIC-- | | | |
| | | PYRUVIC TRANSAMINASE) (GPT) (GLUTAMIC-- | | | |
| | | ALANINE TRANSAMINASE). | | | |
| | | Similar to BST2_HUMAN Q10589 HOMO SAPIENS | | | |
| | | (HUMAN). BONE MARROW STROMAL ANTIGEN | | | |
| | | 2 (BST-2). | | | |
| | | Similar to FSHB_MOUSE Q60687 MUS MUSCULUS | | | |
| | | (MOUSE). FOLLITROPIN BETA CHAIN | | | |
| | | PRECURSOR (FOLLICLE-STIMULATING | | | |
| | | HORMONE)(FSH-B). | | | |
| 966 | | Similar to CP24_MOUSE Q64441 MUS MUSCULUS | 4562, 3780, | 4856 | |
| | | (MOUSE). CYTOCHROME P450-CC24 | 4600, 3878, | | |
| | | MITOCHONDRIAL PRECURSOR (EC 1.14.-.-) | 3130, 4599, | | |
| | | (P450-CC24) (VITAMIN D(3) 24-HYDROXYLASE) | 3080, 3129, | | |
| | | (1,25-DIHYDROXYVITAMIN D(3) 24- | 4561, 3781, | | |
| | | HYDROXYLASE) (24-OHASE). | 3779, 3142 | | |
| 951 | 2227 | Similar to GUN5_TRIRE P43317 TRICHODERMA | 3093, 4139 | 5118 | 5288 |
| | | REESEI. ENDOGLUCANASE V PRECURSOR (EC | | | |
| | | 3.2.1.4) (ENDO-1,4-BETA-GLUCANASE | | | |
| | | V)(CELLULASE V) (EG V). | | | |
| 904 | 2203 | Similar to KR1_SVVD Q04543 SIMIAN | 4212, 4211, | | |
| | | VARICELLA VIRUS (STRAIN DHV) | 2832 | | |
| | | (CERCOPITHECINE HERPESVIRUS 9). | | | |
| | | SERINE/THREONINE-PROTEIN KINASE (EC | | | |
| | | 2.7.1.-). | | | |
| | | Similar to MIH_CARMA Q27225 CARCINUS | | | |
| | | MAENAS (COMMON SHORE CRAB) (GREEN | | | |
| | | CRAB). MOLT-INHIBITING HORMONE | | | |
| | | PRECURSOR (MIH). | | | |
| 899 | | Similar to SRA5_CAEEL Q09207 | 3252, 3461, | | |
| | | CAENORHABDITIS ELEGANS. SRA-5 PROTEIN. | 3460 | | |
| 845 | 2171 | Similar to XYN1_EMENI P55332 Q00173 | | | 5561 |
| | | EMERICELLA NIDULANS (ASPERGILLUS | | | |
| | | NIDULANS). ENDO-1,4-BETA-XYLANASE 1 | | | |
| | | PRECURSOR (EC 3.2.1.8) (XYLANASE 1)(1,4- | | | |
| | | BETA-D-XYLAN XYLANOHYDROLASE 1). | | | |
| 902 | | Similar to gi\|1313907\|dbj\|BAA12691.1\| CDPK-related | 4091, 3182 | | 5758 |
| | | protein kinase [Zea mays] | | | |
| 851 | 2175 | Similar to gi\|8468018\|dbj\|BAA96618.1\| hypothetical | | | |
| | | protein [Oryza sativa] | | | |
| 970 | | Similar to gi\|6553889\|gb\|AAF16555.1\|AC012563_8 | | 5072 | 5635 |
| | | putative RING zinc finger protein [Arabidopsis | | | |
| | | thaliana] | | | |
| 1004 | 2260 | Similar to gi\|7340671\|emb\|CAB82970.1\| putative | 2931 | | 5721 |
| | | protein [Arabidopsis thaliana] | | | |
| | | Similar to gi\|3063458\|gb\|AAC14046.1\|AAC14046 | | | |
| | | F22O13.20 [Arabidopsis thaliana] | | | |
| 1001 | 2257 | Similar to gi\|4938502\|emb\|CAB43860.1\| putative | 4455, 4456, | 5093 | |
| | | protein [Arabidopsis thaliana] | 4457 | | |
| 918 | | Similar to gi\|7573363\|emb\|CAB87669.1\| putative | 4625, 4626 | | |
| | | protein [Arabidopsis thaliana] | | | |
| 958 | 2229 | Similar to gi\|7527730\|gb\|AAF63179.1\|AC010657_15 | | | |
| | | T5E21.3 [Arabidopsis thaliana] | | | |
| 975 | | Similar to gi\|6554473\|gb\|AAF16655.1\|AC012394_4 | 2927, 4090 | | 5528 |
| | | putative RNA-binding protein [Arabidopsis thaliana] | | | |
| | | Similar to ARGC_BACST Q07906 BACILLUS | | | |
| | | STEAROTHERMOPHILUS. N-ACETYL-GAMMA- | | | |
| | | GLUTAMYL-PHOSPHATE REDUCTASE (EC | | | |
| | | 1.2.1.38) (AGPR) (N-ACETYL-GLUTAMATE | | | |
| | | SEMIALDEHYDE DEHYDROGENASE) (NAGSA | | | |
| | | DEHYDROGENASE)(FRAGMENT). | | | |
| | | Similar to SUBT_BACMS P07518 BACILLUS | | | |
| | | MESENTERICUS. SUBTILISIN (EC 3.4.21.62) | | | |
| | | (ALKALINE MESENTERICOPEPTIDASE). | | | |
| | | Similar to IDH_METJA Q58991 | | | |
| | | METHANOCOCCUS JANNASCHII. ISOCITRATE | | | |
| | | DEHYDROGENASE (NADP) (EC 1.1.1.42) | | | |
| | | (OXALOSUCCINATEDECARBOXYLASE) (IDH) | | | |
| | | (NADP+-SPECIFIC ICDH) (IDP). | | | |
| 932 | | Similar to SYD_RAT P15178 RATTUS | | | |
| | | NORVEGICUS (RAT). ASPARTYL-TRNA | | | |
| | | SYNTHETASE (EC 6.1.1.12) (ASPARTATE--TRNA | | | |
| | | LIGASE)(ASPRS). | | | |
| 861 | 2182 | Similar to YK56_YEAST P36156 | | | |
| | | SACCHAROMYCES CEREVISIAE (BAKER S | | | |
| | | YEAST). HYPOTHETICAL 43.3 KD PROTEIN IN | | | |
| | | SIS2-MTD1 INTERGENIC REGION. | | | |
| 853 | 2177 | Similar to gi\|2065531\|gb\|AAC49704.1\| endo-1,4-beta- | 2917, 3477, | | 5612 |
| | | glucanase [Lycopersicon esculentum] | 3028 | | |
| | | Similar to gi\|22347\|emb\|CAA41447.1\| In2-1 [Zea | | | |
| | | mays] | | | |
| | | Similar to gi\|8778603\|gb\|AAF79611.1\|AC027665_12 | | | |
| | | F5M15.17 [Arabidopsis thaliana] | | | |
| 949 | 2226 | Similar to gi\|2109293\|gb\|AAB69123.1\| serine/threonine | 2762, 2708 | 5087 | |
| | | protein kinase [Arabidopsis thaliana] | | | |
| 827 | 2159 | Similar to gi\|9294516\|dbj\|BAB02778.1\| contains | | | 5308 |
| | | similarity to endo-1,3-1,4-beta-D- | | | |
| | | glucanase˜gene_id: MDB19.8 [Arabidopsis thaliana] | | | |
| 998 | 2255 | Similar to gi\|8671834\|gb\|AAF78397.1\|AC009273_3 | | | 5643 |
| | | Contains similarity to a putative protein T2J13.100 | | | |
| | | gi\|6522560 from Arabidopsis thaliana BAC T2J13 | | | |
| | | gb\|AL132967. | | | |
| 944 | | Similar to gi\|7658344\|gb\|AAF66134.1\| unknown | 4361, 4365, | 5057 | 5335 |
| | | protein [Arabidopsis thaliana] | 4364 | | |
| 847 | | Similar to gi\|4581139\|gb\|AAD24623.1\|AC006919_2 | 2883, 3252, | 4881 | |
| | | putative ABC transporter [Arabidopsis thaliana] | 3290, 3230, | | |
| | | | 3077, 3461, | | |
| | | | 3460 | | |
| 842 | 2168 | Similar to gi\|6478930\|gb\|AAF14035.1\|AC011436_19 | 3222 | | 5527 |
| | | unknown protein [Arabidopsis thaliana] | | | |
| 848 | 2173 | Similar to gi\|3522943\|gb\|AAC34225.1\| putative ABC | 3472, 2719, | | |
| | | transporter [Arabidopsis thaliana] | 3365, 3295, | | |
| | | | 4159, 3109, | | |
| | | | 4581, 4580, | | |
| | | | 3364, 4158, | | |
| | | | 2809, 4496, | | |
| | | | 4497, 4160, | | |
| | | | 4530, 2932, | | |
| | | | 3271, 4529, | | |
| | | | 3269, 2707 | | |
| 925 | | Similar to gi\|7452467\|pir\|\|T00932 hypothetical protein | | | |
| | | T24P15.14 - Arabidopsis thaliana | | | |
| 964 | | Similar to gi\|3080398\|emb\|CAA18718.1\| putative | | | 5243 |
| | | protein [Arabidopsis thaliana] | | | |
| 952 | | Similar to gi\|4467159\|emb\|CAB37528.1\| hypothetical | 4169 | 5171 | |
| | | protein [Arabidopsis thaliana] | | | |
| 967 | 2234 | Similar to gi\|6911879\|emb\|CAB72179.1\| hypothetical | 4489 | 4885 | |
| | | protein [Arabidopsis thaliana] | | | |
| 871 | | Similar to gi\|6562261\|emb\|CAB62631.1\| putative | 3396, 3394, | | 5580 |
| | | protein [Arabidopsis thaliana] | 3395 | | |
| 833 | | Similar to gi\|6403490\|gb\|AAF07830.1\|AC010871_6 | | | 5331 |
| | | putative SCO1 protein [Arabidopsis thaliana] | | | |
| | | Similar to gi\|6573782\|gb\|AAF17702.1\|AC009243_29 | | | |
| | | F28K19.2 [Arabidopsis thaliana] | | | |
| 815 | | Similar to gi\|5882745\|gb\|AAD55298.1\|AC008263_29 | 4560 | | 5299 |
| | | F25A4.24 [Arabidopsis thaliana] | | | |
| 956 | | Similar to gi\|2317901\|gb\|AAC24365.1\| Similar to | | 4952 | |
| | | vesicle transport protein, PIR Accession Number | | | |
| | | A55931 [Arabidopsis thaliana] | | | |
| 939 | 2219 | Similar to gi\|3850584\|gb\|AAC72124.1\| ESTs | | 5159 | |
| | | gb\|H37641 and gb\|AA651422 come from this gene. | | | |
| | | [Arabidopsis thaliana] | | | |
| | | Similar to gi\|2341032\|gb\|AAB70432.1\| EST | | | |
| | | gb\|ATTS0956 comes from this gene. [Arabidopsis | | | |
| | | thaliana] | | | |
| 900 | | Similar to ANAG_HUMAN P54802 HOMO SAPIENS | 4313, 4312 | 5010 | 5276 |
| | | (HUMAN). ALPHA-N- | | | |
| | | ACETYLGLUCOSAMINIDASE PRECURSOR (EC | | | |
| | | 3.2.1.50) (N-ACETYL-ALPHA- | | | |
| | | GLUCOSAMINIDASE) (NAG). | | | |
| 876 | 2189 | Similar to DP1_HUMAN Q00765 Q04198 HOMO | | | |
| | | SAPIENS (HUMAN). POLYPOSIS LOCUS | | | |
| | | PROTEIN 1 (TB2 PROTEIN). | | | |
| 965 | 2233 | Similar to LEPU_BACSU P42959 BACILLUS | 4399 | | |
| | | SUBTILIS. SIGNAL PEPTIDASE I U (EC 3.4.21.89) | | | |
| | | (SPASE I) (LEADER PEPTIDASE I). | | | |
| | | Similar to YR73_ECOLI P21313 ESCHERICHIA | | | |
| | | COLI. HYPOTHETICAL 22.9 KD PROTEIN (ORF3) | | | |
| | | (RETRON EC67). | | | |
| | | Similar to gi\|2062170\|gb\|AAB63644.1\| unknown | | | |
| | | protein | | | |
| 892 | | Similar to gi\|7573426\|emb\|CAB87742.1\| putative | | 4902 | |
| | | protein [Arabidopsis thaliana] | | | |
| 990 | | Similar to gi\|4220531\|emb\|CAA23004.1\| hypothetical | | 4993 | |
| | | protein [Arabidopsis thaliana] | | | |
| 879 | | Similar to gi\|4538950\|emb\|CAB39774.1\| putative | | 5002 | |
| | | protein [Arabidopsis thaliana] | | | |
| 889 | | Similar to gi\|2335108\|gb\|AAC02769.1\| putative zinc | | | |
| | | protease [Arabidopsis thaliana] | | | |
| | | Similar to gi\|4006913\|emb\|CAB16843.1\| hypothetical | | | |
| | | protein [Arabidopsis thaliana] | | | |
| 825 | | Similar to gi\|6633820\|gb\|AAF19679.1\|AC009519_13 | 2909 | | |
| | | F1N19.20 [Arabidopsis thaliana] | | | |
| 969 | | Similar to gi\|6728988\|gb\|AAF26986.1\|AC018363_31 | 2696, 2694, | | 5598 |
| | | putative aspartyl protease [Arabidopsis thaliana] | 2695, 3298 | | |
| 897 | | Similar to gi\|6706418\|emb\|CAB66104.1\| protease-like | 3393, 3391, | | |
| | | protein [Arabidopsis thaliana] | 3392 | | |
| 938 | | Similar to gi\|433663\|emb\|CAA82234.1\| myosin | | | |
| | | [Arabidopsis thaliana] | | | |
| 982 | | Similar to ARGC_STRCO P54895 STREPTOMYCES | | | |
| | | COELICOLOR. N-ACETYL-GAMMA-GLUTAMYL- | | | |
| | | PHOSPHATE REDUCTASE (EC 1.2.1.38) (AGPR) | | | |
| | | (N-ACETYL-GLUTAMATE SEMIALDEHYDE | | | |
| | | DEHYDROGENASE) (NAGSA | | | |
| | | DEHYDROGENASE)(FRAGMENT). | | | |
| | | Similar to DEZ_HUMAN Q99788 Q99789 HOMO | | | |
| | | SAPIENS (HUMAN). PROBABLE G PROTEIN- | | | |
| | | COUPLED RECEPTOR DEZ. | | | |
| 908 | 2206 | Similar to EPC_HUMAN P01854 HOMO SAPIENS | 4640 | 4996 | 5526 |
| | | (HUMAN). IG EPSILON CHAIN C REGION. | | | |
| 922 | | Similar to HEM1_EMENI P38092 EMERICELLA | 2790 | | |
| | | NIDULANS (ASPERGILLUS NIDULANS). 5- | | | |
| | | AMINOLEVULINIC ACID SYNTHASE, | | | |
| | | MITOCHONDRIAL PRECURSOR (EC | | | |
| | | 2.3.1.37) (DELTA-AMINOLEVULINATE | | | |
| | | SYNTHASE) (DELTA-ALA SYNTHETASE). | | | |
| 813 | 2151 | Similar to LOXP_MOUSE P39655 MUS | 3053, 4540, | 4826 | 5578 |
| | | MUSCULUS (MOUSE). ARACHIDONATE 12- | 3946, 4046, | | |
| | | LIPOXYGENASE, PLATELET-TYPE (EC | 4372, 4538, | | |
| | | 1.13.11.31) (12-LOX). | 4539, 3424, | | |
| | | | 4373, 4047, | | |
| | | | 4374, 3945, | | |
| | | | 4045, 3944 | | |
| 819 | 2154 | Similar to LIG_PHLRA P20010 PHLEBIA RADIATA | 3413 | 5141 | |
| | | (WHITE-ROT FUNGUS). LIGNINASE III | | | |
| | | PRECURSOR (EC 1.11.1.-) (LIGNIN | | | |
| | | PEROXIDASE). | | | |
| | | Similar to MDM2_MESAU Q60524 | | | |
| | | MESOCRICETUS AURATUS (GOLDEN | | | |
| | | HAMSTER). MDM2 PROTEIN (P53-ASSOCIATED | | | |
| | | PROTEIN) (FRAGMENT). | | | |
| 803 | 2145 | Similar to PEPG_LACDL P94869 LACTOBACILLUS | | | 5875 |
| | | DELBRUECKII (SUBSP. LACTIS). | | | |
| | | AMINOPEPTIDASE G (EC 3.4.22.-). | | | |
| 933 | | Similar to PPCT_BOVIN P02720 BOS TAURUS | 3020, 3021 | 4999 | 5868 |
| | | (BOVINE). PHOSPHATIDYLCHOLINE TRANSFER | | | |
| | | PROTEIN (PC-TP). | | | |
| 916 | | Similar to RGS6_HUMAN P49758 HOMO SAPIENS | | | |
| | | (HUMAN). REGULATOR OF G-PROTEIN | | | |
| | | SIGNALING 6 (RGS6) (S914) (FRAGMENT). | | | |
| | | Similar to SRE1_CRIGR Q60416 CRICETULUS | | | |
| | | GRISEUS (CHINESE HAMSTER). STEROL | | | |
| | | REGULATORY ELEMENT BINDING PROTEIN-1 | | | |
| | | (SREBP-1) (STEROLREGULATORY ELEMENT- | | | |
| | | BINDING TRANSCRIPTION FACTOR 1). | | | |
| 992 | 2250 | Similar to UL31_HSVEB P28951 EQUINE | | | |
| | | HERPESVIRUS TYPE 1 (STRAIN AB4P) (EHV-1). | | | |
| | | GENE 29 PROTEIN. | | | |
| 866 | | Similar to UBPB_YEAST P36026 | 3863, 3048, | | 5806 |
| | | SACCHAROMYCES CEREVISIAE (BAKER S | 3046, 3861, | | |
| | | YEAST). UBIQUITIN CARBOXYL-TERMINAL | 3864 | | |
| | | HYDROLASE 11 (EC 3.1.2.15) | | | |
| | | (UBIQUITINTHIOLESTERASE 11) (UBIQUITIN- | | | |
| | | SPECIFIC PROCESSING PROTEASE | | | |
| | | 11) (DEUBIQUITINATING ENZYME 11). | | | |
| 849 | | Similar to TAU_RAT P19332 RATTUS | | | |
| | | NORVEGICUS (RAT). MICROTUBULE- | | | |
| | | ASSOCIATED PROTEIN TAU. | | | |
| 887 | 2198 | Similar to UVRA_MYCPN P75176 MYCOPLASMA | 3364, 4159, | | |
| | | PNEUMONIAE. EXCINUCLEASE ABC SUBUNIT A. | 3271, 2768, | | |
| | | | 4496, 4530, | | |
| | | | 4497, 2707, | | |
| | | | 3269, 4158, | | |
| | | | 3472, 4160, | | |
| | | | 3295 | | |
| 880 | 2192 | Similar to Y05A_BPT4 P39256 BACTERIOPHAGE | | | |
| | | T4. HYPOTHETICAL 39.7 KD PROTEIN IN NRDC- | | | |
| | | TK INTERGENIC REGION. | | | |
| 911 | | Similar to XYNA_PSEFL P14768 PSEUDOMONAS | | | |
| | | FLUORESCENS. ENDO-1,4-BETA-XYLANASE A | | | |
| | | PRECURSOR (EC 3.2.1.8) (XYLANASE A)(1,4- | | | |
| | | BETA-D-XYLAN XYLANOHYDROLASE A) | | | |
| | | (XYLA). | | | |
| 953 | | Similar to YKH1_CAEEL P34269 | 4176, 4175 | 5006 | 5571 |
| | | CAENORHABDITIS ELEGANS. HYPOTHETICAL | | | |
| | | TYROSINASE-LIKE PROTEIN C02C2.1 IN | | | |
| | | CHROMOSOME III. | | | |
| | | Similar to YHHW_ECOLI P46852 ESCHERICHIA | | | |
| | | COLI. HYPOTHETICAL 26.3 KD PROTEIN IN | | | |
| | | GNTR-GGT INTERGENIC REGION (F231). | | | |
| | | Similar to YKQ5_YEAST P36051 | | | |
| | | SACCHAROMYCES CEREVISIAE (BAKER S | | | |
| | | YEAST). HYPOTHETICAL 105.7 KD PROTEIN IN | | | |
| | | TPK3-PIR1 INTERGENIC REGION. | | | |
| 935 | 2218 | Similar to YIJ4_YEAST P40495 | 2704, 3150, | 5078 | 5524 |
| | | SACCHAROMYCES CEREVISIAE (BAKER S | 3151, 2703, | | |
| | | YEAST). HYPOTHETICAL 40.1 KD PROTEIN IN | 3149 | | |
| | | SGA1-KTR7 INTERGENIC REGION. | | | |
| 929 | 2216 | Similar to YOO1_CAEEL P34633 | 3348, 3011, | 5117 | |
| | | CAENORHABDITIS ELEGANS. PUTATIVE | 2698, 3012, | | |
| | | SERINE/THREONINE-PROTEIN KINASE ZK507.1 | 2699, 3349, | | |
| | | IN CHROMOSOME III(EC 2.7.1.-). | 2697 | | |
| 895 | | Similar to YWJE_BACSU P45865 BACILLUS | 2774, 2775, | 4809 | |
| | | SUBTILIS. HYPOTHETICAL 45.8 KD PROTEIN IN | 2773 | | |
| | | ACDA-NARI INTERGENIC REGION. | | | |
| 1008 | 2264 | Similar to YZ05_MYCTU Q10539 | | | |
| | | MYCOBACTERIUM TUBERCULOSIS. | | | |
| | | HYPOTHETICAL 27.5 KD PROTEIN CY31.05. | | | |
| | | Similar to gi\|9294087\|dbj\|BAB01939.1\| | | | |
| | | gene_id: F1M23.14˜unknown protein [Arabidopsis | | | |
| | | thaliana] | | | |
| 978 | | Similar to gi\|5262756\|emb\|CAB45904.1\| putative | 3956 | 5197 | |
| | | protein [Arabidopsis thaliana] | | | |
| | | Similar to gi\|6016690\|gb\|AAF01517.1\|AC009991_13 | | | |
| | | unknown protein [Arabidopsis thaliana] | | | |
| 1000 | 2256 | Similar to gi\|4204282\|gb\|AAD10663.1\| Hypothetical | 3040, 3041 | | 5921 |
| | | protein [Arabidopsis thaliana] | | | |
| 822 | | Open Reading Frame OS ORF000020 HTC000072- | | | |
| | | A01.16 FRAME: −1 ORF: 18 LEN: 669 | | | |
| 883 | 2195 | Open Reading Frame containing a Sage tag sequence | | | 5787 |
| | | near 3 end OS_ORF001346 ST(F) HTC007682- | | | |
| | | A01.16 FRAME: 2 ORF: 9 LEN: 855 | | | |
| 930 | 2217 | Open Reading Frame OS_ORF001368 HTC007859- | 4514, 4391, | 4818 | 5839 |
| | | A01.21 FRAME: 1 ORF: 12 LEN: 714 | 4515, 4377 | | |
| 802 | 2144 | Open Reading Frame OS_ORF002810 ST(R) | | 4937 | 5576 |
| | | HTC016316-A01.6 FRAME: 3 ORF: 3 LEN: 525 | | | |
| 926 | | Open Reading Frame OS_ORF004258 ST(R) | | | 5597 |
| | | HTC024922-A01.3 FRAME: 3 ORF: 1 LEN: 861 | | | |
| | | Open Reading Frame OS_ORF004847 ST(R) | | | |
| | | HTC028561-A01.R.13 FRAME: 1 ORF: 22 LEN: 501 | | | |
| 955 | 2228 | Open Reading Frame OS_ORF005022 ST(R) | | | |
| | | HTC029643-A01.4 FRAME: 1 ORF: 1 LEN: 522 | | | |
| 809 | 2149 | Open Reading Frame containing a Sage tag sequence | | | |
| | | near 3 end OS_ORF005199 ST(F) HTC030875- | | | |
| | | A01.18 FRAME: 2 ORF: 29 LEN: 567 | | | |
| 852 | 2176 | Open Reading Frame containing a Sage tag sequence | | 4878 | 5291 |
| | | near 3 end OS_ORF006145 ST(F) HTC036786- | | | |
| | | A01.F.12 FRAME: −2 ORF: 1 LEN: 507 | | | |
| | | Open Reading Frame OS_ORF007113 HTC042559- | | | |
| | | A01.R.22 FRAME: −3 ORF: 34 LEN: 822 | | | |
| 1015 | 2271 | Open Reading Frame containing a Sage tag sequence | | | 5294 |
| | | near 3 end OS_ORF008466 ST(F) HTC050935- | | | |
| | | A01.R.8 FRAME: −3 ORF: 2 LEN: 504 | | | |
| 858 | 2180 | Open Reading Frame OS_ORF008551 HTC051403- | 4410, 4411, | 5115 | 5912 |
| | | A01.F.18 FRAME: 2 ORF: 18 LEN: 897 | 4021, 4409, | | |
| | | | 3538, 3514, | | |
| | | | 3542, 3519, | | |
| | | | 3541, 4020 | | |
| 921 | 2212 | Open Reading Frame containing a Sage tag sequence | 3242, 3320, | | 5877 |
| | | near 3 end OS_ORF008787 ST(F) HTC052703- | 2844 | | |
| | | A01.R.16 FRAME: −1 ORF: 2 LEN: 591 | | | |
| 811 | 2150 | Open Reading Frame OS_ORF009745 HTC058532- | | | |
| | | A01.R.12 FRAME: 2 ORF: 1 LEN: 732 | | | |
| 988 | 2247 | Open Reading Frame containing a Sage tag sequence | | | |
| | | near 3 end OS_ORF009938 ST(F) HTC059864- | | | |
| | | A01.F.7 FRAME: −1 ORF: 1 LEN: 573 | | | |
| 991 | 2249 | Open Reading Frame OS_ORF010701 HTC065659- | | | |
| | | A01.F.9 FRAME: 1 ORF: 24 LEN: 750 | | | |
| 823 | | Open Reading Frame OS_ORF011291 HTC069604- | | | 5250 |
| | | A01.21 FRAME: −2 ORF: 1 LEN: 963 | | | |
| 936 | | Open Reading Frame OS_ORF012525 HTC078561- | | 5018 | 5270 |
| | | A01.R.14 FRAME: −2 ORF: 29 LEN: 687 | | | |
| 1017 | 2273 | Open Reading Frame containing a Sage tag sequence | | | 5744 |
| | | near 3 end OS_ORF014687 ST(F) HTC094931- | | | |
| | | A01.R.16 FRAME: −2 ORF: 8 LEN: 876 | | | |
| 886 | 2197 | Open Reading Frame OS_ORF015057 HTC097936- | 3493 | | |
| | | A01.32 FRAME: 1 ORF: 20 LEN: 1020 | | | |
| 816 | 2152 | Open Reading Frame OS_ORF015958 HTC104357- | 4673, 4672 | | |
| | | A01.R.26 FRAME: −3 ORF: 29 LEN: 1713 | | | |
| 885 | | Open Reading Frame OS_ORF015967 HTC104539- | | | |
| | | A01.R.4 FRAME: −2 ORF: 1 LEN: 813 | | | |
| 888 | | Open Reading Frame OS_ORF015975 HTC104583- | 2883, 3252, | | |
| | | A01.R.8 FRAME: −1 ORF: 5 LEN: 702 | 3230, 4429, | | |
| | | | 3461, 3460 | | |
| 901 | 2201 | Open Reading Frame OS_ORF016116 ST(R) | 4334, 3083, | | |
| | | HTC105941-A01.R.24 FRAME: 3 ORF: 11 LEN: 570 | 3212, 4332, | | |
| | | | 4333, 2983 | | |
| 999 | | Open Reading Frame OS_ORF016142 HTC106153- | | | 5242 |
| | | A01.R.10 FRAME: 3 ORF: 4 LEN: 759 | | | |
| | | Open Reading Frame OS_ORF016435 ST(R) | | | |
| | | HTC108657-A01.F.12 FRAME: 3 ORF: 19 LEN: 573 | | | |
| 993 | 2251 | Open Reading Frame OS_ORF016475 HTC108916- | | | |
| | | A01.39 FRAME: 2 ORF: 5 LEN: 693 | | | |
| 841 | 2167 | Open Reading Frame OS_ORF016483 HTC108992- | | | |
| | | A01.F.44 FRAME: 3 ORF: 18 LEN: 2754 | | | |
| 924 | | Open Reading Frame OS_ORF016966 ST(R) | | | 5421 |
| | | HTC112541-A01.F.22 FRAME: −2 ORF: 4 LEN: 819 | | | |
| | | Open Reading Frame containing a Sage tag sequence | | | |
| | | near 3 end OS_ORF017091 ST(F) HTC113530- | | | |
| | | A01.R.5 FRAME: −2 ORF: 1 LEN: 531 | | | |
| 985 | 2244 | Open Reading Frame OS_ORF018374 HTC122609- | | 5192 | |
| | | A01.R.13 FRAME: 1 ORF: 5 LEN: 672 | | | |
| | | Open Reading Frame OS_ORF018673 ST(R) | | | |
| | | HTC124756-A01.11 FRAME: 3 ORF: 16 LEN: 555 | | | |
| 839 | 2165 | Open Reading Frame OS_ORF020011 HTC135067- | | | 5241 |
| | | A01.F.24 FRAME: −1 ORF: 27 LEN: 606 | | | |
| 961 | | Open Reading Frame containing a Sage tag sequence | | | 5386 |
| | | near 3 end OS_ORF021006 ST(F) HTC142475- | | | |
| | | A01.F.34 FRAME: −3 ORF: 8 LEN: 969 | | | |
| 945 | 2223 | Open Reading Frame containing a Sage tag sequence | | | 5767 |
| | | near 3 end OS_ORF022122 ST(F) HTC151590-A01.7 | | | |
| | | FRAME: 1 ORF: 2 LEN: 501 | | | |
| 877 | 2190 | Open Reading Frame OS_ORF022130 HTC151702- | | | |
| | | A01.R.7 FRAME: 2 ORF: 1 LEN: 765 | | | |

[0689] TABLE 9
SEQ ID NOs and corresponding description for Oryza genes which are express
in a pollen-specific manner and further the SEQ ID NOs for the corresponding
homologous sequences found in wheat, banana and maize

| | | | | | |
|---|---|---|---|---|---|
| ORF | Promo | | | Bana | Maize |
| (SEQ | (SEQ | | Wheat | (SEQ | (SEQ |
| ID) | ID) | Description | (SEQ ID) | ID) | ID) |

Pollen

| | | | | | |
|---|---|---|---|---|---|
| 726 | 2090 | Similar to PRO2_MAIZE P35082 ZEA MAYS | 3941, 4030, | 4792 | 5514 |
| | | (MAIZE). PROFILIN 2. | 3940, 4665 | | |
| 725 | 2089 | Similar to T2FB_HUMAN P13984 HOMO SAPIENS | 4488, 4487, | 5213 | |
| | | (HUMAN). TRANSCRIPTION INITIATION | 4486 | | |
| | | FACTOR IIF, BETA SUBUNIT (TFIIF- | | | |
| | | BETA)(TRANSCRIPTION INITIATION FACTOR | | | |
| | | RAP30). | | | |
| 724 | 2088 | Similar to MTBS_BPSPR P00476 BACTERIOPHAGE | | | |
| | | SPR. MODIFICATION METHYLASE BSU SPRI (EC | | | |
| | | 2.1.1.73) (CYTOSINE- | | | |
| | | SPECIFICMETHYLTRANSFERASE BSU SPRI) | | | |
| | | (M. SPRI). | | | |
| 723 | | Similar to gi\|1778444\|gb\|AAB40728.1\| putative protein | 3646, 3322, | 4878 | 5263 |
| | | kinase PK9 [Arabidopsis thaliana] | 4433, 3645, | | |
| | | | 3643, 3660, | | |
| | | | 3641, 3642, | | |
| | | | 3659, 3387, | | |
| | | | 3539, 2692, | | |
| | | | 3816, 2793 | | |
| 728 | | Similar to GAG_GALV P21416 GIBBON APE | | | |
| | | LEUKEMIA VIRUS. GAG POLYPROTEIN | | | |
| | | (CONTAINS: CORE PROTEINS P15, P12, P30, P10). | | | |
| | | Similar to gi\|1785758\|emb\|CAA69842.1\| orf153b | | | |
| | | [Arabidopsis thaliana] | | | |
| | | Similar to P200_MYCPN P75211 MYCOPLASMA | | | |
| | | PNEUMONIAE. PROTEIN P200. | | | |
| 727 | 2091 | Similar to gi\|870716\|gb\|AAA70313.1\| Nad3 protein | | | |
| | | Similar to YMI9_YEAST Q04502 | | | |
| | | SACCHAROMYCES CEREVISIAE (BAKER S | | | |
| | | YEAST). VERY HYPOTHETICAL 14.2 KD | | | |
| | | PROTEIN IN RPM2-TUB1 INTERGENIC REGION. | | | |
| 722 | 2087 | Open Reading Frame containing a Sage tag sequence | 3214, 4389, | 5096 | |
| | | near 3 end OS_ORF014631 ST(F) HTC094453- | 2868, 4390, | | |
| | | A01.F.22 FRAME: 2 ORF: 19 LEN: 546 | 4388, 2940 | | |
| 721 | 2086 | Similar to gi\|6728866\|gb\|AAF26939.1\|AC008113_10 | 3495, 3496 | | 5302 |
| | | F12A21.21 [Arabidopsis thaliana] | | | |
| 729 | 2092 | Similar to gi\|3757513\|gb\|AAC64215.1\| hypothetical | | 4951 | 5430 |
| | | protein [Arabidopsis thaliana] | | | |
| 734 | | Similar to P24_CRIGR P49020 CRICETULUS | 4291, 4290, | 4884 | 5573 |
| | | GRISEUS (CHINESE HAMSTER). COP-COATED | 4289 | | |
| | | VESICLE MEMBRANE PROTEIN P24 | | | |
| | | PRECURSOR (FRAGMENT). | | | |
| 732 | 2095 | Similar to gi\|1841391\|dbj\|BAA10904.1\| EL3 [Oryza | | 5097 | |
| | | sativa] | | | |
| | | Similar to gi\|4775214\|emb\|CAB42596.1\| unnamed | | | |
| | | protein product [Arabidopsis thaliana] | | | |
| | | Similar to gi\|13209\|emb\|CAA36416.1\| ATPase subunit | | | |
| | | 6 [Oryza sativa] | | | |
| | | Similar to gi\|870713\|gb\|AAA70309.1\| unknown protein | | | |
| | | Similar to gi\|4584550\|emb\|CAB40780.1\| hypothetical | | | |
| | | protein [Arabidopsis thaliana] | | | |
| 731 | 2094 | Similar to gi\|4105160\|gb\|AAD02278.1\| cell wall | 3120 | | 5560 |
| | | invertase Incw3 [Zea mays] | | | |
| 730 | 2093 | Similar to YEZ9_YEAST P39956 | 2935, 4484 | 4787 | |
| | | SACCHAROMYCES CEREVISIAE (BAKER S | | | |
| | | YEAST). PUTATIVE 90.2 KD ZINC FINGER | | | |
| | | PROTEIN IN CCA1-ADK2 INTERGENIC REGION. | | | |
| | | Similar to gi\|13203\|emb\|CAA37747.1\| apocytochrome | | | |
| | | b [Oryza sativa] | | | |
| | | Similar to gi\|13217\|emb\|CAA34898.1\| cytochrome | | | |
| | | oxidase subunit 3 (AA 1-265) [Oryza sativa] | | | |
| 736 | 2097 | Similar to gi\|6983874\|dbj\|BAA90809.1\| hypothetical | | | 5709 |
| | | protein [Oryza sativa] | | | |
| | | Similar to YM01_MARPO P38450 MARCHANTIA | | | |
| | | POLYMORPHA (LIVERWORT). HYPOTHETICAL | | | |
| | | 19.2 KD PROTEIN IN RPS2 3 REGION (ORF 168). | | | |
| | | Similar to VG67_BPPZA P08386 BACTERIOPHAGE | | | |
| | | PZA. EARLY PROTEIN GP16.7. | | | |
| 735 | | Similar to gi\|1890352\|emb\|CAA62744.1\| transcription | | 4830 | 5774 |
| | | factor L2 [Arabidopsis thaliana] | | | |
| 743 | 2103 | Similar to V07K_POPMV Q02122 POPLAR MOSAIC | | | |
| | | VIRUS (ISOLATE ATCC PV275) (PMV). 7 KD | | | |
| | | PROTEIN. | | | |
| | | Similar to YNI1_YEAST P53937 | | | |
| | | SACCHAROMYCES CEREVISIAE (BAKER S | | | |
| | | YEAST). PUTATIVE 40S MITOCHONDRIAL | | | |
| | | RIBOSOMAL PROTEIN YNL081C. | | | |
| 740 | 2100 | Similar to YKT5_YEAST P36046 | | | |
| | | SACCHAROMYCES CEREVISIAE (BAKER S | | | |
| | | YEAST). HYPOTHETICAL 47.4 KD PROTEIN IN | | | |
| | | PAS1-MST1 INTERGENIC REGION. | | | |
| 742 | 2102 | Similar to gi\|7267309\|emb\|CAB81091.1\| N7-like | | 4983 | 5336 |
| | | protein [Arabidopsis thaliana] | | | |
| | | Similar to gi\|897624\|gb\|AAA70274.1\| S13 homologous | | | |
| | | protein; putative | | | |
| | | Similar to gi\|3025870\|gb\|AAC26506.1\| ribosomal | | | |
| | | protein S4 [Oryza sativa] | | | |
| | | Similar to gi\|769715\|dbj\|BAA06819.1\| ORF71 [Oryza | | | |
| | | sativa] | | | |
| | | Similar to.gi\|20382\|emb\|CAA29825.1\| put. ORF 2 | | | |
| | | [Oryza sativa] | | | |
| | | Similar to gi\|769719\|dbj\|BAA06823.1\| ORF91 [Oryza | | | |
| | | sativa] | | | |
| | | Similar to gi\|9294320\|dbj\|BAB02217.1\| | | | |
| | | gene_id: K24M9.8˜unknown protein [Arabidopsis | | | |
| | | thaliana] | | | |
| 737 | 2098 | Similar to gi\|7339700\|dbj\|BAA92905.1\| hypothetical | | | |
| | | protein [Oryza sativa] | | | |
| | | Similar to gi\|13985\|emb\|CAA47479.1\| NADH- | | | |
| | | dehydrogenase subunit 4L [Arabidopsis thaliana] | | | |
| 738 | | Similar to gi\|2924780\|gb\|AAC04909.1\| hypothetical | | | 5555 |
| | | protein [Arabidopsis thaliana] | | | |
| 739 | 2099 | Similar to HEMA_IAXIA P28731 INFLUENZA A | | | |
| | | VIRUS (STRAIN A/XIANFENG/3/89). | | | |
| | | HEMAGGLUTININ PRECURSOR (FRAGMENT). | | | |
| | | Similar to gi\|7340645\|emb\|CAB82925.1\| putative | | | |
| | | protein [Arabidopsis thaliana] | | | |
| | | Similar to CYB_LATCH O03176 LATIMERIA | | | |
| | | CHALUMNAE (LATIMERIA) (COELACANTH). | | | |
| | | CYTOCHROME B (EC 1.10.2.2). | | | |
| 733 | 2096 | Similar to gi\|9280660\|gb\|AAF86529.1\|AC002560_22 | | 4923 | 5428 |
| | | F21B7.23 [Arabidopsis thaliana] | | | |
| 741 | 2101 | Similar to gi\|600446\|emb\|CAA25566.1\| cytochrome C | | | |
| | | oxidase polypeptide II [Oryza sativa] | | | |
| | | Similar to gi\|82643\|pir\|\|JQ1447 NADH dehydrogenase | | | |
| | | (ubiquinone) (EC 1.6.5.3) chain 5 - wheat | | | |
| | | mitochondrion | | | |
| 796 | 2139 | Similar to gi\|929918\|emb\|CAA56786.1\| actin- | 3810, 3811, | 4976 | 5854 |
| | | depolymerizing factor [Zea mays] | 3558, 3555, | | |
| | | | 3809, 3814, | | |
| | | | 3153, 3058, | | |
| | | | 3553, 3414 | | |
| | | Similar to NXL4_BUNMU P15817 BUNGARUS | | | |
| | | MULTICINCTUS (MANY-BANDED KRAIT). | | | |
| | | LONG NEUROTOXIN CR1 PRECURSOR (KAPPA | | | |
| | | NEUROTOXIN). | | | |
| 750 | 2107 | Similar to gi\|8439465\|emb\|CAB94202.1\| GDP | 4142, 4501, | 5053 | 5277 |
| | | dissociation inhibitor [Lycopersicon esculentum] | 4500, 3055, | | |
| | | | 3108, 3054 | | |
| 758 | | Similar to gi\|6692688\|gb\|AAF24822.1\|AC007592_15 | 2921 | | |
| | | F12K11.17 [Arabidopsis thaliana] | | | |
| 795 | 2138 | Similar to ATP0_ORYSA P15998 ORYZA SATIVA | | | 5462 |
| | | (RICE). ATP SYNTHASE ALPHA CHAIN, | | | |
| | | MITOCHONDRIAL (EC 3.6.1.34). | | | |
| 787 | 2131 | Similar to gi\|4544420\|gb\|AAD22329.1\|AC006955_15 | | | |
| | | En/Spm-like transposon protein [Arabidopsis thaliana] | | | |
| 791 | 2134 | Open Reading Frame OS_ORF002847 HTC016575- | 4345, 4344, | | |
| | | A01.12 FRAME: 2 ORF: 8 LEN: 1065 | 4343 | | |
| 788 | 2132 | Open Reading Frame OS_ORF021355 HTC145457- | | | |
| | | A01.R.6 FRAME: 1 ORF: 1 LEN: 663 | | | |
| 794 | 2137 | Similar to NECD_BOVIN P29554 BOS TAURUS | 3983, 3518, | | 5509 |
| | | (BOVINE). NEUROCALCIN DELTA. | 2914, 3981, | | |
| | | | 3982, 3984, | | |
| | | | 2864, 4055, | | |
| | | | 3517, 3292 | | |
| 764 | 2114 | Similar to gi\|8096465\|dbj\|BAA94532.2\| ESTs | | | 5247 |
| | | D40069(S1808), D40089(S1834), AU083572(S1834) | | | |
| | | correspond to a region of the predicted gene. ˜Similar | | | |
| | | to Citrus limon vacuolar V − H + ATPase subunit E | | | |
| | | (AF165939) [Oryza sativa] | | | |
| | | Similar to gi\|2522193\|gb\|AAB80946.1\| pyrroline-5- | | | |
| | | carboxylate synthetase [Triticum aestivum] | | | |
| | | Similar to gi\|5688943\|dbj\|BAA82747.1\| ribosomal | | | |
| | | protein L5 [Oryza sativa] | | | |
| 789 | 2133 | Similar to ABRA_ABRPR P11140 P28589 ABRUS | | | |
| | | PRECATORIUS (INDIAN LICORICE) (CRAB S | | | |
| | | EYE). ABRIN-A PRECURSOR (RRNA N- | | | |
| | | GLYCOSIDASE) (EC 3.2.2.22). | | | |
| | | Similar to gi\|226676\|prf\|\|1603356DD NADH | | | |
| | | dehydrogenase ND1 [Oryza sativa] | | | |
| | | Similar to COX2_MYCTU Q10375 | | | |
| | | MYCOBACTERIUM TUBERCULOSIS. PUTATIVE | | | |
| | | CYTOCHROME C OXIDASE POLYPEPTIDE II | | | |
| | | PRECURSOR (EC 1.9.3.1) (CYTOCHROME AA3 | | | |
| | | SUBUNIT 2). | | | |
| | | Similar to gi\|769721\|dbj\|BAA06825.1\| ORF483 [Oryza | | | |
| | | sativa] | | | |
| 770 | 2116 | Similar to LA52_LYCES P13447 LYCOPERSICON | | | 5441 |
| | | ESCULENTUM (TOMATO). ANTHER SPECIFIC | | | |
| | | LAT52 PROTEIN PRECURSOR. | | | |
| | | Similar to gi\|5852177\|emb\|CAB55415.1\| zhb0007.1 | | | |
| | | [Oryza sativa] | | | |
| | | Similar to COX2_GEOSD P29657 GEOPHAGUS | | | |
| | | STEINDACHNERI. CYTOCHROME C OXIDASE | | | |
| | | POLYPEPTIDE II (EC 1.9.3.1) (FRAGMENT). | | | |
| 769 | | Similar to RAN_BRARE P79735 BRACHYDANIO | | 5196 | 5723 |
| | | RERIO (ZEBRAFISH) (ZEBRA DANIO). GTP- | | | |
| | | BINDING NUCLEAR PROTEIN RAN. | | | |
| | | Similar to YNR1_YEAST P53887 | | | |
| | | SACCHAROMYCES CEREVISIAE (BAKER S | | | |
| | | YEAST). HYPOTHETICAL 14.6 KD PROTEIN IN | | | |
| | | RPS3-PSD1 INTERGENIC REGION. | | | |
| | | Similar to gi\|7432558\|pir\|\|S71457 NADH | | | |
| | | dehydrogenase (ubiquinone) (EC 1.6.5.3) chain 6 - rice | | | |
| | | mitochondrion (fragment) | | | |
| 792 | 2135 | Similar to gi\|9293898\|dbj\|BAB01801.1\| MAP (mitogen | 2929, 2806 | | 5350 |
| | | activated protein) kinase-like protein [Arabidopsis | | | |
| | | thaliana] | | | |
| | | Similar to YE66_METJA Q58861 | | | |
| | | METHANOCOCCUS JANNASCHII. | | | |
| | | HYPOTHETICAL PROTEIN MJ1466. | | | |
| 744 | 2104 | Similar to VGLC_HSVE4 P22596 EQUINE | | | |
| | | HERPESVIRUS TYPE 4 (STRAIN 1942) (EHV-4) | | | |
| | | (EQUINE HERPESVIRUSTYPE 1 SUBTYPE 2). | | | |
| | | GLYCOPROTEIN C PRECURSOR | | | |
| | | (GLYCOPROTEIN 13). | | | |
| | | Similar to gi\|226686\|prf\|\|1603356L ORF 70 [Oryza | | | |
| | | sativa] | | | |
| | | Similar to gi\|7671432\|emb\|CAB89373.1\| putative | | | |
| | | protein [Arabidopsis thaliana] | | | |
| | | Similar to YM03_MARPO P38452 MARCHANTIA | | | |
| | | POLYMORPHA (LIVERWORT). HYPOTHETICAL | | | |
| | | 19.3 KD PROTEIN IN RPS2 3 REGION (ORF 169). | | | |
| 760 | | Similar to CAP_YEAST P17555 | | | 5328 |
| | | SACCHAROMYCES CEREVISIAE (BAKER S | | | |
| | | YEAST). ADENYLYL CYCLASE-ASSOCIATED | | | |
| | | PROTEIN (CAP). | | | |
| | | Similar to gi\|1785731\|emb\|CAA69844.1\| orf240a | | | |
| | | [Arabidopsis thaliana] | | | |
| | | Similar to gi\|2832632\|emb\|CAA16761.1\| hypothetical | | | |
| | | protein [Arabidopsis thaliana] | | | |
| | | Similar to VA19_VARY P33842 VARIOLA VIRUS. | | | |
| | | PROTEIN A19. | | | |
| 756 | 2112 | Similar to YO21_CAEEL P34671 | | | |
| | | CAENORHABDITIS ELEGANS. HYPOTHETICAL | | | |
| | | 18.0 KD PROTEIN ZK688.1 IN CHROMOSOME III. | | | |
| 749 | 2106 | Similar to gi\|7446425\|pir\|\|T02306 hypothetical protein | 2905, 4695, | | 5820 |
| | | F13P17.2 - Arabidopsis thaliana | 3163, 4694, | | |
| | | | 2944, 3263, | | |
| | | | 3449, 4392, | | |
| | | | 2987 | | |
| | | Similar to NU2M_STRPU P15549 | | | |
| | | STRONGYLOCENTROTUS PURPURATUS | | | |
| | | (PURPLE SEA URCHIN). NADH-UBIQUINONE | | | |
| | | OXIDOREDUCTASE CHAIN 2 (EC 1.6.5.3). | | | |
| | | Similar to gi\|1334612\|emb\|CAA41034.1\| nad1 | | | |
| | | [Triticum aestivum] | | | |
| 800 | 2143 | Similar to gi\|4741188\|emb\|CAB41854.1\| hypothetical | | 4808 | 5452 |
| | | protein [Arabidopsis thaliana] | | | |
| | | Similar to gi\|4106831\|gb\|AAD03035.1\| apocytochrome | | | |
| | | b [Solanum tuberosum] | | | |
| | | Similar to gi\|1173302\|sp\|P46773\|RT03_ORYSA | | | |
| | | MITOCHONDRIAL RIBOSOMAL PROTEIN S3 | | | |
| 772 | 2118 | Similar to gi\|6997198\|gb\|AAF34860.1\| putative | | 4944 | 5911 |
| | | elicitor-responsive gene [Arabidopsis thaliana] | | | |
| 763 | | Open Reading Frame OS_ORF016189 ST(R) | 4476, 4494, | | |
| | | HTC106572-A01.F.20 FRAME: 3 ORF: 2 LEN: 507 | 2867, 4477, | | |
| | | | 4475 | | |
| | | Similar to gi\|7267214\|emb\|CAB80821.1\| putative | | | |
| | | transposon protein [Arabidopsis thaliana] | | | |
| | | Similar to PHZF_PSEAR Q51517 PSEUDOMONAS | | | |
| | | AUREOFACIENS. PROBABLE PHOSPHO-2- | | | |
| | | DEHYDRO-3-DEOXYHEPTONATEALDOLASE | | | |
| | | (EC 4.1.2.15)(PHOSPHO-2-KETO-3- | | | |
| | | DEOXYHEPTONATE ALDOLASE) (DAHP | | | |
| | | SYNTHETASE)(3-DEOXY-D-ARABINO- | | | |
| | | HEPTULOSONATE 7-PHOSPHATE SYNTHASE). | | | |
| 482 | | Similar to gi\|5679840\|emb\|CAB51833.1\| 11332.4 | 3442, 3443, | 5106 | 5613 |
| | | [Oryza sativa] | 3441 | | |
| 759 | | Similar to gi\|6587831\|gb\|AAF18520.1\|AC006551_6 | | | |
| | | Unknown protein [Arabidopsis thaliana] | | | |
| | | Open Reading Frame OS_ORF018289 ST(R) | | | |
| | | HTC121977-A01.R.21 FRAME: 1 ORF: 2 LEN: 609 | | | |
| 774 | | Similar to 7B2_HUMAN P05408 P01164 HOMO | | | |
| | | SAPIENS (HUMAN). NEUROENDOCRINE | | | |
| | | PROTEIN 7B2 PRECURSOR (SECRETORY | | | |
| | | GRANULE ENDOCRINEPROTEIN I) | | | |
| | | (SECRETOGRANIN V) (PITUITARY | | | |
| | | POLYPEPTIDE). | | | |
| | | Similar to gi\|1785764\|emb\|CAA69794.1\| orf262 | | | |
| | | [Arabidopsis thaliana] | | | |
| | | Similar to gi\|870717\|gb\|AAA70314.1\| ribosomal | | | |
| | | protein S12 | | | |
| 751 | 2108 | Similar to gi\|4680495\|gb\|AAD27675.1\|AF119222_7 | 3025 | | |
| | | receptor kinase-like protein [Oryza sativa] | | | |
| | | Similar to gi\|1084436\|pir\|\|S46439 NADH | | | |
| | | dehydrogenase (EC 1.6.99.3) - potato | | | |
| 746 | | Similar to gi\|9229291\|dbj\|BAA99594.1\| | | | |
| | | dihydrolipoamide acetyltransferase [Arabidopsis | | | |
| | | thaliana] | | | |
| 784 | 2129 | Similar to gi\|4926831\|gb\|AAD32941.1\|AC004135_16 | 3717, 3730, | | |
| | | T17H7.16 [Arabidopsis thaliana] | 3729 | | |
| | | Similar to NXSD_LATCO P10456 LATICAUDA | | | |
| | | COLUBRINA (YELLOW-LIPPED SEA KRAIT). | | | |
| | | SHORT NEUROTOXTN D. | | | |
| 786 | 2130 | Similar to UL04_HSVEB P28943 EQUINE | | | |
| | | HERPES VIRUS TYPE 1 (STRAIN AB4P) (EHV-1). | | | |
| | | GENE 58 PROTEIN. | | | |
| | | Similar to MAPB_HUMAN P46821 HOMO SAPIENS | | | |
| | | (HUMAN). MICROTUBULE-ASSOCIATED | | | |
| | | PROTEIN IB. | | | |
| 755 | 2111 | Similar to gi\|7529257\|emb\|CAB86673.1\| putative | | | |
| | | protein [Arabidopsis thaliana] | | | |
| | | Similar to GTH2_CORAU P48251 COREGONUS | | | |
| | | AUTUMNALIS (BAIKAL OMUL). | | | |
| | | GONADOTROPIN BETA-H CHAIN PRECURSOR | | | |
| | | (GTH-II). | | | |
| 785 | | Similar to gi\|1173087\|sp\|P46801\|RM16_ORYSA | | | |
| | | MITOCHONDRIAL 60S RIBOSOMAL PROTEIN | | | |
| | | L16 | | | |
| 780 | 2125 | Open Reading Frame containing a Sage tag sequence | 2862, 2860, | | 5368 |
| | | near 3 end OS_ORF001458 ST(F) HTC008279- | 2861, 4052, | | |
| | | A01.14 FRAME: −1 ORF: 13 LEN: 537 | 4053, 4054 | | |
| 766 | 2115 | Similar to gi\|4406761\|gb\|AAD20072.1\| putative | 4652, 4651 | 4906 | 5289 |
| | | ubiquinone biosynthesis protein [Arabidopsis thaliana] | | | |
| 757 | 2113 | Similar to COPE_CRIGR Q60445 CRICETULUS | 2777, 2776 | 5163 | 5293 |
| | | GRISEUS (CHINESE HAMSTER). COATOMER | | | |
| | | EPSILON SUBUNIT (EPSILON-COAT PROTEIN) | | | |
| | | (EPSILON-COP) (LDLF). | | | |
| 799 | 2142 | Similar to gi\|7487633\|pir\|\|T02103 hypothetical protein | | | |
| | | T3K9.7 - Arabidopsis thaliana | | | |
| | | Similar to gi\|769717\|dbj\|BAA06821.1\| ORF76B [Oryza | | | |
| | | sativa] | | | |
| 761 | | Similar to gi\|1098977\|gb\|AAB19030.1\| myo-inositol | 3027 | | |
| | | monophosphatase 1 | | | |
| 768 | | Similar to gi\|6522538\|emb\|CAB61981.1\| putative | | | |
| | | protein [Arabidopsis thaliana] | | | |
| 747 | | Similar to gi\|6063538\|dbj\|BAA85398.1\| similar to sugar | 2683, 2684, | | |
| | | transporter protein. (AL022604) [Oryza sativa] | 2685, 3193 | | |
| | | Similar to Y706_METJA Q58117 | | | |
| | | METHANOCOCCUS JANNASCHII. | | | |
| | | HYPOTHETICAL PROTEIN MJ0706. | | | |
| 748 | 2105 | Similar to HMCS_DICDI P54872 DICTYOSTELIUM | | 5220 | 5449 |
| | | DISCOIDEUM (SLIME MOLD). | | | |
| | | HYDROXYMETHYLGLUTARYL-COA | | | |
| | | SYNTHASE (EC 4.1.3.5) (HMG-COA | | | |
| | | SYNTHASE)(3-HYDROXY-3- | | | |
| | | METHYLGLUTARYL COENZYME A SYNTHASE) | | | |
| | | (FRAGMENT). | | | |
| 778 | 2123 | Similar to YFEA_ECOLI P23842 ESCHERICHIA | | | |
| | | COLI. HYPOTHETICAL 19.0 KD PROTEIN IN | | | |
| | | NUPC-ALAX INTERGENIC REGION. | | | |
| 779 | 2124 | Similar to gi\|4467116\|emb\|CAB37550.1\| hypothetical | 4162, 4161 | 5004 | 5401 |
| | | protein [Arabidopsis thaliana] | | | |
| | | Similar to gi\|769718\|dbj\|BAA06822.1\| ORF83 [Oryza | | | |
| | | sativa] | | | |
| | | Similar to SCX5_CENNO P45663 CENTRUROIDES | | | |
| | | NOXIUS (MEXICAN SCORPION). TOXIN CNGTII | | | |
| | | PRECURSOR. | | | |
| | | Similar to E1BS_ADEM1 P12535 MOUSE | | | |
| | | ADENO VIRUS TYPE 1 (MAV-1). E1B PROTEIN, | | | |
| | | SMALL T-ANTIGEN (E1B 21 KD PROTEIN). | | | |
| 775 | 2120 | Similar to gi\|6851021\|emb\|CAA69741.3\| orfX | | | |
| | | [Arabidopsis thaliana] | | | |
| 797 | 2140 | Similar to gi\|7488710\|pir\|\|T08897 ribonuclease H - | | | |
| | | soybean copia/Ty1-like retroelement SIRE-1 | | | |
| | | (fragment) | | | |
| 753 | 2109 | Similar to gi\|7487881\|pir\|\|T00982 hypothetical protein | | | |
| | | T9J22. 16 - Arabidopsis thaliana | | | |
| | | Similar to gi\|6851012\|emb\|CAA69763.3\| cytochrome c | | | |
| | | biogenesis orf452 [Arabidopsis thaliana] | | | |
| | | Similar to gi\|266533\|sp\|Q00058\|MI25_ORYSA | | | |
| | | MITOCHONDRIAL 22 KD PROTEIN (ORF 25) | | | |
| 762 | | Similar to gi\|6648208\|gb\|AAF21206.1\|AC013483_30 | 4505, 4506, | | |
| | | putative phosphatidylinositol-4-phosphate 5-kinase | 2945 | | |
| | | [Arabidopsis thaliana] | | | |
| 767 | | Similar to gi\|6437556\|gb\|AAF08583.1\|AC011623_16 | | 4909 | |
| | | unknown protein [Arabidopsis thaliana] | | | |
| 771 | 2117 | Similar to gi\|2288981\|gb\|AAB64310.1\| putative Ca2+- | | 5223 | 5853 |
| | | binding protein [Arabidopsis thaliana] | | | |
| | | Similar to gi\|4544414\|gb\|AAD22323.1\|AC006955_9 | | | |
| | | hypothetical protein [Arabidopsis thaliana] | | | |
| 754 | 2110 | Similar to YAFD_ECOLI P30865 P75671 | | | |
| | | ESCHERICHIA COLI. HYPOTHETICAL 29.1 KD | | | |
| | | PROTEIN IN ASPU-MLTD INTERGENIC REGION | | | |
| | | (ORF259). | | | |
| | | Similar to VL2_HPV51 P26539 HUMAN | | | |
| | | PAPILLOMAVIRUS TYPE 51. MINOR CAPSID | | | |
| | | PROTEIN L2. | | | |
| 782 | 2127 | Similar to DPOL_VACCV P06856 VACCINIA | | | |
| | | VIRUS (STRAIN WR). DNA POLYMERASE (EC | | | |
| | | 2.7.7.7). | | | |
| | | Similar to gi\|7486464\|pir\|\|T02471 hypothetical protein | | | |
| | | F4I18.26 - Arabidopsis thaliana | | | |
| | | Similar to gi\|769707\|dbj\|BAA06811.1\| ORF72B [Oryza | | | |
| | | sativa] | | | |
| | | Open Reading Frame containing a Sage tag sequence | | | |
| | | near 3 end OS_ORF001179 ST(F) HTC006678-A01.7 | | | |
| | | FRAME: −3 ORF: 6 LEN: 549 | | | |
| | | Similar to gi\|928898\|emb\|CAA60524.1\| protein kinase | | | |
| | | catalytic domain (fragment) [Arabidopsis thaliana] | | | |
| 790 | | Similar to gi\|4006886\|emb\|CAB16816.1\| putative | 4285, 4287, | 4868 | |
| | | protein [Arabidopsis thaliana] | 4286 | | |
| 752 | | Similar to gi\|8096422\|dbj\|BAA95892.1\| EST | | | |
| | | D47996(S13901)SS3901_1A corresponds to a region | | | |
| | | of the predicted gene. ˜Similar to Zea mays transposon | | | |
| | | MuDR mudrA and mudrB genes; mudrA. (M76978) | | | |
| | | [Oryza sativa] | | | |
| 773 | 2119 | Similar to gi\|7485912\|pir\|\|T00888 hypothetical protein | | | |
| | | F21B7.2 - Arabidopsis thaliana | | | |
| 745 | | Similar to gi\|4454484\|gb\|AAD20931.1\| putative | 3999 | 4983 | 5336 |
| | | diacylglycerol kinase [Arabidopsis thaliana] | | | |
| | | Similar to gi\|5738367\|emb\|CAB52824.1\| putative | | | |
| | | protein [Arabidopsis thaliana] | | | |
| | | Similar to gi\|4680186\|gb\|AAD27554.1\|AF111709_8 | | | |
| | | unknown [Oryza sativa subsp. indica] | | | |
| 777 | 2122 | Open Reading Frame containing a Sage tag sequence | | 5212 | 5664 |
| | | near 3 end OS_ORF005018 ST(F) HTC029605- | | | |
| | | A01.R.14 FRAME: 2 ORF: 1 LEN: 510 | | | |
| 783 | 2128 | Open Reading Frame OS_ORF019510 HTC131468- | | | |
| | | A01.F.21 FRAME: −3 ORF: 2 LEN: 741 | | | |
| | | Similar to gi\|7486818\|pir\|\|T05789 hypothetical protein | | | |
| | | M7J2.50 - Arabidopsis thaliana | | | |
| 781 | 2126 | Open Reading Frame OS_ORF014283 HTC091925- | | | |
| | | A01.22 FRAME: −1 ORF: 18 LEN: 930 | | | |
| 765 | | Open Reading Frame OS_ORF008033 ST(R) | | | 5699 |
| | | HTC048091-A01.R.10 FRAME: −2 ORF: 15 LEN: 573 | | | |
| | | Similar to gi\|133416\|sp\|P12091\|RPOB_ORYSA DNA- | | | |
| | | DIRECTED RNA POLYMERASE BETA CHAIN | | | |
| | | Similar to gi\|7770328\|gb\|AAF69698.1\|AC016041_3 | | | |
| | | F27J15.7 [Arabidopsis thaliana] | | | |
| 776 | 2121 | Open Reading Frame containing a Sage tag sequence | | | |
| | | near 3 end OS_ORF007931 ST(F) HTC047564- | | | |
| | | A01.R.36 FRAME: −3 ORF: 7 LEN: 615 | | | |
| | | Similar to MURC_STAAU O31211 | | | |
| | | STAPHYLOCOCCUS AUREUS. UDP-N- | | | |
| | | ACETYLMURAMATE--ALANINE LIGASE (EC | | | |
| | | 6.3.2.8) (UDP-N-ACETYLMURANOYL-L- | | | |
| | | ALANINE SYNTHETASE). | | | |
| 793 | 2136 | Open Reading Frame OS_ORF019825 ST(R) | | | |
| | | HTC133880-A01.R.8 FRAME: 1 ORF: 6 LEN: 942 | | | |
| 798 | 2141 | Open Reading Frame OS_ORF008443 HTC050714- | | | |
| | | A01.F.22 FRAME: −2 ORF: 32 LEN: 735 | | | |
| | | Similar to YCX1_CUSRE P32035 CUSCUTA | | | |
| | | REFLEXA (SOUTHERN ASIAN DODDER). | | | |
| | | HYPOTHETICAL 6.8 KD PROTEIN IN TRNL 3 | | | |
| | | REGION (ORF 55). | | | |

[0690] TABLE 10
This table identifies the start and end points
and the nucleotide sequence of trinucleotide repeat units
in the coding sequence of selected ORFs

| SeqID | Start | End | Sequence |
|---|---|---|---|
| 2 | 1342 | 1356 | TGC |
| 10 | 391 | 408 | CGG |
| 11 | 129 | 143 | CGG |
| 19 | 842 | 859 | AGG |
| 20 | 165 | 188 | CGA |
| 21 | 245 | 259 | GGC |
| | 425 | 439 | CGG |
| 26 | 12 | 26 | GGC |
| 27 | 265 | 279 | CGC |
| 29 | 66 | 80 | CGG |
| | 1369 | 1383 | GGC |
| 32 | 388 | 402 | GGT |
| 34 | 8 | 22 | GCG |
| | 483 | 497 | CCT |
| 39 | 319 | 333 | GAG |
| | 526 | 540 | CCG |
| | 560 | 574 | ACC |
| | 677 | 694 | CCG |
| 40 | 863 | 880 | AG |
| 41 | 115 | 135 | GAG |
| 44 | 151 | 165 | TCC |
| | 399 | 413 | CGC |
| | 597 | 611 | CGC |
| | 958 | 972 | CCG |
| 49 | 727 | 744 | CG |
| 53 | 640 | 654 | GCC |
| 55 | 270 | 284 | GCG |
| 57 | 18 | 32 | CTC |
| 59 | 308 | 322 | CCG |
| | 341 | 355 | CGT |
| 65 | 398 | 415 | CCG |
| 68 | 201 | 214 | CT |
| 83 | 262 | 276 | CCG |
| | 311 | 328 | ACC |
| | 359 | 376 | AGC |
| 95 | 958 | 972 | CCG |
| 96 | 70 | 90 | GAG |
| 99 | 639 | 656 | CGG |
| 102 | 582 | 596 | CCT |
| 103 | 41 | 61 | ACC |
| | 184 | 198 | GCG |
| 104 | 144 | 161 | CGG |
| 106 | 360 | 377 | CGG |
| 109 | 150 | 170 | GGT |
| 112 | 243 | 257 | ACG |
| 126 | 485 | 499 | CCG |
| | 732 | 746 | CGG |
| 128 | 651 | 665 | CGG |
| 130 | 83 | 98 | AG |
| 141 | 180 | 194 | CGG |
| 144 | 1436 | 1456 | CCG |
| 146 | 373 | 387 | TCG |
| | 972 | 986 | CCG |
| 154 | 1227 | 1241 | CCG |
| 157 | 71 | 88 | AGG |
| 159 | 524 | 541 | GAC |
| 160 | 1075 | 1095 | CCG |
| 164 | 778 | 795 | GTC |
| 168 | 48 | 62 | CGC |
| 169 | 5 | 19 | CGG |
| 174 | 428 | 451 | AGG |
| 177 | 40 | 54 | GGC |
| | 83 | 103 | CGG |
| | 719 | 733 | GCG |
| 178 | 20 | 34 | CGG |
| 182 | 180 | 197 | ACC |
| 185 | 21 | 35 | CCG |
| 186 | 385 | 399 | GCG |
| 188 | 478 | 492 | CCG |
| 198 | 66 | 80 | CGG |
| | 138 | 152 | TCC |
| 209 | 332 | 349 | AG |
| 221 | 253 | 266 | CT |
| | 827 | 841 | CGG |
| 223 | 590 | 604 | CCT |
| | 671 | 685 | GCG |
| 237 | 451 | 466 | CCAT |
| 246 | 208 | 231 | GCG |
| 249 | 114 | 131 | CGC |
| | 130 | 144 | GCA |
| 253 | 280 | 315 | AAG |
| 255 | 40 | 60 | GTC |
| 259 | 1787 | 1801 | GCG |
| 260 | 193 | 207 | GGC |
| | 422 | 436 | GCG |
| | 690 | 707 | AG |
| | 915 | 929 | GCC |
| | 1777 | 1791 | GAC |
| 261 | 197 | 211 | GCG |
| | 1464 | 1478 | CGG |
| 262 | 31 | 48 | CAG |
| | 284 | 298 | AGC |
| | 788 | 808 | AGG |
| | 1061 | 1078 | AGC |
| | 1485 | 1499 | GCA |
| 265 | 86 | 103 | CGC |
| | 1160 | 1174 | CGG |
| 268 | 696 | 710 | CGC |
| 274 | 389 | 403 | CCG |
| 276 | 119 | 133 | CCG |
| | 156 | 170 | CGC |
| 281 | 61 | 81 | CCG |
| 282 | 20 | 37 | CCT |
| 283 | 18 | 31 | CT |
| 286 | 293 | 313 | CGG |
| 287 | 201 | 218 | CGG |
| 290 | 279 | 293 | CGG |
| 291 | 272 | 289 | GCC |
| 295 | 80 | 94 | CGG |
| | 1214 | 1231 | ACG |
| 311 | 801 | 815 | AGC |
| | 1114 | 1128 | CGG |
| 312 | 718 | 732 | GTC |
| 316 | 609 | 623 | CGG |
| 318 | 567 | 581 | TCG |
| 322 | 183 | 197 | AGG |
| 323 | 569 | 583 | GCG |
| 324 | 487 | 501 | CCG |
| 326 | 639 | 653 | CGG |
| 329 | 5 | 25 | CGG |
| 332 | 418 | 437 | TTAA |
| 336 | 304 | 318 | CCG |
| 338 | 51 | 65 | CGG |
| | 453 | 473 | ACC |
| | 788 | 805 | GCG |
| 342 | 583 | 603 | TCG |
| 343 | 353 | 373 | AGC |
| 345 | 107 | 121 | CCG |
| 351 | 463 | 476 | GA |
| | 561 | 575 | CGG |
| 353 | 30 | 44 | CGG |
| | 192 | 206 | CCT |
| 357 | 132 | 158 | CGG |
| 359 | 318 | 332 | CGG |
| 363 | 146 | 160 | ACG |
| 364 | 939 | 959 | CGC |
| 365 | 605 | 619 | CCG |
| | 1235 | 1249 | CGG |
| 366 | 714 | 729 | TC |
| 367 | 237 | 251 | CGG |
| 368 | 98 | 115 | CGT |
| 378 | 127 | 144 | GAG |
| 381 | 151 | 165 | AGG |
| 383 | 47 | 64 | CCA |
| | 86 | 100 | AGC |
| | 172 | 189 | CAG |
| | 662 | 676 | CGG |
| 384 | 316 | 330 | GGC |
| 389 | 236 | 253 | CGT |
| | 380 | 394 | CGG |
| 390 | 174 | 188 | GCG |
| 391 | 251 | 268 | GCG |
| | 299 | 313 | GCG |
| 393 | 160 | 174 | CGG |
| 396 | 51 | 65 | CGG |
| | 407 | 421 | ACG |
| 401 | 110 | 124 | GAG |
| | 138 | 155 | AGC |
| 404 | 73 | 87 | CCT |
| | 91 | 108 | AGC |
| 418 | 33 | 47 | GTC |
| 448 | 57 | 74 | CCG |
| | 2606 | 2625 | AAGC |
| 475 | 42 | 56 | CGG |
| 479 | 38 | 52 | GGT |
| 481 | 166 | 180 | CCG |
| 493 | 342 | 356 | ACC |
| | 494 | 511 | CAC |
| 496 | 292 | 306 | AGC |
| 502 | 80 | 94 | CGG |
| 505 | 148 | 174 | GAG |
| 511 | 173 | 187 | GCG |
| 517 | 1534 | 1551 | GGC |
| 518 | 436 | 450 | AGG |
| 529 | 1060 | 1077 | GGT |
| | 1151 | 1165 | AGG |
| | 1310 | 1324 | CCG |
| | 1978 | 1992 | AAG |
| 539 | 11 | 25 | CGG |
| 540 | 83 | 100 | AGG |
| 546 | 21 | 35 | GGC |
| 547 | 18 | 32 | GGC |
| 564 | 112 | 126 | CCG |
| | 145 | 162 | CCG |
| | 477 | 500 | CGC |
| 574 | 146 | 160 | GAG |
| 576 | 1340 | 1354 | CGA |
| 580 | 63 | 80 | CGG |
| 584 | 12 | 29 | CGC |
| 589 | 276 | 293 | CCG |
| 591 | 874 | 888 | AGC |
| 594 | 65 | 79 | CGG |
| 602 | 500 | 514 | CGG |
| | 608 | 622 | CGG |
| 612 | 3 | 17 | GTC |
| 636 | 170 | 184 | CGC |
| 643 | 44 | 58 | AGG |
| 648 | 98 | 112 | ACC |
| 654 | 623 | 637 | AAG |
| 658 | 74 | 88 | AGG |
| 676 | 256 | 270 | GAG |
| 678 | 417 | 431 | AGC |
| 680 | 158 | 172 | AGG |
| 681 | 613 | 627 | GCT |
| 689 | 135 | 150 | CGTT |
| 695 | 1275 | 1289 | AGC |
| 700 | 572 | 586 | GAG |
| 701 | 350 | 364 | GCG |
| | 514 | 528 | GGT |
| | 1107 | 1124 | CGG |
| | 1529 | 1546 | CGG |
| 703 | 114 | 128 | CGG |
| 711 | 829 | 843 | GAC |
| 716 | 340 | 357 | GCC |
| 734 | 24 | 38 | CCT |
| 740 | 406 | 426 | AAG |
| | 449 | 466 | ATG |
| | 619 | 636 | AAG |
| 741 | 592 | 607 | GGAG |
| 742 | 19 | 36 | CGC |
| | 940 | 957 | GAT |
| 777 | 279 | 302 | CGA |
| | 438 | 461 | CGG |
| 791 | 2264 | 2281 | AGC |
| 797 | 50 | 67 | CTT |
| 803 | 88 | 102 | CCG |
| 824 | 29 | 43 | TCG |
| 826 | 363 | 377 | ACG |
| 838 | 59 | 73 | AGC |
| | 237 | 251 | ATC |
| 842 | 233 | 246 | AG |
| | 1103 | 1117 | CCG |
| 845 | 262 | 279 | CGG |
| | 417 | 431 | CGG |
| | 579 | 599 | CGG |
| | 728 | 748 | GCG |
| 851 | 1206 | 1220 | GCG |
| 875 | 4 | 24 | GCG |
| 877 | 268 | 282 | CCG |
| 889 | 387 | 404 | CGG |
| 895 | 15 | 29 | CGG |
| 900 | 36 | 50 | CCT |
| 905 | 53 | 67 | GCG |
| 911 | 309 | 323 | CCG |
| 914 | 717 | 731 | AGC |
| 915 | 1286 | 1300 | AGC |
| 916 | 317 | 334 | GCT |
| | 671 | 685 | GCG |
| 926 | 20 | 34 | CCG |
| | 38 | 52 | AAG |
| 930 | 217 | 234 | CCG |
| 933 | 106 | 125 | AG |
| 940 | 33 | 50 | CGG |
| 951 | 768 | 781 | CG |
| 954 | 608 | 628 | ACC |
| | 704 | 718 | GCG |
| 959 | 663 | 683 | CTG |
| 961 | 60 | 77 | CGG |
| 975 | 20 | 37 | CGG |
| 983 | 457 | 471 | GAG |
| | 568 | 582 | ACC |
| 987 | 34 | 57 | AAC |
| 989 | 339 | 353 | CGG |
| 995 | 3298 | 3315 | CCG |
| 998 | 324 | 338 | GAG |
| 1000 | 230 | 247 | AGG |
| | 371 | 385 | AGG |
| 1004 | 50 | 67 | ACC |
| 1010 | 450 | 463 | CG |
| 1013 | 59 | 73 | CGG |
| | 159 | 179 | CGG |
| 1015 | 279 | 296 | CGG |
| 1017 | 157 | 171 | GGA |
| | 353 | 370 | AGA |
| 1024 | 70 | 84 | CGG |
| | 213 | 227 | ACG |
| | 1023 | 1037 | CGG |
| 1026 | 1851 | 1866 | CGTT |
| 1046 | 49 | 66 | CAG |
| 1047 | 1401 | 1415 | CGT |
| 1049 | 147 | 161 | CGG |
| | 3200 | 3217 | CCG |
| 1056 | 1300 | 1314 | ATG |
| 1062 | 113 | 127 | AGG |
| 1078 | 813 | 827 | CGG |
| | 1246 | 1260 | GGC |
| 1112 | 468 | 482 | CGG |
| 1120 | 345 | 359 | CGG |
| 1130 | 157 | 177 | GCG |
| | 206 | 220 | AGA |
| 1131 | 371 | 385 | ACG |
| 1133 | 624 | 638 | CGG |
| | 1599 | 1613 | CGG |
| | 2219 | 2236 | GCG |
| 1134 | 1421 | 1434 | CT |
| 1135 | 524 | 541 | CGC |
| | 671 | 691 | AGG |
| | 1376 | 1393 | GCG |
| 1137 | 809 | 823 | ACG |
| 1139 | 266 | 280 | GTC |
| 1148 | 563 | 583 | CCA |
| 1150 | 669 | 683 | CCG |
| 1153 | 536 | 550 | CTG |
| 1154 | 458 | 478 | AGG |
| 1159 | 310 | 330 | GAG |
| 1172 | 261 | 281 | CGG |
| | 932 | 955 | AGC |
| 1178 | 1765 | 1779 | CCG |
| | 2203 | 2220 | CGT |
| 1179 | 203 | 220 | CCG |
| 1180 | 38 | 52 | CCT |
| 1184 | 489 | 503 | GCA |
| | 2658 | 2675 | AGC |
| 1220 | 1298 | 1315 | GCC |
| | 1409 | 1426 | ACC |
| 1223 | 1727 | 1742 | GAAA |
| 1229 | 41 | 58 | ACC |
| 1233 | 396 | 410 | CGC |
| 1244 | 885 | 899 | TGA |
| 1245 | 213 | 227 | CGG |
| 1260 | 338 | 355 | CGC |
| 1264 | 81 | 95 | CCG |
| | 1020 | 1037 | CGG |
| 1266 | 190 | 205 | ATCG |
| | 493 | 513 | GGT |
| 1269 | 38 | 61 | CCT |
| 1271 | 54 | 68 | CGC |
| 1279 | 338 | 358 | AGC |
| 1282 | 248 | 262 | CCG |
| | 829 | 843 | GAC |
| 1286 | 8 | 28 | CCG |
| | 71 | 85 | AGG |
| 1287 | 23 | 37 | ACC |
| 1292 | 177 | 191 | CCG |
| 1297 | 4 | 21 | GCG |
| 1301 | 997 | 1012 | AG |
| 1312 | 47 | 67 | CGG |
| 1315 | 527 | 553 | CCG |
| 1334 | 585 | 604 | AG |
| 1351 | 559 | 576 | ATT |
| 1354 | 644 | 659 | AG |
| 1366 | 63 | 83 | CGG |
| | 551 | 565 | GCC |
| 1367 | 283 | 300 | CCG |
| 1368 | 9 | 23 | CGG |
| 1369 | 213 | 233 | CGC |
| | 439 | 453 | GAG |
| 1370 | 548 | 562 | CCG |
| 1376 | 56 | 70 | GCG |
| 1385 | 447 | 461 | GGA |
| 1387 | 5 | 19 | CCG |
| 1396 | 90 | 110 | CGC |
| 1424 | 1053 | 1067 | GGC |
| | 1193 | 1207 | CTT |
| 1434 | 268 | 282 | ATC |
| 1435 | 12 | 29 | GAG |
| | 330 | 344 | GCG |
| 1436 | 627 | 641 | CGA |
| 1452 | 16 | 33 | GGC |
| 1457 | 464 | 478 | CCG |
| 1458 | 130 | 144 | ACC |
| 1462 | 7 | 21 | CGG |
| 1466 | 97 | 112 | ATCG |
| 1479 | 168 | 182 | CGG |
| | 248 | 262 | GCA |
| 1487 | 142 | 159 | CGG |
| 1493 | 2518 | 2532 | AGC |
| | 2620 | 2640 | AGC |
| 1510 | 928 | 942 | GAC |
| 1517 | 687 | 701 | CAA |
| | 973 | 987 | CAA |
| | 1096 | 1113 | AAG |
| 1522 | 44 | 61 | TCC |
| 1528 | 334 | 348 | CCG |
| 1530 | 140 | 154 | ACG |
| | 627 | 641 | CGG |
| 1534 | 1433 | 1447 | CGG |
| 1535 | 179 | 193 | CCT |
| 1537 | 153 | 173 | CGA |
| | 338 | 352 | CCG |
| 1538 | 590 | 607 | CCG |
| | 653 | 667 | CGA |
| | 797 | 814 | CGG |
| 1540 | 160 | 174 | GCG |
| | 529 | 543 | GCG |
| 1543 | 540 | 554 | GGT |
| | 952 | 966 | CAC |
| 1544 | 227 | 241 | CGG |
| | 676 | 690 | GGC |
| 1549 | 518 | 532 | CCG |
| 1550 | 28 | 45 | CCG |
| 1551 | 650 | 664 | GCC |
| 1563 | 123 | 137 | GGC |
| 1567 | 32 | 46 | CGG |
| 1580 | 34 | 51 | CCG |
| 1584 | 260 | 274 | CCT |
| 1590 | 4 | 21 | AGG |
| | 124 | 138 | CGT |
| 1595 | 149 | 163 | CGG |

[0691] TABLE 11
Swiss-Prot Data

| | |
|---|---|
| Seq ID: 1 | Seq ID: 801 |
| Accession: P27322 | Accession: Q9T074 |
| Swissprot_id: HS72_LYCES | Swissprot_id: PPCK_ARATH |
| Gi_number: 123620 | Gi_number: 12230482 |
| Description: HEAT SHOCK COGNATE | Description: Phosphoenolpyruvate |
| 70 KD PROTEIN 2 | carboxykinase [ATP](PEP |
| Seq ID: 2 | carboxykinase) |
| Accession: P28968 | (Phosphoenolpyruvate carboxylase) |
| Swissprot_id: VGLX_HSVEB | (PEPCK) |
| Gi_number: 138350 | Seq ID: 802 |
| Description: GLYCOPROTEIN X | Accession: Q03663 |
| PRECURSOR | Swissprot_id: GTX2_TOBAC |
| Seq ID: 3 | Gi_number: 416650 |
| Accession: Q9ZRR5 | Description: Probable glutathione S- |
| Swissprot_id: TBA3_HORVU | transferase (Auxin-induced protein |
| Gi_number: 8928432 | PGNT35/PCNT111) |
| Description: Tubulin alpha-3 chain | Seq ID: 803 |
| Seq ID: 4 | Accession: P80884 |
| Accession: P03993 | Swissprot_id: ANAN_ANACO |
| Swissprot_id: UBIQ_SOYBN | Gi_number: 13432122 |
| Gi_number: 136673 | Description: ANANAIN PRECURSOR |
| Description: UBIQUITIN | Seq ID: 804 |
| Seq ID: 5 | Accession: Q06548 |
| Accession: O64937 | Swissprot_id: APKA_ARATH |
| Swissprot_id: EF1A_ORYSA | Gi_number: 1168470 |
| Gi_number: 6015059 | Description: Protein kinase APK1A |
| Description: ELONGATION FACTOR 1- | Seq ID: 805 |
| ALPHA (EF-1-ALPHA) | Accession: P35792 |
| Seq ID: 6 | Swissprot_id: PR12_HORVU |
| Accession: P13983 | Gi_number: 548588 |
| Swissprot_id: EXTN_TOBAC | Description: PATHOGENESIS- |
| Gi_number: 119714 | RELATED PROTEIN PRB1-2 |
| Description: Extensin precursor (Cell wall | PRECURSOR |
| hydroxyproline-rich | Seq ID: 806 |
| glycoprotein) | Accession: P27349 |
| Seq ID: 7 | Swissprot_id: GOS9_ORYSA |
| Accession: O00555 | Gi_number: 121528 |
| Swissprot_id: CCAA_HUMAN | Description: G0S9 PROTEIN |
| Gi_number: 6166047 | Seq ID: 807 |
| Description: VOLTAGE-DEPENDENT | Accession: O43374 |
| P/Q-TYPE CALCIUM CHANNEL | Swissprot_id: RSG5_HUMAN |
| ALPHA-1A | Gi_number: 13959542 |
| SUBUNIT (CALCIUM | Description: RASGAP-ACTIVATING- |
| CHANNEL, L TYPE, ALPHA-1 | LIKE PROTEIN 2 |
| POLYPEPTIDE | Seq ID: 809 |
| ISOFORM 4) (BRAIN | Accession: P29834 |
| CALCIUM CHANNEL I) (BI) | Swissprot_id: GRP2_ORYSA |
| Seq ID: 8 | Gi_number: 232183 |
| Accession: Q99583 | Description: GLYCINE-RICH CELL |
| Swissprot_id: MNT_HUMAN | WALL STRUCTURAL PROTEIN 2 |
| Gi_number: 3914034 | PRECURSOR |
| Description: MAX binding protein MNT | Seq ID: 810 |
| (ROX protein) (MYC antagonist MNT) | Accession: Q03460 |
| Seq ID: 9 | Swissprot_id: GLSN_MEDSA |
| Accession: P35681 | Gi_number: 417073 |
| Swissprot_id: TCTP_ORYSA | Description: Glutamate synthase [NADH], |
| Gi_number: 549063 | chloroplast precursor |
| Description: TRANSLATIONALLY | (NADH-GOGAT) |
| CONTROLLED TUMOR PROTEIN | Seq ID: 811 |
| HOMOLOG (TCTP) | Accession: O23731 |
| Seq ID: 10 | Swissprot_id: CHS8_BROFI |
| Accession: P49311 | Gi_number: 5921766 |
| Swissprot_id: GRP2_SINAL | Description: CHALCONE SYNTHASE 8 |
| Gi_number: 1346181 | (NARINGENIN-CHALCONE |
| Description: Glycine-rich RNA-binding | SYNTHASE 8) |
| protein GRP2A | Seq ID: 812 |
| Seq ID: 11 | Accession: Q99758 |
| Accession: P54258 | Swissprot_id: ABC3_HUMAN |
| Swissprot_id: DRPL_RAT | Gi_number: 7387524 |
| Gi_number: 1706520 | Description: ATP-binding cassette, sub- |
| Description: ATROPHIN-1 | family A, member 3 (ATP-binding |
| (DENTATORUBRAL- | cassette transporter 3) (ATP- |
| PALLIDOLUYSIAN ATROPHY | binding cassette 3) (ABC-C |
| PROTEIN) | transporter) |
| Seq ID: 13 | Seq ID: 813 |
| Accession: P02308 | Accession: P29250 |
| Swissprot_id: H4_WHEAT | Swissprot_id: LOX2_ORYSA |
| Gi_number: 122106 | Gi_number: 126401 |
| Description: HISTONE H4 | Description: LIPOXYGENASE L-2 |
| Seq ID: 14 | Seq ID: 815 |
| Accession: P57078 | Accession: P13650 |
| Swissprot_id: ANR3_HUMAN | Swissprot_id: DHGB_ACICA |
| Gi_number: 10719883 | Gi_number: 118560 |
| Description: Serine/threonine-protein | Description: Glucose dehydrogenase-B |
| kinase ANKRD3 (Ankyrin repeat | [pyrroloquinoline-quinone] |
| domain protein 3) (PKC-delta- | precursor |
| interacting protein kinase) | Seq ID: 816 |
| Seq ID: 15 | Accession: Q06915 |
| Accession: P04050 | Swissprot_id: EA6_ARATH |
| Swissprot_id: RPB1_YEAST | Gi_number: 1169451 |
| Gi_number: 2507347 | Description: Probable glucan endo-1,3- |
| Description: DNA-DIRECTED RNA | beta-glucosidase A6 precursor |
| POLYMERASE II LARGEST SUBUNIT | ((1->3)-beta-glucan |
| (B220) | endohydrolase) ((1->3)-beta-glucanase) |
| Seq ID: 16 | (Beta-1,3-endoglucanase) |
| Accession: Q06666 | (Anther-specific protein A6) |
| Swissprot_id: T2_MOUSE | Seq ID: 817 |
| Gi_number: 730888 | Accession: P52420 |
| Description: OCTAPEPTIDE-REPEAT | Swissprot_id: PUR2_ARATH |
| PROTEIN T2 | Gi_number: 12644306 |
| Seq ID: 17 | Description: Phosphoribosylamine--glycine |
| Accession: Q9QX66 | ligase, chloroplast precursor |
| Swissprot_id: REQN_MOUSE | (GARS) (Glycinamide |
| Gi_number: 13431818 | ribonucleotide synthetase) |
| Description: ZINC-FINGER PROTEIN | (Phosphoribosylglycinamide |
| NEURO-D4 | synthetase) |
| Seq ID: 18 | Seq ID: 818 |
| Accession: Q02817 | Accession: Q07176 |
| Swissprot_id: MUC2_HUMAN | Swissprot_id: MMK1_MEDSA |
| Gi_number: 2506877 | Gi_number: 585519 |
| Description: MUCIN 2 PRECURSOR | Description: MITOGEN-ACTIVATED |
| (INTESTINAL MUCIN 2) | PROTEIN KINASE HOMOLOG MMK1 |
| Seq ID: 19 | (MAP KINASE |
| Accession: P12978 | MSK7) (MAP KINASE ERK1) |
| Swissprot_id: EBN2_EBV | Seq ID: 819 |
| Gi_number: 119111 | Accession: P11965 |
| Description: EBNA-2 NUCLEAR | Swissprot_id: PERX_TOBAC |
| PROTEIN | Gi_number: 129837 |
| Seq ID: 20 | Description: Lignin forming anionic |
| Accession: P08640 | peroxidase precursor |
| Swissprot_id: AMYH_YEAST | Seq ID: 820 |
| Gi_number: 728850 | Accession: P19135 |
| Description: GLUCOAMYLASE S1/S2 | Swissprot_id: PER2_CUCSA |
| PRECURSOR (GLUCAN | Gi_number: 129810 |
| 1,4-ALPHA-GLUCOSIDASE) | Description: Peroxidase 2 |
| (1,4-ALPHA-D-GLUCAN | Seq ID: 821 |
| GLUCOHYDROLASE) | Accession: P51614 |
| Seq ID: 21 | Swissprot_id: CHIA_VITVI |
| Accession: P21997 | Gi_number: 1705812 |
| Swissprot_id: SSGP_VOLCA | Description: ACIDIC ENDOCHITINASE |
| Gi_number: 134920 | PRECURSOR |
| Description: SULFATED SURFACE | Seq ID: 822 |
| GLYCOPROTEIN 185 (SSG 185) | Accession: Q9SYQ8 |
| Seq ID: 22 | Swissprot_id: CLV1_ARATH |
| Accession: Q9NZM4 | Gi_number: 12643323 |
| Swissprot_id: GSR1_HUMAN | Description: RECEPTOR PROTEIN |
| Gi_number: 18203330 | KINASE CLAVATA1 PRECURSOR |
| Description: Glioma tumor suppressor | Seq ID: 823 |
| candidate region gene 1 protein | Accession: P08640 |
| Seq ID: 23 | Swissprot_id: AMYH_YEAST |
| Accession: P48608 | Gi_number: 728850 |
| Swissprot_id: DIA_DROME | Description: GLUCOAMYLASE S1/S2 |
| Gi_number: 13124711 | PRECURSOR (GLUCAN |
| Description: DIAPHANOUS PROTEIN | 1,4-ALPHA-GLUCOSIDASE) |
| Seq ID: 24 | (1,4-ALPHA-D-GLUCAN |
| Accession: P27484 | GLUCOHYDROLASE) |
| Swissprot_id: GRP2_NICSY | Seq ID: 824 |
| Gi_number: 121631 | Accession: P24021 |
| Description: Glycine-rich protein 2 | Swissprot_id: NUS1_ASPOR |
| Seq ID: 25 | Gi_number: 128912 |
| Accession: P31924 | Description: NUCLEASE S1 |
| Swissprot_id: SUS2_ORYSA | (ENDONUCLEASE S1) (SINGLE- |
| Gi_number: 401140 | STRANDED-NUCLEATE |
| Description: Sucrose synthase 2 (Sucrose- | ENDONUCLEASE) |
| UDP glucosyltransferase 2) | (DEOXYRIBONUCLEASE S1) |
| Seq ID: 26 | Seq ID: 825 |
| Accession: P08640 | Accession: Q01577 |
| Swissprot_id: AMYH_YEAST | Swissprot_id: PKPA_PHYBL |
| Gi_number: 728850 | Gi_number: 3122617 |
| Description: GLUCOAMYLASE S1/S2 | Description: Serine/threonine protein |
| PRECURSOR (GLUCAN | kinase PKPA |
| 1,4-ALPHA-GLUCOSIDASE) | Seq ID: 826 |
| (1,4-ALPHA-D-GLUCAN | Accession: P80073 |
| GLUCOHYDROLASE) | Swissprot_id: MYB2_PHYPA |
| Seq ID: 27 | Gi_number: 462669 |
| Accession: P54774 | Description: Myb-related protein Pp2 |
| Swissprot_id: CC48_SOYBN | Seq ID: 827 |
| Gi_number: 1705678 | Accession: Q9ZT66 |
| Description: CELL DIVISION CYCLE | Swissprot_id: E134_MAIZE |
| PROTEIN 48 HOMOLOG (VALOSIN | Gi_number: 8928122 |
| CONTAINING | Description: Endo-1,3; 1,4-beta-D- |
| PROTEIN HOMOLOG) (VCP) | glucanase precursor |
| Seq ID: 28 | Seq ID: 828 |
| Accession: P33126 | Accession: P77258 |
| Swissprot_id: HS82_ORYSA | Swissprot_id: NEMA_ECOLI |
| Gi_number: 417154 | Gi_number: 2499420 |
| Description: HEAT SHOCK PROTEIN 82 | Description: N-ethylmaleimide reductase |
| Seq ID: 29 | (N-ethylmaleimide reducing |
| Accession: P08640 | enzyme) |
| Swissprot_id: AMYH_YEAST | Seq ID: 829 |
| Gi_number: 728850 | Accession: P93329 |
| Description: GLUCOAMYLASE S1/S2 | Swissprot_id: NO20_MEDTR |
| PRECURSOR (GLUCAN | Gi_number: 3914142 |
| 1,4-ALPHA-GLUCOSIDASE) | Description: EARLY NODULIN 20 |
| (1,4-ALPHA-D-GLUCAN | PRECURSOR (N-20) |
| GLUCOHYDROLASE) | Seq ID: 830 |
| Seq ID: 30 | Accession: P12653 |
| Accession: P28968 | Swissprot_id: GTH1_MAIZE |
| Swissprot_id: VGLX_HSVEB | Gi_number: 121695 |
| Gi_number: 138350 | Description: GLUTATHIONE S- |
| Description: GLYCOPROTEIN X | TRANSFERASE I (GST-I) (GST-29) |
| PRECURSOR | (GST |
| Seq ID: 31 | CLASS-PHI) |
| Accession: P14641 | Seq ID: 831 |
| Swissprot_id: TBA2_MAIZE | Accession: P37835 |
| Gi_number: 135411 | Swissprot_id: PER2_ORYSA |
| Description: Tubulin alpha-2 chain (Alpha- | Gi_number: 585662 |
| 2 tubulin) | Description: Peroxidase precursor |
| Seq ID: 32 | Seq ID: 832 |
| Accession: P51968 | Accession: P08995 |
| Swissprot_id: RO31_XENLA | Swissprot_id: NO26_SOYBN |
| Gi_number: 1710625 | Gi_number: 1352509 |
| Description: Heterogeneous nuclear | Description: NODULIN-26 (N-26) |
| ribonucleoprotein A3 homolog 1 | Seq ID: 833 |
| (hnRNP A3(A)) | Accession: O75880 |
| Seq ID: 33 | Swissprot_id: SCO1_HUMAN |
| Accession: P25439 | Gi_number: 8134663 |
| Swissprot_id: BRM_DROME | Description: SCO1 protein homolog, |
| Gi_number: 115132 | mitochondrial precursor |
| Description: HOMEOTIC GENE | Seq ID: 834 |
| REGULATOR (BRAHMA PROTEIN) | Accession: Q05968 |
| Seq ID: 34 | Swissprot_id: PR1_HORVU |
| Accession: P14328 | Gi_number: 548592 |
| Swissprot_id: SP96_DICDI | Description: PATHOGENESIS- |
| Gi_number: 134780 | RELATED PROTEIN 1 PRECURSOR |
| Description: SPORE COAT PROTEIN | Seq ID: 835 |
| SP96 | Accession: P28814 |
| Seq ID: 35 | Swissprot_id: BARW_HORVU |
| Accession: Q02817 | Gi_number: 114832 |
| Swissprot_id: MUC2_HUMAN | Description: Barwin |
| Gi_number: 2506877 | Seq ID: 836 |
| Description: MUCIN 2 PRECURSOR | Accession: P07084 |
| (INTESTINAL MUCIN 2) | Swissprot_id: IBBR_ORYSA |
| Seq ID: 36 | Gi_number: 6166242 |
| Accession: P03211 | Description: BOWMAN-BIRK TYPE |
| Swissprot_id: EBN1_EBV | BRAN TRYPSIN INHIBITOR |
| Gi_number: 119110 | PRECURSOR (RBTI) |
| Description: EBNA-1 NUCLEAR | (OSE727A) |
| PROTEIN | Seq ID: 839 |
| Seq ID: 37 | Accession: P29834 |
| Accession: O23755 | Swissprot_id: GRP2_ORYSA |
| Swissprot_id: EF2_BETVU | Gi_number: 232183 |
| Gi_number: 6015065 | Description: GLYCINE-RICH CELL |
| Description: ELONGATION FACTOR 2 | WALL STRUCTURAL PROTEIN 2 |
| (EF-2) | PRECURSOR |
| Seq ID: 38 | Seq ID: 841 |
| Accession: P25862 | Accession: O14727 |
| Swissprot_id: TBB1_AVESA | Swissprot_id: APAF_HUMAN |
| Gi_number: 135444 | Gi_number: 3023307 |
| Description: TUBULIN BETA-1 CHAIN | Description: Apoptotic protease activating |
| Seq ID: 39 | factor 1 (Apaf-1) |
| Accession: P06876 | Seq ID: 842 |
| Swissprot_id: MYB_MOUSE | Accession: P35816 |
| Gi_number: 127594 | Swissprot_id: PDP1_BOVIN |
| Description: MYB PROTO-ONCOGENE | Gi_number: 548465 |
| PROTEIN (C-MYB) | Description: [Pyruvate dehydrogenase |
| Seq ID: 40 | [Lipoamide]]-phosphatase 1, |
| Accession: Q06666 | mitochondrial precursor (PDP 1) |
| Swissprot_id: T2_MOUSE | (Pyruvate dehydrogenase |
| Gi_number: 730888 | phosphatase, catalytic subunit 1) |
| Description: OCTAPEPTIDE-REPEAT | (PDPC 1) |
| PROTEIN T2 | Seq ID: 843 |
| Seq ID: 41 | Accession: P32839 |
| Accession: P03211 | Swissprot_id: BCS1_YEAST |
| Swissprot_id: EBN1_EBV | Gi_number: 2506091 |
| Gi_number: 119110 | Description: BCS1 PROTEIN |
| Description: EBNA-1 NUCLEAR | Seq ID: 844 |
| PROTEIN | Accession: P46573 |
| Seq ID: 42 | Swissprot_id: APKB_ARATH |
| Accession: Q43247 | Gi_number: 12644274 |
| Swissprot_id: G3PE_MAIZE | Description: PROTEIN KINASE APK1B |
| Gi_number: 6166167 | Seq ID: 845 |
| Description: Glyceraldehyde 3-phosphate | Accession: P10496 |
| dehydrogenase, cytosolic 3 | Swissprot_id: GRP2_PHAVU |
| Seq ID: 43 | Gi_number: 121632 |
| Accession: Q40649 | Description: GLYCINE-RICH CELL |
| Swissprot_id: R103_ORYSA | WALL STRUCTURAL PROTEIN 1.8 |
| Gi_number: 2500353 | PRECURSOR |
| Description: 60S RIBOSOMAL PROTEIN | (GRP 1.8) |
| L10-3 (QM/R22) | Seq ID: 846 |
| Seq ID: 44 | Accession: P39881 |
| Accession: Q9LQZ7 | Swissprot_id: CUT1_CANFA |
| Swissprot_id: COL6_ARATH | Gi_number: 729093 |
| Gi_number: 17433066 | Description: CCAAT displacement protein |
| Description: Zinc finger protein constans- | (Homeobox protein Clox) |
| like 6 | (Clox-1) |
| Seq ID: 45 | Seq ID: 847 |
| Accession: P39858 | Accession: O42690 |
| Swissprot_id: CAPI_STAAU | Swissprot_id: CDR3_CANAL |
| Gi_number: 729026 | Gi_number: 5921713 |
| Description: CAPI PROTEIN | Description: OPAQUE-SPECIFIC ABC |
| Seq ID: 46 | TRANSPORTER CDR3 |
| Accession: P80299 | Seq ID: 848 |
| Swissprot_id: HYES_RAT | Accession: P08183 |
| Gi_number: 462371 | Swissprot_id: MDR1_HUMAN |
| Description: SOLUBLE EPOXIDE | Gi_number: 2506118 |
| HYDROLASE (SEH) (EPOXIDE | Description: MULTIDRUG RESISTANCE |
| HYDRATASE) | PROTEIN 1 (P-GLYCOPROTEIN 1) |
| (CYTOSOLIC EPOXIDE | Seq ID: 849 |
| HYDROLASE) (CEH) | Accession: P21997 |
| Seq ID: 47 | Swissprot_id: SSGP_VOLCA |
| Accession: O13759 | Gi_number: 134920 |
| Swissprot_id: CSX1_SCHPO | Description: SULFATED SURFACE |
| Gi_number: 3121946 | GLYCOPROTEIN 185 (SSG 185) |
| Description: RNA-BINDING POST- | Seq ID: 850 |
| TRANSCRIPTIONAL REGULATOR | Accession: O15254 |
| CSX1 | Swissprot_id: CAO3_HUMAN |
| Seq ID: 48 | Gi_number: 17366151 |
| Accession: O43516 | Description: Acyl-coenzyme A oxidase 3, |
| Swissprot_id: WAIP_HUMAN | peroxisomal (Pristanoyl-CoA |
| Gi_number: 13124642 | oxidase) |
| Description: WISKOTT-ALDRICH | Seq ID: 851 |
| SYNDROME PROTEIN INTERACTING | Accession: P13983 |
| PROTEIN (WASP | Swissprot_id: EXTN_TOBAC |
| INTERACTING PROTEIN) | Gi_number: 119714 |
| (PRPL-2 PROTEIN) | Description: Extensin precursor (Cell wall |
| Seq ID: 49 | hydroxyproline-rich |
| Accession: P25096 | glycoprotein) |
| Swissprot_id: P21_SOYBN | Seq ID: 852 |
| Gi_number: 129320 | Accession: Q9SYQ8 |
| Description: P21 PROTEIN | Swissprot_id: CLV1_ARATH |
| Seq ID: 50 | Gi_number: 12643323 |
| Accession: P49688 | Description: RECEPTOR PROTEIN |
| Swissprot_id: RS2_ARATH | KINASE CLAVATA1 PRECURSOR |
| Gi_number: 3915847 | Seq ID: 853 |
| Description: 40S RIBOSOMAL PROTEIN | Accession: P05522 |
| S2 | Swissprot_id: GUN1_PERAE |
| Seq ID: 51 | Gi_number: 121784 |
| Accession: P33278 | Description: ENDOGLUCANASE 1 |
| Swissprot_id: SUI1_ORYSA | PRECURSOR (ENDO-1,4-BETA- |
| Gi_number: 462195 | GLUCANASE) |
| Description: PROTEIN TRANSLATION | (ABSCISSION CELLULASE 1) |
| FACTOR SUI1 HOMOLOG (GOS2 | Seq ID: 854 |
| PROTEIN) | Accession: P43293 |
| Seq ID: 52 | Swissprot_id: NAK_ARATH |
| Accession: Q99583 | Gi_number: 1171642 |
| Swissprot_id: MNT_HUMAN | Description: Probable serine/threonine- |
| Gi_number: 3914034 | protein kinase NAK |
| Description: MAX binding protein MNT | Seq ID: 855 |
| (ROX protein) (MYC antagonist MNT) | Accession: P54646 |
| Seq ID: 53 | Swissprot_id: AAK2_HUMAN |
| Accession: P46602 | Gi_number: 1703035 |
| Swissprot_id: HAT3_ARATH | Description: 5′-AMP-activated protein |
| Gi_number: 12644275 | kinase, catalytic alpha-2 chain |
| Description: Homeobox-leucine zipper | (AMPK alpha-2 chain) |
| protein HAT3 (HD-ZIP protein 3) | Seq ID: 856 |
| Seq ID: 54 | Accession: P34106 |
| Accession: P21997 | Swissprot_id: ALA2_PANMI |
| Swissprot_id: SSGP_VOLCA | Gi_number: 461498 |
| Gi_number: 134920 | Description: ALANINE |
| Description: SULFATED SURFACE | AMINOTRANSFERASE 2 (GPT) |
| GLYCOPROTEIN 185 (SSG 185) | (GLUTAMIC--PYRUVIC |
| Seq ID: 55 | TRANSAMINASE 2) |
| Accession: P13983 | (GLUTAMIC--ALANINE |
| Swissprot_id: EXTN_TOBAC | TRANSAMINASE 2) |
| Gi_number: 119714 | (ALAAT-2) |
| Description: Extensin precursor (Cell wall | Seq ID: 858 |
| hydroxyproline-rich | Accession: P10056 |
| glycoprotein) | Swissprot_id: PAP3_CARPA |
| Seq ID: 56 | Gi_number: 1709574 |
| Accession: Q9SW70 | Description: Caricain precursor (Papaya |
| Swissprot_id: SRP_VITRI | proteinase omega) (Papaya |
| Gi_number: 15214303 | proteinase III) (PPIII) (Papaya |
| Description: Stress-related protein | peptidase A) |
| Seq ID: 57 | Seq ID: 859 |
| Accession: P53039 | Accession: P28968 |
| Swissprot_id: YIPA_YEAST | Swissprot_id: VGLX_HSVEB |
| Gi_number: 1724030 | Gi_number: 138350 |
| Description: YIP1 PROTEIN | Description: GLYCOPROTEIN X |
| Seq ID: 58 | PRECURSOR |
| Accession: O22540 | Seq ID: 860 |
| Swissprot_id: RL11_ORYSA | Accession: O70579 |
| Gi_number: 6093997 | Swissprot_id: PM34_MOUSE |
| Description: 60S RIBOSOMAL PROTEIN | Gi_number: 12585304 |
| L11 | Description: Peroxisomal membrane |
| Seq ID: 59 | protein PMP34 (34 kDa peroxisomal |
| Accession: Q03211 | membrane protein) (Solute carrier |
| Swissprot_id: EXLP_TOBAC | family 25, member 17) |
| Gi_number: 544262 | Seq ID: 861 |
| Description: PISTIL-SPECIFIC | Accession: Q95107 |
| EXTENSIN-LIKE PROTEIN | Swissprot_id: WASL_BOVIN |
| PRECURSOR (PELP) | Gi_number: 13431968 |
| Seq ID: 60 | Description: Neural Wiskott-Aldrich |
| Accession: P05203 | syndrome protein (N-WASP) |
| Swissprot_id: H3_MAIZE | Seq ID: 862 |
| Gi_number: 122085 | Accession: P23923 |
| Description: HISTONE H3 | Swissprot_id: HBPB_WHEAT |
| Seq ID: 61 | Gi_number: 122772 |
| Accession: P29314 | Description: TRANSCRIPTION FACTOR |
| Swissprot_id: RS9_RAT | HBP-1B |
| Gi_number: 1173286 | Seq ID: 865 |
| Description: 40S RIBOSOMAL PROTEIN | Accession: P81214 |
| S9 | Swissprot_id: CARP_SYNRA |
| Seq ID: 62 | Gi_number: 5915874 |
| Accession: P06599 | Description: SYNCEPHAPEPSIN |
| Swissprot_id: EXTN_DAUCA | PRECURSOR |
| Gi_number: 119711 | Seq ID: 866 |
| Description: EXTENSIN PRECURSOR | Accession: O75317 |
| Seq ID: 63 | Swissprot_id: UBPC_HUMAN |
| Accession: P37705 | Gi_number: 6707738 |
| Swissprot_id: GRP3_DAUCA | Description: Ubiquitin carboxyl-terminal |
| Gi_number: 585217 | hydrolase 12 (Ubiquitin |
| Description: GLYCINE RICH PROTEIN | thiolesterase 12) (Ubiquitin- |
| A3 | specific processing protease |
| Seq ID: 64 | 12) (Deubiquitinating enzyme 12) |
| Accession: Q99091 | (Ubiquitin hydrolyzing |
| Swissprot_id: CPR3_PETCR | enzyme 1) |
| Gi_number: 1169084 | Seq ID: 868 |
| Description: LIGHT-INDUCIBLE | Accession: P16273 |
| PROTEIN CPRF-3 | Swissprot_id: PRPX_HORVU |
| Seq ID: 65 | Gi_number: 1346809 |
| Accession: P13983 | Description: PATHOGEN-RELATED |
| Swissprot_id: EXTN_TOBAC | PROTEIN |
| Gi_number: 119714 | Seq ID: 869 |
| Description: Extensin precursor (Cell wall | Accession: Q43295 |
| hydroxyproline-rich | Swissprot_id: KAP1_ARATH |
| glycoprotein) | Gi_number: 7387811 |
| Seq ID: 66 | Description: Adenylylsulfate kinase 1, |
| Accession: P18566 | chloroplast precursor (APS |
| Swissprot_id: RBS2_ORYSA | kinase) (Adenosine- |
| Gi_number: 132096 | 5′phosphosulfate kinase) (ATP |
| Description: Ribulose bisphosphate | adenosine-5′-phosphosulfate 3′- |
| carboxylase small chain A, | phosphotransferase) |
| chloroplast precursor (RuBisCO | Seq ID: 870 |
| small subunit A) | Accession: P08393 |
| Seq ID: 67 | Swissprot_id: ICP0_HSV11 |
| Accession: P03211 | Gi_number: 124134 |
| Swissprot_id: EBN1_EBV | Description: Trans-acting transcriptional |
| Gi_number: 119110 | protein ICP0 (Immediate-early |
| Description: EBNA-1 NUCLEAR | protein IE110) (VMW110) |
| PROTEIN | (Alpha-0 protein) |
| Seq ID: 69 | Seq ID: 872 |
| Accession: P23246 | Accession: P40616 |
| Swissprot_id: SFPQ_HUMAN | Swissprot_id: ARL1_HUMAN |
| Gi_number: 1709851 | Gi_number: 728888 |
| Description: SPLICING FACTOR, | Description: ADP-RIBOSYLATION |
| PROLINE-AND GLUTAMINE-RICH | FACTOR-LIKE PROTEIN 1 |
| (POLYPYRIMIDINE TRACT- | Seq ID: 874 |
| BINDING PROTEIN-ASSOCIATED | Accession: P35135 |
| SPLICING | Swissprot_id: UBC4_LYCES |
| FACTOR) (PTB-ASSOCIATED | Gi_number: 464981 |
| SPLICING FACTOR) (PSF) | Description: UBIQUITIN- |
| (DNA-BINDING P52/P100 | CONJUGATING ENZYME E2-17 KD |
| COMPLEX, 100 KDA SUBUNIT) | (UBIQUITIN-PROTEIN |
| Seq ID: 71 | LIGASE) (UBIQUITIN |
| Accession: P22277 | CARRIER PROTEIN) |
| Swissprot_id: R27A_HORVU | Seq ID: 876 |
| Gi_number: 133898 | Accession: Q00765 |
| Description: 40S RIBOSOMAL PROTEIN | Swissprot_id: DP1_HUMAN |
| S27A | Gi_number: 232007 |
| Seq ID: 72 | Description: POLYPOSIS LOCUS |
| Accession: Q9SS17 | PROTEIN 1 (TB2 PROTEIN) |
| Swissprot_id: RS24_ARATH | Seq ID: 877 |
| Gi_number: 11134742 | Accession: Q9NZW4 |
| Description: 40S ribosomal protein S24 | Swissprot_id: DSPP_HUMAN |
| Seq ID: 73 | Gi_number: 17865470 |
| Accession: P03993 | Description: Dentin sialophosphoprotein |
| Swissprot_id: UBIQ_SOYBN | precursor [Contains: Dentin |
| Gi_number: 136673 | phosphoprotein (Dentin |
| Description: UBIQUITIN | phosphophoryn) (DPP); Dentin |
| Seq ID: 74 | sialoprotein (DSP)] |
| Accession: P24068 | Seq ID: 878 |
| Swissprot_id: OCS1_MAIZE | Accession: P21997 |
| Gi_number: 1352613 | Swissprot_id: SSGP_VOLCA |
| Description: OCS-ELEMENT BINDING | Gi_number 134920 |
| FACTOR 1 (OCSBF-1) | Description: SULFATED SURFACE |
| Seq ID: 75 | GLYCOPROTEIN 185 (SSG 185) |
| Accession: P05203 | Seq ID: 881 |
| Swissprot_id: H3_MAIZE | Accession: P43293 |
| Gi_number: 122085 | Swissprot_id: NAK_ARATH |
| Description: HISTONE H3 | Gi_number: 1171642 |
| Seq ID: 76 | Description: Probable serine/threonine- |
| Accession: P49637 | protein kinase NAK |
| Swissprot_id: RL2A_ARATH | Seq ID: 882 |
| Gi_number: 1710530 | Accession: P27164 |
| Description: 60S ribosomal protein L27A | Swissprot_id: CAL3_PETHY |
| Seq ID: 77 | Gi_number: 115492 |
| Accession: P46297 | Description: CALMODULIN-RELATED |
| Swissprot_id: RS23_FRAAN | PROTEIN |
| Gi_number: 1173187 | Seq ID: 883 |
| Description: 40S RIBOSOMAL PROTEIN | Accession: P11675 |
| S23 (S12) | Swissprot_id: IE18_PRVIF |
| Seq ID: 78 | Gi_number: 124178 |
| Accession: P46297 | Description: IMMEDIATE-EARLY |
| Swissprot_id: RS23_FRAAN | PROTEIN IE180 |
| Gi_number: 1173187 | Seq ID: 884 |
| Description: 40S RIBOSOMAL PROTEIN | Accession: O52535 |
| S23 (S12) | Swissprot_id: CAH_KLEPN |
| Seq ID: 79 | Gi_number: 5915869 |
| Accession: P93329 | Description: Carbonic anhydrase precursor |
| Swissprot_id: NO20_MEDTR | (Carbonate dehydratase) |
| Gi_number: 3914142 | Seq ID: 885 |
| Description: EARLY NODULIN 20 | Accession: O64637 |
| PRECURSOR (N-20) | Swissprot_id: C7C2_ARATH |
| Seq ID: 80 | Gi_number: 5915832 |
| Accession: P49216 | Description: Cytochrome P450 76C2 |
| Swissprot_id: RS26_ORYSA | Seq ID: 886 |
| Gi_number: 1350969 | Accession: P10978 |
| Description: 40S RIBOSOMAL PROTEIN | Swissprot_id: POLX_TOBAC |
| S26 (S31) | Gi_number: 130582 |
| Seq ID: 81 | Description: Retrovirus-related Pol |
| Accession: P03211 | polyprotein from transposon TNT |
| Swissprot_id: EBN1_EBV | 1-94 [Contains: Protease; |
| Gi_number: 119110 | Reverse transcriptase; |
| Description: EBNA-1 NUCLEAR | Endonuclease] |
| PROTEIN | Seq ID: 887 |
| Seq ID: 82 | Accession: P06795 |
| Accession: O48557 | Swissprot_id: MDR1_MOUSE |
| Swissprot_id: RL17_MAIZE | Gi_number: 126927 |
| Gi_number: 3914685 | Description: Multidrug resistance protein 1 |
| Description: 60S RIBOSOMAL PROTEIN | (P-glycoprotein 1) |
| L17 | Seq ID: 888 |
| Seq ID: 83 | Accession: P51533 |
| Accession: Q24523 | Swissprot_id: PDRA_YEAST |
| Swissprot_id: BUN2_DROME | Gi_number: 1709621 |
| Gi_number: 17366491 | Description: ATP-dependent permease |
| Description: Bunched protein, class 2/class | PDR10 |
| 3 isoforms (Shortsighted | Seq ID: 889 |
| protein) | Accession: P22817 |
| Seq ID: 84 | Swissprot_id: IDE_DROME |
| Accession: P00303 | Gi_number: 124156 |
| Swissprot_id: BABL_CUCSA | Description: INSULIN-DEGRADING |
| Gi_number: 114806 | ENZYME (INSULYSIN) (INSULINASE) |
| Description: BASIC BLUE PROTEIN | (INSULIN |
| (CUSACYANIN) (PLANTACYANIN) | PROTEASE) |
| (CBP) | Seq ID: 890 |
| Seq ID: 85 | Accession: O22060 |
| Accession: P17078 | Swissprot_id: SPS1_CITUN |
| Swissprot_id: RL35_RAT | Gi_number: 3915023 |
| Gi_number: 132917 | Description: SUCROSE-PHOSPHATE |
| Description: 60S RIBOSOMAL PROTEIN | SYNTHASE 1 |
| L35 | (UDP-GLUCOSE-FRUCTOSE- |
| Seq ID: 86 | PHOSPHATE |
| Accession: O08816 | GLUCOSYLTRANSFERASE 1) |
| Swissprot_id: WASL_RAT | Seq ID: 891 |
| Gi_number: 13431956 | Accession: O81108 |
| Description: Neural Wiskott-Aldrich | Swissprot_id: ACA2_ARATH |
| syndrome protein (N-WASP) | Gi_number: 12229639 |
| Seq ID: 87 | Description: Calcium-transporting ATPase |
| Accession: Q9M352 | 2, plasma membrane-type |
| Swissprot_id: R36B_ARATH | (Ca2+-ATPase, isoform 2) |
| Gi_number: 17865567 | Seq ID: 893 |
| Description: 60S ribosomal protein L36-2 | Accession: Q9S7J8 |
| Seq ID: 88 | Swissprot_id: AHM5_ARATH |
| Accession: P35687 | Gi_number: 12229667 |
| Swissprot_id: RS21_ORYSA | Description: Copper-transporting ATPase |
| Gi_number: 548852 | RAN1 (Responsive-to-antagonist |
| Description: 40S RIBOSOMAL PROTEIN | 1) |
| S21 | Seq ID: 894 |
| Seq ID: 89 | Accession: Q07158 |
| Accession: P14328 | Swissprot_id: TPS1_KLULA |
| Swissprot_id: SP96_DICDI | Gi_number: 586113 |
| Gi_number: 134780 | Description: ALPHA, ALPHA- |
| Description: SPORE COAT PROTEIN | TREHALOSE-PHOSPHATE SYNTHASE |
| SP96 | [UDP-FORMING] 56 |
| Seq ID: 90 | KD SUBUNIT (TREHALOSE-6- |
| Accession: P13983 | PHOSPHATE SYNTHASE) |
| Swissprot_id: EXTN_TOBAC | (UDP-GLUCOSE- |
| Gi_number: 119714 | GLUCOSEPHOSPHATE |
| Description: Extensin precursor (Cell wall | GLUCOSYLTRANSFERASE) |
| hydroxyproline-rich | Seq ID: 895 |
| glycoprotein) | Accession: P93400 |
| Seq ID: 91 | Swissprot_id: PLD_TOBAC |
| Accession: P08640 | Gi_number: 3914361 |
| Swissprot_id: AMYH_YEAST | Description: PHOSPHOLIPASE D |
| Gi_number: 728850 | PRECURSOR (PLD) (CHOLINE |
| Description: GLUCOAMYLASE S1/S2 | PHOSPHATASE) |
| PRECURSOR (GLUCAN | (PHOSPHATIDYLCHOLINE- |
| 1,4-ALPHA-GLUCOSIDASE) | HYDROLYZING PHOSPHOLIPASE D) |
| (1,4-ALPHA-D-GLUCAN | Seq ID: 896 |
| GLUCOHYDROLASE) | Accession: P49608 |
| Seq ID: 92 | Swissprot_id: ACOC_CUCMA |
| Accession: P27483 | Gi_number: 1351856 |
| Swissprot_id: GRP_ARATH | Description: ACONITATE HYDRATASE, |
| Gi_number: 121640 | CYTOPLASMIC (CITRATE HYDROLYASE) |
| Description: GLYCINE-RICH CELL | (ACONITASE) |
| WALL STRUCTURAL PROTEIN | Seq ID: 897 |
| PRECURSOR | Accession: P22817 |
| Seq ID: 93 | Swissprot_id: IDE_DROME |
| Accession: P08640 | Gi_number: 124156 |
| Swissprot_id: AMYH_YEAST | Description: INSULIN-DEGRADING |
| Gi_number: 728850 | ENZYME (INSULYSIN) (INSULINASE) |
| Description: GLUCOAMYLASE S1/S2 | (INSULIN |
| PRECURSOR (GLUCAN | PROTEASE) |
| 1,4-ALPHA-GLUCOSIDASE) | Seq ID: 898 |
| (1,4-ALPHA-D-GLUCAN | Accession: P49333 |
| GLUCOHYDROLASE) | Swissport_id: ETR1_ARATH |
| Seq ID: 95 | Gi_number: 1352397 |
| Accession: P40602 | Description: ETR1 protein |
| Swissprot_id: APG_ARATH | Seq ID: 899 |
| Gi_number: 728867 | Accession: P33302 |
| Description: ANTER-SPECIFIC | Swissprot_id: PDR5_YEAST |
| PROLINE-RICH PROTEIN APG | Gi_number: 464819 |
| PRECURSOR | Description: SUPPRESSOR OF |
| Seq ID: 96 | TOXICITY OF SPORIDESMIN |
| Accession: P33485 | Seq ID: 900 |
| Swissprot_id: VNUA_PRVKA | Accession: P54802 |
| Gi_number: 465445 | Swissprot_id: ANAG_HUMAN |
| Description: PROBABLE NUCLEAR | Gi_number: 1703303 |
| ANTIGEN | Description: Alpha-N- |
| Seq ID: 97 | acetylglucosaminidase precursor |
| Accession: P70315 | (N-acetyl-alpha-glucosaminidase) |
| Swissprot_id: WASP_MOUSE | (NAG) |
| Gi_number: 2499130 | Seq ID: 901 |
| Description: Wiskott-Aldrich syndrome | Accession: P29141 |
| protein homolog (WASP) | Swissprot_id: SUBV_BACSU |
| Seq ID: 98 | Gi_number: 135023 |
| Accession: P10220 | Description: Minor extracellular protease |
| Swissprot_id: TEGU_HSV11 | VPR precursor |
| Gi_number: 135576 | Seq ID: 902 |
| Description: LARGE TEGUMENT | Accession: P53681 |
| PROTEIN (VIRION PROTEIN UL36) | Swissprot_id: CRK_DAUCA |
| Seq ID: 99 | Gi_number: 1706130 |
| Accession: P11675 | Description: CDPK-related protein kinase |
| Swissprot_id: IE18_PRVIF | (PK421) |
| Gi_number: 124178 | Seq ID: 903 |
| Description: IMMEDIATE-EARLY | Accession: P46401 |
| PROTEIN IE180 | Swissprot_id: BCCA_MYCTU |
| Seq ID: 100 | Gi_number: 1168278 |
| Accession: P13983 | Description: Acetyl-/propionyl-coenzyme |
| Swissprot_id: EXTN_TOBAC | A carboxylase alpha chain |
| Gi_number: 119714 | [Includes: Biotin carboxylase; |
| Description: Extensin precursor (Cell wall | Biotin carboxyl carrier |
| hydroxyproline-rich | protein (BCCP)] |
| glycoprotein) | Seq ID: 904 |
| Seq ID: 101 | Accession: Q02779 |
| Accession: Q62376 | Swissprot_id: M3KA_HUMAN |
| Swissprot_id: RU17_MOUSE | Gi_number: 6686295 |
| Gi_number: 13633918 | Description: MITOGEN-ACTIVATED |
| Description: U1 small nuclear | PROTEIN KINASE KINASE KINASE 10 |
| ribonucleoprotein 70 kDa (U1 SNRNP 70 | (MIXED |
| kDa) (snRNP70) | LINEAGE KINASE 2) |
| Seq ID: 102 | (PROTEIN KINASE MST) |
| Accession: P03211 | Seq ID: 906 |
| Swissprot_id: EBN1_EBV | Accession: Q06850 |
| Gi_number: 119110 | Swissprot_id: CDP1_ARATH |
| Description: EBNA-1 NUCLEAR | Gi_number: 729092 |
| PROTEIN | Description: Calcium-dependent protein |
| Seq ID: 103 | kinase, isoform AK1 (CDPK) |
| Accession: P33485 | Seq ID: 907 |
| Swissprot_id: VNUA_PRVKA | Accession: P48422 |
| Gi_number: 465445 | Swissprot_id: C861_ARATH |
| Description: PROBABLE NUCLEAR | Gi_number: 13878905 |
| ANTIGEN | Description: Cytochrome P450 86A1 |
| Seq ID: 104 | (CYPLXXXVI) (P450-dependent fatty |
| Accession: P21997 | acid omega-hydroxylase) |
| Swissprot_id: SSGP_VOLCA | Seq ID: 908 |
| Gi_number: 134920 | Accession: P25297 |
| Description: SULFATED SURFACE | Swissprot_id: PH84_YEAST |
| GLYCOPROTEIN 185 (SSG 185) | Gi_number: 1346710 |
| Seq ID: 105 | Description: INORGANIC PHOSPHATE |
| Accession: Q63003 | TRANSPORTER PHO84 |
| Swissprot_id: 5E5_RAT | Seq ID: 909 |
| Gi_number: 2498095 | Accession: P16157 |
| Description: 5E5 ANTIGEN | Swissprot_id: ANK1_HUMAN |
| Seq ID: 106 | Gi_number: 113884 |
| Accession: Q02817 | Description: Ankyrin 1 (Erythrocyte |
| Swissprot_id: MUC2_HUMAN | ankyrin) (Ankyrin R) |
| Gi_number: 2506877 | Seq ID: 910 |
| Description: MUCIN 2 PRECURSOR | Accession: P46032 |
| (INTESTINAL MUCIN 2) | Swissprot_id: PT2B_ARATH |
| Seq ID: 107 | Gi_number: 1172704 |
| Accession: P13983 | Description: Peptide transporter PTR2-B |
| Swissprot_id: EXTN_TOBAC | (Histidine transporting |
| Gi_number: 119714 | protein) |
| Description: Extensin precursor (Cell wall | Seq ID: 911 |
| hydroxyproline-rich | Accession: P26514 |
| glycoprotein) | Swissprot_id: XYNA_STRLI |
| Seq ID: 109 | Gi_number: 6226911 |
| Accession: P18615 | Description: ENDO-1,4-BETA- |
| Swissprot_id: RDP_HUMAN | XYLANASE A PRECURSOR |
| Gi_number: 1350554 | (XYLANASE A) |
| Description: RD protein | (1,4-BETA-D-XYLAN |
| Seq ID: 110 | XYLANOHYDROLASE A) |
| Accession: P21997 | Seq ID: 912 |
| Swissprot_id: SSGP_VOLCA | Accession: Q02775 |
| Gi_number: 134920 | Swissprot_id: SLU7_YEAST |
| Description: SULFATED SURFACE | Gi_number: 401091 |
| GLYCOPROTEIN 185 (SSG 185) | Description: PRE-MRNA SPLICING |
| Seq ID: 111 | FACTOR SLU7 |
| Accession: Q00451 | Seq ID: 913 |
| Swissprot_id: PRF1_LYCES | Accession: Q04468 |
| Gi_number: 1709767 | Swissprot_id: TCMO_HELTU |
| Description: 36.4 KD PROLINE-RICH | Gi_number: 417863 |
| PROTEIN | Description: TRANS-CINNAMATE 4- |
| Seq ID: 112 | MONOOXYGENASE (CINNAMIC ACID |
| Accession: Q02817 | 4-HYDROXYLASE) (CA4H) |
| Swissprot_id: MUC2_HUMAN | (C4H) (P450C4H) (CYTOCHROME P450 |
| Gi_number: 2506877 | 73) |
| Description: MUCIN 2 PRECURSOR | Seq ID: 914 |
| (INTESTINAL MUCIN 2) | Accession: P55034 |
| Seq ID: 113 | Swissprot_id: PSD4_ARATH |
| Accession: P21997 | Gi_number: 1709794 |
| Swissprot_id: SSGP_VOLCA | Description: 26S proteasome regulatory |
| Gi_number: 134920 | subunit S5A (Multiubiquitin |
| Description: SULFATED SURFACE | chain binding protein) |
| GLYCOPROTEIN 185 (SSG 185) | Seq ID: 915 |
| Seq ID: 116 | Accession: P06782 |
| Accession: Q02817 | Swissprot_id: SNF1_YEAST |
| Swissprot_id: MUC2_HUMAN | Gi_number: 134588 |
| Gi_number: 2506877 | Description: CARBON CATABOLITE |
| Description: MUCIN 2 PRECURSOR | DEREPRESSING PROTEIN KINASE |
| (INTESTINAL MUCIN 2) | Seq ID: 917 |
| Seq ID: 117 | Accession: O64668 |
| Accession: P70315 | Swissprot_id: PSNH_ARATH |
| Swissprot_id: WASP_MOUSE | Gi_number: 6093852 |
| Gi_number: 2499130 | Description: Presenilin homolog |
| Description: Wiskott-Aldrich syndrome | Seq ID: 919 |
| protein homolog (WASP) | Accession: P26300 |
| Seq ID: 121 | Swissprot_id: ENO_LYCES |
| Accession: O22446 | Gi_number: 119354 |
| Swissprot_id: HDAC_ARATH | Description: ENOLASE (2- |
| Gi_number: 3023945 | PHOSPHOGLYCERATE |
| Description: Histone deacetylase (HD) | DEHYDRATASE) |
| Seq ID: 122 | (2-PHOSPHO-D-GLYCERATE |
| Accession: P03211 | HYDRO-LYASE) |
| Swissprot_id: EBN1_EBV | Seq ID: 920 |
| Gi_number: 119110 | Accession: P37287 |
| Description: EBNA-1 NUCLEAR | Swissprot_id: PIGA_HUMAN |
| PROTEIN | Gi_number: 585696 |
| Seq ID: 124 | Description: N-acetylglucosaminyl- |
| Accession: P08393 | phosphatidylinositol biosynthetic |
| Swissprot_id: ICP0_HSV11 | protein (GlcNac-PI synthesis |
| Gi_number: 124134 | protein) |
| Description: Trans-acting transcriptional | (Phosphatidylinositol-glycan |
| protein ICP0 (Immediate-early | biosynthesis, class A |
| protein IE110) (VMW110) | protein) (PIG-A) |
| (Alpha-0 protein) | Seq ID: 921 |
| Seq ID: 125 | Accession: P21997 |
| Accession: P49625 | Swissprot_id: SSGP_VOLCA |
| Swissprot_id: RL5_ORYSA | Gi_number: 134920 |
| Gi_number: 3915826 | Description: SULFATED SURFACE |
| Description: 60S RIBOSOMAL PROTEIN | GLYCOPROTEIN 185 (SSG 185) |
| L5 | Seq ID: 922 |
| Seq ID: 126 | Accession: O15269 |
| Accession: P33485 | Swissprot_id: LCB1_HUMAN |
| Swissprot_id: VNUA_PRVKA | Gi_number: 6685579 |
| Gi_number: 465445 | Description: Serine palmitoyltransferase 1 |
| Description: PROBABLE NUCLEAR | (Long chain base |
| ANTIGEN | biosynthesis protein 1) (LCB 1) |
| Seq ID: 127 | (Serine-palmitoyl-CoA |
| Accession: P14918 | transferase 1) (SPT 1) (SPT1) |
| Swissprot_id: EXTN_MAIZE | Seq ID: 923 |
| Gi_number: 119712 | Accession: P13728 |
| Description: EXTENSIN PRECURSOR | Swissprot_id: SGS3_DROYA |
| (PROLINE-RICH GLYCOPROTEIN) | Gi_number: 134469 |
| Seq ID: 128 | Description: Salivary glue protein SGS-3 |
| Accession: P42736 | precursor |
| Swissprot_id: CDI3_ARATH | Seq ID: 924 |
| Gi_number: 1168862 | Accession: P93846 |
| Description: CADMIUM-INDUCED | Swissprot_id: CP51_SORBI |
| PROTEIN AS30 | Gi_number: 5921924 |
| Seq ID: 129 | Description: Cytochrome P450 51 |
| Accession: P33479 | (CYPL1) (P450-L1A1) (Obtusifoliol |
| Swissprot_id: IE18_PRVKA | 14-alpha demethylase) |
| Gi_number: 462387 | Seq ID: 925 |
| Description: IMMEDIATE-EARLY | Accession: P70315 |
| PROTEIN IE180 | Swissprot_id: WASP_MOUSE |
| Seq ID: 130 | Gi_number: 2499130 |
| Accession: Q95107 | Description: Wiskott-Aldrich syndrome |
| Swissprot_id: WASL_BOVIN | protein homolog (WASP) |
| Gi_number: 13431968 | Seq ID: 926 |
| Description: Neural Wiskott-Aldrich | Accession: P13728 |
| syndrome protein (N-WASP) | Swissprot_id: SGS3_DROYA |
| Seq ID: 132 | Gi_number: 134469 |
| Accession: P33485 | Description: Salivary glue protein SGS-3 |
| Swissprot_id: VNUA_PRVKA | precursor |
| Gi_number: 465445 | Seq ID: 927 |
| Description: PROBABLE NUCLEAR | Accession: P47179 |
| ANTIGEN | Swissprot_id: DAN4_YEAST |
| Seq ID: 133 | Gi_number: 1352944 |
| Accession: Q02817 | Description: Cell wall protein DAN4 |
| Swissprot_id: MUC2_HUMAN | precursor |
| Gi_number: 2506877 | Seq ID: 928 |
| Description: MUCIN 2 PRECURSOR | Accession: Q9UJY5 |
| (INTESTINAL MUCIN 2) | Swissprot_id: GGA1_HUMAN |
| Seq ID: 134 | Gi_number: 14548066 |
| Accession: Q9SYQ8 | Description: ADP-RIBOSYLATION |
| Swissprot_id: CLV1_ARATH | FACTOR BINDING PROTEIN GGA1 |
| Gi_number: 12643323 | (GOLGI-LOCALIZED, GAMMA |
| Description: RECEPTOR PROTEIN | EAR-CONTAINING, ARF-BINDING |
| KINASE CLAVATA1 PRECURSOR | PROTEIN 1) (GAMMA- |
| Seq ID: 135 | ADAPTIN RELATED PROTEIN 1) |
| Accession: O80340 | Seq ID: 929 |
| Swissprot_id: ERF4_ARATH | Accession: Q02779 |
| Gi_number: 7531110 | Swissprot_id: M3KA_HUMAN |
| Description: Ethylene responsive element | Gi_number: 6686295 |
| binding factor 4 (AtERF4) | Description: MITOGEN-ACTIVATED |
| Seq ID: 136 | PROTEIN KINASE KINASE KINASE 10 |
| Accession: P08392 | (MIXED |
| Swissprot_id: ICP4_HSV11 | LINEAGE KINASE 2) |
| Gi_number: 124141 | (PROTEIN KINASE MST) |
| Description: TRANS-ACTING | Seq ID: 930 |
| TRANSCRIPTIONAL PROTEIN ICP4 | Accession: P05143 |
| (TRANSCRIPTIONAL | Swissprot_id: PRP3_MOUSE |
| ACTIVATOR IE175) (ALPHA-4 | Gi_number: 131002 |
| PROTEIN) | Description: PROLINE-RICH PROTEIN |
| Seq ID: 137 | MP-3 |
| Accession: Q03211 | Seq ID: 931 |
| Swissprot_id: EXLP_TOBAC | Accession: P08548 |
| Gi_number: 544262 | Swissprot_id: LIN1_NYCCO |
| Description: PISTIL-SPECIFIC | Gi_number: 126296 |
| EXTENSIN-LIKE PROTEIN | Description: LINE-1 REVERSE |
| PRECURSOR (PELP) | TRANSCRIPTASE HOMOLOG |
| Seq ID: 138 | Seq ID: 932 |
| Accession: P18165 | Accession: P04802 |
| Swissprot_id: LORI_MOUSE | Swissprot_id: SYDC_YEAST |
| Gi_number: 126390 | Gi_number: 135100 |
| Description: LORICRIN | Description: ASPARTYL-TRNA |
| Seq ID: 139 | SYNTHETASE, CYTOPLASMIC |
| Accession: O00268 | (ASPARTATE--TRNA |
| Swissprot_id: T2D3_HUMAN | LIGASE) (ASPRS) |
| Gi_number: 3024681 | Seq ID: 933 |
| Description: TRANSCRIPTION | Accession: Q9UKL6 |
| INITIATION FACTOR TFIID 135 KDA | Swissprot_id: PPCT_HUMAN |
| SUBUNIT | Gi_number: 15214192 |
| (TAFII-135) (TAFII135) (TAFII- | Description: PHOSPHATIDYLCHOLINE |
| 130) (TAFII130) | TRANSFER PROTEIN (PC-TP) |
| Seq ID: 140 | Seq ID: 935 |
| Accession: P42768 | Accession: O13302 |
| Swissprot_id: WASP_HUMAN | Swissprot_id: IDH1_AJECA |
| Gi_number: 1722836 | Gi_number: 13124301 |
| Description: WISKOTT-ALDRICH | Description: Isocitrate dehydrogenase |
| SYNDROME PROTEIN (WASP) | [NAD] subunit 1, mitochondrial |
| Seq ID: 141 | precursor (Isocitric |
| Accession: P78621 | dehydrogenase) (NAD+-specific ICDH) |
| Swissprot_id: SEPA_EMENI | Seq ID: 936 |
| Gi_number: 15214279 | Accession: Q27546 |
| Description: CYTOKINESIS PROTEIN | Swissprot_id: IUNH_CRIFA |
| SEPA (FH1/2 PROTEIN) (FORCED | Gi_number: 2497465 |
| EXPRESSION INHIBITION OF | Description: INOSINE-URIDINE |
| GROWTH A) | PREFERRING NUCLEOSIDE |
| Seq ID: 142 | HYDROLASE |
| Accession: P46301 | (IU-NUCLEOSIDE |
| Swissprot_id: RS25_LYCES | HYDROLASE) (PURINE |
| Gi_number: 1173234 | NUCLEOSIDASE) |
| Description: 40S RIBOSOMAL PROTEIN | Seq ID: 937 |
| S25 | Accession: P27545 |
| Seq ID: 143 | Swissprot_id: LSS1_MOUSE |
| Accession: Q00519 | Gi_number: 137047 |
| Swissprot_id: XDH_MOUSE | Description: Longevity assurance homolog |
| Gi_number: 1722858 | 1 (UOG-1 protein) |
| Description: XANTHINE | Seq ID: 938 |
| DEHYDROGENASE/OXIDASE | Accession: Q02440 |
| [INCLUDES: XANTHINE | Swissprot_id: MY5A_CHICK |
| DEHYDROGENASE (XD); | Gi_number: 547967 |
| XANTHINE OXIDASE (XO) | Description: Myosin Va (Myosin 5A) |
| (XANTHINE | (Dilute myosin heavy chain, |
| OXIDOREDUCTASE)] | non-muscle) (Myosin heavy chain |
| Seq ID: 144 | P190) (Myosin-V) |
| Accession: Q43043 | Seq ID: 939 |
| Swissprot_id: PME_PETIN | Accession: Q9DCG6 |
| Gi_number: 6093743 | Swissprot_id: PHZ2_MOUSE |
| Description: PECTINESTERASE | Gi_number: 18202860 |
| PRECURSOR (PECTIN | Description: Probable oxidoreductase |
| METHYLESTERASE) (PE) | 0610038K03Rik |
| Seq ID: 145 | Seq ID: 940 |
| Accession: O76082 | Accession: P06237 |
| Swissprot_id: OCN2_HUMAN | Swissprot_id: NOH4_RHIME |
| Gi_number: 8928257 | Gi_number: 128469 |
| Description: Organic cation/carnitine | Description: NODULATION PROTEIN H |
| transporter 2 (Solute carrier | (HOST-SPECIFICITY OF |
| family 22, member 5) (High- | NODULATION |
| affinity sodium-dependent | PROTEIN D) |
| carnitine cotransporter) | Seq ID: 941 |
| Seq ID: 146 | Accession: Q43062 |
| Accession: P07730 | Swissprot_id: PME_PRUPE |
| Swissprot_id: GLU2_ORYSA | Gi_number: 6093744 |
| Gi_number: 121475 | Description: Pectinesterase PPE8B |
| Description: GLUTELIN TYPE II | precursor (Pectin methylesterase) |
| PRECURSOR | (PE) |
| Seq ID: 147 | Seq ID: 942 |
| Accession: Q43772 | Accession: P39101 |
| Swissprot_id: UDPG_HORVU | Swissprot_id: CAJ1_YEAST |
| Gi_number: 6136111 | Gi_number: 729007 |
| Description: UTP--GLUCOSE-1- | Description: CAJ1 protein |
| PHOSPHATE | Seq ID: 943 |
| URIDYLYLTRANSFERASE (UDP- | Accession: P33479 |
| GLUCOSE | Swissprot_id: IE18_PRVKA |
| PYROPHOSPHORYLASE) | Gi_number: 462387 |
| (UDPGP) (UGPASE) | Description: IMMEDIATE-EARLY |
| Seq ID: 148 | PROTEIN IE180 |
| Accession: P24465 | Seq ID: 944 |
| Swissprot_id: CP71_PERAE | Accession: Q06136 |
| Gi_number: 117188 | Swissprot_id: FVT1_HUMAN |
| Description: CYTOCHROME P450 71A1 | Gi_number: 544358 |
| (CYPLXXIA1) (ARP-2) | Description: Follicular variant |
| Seq ID: 149 | translocation protein 1 precursor |
| Accession: P32323 | (FVT-1) |
| Swissprot_id: AGA1_YEAST | Seq ID: 945 |
| Gi_number: 416592 | Accession: P17180 |
| Description: A-AGGLUTININ | Swissprot_id: PER3_ARMRU |
| ATTACHMENT SUBUNIT | Gi_number: 129812 |
| PRECURSOR | Description: Peroxidase C3 precursor |
| Seq ID: 150 | Seq ID: 946 |
| Accession: P09195 | Accession: P48490 |
| Swissprot_id: F16P_WHEAT | Swissprot_id: PP1_PHAVU |
| Gi_number: 119745 | Gi_number: 1346765 |
| Description: FRUCTOSE-1,6- | Description: SERINE/THREONINE |
| BISPHOSPHATASE, CHLOROPLAST | PROTEIN PHOSPHATASE PP1 |
| PRECURSOR | Seq ID: 948 |
| (D-FRUCTOSE-1,6- | Accession: P22196 |
| BISPHOSPHATE 1- | Swissprot_id: PER2_ARAHY |
| PHOSPHOHYDROLASE) (FBPASE) | Gi_number: 129808 |
| Seq ID: 151 | Description: Cationic peroxidase 2 |
| Accession: Q9BYV1 | precursor |
| Swissprot_id: AGT2_HUMAN | Seq ID: 949 |
| Gi_number: 17432913 | Accession: P57760 |
| Description: Alanine--glyoxylate | Swissprot_id: ST16_RAT |
| aminotransferase 2, mitochondrial | Gi_number: 13124540 |
| precursor (AGT 2) (Beta-alanine- | Description: Serine/threonine protein |
| pyruvate aminotransferase) | kinase 16 (Protein kinase PKL12) |
| (Beta-ALAAT II) | (Myristoylated and palmitoylated |
| Seq ID: 152 | serine-threonine kinase) |
| Accession: P18583 | (MPSK) (TGF-beta stimulated |
| Swissprot_id: SON_HUMAN | factor 1) (TSF-1) |
| Gi_number: 586013 | Seq ID: 950 |
| Description: SON PROTEIN (SON3) | Accession: P24289 |
| Seq ID: 153 | Swissprot_id: NUP1_PENCI |
| Accession: P76072 | Gi_number: 128906 |
| Swissprot_id: STFR_ECOLI | Description: NUCLEASE P1 |
| Gi_number: 12643676 | (ENDONUCLEASE P1) |
| Description: SIDE TAIL FIBER PROTEIN | (DEOXYRIBONUCLEASE P1) |
| HOMOLOG FROM LAMBDOID | Seq ID: 951 |
| PROPHAGE RAC | Accession: P22420 |
| Seq ID: 154 | Swissprot_id: VE2_HPV47 |
| Accession: P17814 | Gi_number: 137682 |
| Swissprot_id: 4CL1_ORYSA | Description: REGULATORY PROTEIN |
| Gi_number: 112802 | E2 |
| Description: 4-coumarate--CoA ligase 1 | Seq ID: 953 |
| (4CL 1) (4-coumaroyl-CoA | Accession: Q60715 |
| synthase 1) | Swissprot_id: P4H1_MOUSE |
| Seq ID: 155 | Gi_number: 2498740 |
| Accession: P03211 | Description: PROLYL 4- |
| Swissprot_id: EBN1_EBV | HYDROXYLASE ALPHA-1 SUBUNIT |
| Gi_number: 119110 | PRECURSOR |
| Description: EBNA-1 NUCLEAR | Seq ID: 954 |
| PROTEIN | Accession: P78621 |
| Seq ID: 156 | Swissprot_id: SEPA_EMENI |
| Accession: P39656 | Gi_number: 15214279 |
| Swissprot_id: OST4_HUMAN | Description: CYTOKINESIS PROTEIN |
| Gi_number: 730241 | SEPA (FH1/2 PROTEIN) (FORCED |
| Description: DOLICHYL- | EXPRESSION INHIBITION OF |
| DIPHOSPHOOLIGOSACCHARIDE-- | GROWTH A) |
| PROTEIN | Seq ID: 959 |
| GLYCOSYLTRANSFERASE 48 | Accession: P16273 |
| KDA SUBUNIT PRECURSOR | Swissprot_id: PRPX_HORVU |
| (OLIGOSACCHARYL | Gi_number: 1346809 |
| TRANSFERASE 48 KDA SUBUNIT) | Description: PATHOGEN-RELATED |
| (DDOST 48 KDA | PROTEIN |
| SUBUNIT) | Seq ID: 961 |
| Seq ID: 157 | Accession: P41151 |
| Accession: O82256 | Swissprot_id: HSF1_ARATH |
| Swissprot_id: COLA_ARATH | Gi_number: 12644262 |
| Gi_number: 17432989 | Description: HEAT SHOCK FACTOR |
| Description: Zinc finger protein constans- | PROTEIN 1 (HSF 1) (HEAT SHOCK |
| like 10 | TRANSCRIPTION FACTOR 1) |
| Seq ID: 158 | (HSTF 1) |
| Accession: P21997 | Seq ID: 962 |
| Swissprot_id: SSGP_VOLCA | Accession: Q38841 |
| Gi_number: 134920 | Swissprot_id: AG12_ARATH |
| Description: SULFATED SURFACE | Gi_number: 12643746 |
| GLYCOPROTEIN 185 (SSG 185) | Description: Agamous-like MADS box |
| Seq ID: 159 | protein AGL12 |
| Accession: Q02910 | Seq ID: 964 |
| Swissprot_id: CPN_DROME | Accession: Q9NRA0 |
| Gi_number: 416833 | Swissprot_id: SPH2_HUMAN |
| Description: CALPHOTIN | Gi_number: 17369316 |
| Seq ID: 160 | Description: Sphingosine kinase 2 (SK 2) |
| Accession: P15792 | (SPK 2) |
| Swissprot_id: KPK1_PHAVU | Seq ID: 965 |
| Gi_number: 125568 | Accession: P72660 |
| Description: Protein kinase PVPK-1 | Swissprot_id: LEP1_SYNY3 |
| Seq ID: 161 | Gi_number: 6225603 |
| Accession: P40602 | Description: Probable signal peptidase I-1 |
| Swissprot_id: APG_ARATH | (SPase I-1) (Leader |
| Gi_number: 728867 | peptidase I-1) |
| Description: ANTER-SPECIFIC | Seq ID: 966 |
| PROLINE-RICH PROTEIN APG | Accession: P93531 |
| PRECURSOR | Swissprot_id: C7D7_SOLCH |
| Seq ID: 162 | Gi_number: 5915836 |
| Accession: P41152 | Description: CYTOCHROME P450 71D7 |
| Swissprot_id: HSF3_LYCPE | Seq ID: 968 |
| Gi_number: 729774 | Accession: P52835 |
| Description: HEAT SHOCK FACTOR | Swissprot_id: F3ST_FLABI |
| PROTEIN HSF30 (HEAT SHOCK | Gi_number: 1706738 |
| TRANSCRIPTION | Description: FLAVONOL 3- |
| FACTOR 30) (HSTF 30) (HEAT | SULFOTRANSFERASE (F3-ST) |
| STRESS TRANSCRIPTION FACTOR) | Seq ID: 970 |
| Seq ID: 163 | Accession: Q06003 |
| Accession: P05143 | Swissprot_id: GOLI_DROME |
| Swissprot_id: PRP3_MOUSE | Gi_number: 462193 |
| Gi_number: 131002 | Description: Goliath protein (G1 protein) |
| Description: PROLINE-RICH PROTEIN | Seq ID: 971 |
| MP-3 | Accession: Q9ZNV5 |
| Seq ID: 164 | Swissprot_id: CEN_ARATH |
| Accession: O43516 | Gi_number: 17366125 |
| Swissprot_id: WAIP_HUMAN | Description: CENTRORADIALIS-like |
| Gi_number: 13124642 | protein |
| Description: WISKOTT-ALDRICH | Seq ID: 972 |
| SYNDROME PROTEIN INTERACTING | Accession: Q99090 |
| PROTEIN (WASP | Swissprot_id: CPR2_PETCR |
| INTERACTING PROTEIN) | Gi_number: 2842757 |
| (PRPL-2 PROTEIN) | Description: LIGHT-INDUCIBLE |
| Seq ID: 165 | PROTEIN CPRF-2 |
| Accession: P17784 | Seq ID: 974 |
| Swissprot_id: ALF_ORYSA | Accession: Q9MB73 |
| Gi_number: 113622 | Swissprot_id: LGT_CITUN |
| Description: FRUCTOSE- | Gi_number: 13431605 |
| BISPHOSPHATE ALDOLASE, | Description: Limonoid UDP- |
| CYTOPLASMIC ISOZYME | glucosyltransferase (Limonoid |
| Seq ID: 166 | glucosyltransferase) (Limonoid |
| Accession: P21997 | GTase) (LGTase) |
| Swissprot_id: SSGP_VOLCA | Seq ID: 975 |
| Gi_number: 134920 | Accession: P48809 |
| Description: SULFATED SURFACE | Swissprot_id: RB27_DROME |
| GLYCOPROTEIN 185 (SSG 185) | Gi_number: 1346955 |
| Seq ID: 167 | Description: Heterogeneous nuclear |
| Accession: P30364 | ribonucleoprotein 27C (hnRNP 48) |
| Swissprot_id: ASPG_LUPAN | (HRP48.1) |
| Gi_number: 231573 | Seq ID: 976 |
| Description: L-ASPARAGINASE (L- | Accession: P13230 |
| ASPARAGINE AMIDOHYDROLASE) | Swissprot_id: GRP3_ARTSA |
| Seq ID: 168 | Gi_number: 121634 |
| Accession: Q9UBQ6 | Description: Glycine-rich protein GRP33 |
| Swissprot_id: EXL2_HUMAN | Seq ID: 977 |
| Gi_number: 9296986 | Accession: P20024 |
| Description: Exostosin-like 2 (EXT-related | Swissprot_id: MYB1_MAIZE |
| protein 2) | Gi_number: 127580 |
| Seq ID: 169 | Description: Myb-related protein Zm1 |
| Accession: Q02817 | Seq ID: 978 |
| Swissprot_id: MUC2_HUMAN | Accession: Q9NVW2 |
| Gi_number: 2506877 | Swissprot_id: RNFB_HUMAN |
| Description: MUCIN 2 PRECURSOR | Gi_number: 13124522 |
| (INTESTINAL MUCIN 2) | Description: RING FINGER PROTEIN 12 |
| Seq ID: 170 | (LIM DOMAIN INTERACTING RING |
| Accession: O54939 | FINGER |
| Swissprot_id: DHB3_RAT | PROTEIN) (RING FINGER LIM |
| Gi_number: 3913460 | DOMAIN-BINDING PROTEIN) (R-LIM) |
| Description: Estradiol 17 beta- | (NY-REN-43 ANTIGEN) |
| dehydrogenase 3 (17-beta-HSD 3) | Seq ID: 979 |
| (Testicular 17-beta- | Accession: P22988 |
| hydroxysteroid dehydrogenase) | Swissprot_id: LDHA_HORVU |
| Seq ID: 171 | Gi_number: 126033 |
| Accession: Q63003 | Description: L-lactate dehydrogenase A |
| Swissprot_id: 5E5_RAT | (LDH-A) |
| Gi_number: 2498095 | Seq ID: 980 |
| Description: 5E5 ANTIGEN | Accession: P34802 |
| Seq ID: 172 | Swissprot_id: GGPP_ARATH |
| Accession: P14009 | Gi_number: 13432144 |
| Swissprot_id: 14KD_DAUCA | Description: GERANYLGERANYL |
| Gi_number: 112697 | PYROPHOSPHATE SYNTHETASE, |
| Description: 14 KD PROLINE-RICH | CHLOROPLAST |
| PROTEIN DC2.15 PRECURSOR | PRECURSOR (GGPP |
| Seq ID: 173 | SYNTHETASE) (GGPS) [INCLUDES: |
| Accession: P50172 | DIMETHYLALLYLTRANSFERASE; |
| Swissprot_id: DHI1_MOUSE | GERANYLTRANSTRANSFERASE; |
| Gi_number: 1706408 | FARNESYLTRANSTRANSFERASE] |
| Description: Corticosteroid 11-beta- | Seq ID: 981 |
| dehydrogenase, isozyme 1 (11-DH) | Accession: P87146 |
| (11-beta-hydroxysteroid | Swissprot_id: IM22_SCHPO |
| dehydrogenase 1) (11-beta-HSD1) | Gi_number: 3219815 |
| (11beta-HSD1A) | Description: MITOCHONDRIAL |
| Seq ID: 174 | IMPORT INNER MEMBRANE |
| Accession: P25866 | TRANSLOCASE SUBUNIT |
| Swissprot_id: UBC2_WHEAT | TIM22 HOMOLOG |
| Gi_number: 136640 | Seq ID: 982 |
| Description: UBIQUITIN- | Accession: O26934 |
| CONJUGATING ENZYME E2-17 KD | Swissprot_id: ARGC_METTH |
| (UBIQUITIN-PROTEIN | Gi_number: 8927968 |
| LIGASE) (UBIQUITIN | Description: N-acetyl-gamma-glutamyl- |
| CARRIER PROTEIN) | phosphate reductase |
| Seq ID: 175 | (N-acetyl-glutamate semialdehyde |
| Accession: P51614 | dehydrogenase) (NAGSA |
| Swissprot_id: CHIA_VITVI | dehydrogenase) |
| Gi_number: 1705812 | Seq ID: 983 |
| Description: ACIDIC ENDOCHITINASE | Accession: P08640 |
| PRECURSOR | Swissprot_id: AMYH_YEAST |
| Seq ID: 177 | Gi_number: 728850 |
| Accession: P48038 | Description: GLUCOAMYLASE S1/S2 |
| Swissprot_id: ACRO_RABIT | PRECURSOR (GLUCAN |
| Gi_number: 1351865 | 1,4-ALPHA-GLUCOSIDASE) |
| Description: Acrosin precursor | (1,4-ALPHA-D-GLUCAN |
| Seq ID: 179 | GLUCOHYDROLASE) |
| Accession: P42736 | Seq ID: 984 |
| Swissprot_id: CDI3_ARATH | Accession: Q02817 |
| Gi_number: 1168862 | Swissprot_id: MUC2_HUMAN |
| Description: CADMIUM-INDUCED | Gi_number: 2506877 |
| PROTEIN AS30 | Description: MUCIN 2 PRECURSOR |
| Seq ID: 180 | (INTESTINAL MUCIN 2) |
| Accession: Q42443 | Seq ID: 985 |
| Swissprot_id: THIH_ORYSA | Accession: O23066 |
| Gi_number: 3915131 | Swissprot_id: C862_ARATH |
| Description: THIOREDOXIN H-TYPE | Gi_number: 5915846 |
| (TRX-H) (PHLOEM SAP 13 KDA | Description: Cytochrome P450 86A2 |
| PROTEIN-1) | Seq ID: 986 |
| Seq ID: 181 | Accession: P18583 |
| Accession: Q04629 | Swissprot_id: SON_HUMAN |
| Swissprot_id: PSLA_YEAST | Gi_number: 586013 |
| Gi_number: 18202481 | Description: SON PROTEIN (SON3) |
| Description: PSL10 protein | Seq ID: 991 |
| Seq ID: 182 | Accession: P19275 |
| Accession: P27884 | Swissprot_id: VTP3_TTV1V |
| Swissprot_id: CCAA_RABIT | Gi_number: 139655 |
| Gi_number: 399201 | Description: VIRAL PROTEIN TPX |
| Description: VOLTAGE-DEPENDENT | Seq ID: 992 |
| P/Q-TYPE CALCIUM CHANNEL | Accession: P47735 |
| ALPHA-1A | Swissprot_id: RLK5_ARATH |
| SUBUNIT (CALCIUM | Gi_number: 1350783 |
| CHANNEL, L TYPE, ALPHA-1 | Description: Receptor-like protein kinase 5 |
| POLYPEPTIDE | precursor |
| ISOFORM 4) (BRAIN | Seq ID: 994 |
| CALCIUM CHANNEL I) (BI) | Accession: P13816 |
| Seq ID: 183 | Swissprot_id: GARP_PLAFF |
| Accession: P02350 | Gi_number: 120943 |
| Swissprot_id: RS3A_XENLA | Description: GLUTAMIC ACID-RICH |
| Gi_number: 133940 | PROTEIN PRECURSOR |
| Description: 40S RIBOSOMAL PROTEIN | Seq ID: 995 |
| S3A (S1A) | Accession: P80073 |
| Seq ID: 184 | Swissprot_id: MYB2_PHYPA |
| Accession: Q9S8P4 | Gi_number: 462669 |
| Swissprot_id: RHRE_PEA | Description: Myb-related protein Pp2 |
| Gi_number: 18203442 | Seq ID: 996 |
| Description: Rhicadhesin receptor | Accession: Q41144 |
| precursor (Germin-like protein) | Swissprot_id: STC_RICCO |
| Seq ID: 185 | Gi_number: 3915039 |
| Accession: Q07760 | Description: SUGAR CARRIER |
| Swissprot_id: RL23_TOBAC | PROTEIN C |
| Gi_number: 730536 | Seq ID: 997 |
| Description: 60S RIBOSOMAL PROTEIN | Accession: P33215 |
| L23 | Swissprot_id: NED1_MOUSE |
| Seq ID: 186 | Gi_number: 462692 |
| Accession: P13983 | Description: NEDD1 protein |
| Swissprot_id: EXTN_TOBAC | Seq ID: 998 |
| Gi_number: 119714 | Accession: P51617 |
| Description: Extensin precursor (Cell wall | Swissprot_id: IRA1_HUMAN |
| hydroxyproline-rich | Gi_number: 8928535 |
| glycoprotein) | Description: Interleukin-1 receptor- |
| Seq ID: 187 | associated kinase 1 (IRAK-1) |
| Accession: Q9SP35 | Seq ID: 999 |
| Swissprot_id: IM17_ARATH | Accession: P29128 |
| Gi_number: 12643851 | Swissprot_id: ICP0_HSVBJ |
| Description: MITOCHONDRIAL | Gi_number: 124136 |
| IMPORT INNER MEMBRANE | Description: Trans-acting transcriptional |
| TRANSLOCASE SUBUNIT | protein ICP0 (P135 protein) |
| TIM17 | (IER 2.9/ER2.6) |
| Seq ID: 188 | Seq ID: 1000 |
| Accession: Q05466 | Accession: P19338 |
| Swissprot_id: HAT4_ARATH | Swissprot_id: NUCL_HUMAN |
| Gi_number: 462281 | Gi_number: 128841 |
| Description: Homeobox-leucine zipper | Description: Nucleolin (Protein C23) |
| protein HAT4 (HD-ZIP protein 4) | Seq ID: 1002 |
| (HD-ZIP protein ATHB-2) | Accession: P13645 |
| Seq ID: 189 | Swissprot_id: K1CJ_HUMAN |
| Accession: P50160 | Gi_number: 547749 |
| Swissprot_id: TS2_MAIZE | Description: Keratin, type I cytoskeletal 10 |
| Gi_number: 1717794 | (Cytokeratin 10) (K10) (CK |
| Description: SEX DETERMINATION | 10) |
| PROTEIN TASSELSEED 2 | Seq ID: 1003 |
| Seq ID: 190 | Accession: P52839 |
| Accession: O54939 | Swissprot_id: FSTL_ARATH |
| Swissprot_id: DHB3_RAT | Gi_number: 1706917 |
| Gi_number: 3913460 | Description: Flavonol sulfotransferase-like |
| Description: Estradiol 17 beta- | (RaRO47) |
| dehydrogenase 3 (17-beta-HSD 3) | Seq ID: 1005 |
| (Testicular 17-beta- | Accession: P24814 |
| hydroxysteroid dehydrogenase) | Swissprot_id: GRR1_YEAST |
| Seq ID: 191 | Gi_number: 121649 |
| Accession: Q9WTV7 | Description: GRR1 protein |
| Swissprot_id: RNFB_MOUSE | Seq ID: 1007 |
| Gi_number: 13124535 | Accession: O43791 |
| Description: RING FINGER PROTEIN 12 | Swissprot_id: SPOP_HUMAN |
| (LIM DOMAIN INTERACTING RING | Gi_number: 8134708 |
| FINGER | Description: Speckle-type POZ protein |
| PROTEIN) (RING FINGER LIM | Seq ID: 1008 |
| DOMAIN-BINDING PROTEIN) (R-LIM) | Accession: Q06003 |
| Seq ID: 192 | Swissprot_id: GOLI_DROME |
| Accession: Q06666 | Gi_number: 462193 |
| Swissprot_id: T2_MOUSE | Description: Goliath protein (G1 protein) |
| Gi_number: 730888 | Seq ID: 1009 |
| Description: OCTAPEPTIDE-REPEAT | Accession: P09651 |
| PROTEIN T2 | Swissprot_id: ROA1_HUMAN |
| Seq ID: 193 | Gi_number: 133254 |
| Accession: Q02817 | Description: Heterogeneous nuclear |
| Swissprot_id: MUC2_HUMAN | ribonucleoprotein A1 |
| Gi_number: 2506877 | (Helix-destabilizing protein) |
| Description: MUCIN 2 PRECURSOR | (Single-strand binding |
| (INTESTINAL MUCIN 2) | protein) (hnRNP core protein A1) |
| Seq ID: 194 | Seq ID: 1010 |
| Accession: Q9Y252 | Accession: P08640 |
| Swissprot_id: RNF6_HUMAN | Swissprot_id: AMYH_YEAST |
| Gi_number: 13124536 | Gi_number: 728850 |
| Description: RING FINGER PROTEIN 6 | Description: GLUCOAMYLASE S1/S2 |
| Seq ID: 195 | PRECURSOR (GLUCAN |
| Accession: Q06652 | 1,4-ALPHA-GLUCOSIDASE) |
| Swissprot_id: GSHZ_CITSI | (1,4-ALPHA-D-GLUCAN |
| Gi_number: 544437 | GLUCOHYDROLASE) |
| Description: GLUTATHIONE | Seq ID: 1011 |
| PEROXIDASE HOMOLOG (SALT- | Accession: P15533 |
| ASSOCIATED PROTEIN) | Swissprot_id: RPT1_MOUSE |
| Seq ID: 197 | Gi_number: 133482 |
| Accession: O00268 | Description: Down regulatory protein of |
| Swissprot_id: T2D3_HUMAN | interleukin 2 receptor |
| Gi_number: 3024681 | Seq ID: 1012 |
| Description: TRANSCRIPTION | Accession: Q9S8P4 |
| INITIATION FACTOR TFIID 135 KDA | Swissprot_id: RHRE_PEA |
| SUBUNIT | Gi_number: 18203442 |
| (TAFII-135) (TAFII135) (TAFII- | Description: Rhicadhesin receptor |
| 130) (TAFII130) | precursor (Germin-like protein) |
| Seq ID: 198 | Seq ID: 1013 |
| Accession: P37705 | Accession: P46897 |
| Swissprot_id: GRP3_DAUCA | Swissprot_id: ATH7_ARATH |
| Gi_number: 585217 | Gi_number: 1168548 |
| Description: GLYCINE RICH PROTEIN | Description: HOMEOBOX-LEUCINE |
| A3 | ZIPPER PROTEIN ATHB-7 (HD-ZIP |
| Seq ID: 199 | PROTEIN |
| Accession: Q40635 | ATHB-7) |
| Swissprot_id: VATL_ORYSA | Seq ID: 1014 |
| Gi_number: 2493147 | Accession: P13983 |
| Description: VACUOLAR ATP | Swissprot_id: EXTN_TOBAC |
| SYNTHASE 16 KD PROTEOLIPID | Gi_number: 119714 |
| SUBUNIT | Description: Extensin precursor (Cell wall |
| Seq ID: 201 | hydroxyproline-rich |
| Accession: O04003 | glycoprotein) |
| Swissprot_id: LG1_MAIZE | Seq ID: 1015 |
| Gi_number: 6016502 | Accession: P18583 |
| Description: LIGULELESS1 PROTEIN | Swissprot_id: SON_HUMAN |
| Seq ID: 202 | Gi_number: 586013 |
| Accession: P80639 | Description: SON PROTEIN (SON3) |
| Swissprot_id: IF5A_MAIZE | Seq ID: 1016 |
| Gi_number: 12643437 | Accession: Q02516 |
| Description: INITIATION FACTOR 5A | Swissprot_id: HAP5_YEAST |
| (EIF-5A) (EIF-4D) | Gi_number: 2493550 |
| Seq ID: 203 | Description: TRANSCRIPTIONAL |
| Accession: P31673 | ACTIVATOR HAP5 |
| Swissprot_id: HS12_ORYSA | Seq ID: 1017 |
| Gi_number: 399937 | Accession: Q9Y252 |
| Description: 17.4 KD CLASS I HEAT | Swissprot_id: RNF6_HUMAN |
| SHOCK PROTEIN | Gi_number: 13124536 |
| Seq ID: 204 | Description: RING FINGER PROTEIN 6 |
| Accession: P27483 | Seq ID: 1019 |
| Swissprot_id: GRP_ARATH | Accession: P11845 |
| Gi_number: 121640 | Swissprot_id: IPP2_RABIT |
| Description: GLYCINE-RICH CELL | Gi_number: 1170582 |
| WALL STRUCTURAL PROTEIN | Description: Protein phosphatase inhibitor |
| PRECURSOR | 2 (IPP-2) |
| Seq ID: 205 | Seq ID: 1020 |
| Accession: P03211 | Accession: Q09151 |
| Swissprot_id: EBN1_EBV | Swissprot_id: GLU3_ORYSA |
| Gi_number: 119110 | Gi_number: 1707986 |
| Description: EBNA-1 NUCLEAR | Description: GLUTELIN TYPE-A III |
| PROTEIN | PRECURSOR |
| Seq ID: 206 | Seq ID: 1021 |
| Accession: Q43261 | Accession: P20698 |
| Swissprot_id: H2B3_MAIZE | Swissprot_id: PRO7_ORYSA |
| Gi_number: 3913804 | Gi_number: 130959 |
| Description: HISTONE H2B.3 | Description: PROLAMIN PPROL 17 |
| Seq ID: 207 | PRECURSOR |
| Accession: Q07760 | Seq ID: 1022 |
| Swissprot_id: RL23_TOBAC | Accession: P14323 |
| Gi_number: 730536 | Swissprot_id: GLU4_ORYSA |
| Description: 60S RIBOSOMAL PROTEIN | Gi_number: 121476 |
| L23 | Description: GLUTELIN PRECURSOR |
| Seq ID: 208 | Seq ID: 1023 |
| Accession: Q41001 | Accession: P29518 |
| Swissprot_id: BCP_PEA | Swissprot_id: BT1_MAIZE |
| Gi_number: 2493318 | Gi_number: 231654 |
| Description: Blue copper protein precursor | Description: Brittle-1 protein, chloroplast |
| Seeq ID: 209 | precursor |
| Accession: P21997 | Seq ID: 1024 |
| Swissprot_id: SSGP_VOLCA | Accession: P28968 |
| Gi_number: 134920 | Swissprot_id: VGLX_HSVEB |
| Description: SULFATED SURFACE | Gi_number: 138350 |
| GLYCOPROTEIN 185 (SSG 185) | Description: GLYCOPROTEIN X |
| Seq ID: 210 | PRECURSOR |
| Accession: P14009 | Seq ID: 1025 |
| Swissprot_id: 14 KD_DAUCA | Accession: Q01883 |
| Gi_number: 112697 | Swissprot_id: RA17_ORYSA |
| Description: 14 KD PROLINE-RICH | Gi_number: 548660 |
| PROTEIN DC2.15 PRECURSOR | Description: SEED ALLERGENIC |
| Seq ID: 211 | PROTEIN RA17 PRECURSOR |
| Accession: Q9P7J6 | Seq ID: 1026 |
| Swissprot_id: R17B_SCHPO | Accession: P53682 |
| Gi_number: 15214229 | Swissprot_id: CDP1_ORYSA |
| Description: 40S ribosomal protein S17-B | Gi_number: 1705733 |
| Seq ID: 212 | Description: Calcium-dependent protein |
| Accession: O74893 | kinase, isoform 1 (CDPK 1) |
| Swissprot_id: RS20_SCHPO | Seq ID: 1027 |
| Gi_number: 6094168 | Accession: Q08047 |
| Description: 40S RIBOSOMAL PROTEIN | Swissprot_id: GLGB_MAIZE |
| S20 | Gi_number: 1169911 |
| Seq ID: 213 | Description: 1,4-alpha-glucan branching |
| Accession: P78621 | enzyme IIB, chloroplast |
| Swissprot_id: SEPA_EMENI | precursor (Starch branching |
| Gi_number: 15214279 | enzyme IIB) (Q-enzyme) |
| Description: CYTOKINESIS PROTEIN | Seq ID: 1028 |
| SEPA (FH1/2 PROTEIN) (FORCED | Accession: P55241 |
| EXPRESSION INHIBITION OF | Swissprot_id: GLG1_MAIZE |
| GROWTH A) | Gi_number: 1707924 |
| Seq ID: 214 | Description: Glucose-1-phosphate |
| Accession: Q96499 | adenylyltransferase large subunit 1, |
| Swissprot_id: RL44_GOSHI | chloroplast precursor (ADP- |
| Gi_number: 2500380 | glucose synthase) (ADP-glucose |
| Description: 60S RIBOSOMAL PROTEIN | pyrophosphorylase) (AGPASE S) |
| L44 | (Alpha-D-glucose-1-phosphate |
| Seq ID: 215 | adenyl transferase) (Shrunken-2) |
| Accession: P55852 | Seq ID: 1029 |
| Swissprot_id: SMT3_ARATH | Accession: Q42980 |
| Gi_number: 2501448 | Swissprot_id: OLE1_ORYSA |
| Description: UBIQUITIN-LIKE PROTEIN | Gi_number: 3334280 |
| SMT3 | Description: OLEOSIN 16 KD (OSE701) |
| Seq ID: 216 | Seq ID: 1030 |
| Accession: P53665 | Accession: Q02921 |
| Swissprot_id: ACPM_ARATH | Swissprot_id: NO93_SOYBN |
| Gi_number: 1703091 | Gi_number: 730165 |
| Description: Acyl carrier protein, | Description: EARLY NODULIN 93 (N- |
| mitochondrial precursor (ACP) | 93) |
| (NADH-ubiquinone | Seq ID: 1032 |
| oxidoreductase 9.6 kDa subunit) | Accession: P07206 |
| (MtACP-1) | Swissprot_id: PULA_KLEPN |
| Seq ID: 217 | Gi_number: 131589 |
| Accession: O81277 | Description: Pullulanase precursor (Alpha- |
| Swissprot_id: PSK5_ORYSA | dextrin |
| Gi_number: 18202216 | endo-1,6-alpha-glucosidase) |
| Description: Phytosulfokines 5 precursor | (Pullulan 6-glucanohydrolase) |
| (Secretory protein SH27A) | Seq ID: 1033 |
| [Contains: Phytosulfokine-alpha | Accession: P18165 |
| (PSK-alpha) | Swissprot_id: LORI_MOUSE |
| (Phytosulfokine-a); | Gi_number: 126390 |
| Phytosulfokine-beta (PSK-beta) | Description: LORICRIN |
| (Phytosulfokine-b)] | Seq ID: 1034 |
| Seq ID: 219 | Accession: Q43093 |
| Accession: P11414 | Swissprot_id: UGS3_PEA |
| Swissprot_id: RPB1_CRIGR | Gi_number: 2833384 |
| Gi_number: 133323 | Description: Glycogen [starch] synthase, |
| Description: DNA-DIRECTED RNA | chloroplast precursor (GBSSII) |
| POLYMERASE II LARGEST SUBUNIT | (Granule-bound starch synthase |
| (RPB1) | II) |
| Seq ID: 220 | Seq ID: 1036 |
| Accession: P27603 | Accession: P23509 |
| Swissprot_id: PHEA_PSEST | Swissprot_id: GLGS_SOLTU |
| Gi_number: 130055 | Gi_number: 232164 |
| Description: P-PROTEIN [INCLUDES: | Description: Glucose-1-phosphate |
| CHORISMATE MUTASE (CM); | adenylyltransferase small subunit, |
| PREPHENATE | chloroplast precursor (ADP- |
| DEHYDRATASE (PDT)] | glucose synthase) (ADP-glucose |
| Seq ID: 221 | pyrophosphorylase) (AGPASE B) |
| Accession: P49455 | (Alpha-D-glucose-1-phosphate |
| Swissprot_id: TPM4_DROME | adenyl transferase) |
| Gi_number: 1351285 | Seq ID: 1037 |
| Description: TROPOMYOSIN 1, FUSION | Accession: P38560 |
| PROTEIN 33 | Swissprot_id: GLN2_MAIZE |
| Seq ID: 223 | Gi_number: 585202 |
| Accession: P42145 | Description: GLUTAMINE |
| Swissprot_id: HSP1_PSECU | SYNTHETASE ROOT ISOZYME 2 |
| Gi_number: 1170404 | (GLUTAMATE —AMMONIA |
| Description: Sperm protamine P1 | LIGASE) |
| Seq ID: 224 | Seq ID: 1038 |
| Accession: P15941 | Accession: P40602 |
| Swissprot_id: MUC1_HUMAN | Swissprot_id: APG_ARATH |
| Gi_number: 547937 | Gi_number: 728867 |
| Description: MUCIN 1 PRECURSOR | Description: ANTER-SPECIFIC |
| (POLYMORPHIC EPITHELIAL MUCIN) | PROLINE-RICH PROTEIN APG |
| (PEM) | PRECURSOR |
| (PEMT) (EPISIALIN) (TUMOR- | Seq ID: 1039 |
| ASSOCIATED MUCIN) | Accession: Q07322 |
| (CARCINOMA-ASSOCIATED | Swissprot_id: EC40_DAUCA |
| MUCIN) (TUMOR-ASSOCIATED | Gi_number: 1706562 |
| EPITHELIAL | Description: EMBRYOGENIC-CELL |
| MEMBRANE ANTIGEN) | PROTEIN 40 (ECP40) |
| (EMA) (H23AG) (PEANUT-REACTIVE | Seq ID: 1040 |
| URINARY | Accession: P09789 |
| MUCIN) (PUM) (BREAST | Swissprot_id: GRP1_PETHY |
| CARCINOMA-ASSOCIA> | Gi_number: 121627 |
| Seq ID: 225 | Description: GLYCINE-RICH CELL |
| Accession: P70315 | WALL STRUCTURAL PROTEIN 1 |
| Swissprot_id: WASP_MOUSE | PRECURSOR |
| Gi_number: 2499130 | Seq ID: 1041 |
| Description: Wiskott-Aldrich syndrome | Accession: P80873 |
| protein homolog (WASP) | Swissprot_id: GS39_BACSU |
| Seq ID: 226 | Gi_number: 3123232 |
| Accession: P36782 | Description: GENERAL STRESS |
| Swissprot_id: VE2_HPV12 | PROTEIN 39 (GSP39) |
| Gi_number: 549237 | Seq ID: 1042 |
| Description: REGULATORY PROTEIN | Accession: P15590 |
| E2 | Swissprot_id: GLB1_MAIZE |
| Seq ID: 227 | Gi_number: 121205 |
| Accession: P04052 | Description: Globulin-1 S allele precursor |
| Swissprot_id: RPB1_DROME | (GLB1-S) (7S-like) |
| Gi_number: 14286163 | Seq ID: 1043 |
| Description: DNA-DIRECTED RNA | Accession: P27061 |
| POLYMERASE II LARGEST SUBUNIT | Swissprot_id: PPA1_LYCES |
| Seq ID: 228 | Gi_number: 130718 |
| Accession: P10162 | Description: Acid phosphatase precursor 1 |
| Swissprot_id: PRPL_HUMAN | Seq ID: 1044 |
| Gi_number: 131011 | Accession: P93329 |
| Description: SALIVARY PROLINE-RICH | Swissprot_id: NO20_MEDTR |
| PROTEIN PO (ALLELE K) [CONTAINS: | Gi_number: 3914142 |
| PEPTIDE P-D] | Description: EARLY NODULIN 20 |
| Seq ID: 229 | PRECURSOR (N-20) |
| Accession: P13983 | Seq ID: 1046 |
| Swissprot_id: EXTN_TOBAC | Accession: P21997 |
| Gi_number: 119714 | Swissprot_id: SSGP_VOLCA |
| Description: Extensin precursor (Cell wall | Gi_number: 134920 |
| hydroxyproline-rich | Description: SULFATED SURFACE |
| glycoprotein) | GLYCOPROTEIN 185 (SSG 185) |
| Seq ID: 230 | Seq ID: 1047 |
| Accession: P13983 | Accession: P12624 |
| Swissprot_id: EXTN_TOBAC | Swissprot_id: MACS_BOVIN |
| Gi_number: 119714 | Gi_number: 585447 |
| Description: Extensin precursor (Cell wall | Description: MYRISTOYLATED |
| hydroxyproline-rich | ALANINE-RICH C-KINASE |
| glycoprotein) | SUBSTRATE (MARCKS) |
| Seq ID: 231 | (ACAMP-81) |
| Accession: P05142 | Seq ID: 1048 |
| Swissprot_id: PRP2_MOUSE | Accession: Q02516 |
| Gi_number: 130999 | Swissprot_id: HAP5_YEAST |
| Description: Proline-rich protein MP-2 | Gi_number: 2493550 |
| precursor | Description: TRANSCRIPTIONAL |
| Seq ID: 232 | ACTIVATOR HAP5 |
| Accession: P13983 | Seq ID: 1049 |
| Swissprot_id: EXTN_TOBAC | Accession: Q9SYQ8 |
| Gi_number: 119714 | Swissprot_id: CLV1_ARATH |
| Description: Extensin precursor (Cell wall | Gi_number: 12643323 |
| hydroxyproline-rich | Description: RECEPTOR PROTEIN |
| glycoprotein) | KINASE CLAVATA1 PRECURSOR |
| Seq ID: 233 | Seq ID: 1050 |
| Accession: P19706 | Accession: P13983 |
| Swissprot_id: MYSB_ACACA | Swissprot_id: EXTN_TOBAC |
| Gi_number: 1171093 | Gi_number: 119714 |
| Description: Myosin heavy chain IB | Description: Extensin precursor (Cell wall |
| (Myosin heavy chain IL) | hydroxyproline-rich |
| Seq ID: 234 | glycoprotein) |
| Accession: P14918 | Seq ID: 1051 |
| Swissprot_id: EXTN_MAIZE | Accession: P21997 |
| Gi_number: 119712 | Swissprot_id: SSGP_VOLCA |
| Description: EXTENSIN PRECURSOR | Gi_number: 134920 |
| (PROLINE-RICH GLYCOPROTEIN) | Description: SULFATED SURFACE |
| Seq ID: 239 | GLYCOPROTEIN 185 (SSG 185) |
| Accession: P40603 | Seq ID: 1052 |
| Swissprot_id: APG_BRANA | Accession: P13983 |
| Gi_number: 728868 | Swissprot_id: EXTN_TOBAC |
| Description: ANTER-SPECIFIC | Gi_number: 119714 |
| PROLINE-RICH PROTEIN APG | Description: Extensin precursor (Cell wall |
| (PROTEIN CEX) | hydroxyproline-rich |
| Seq ID: 240 | glycoprotein) |
| Accession O60610 | Seq ID: 1054 |
| Swissprot_id: DIA1_HUMAN | Accession: Q02280 |
| Gi_number: 6225268 | Swissprot_id: CIKE_DROME |
| Description: DIAPHANOUS PROTEIN | Gi_number: 399253 |
| HOMOLOG 1 (DIAPHANOUS- | Description: Potassium channel protein eag |
| RELATED FORMIN 1) | Seq ID: 1055 |
| (DRF1) | Accession: P46573 |
| Seq ID: 243 | Swissprot_id: APKB_ARATH |
| Accession: P21997 | Gi_number: 12644274 |
| Swissprot_id: SSGP_VOLCA | Description: PROTEIN KINASE APK1B |
| Gi_number: 134920 | Seq ID: 1056 |
| Description: SULFATED SURFACE | Accession: P32583 |
| GLYCOPROTEIN 185 (SSG 185) | Swissprot_id: SR40_YEAST |
| Seq ID: 244 | Gi_number: 548976 |
| Accession: P18431 | Description: SUPPRESSOR PROTEIN |
| Swissprot_id: SGG_DROME | SRP40 |
| Gi_number: 13124808 | Seq ID: 1057 |
| Description: PROTEIN KINASE | Accession: Q9UNQ0 |
| SHAGGY (PROTEIN ZESTE-WHITE 3) | Swissprot_id: ABG2_HUMAN |
| Seq ID: 246 | Gi_number: 17433731 |
| Accession: P24856 | Description: ATP-binding cassette, sub- |
| Swissprot_id: ANP_NOTCO | family G, member 2 |
| Gi_number: 8488962 | (Placenta-specific ATP-binding |
| Description: Antifreeze glycopeptide | cassette transporter) |
| polyprotein precursor (AFGP | (Breast cancer resistance protein) |
| polyprotein) [Contains: AFGP7 | Seq ID: 1058 |
| (AFGP 7); AFGP8 (AFGP 8)] | Accession: P46573 |
| Seq ID: 248 | Swissprot_id: APKB_ARATH |
| Accession: P16356 | Gi_number: 12644274 |
| Swissprot_id: RPB1_CAEEL | Description: PROTEIN KINASE APK1B |
| Gi_number: 133322 | Seq ID: 1060 |
| Description: DNA-DIRECTED RNA | Accession: P57721 |
| POLYMERASE II LARGEST SUBUNIT | Swissprot_id: PCB3_HUMAN |
| Seq ID: 250 | Gi_number: 12230427 |
| Accession: P18165 | Description: Poly(rC)-binding protein 3 |
| Swissprot_id: LORI_MOUSE | (Alpha-CP3) |
| Gi_number: 126390 | Seq ID: 1061 |
| Description: LORICRIN | Accession: P22059 |
| Seq ID: 252 | Swissprot_id: OXYB_HUMAN |
| Accession: P21997 | Gi_number: 129308 |
| Swissprot_id: SSGP_VOLCA | Description: Oxysterol-binding protein |
| Gi_number: 134920 | Seq ID: 1062 |
| Description: SULFATED SURFACE | Accession: P14328 |
| GLYCOPROTEIN 185 (SSG 185) | Swissprot_id: SP96_DICDI |
| Seq ID: 253 | Gi_number: 134780 |
| Accession: Q01538 | Description: SPORE COAT PROTEIN |
| Swissprot_id: MYT1_HUMAN | SP96 |
| Gi_number: 13638422 | Seq ID: 1063 |
| Description: MYELIN TRANSCRIPTION | Accession: P40603 |
| FACTOR 1 (MYT1) (MYTI) | Swissprot_id: APG_BRANA |
| (PROTEOLIPID | Gi_number: 728868 |
| PROTEIN BINDING PROTEIN) | Description: ANTER-SPECIFIC |
| (PLPB1) | PROLINE-RICH PROTEIN APG |
| Seq ID: 254 | (PROTEIN CEX) |
| Accession: Q02817 | Seq ID: 1064 |
| Swissprot_id: MUC2_HUMAN | Accession: Q11207 |
| Gi_number: 2506877 | Swissprot_id: PPOL_ARATH |
| Description: MUCIN 2 PRECURSOR | Gi_number: 1709740 |
| (INTESTINAL MUCIN 2) | Description: Poly [ADP-ribose] |
| Seq ID: 255 | polymerase (PARP) (ADPRT) (NAD(+) |
| Accession: P17133 | ADP-ribosyltransferase) |
| Swissprot_id: RU17_DROME | (Poly[ADP-ribose] synthetase) |
| Gi_number: 13638469 | Seq ID: 1065 |
| Description: U1 SMALL NUCLEAR | Accession: Q06548 |
| RIBONUCLEOPROTEIN 70 KDA (U1 | Swissprot_id: APKA_ARATH |
| SNRNP 70 KDA) | Gi_number: 1168470 |
| (SNRNP70) | Description: Protein kinase APK1A |
| Seq ID: 256 | Seq ID: 1066 |
| Accession: P05527 | Accession: P53392 |
| Swissprot_id: HMIN_DROME | Swissprot_id: SUT2_STYHA |
| Gi_number: 123388 | Gi_number: 1711617 |
| Description: HOMEOBOX PROTEIN | Description: HIGH AFFINITY |
| INVECTED | SULPHATE TRANSPORTER 2 |
| Seq ID: 257 | Seq ID: 1067 |
| Accession: O80340 | Accession: P18583 |
| Swissprot_id: ERF4_ARATH | Swissprot_id: SON_HUMAN |
| Gi_number: 7531110 | Gi_number: 586013 |
| Description: Ethylene responsive element | Description: SON PROTEIN (SON3) |
| binding factor 4 (AtERF4) | Seq ID: 1068 |
| Seq ID: 258 | Accession: P41230 |
| Accession: P40954 | Swissprot_id: SMCX_MOUSE |
| Swissprot_id: CHI3_CANAL | Gi_number: 17380305 |
| Gi_number: 1168933 | Description: SmcX protein (Xe169 protein) |
| Description: CHITINASE 3 PRECURSOR | Seq ID: 1069 |
| Seq ID: 259 | Accession: Q9Y705 |
| Accession: Q02817 | Swissprot_id: ALP4_SCHPO |
| Swissprot_id: MUC2_HUMAN | Gi_number: 18203637 |
| Gi_number: 2506877 | Description: Spindle pole body component |
| Description: MUCIN 2 PRECURSOR | Alp4 |
| (INTESTINAL MUCIN 2) | Seq ID: 1070 |
| Seq ID: 260 | Accession: P52409 |
| Accession: P11675 | Swissprot_id: E13B_WHEAT |
| Swissprot_id: IE18_PRVIF | Gi_number: 1706551 |
| Gi_number: 124178 | Description: GLUCAN ENDO-1,3-BETA- |
| Description: IMMEDIATE-EARLY | GLUCOSIDASE PRECURSOR |
| PROTEIN IE180 | ((1->3)-BETA-GLUCAN |
| Seq ID: 261 | ENDOHYDROLASE) ((1->3)-BETA- |
| Accession: P08640 | GLUCANASE) |
| Swissprot_id: AMYH_YEAST | (BETA-1,3- |
| Gi_number: 728850 | ENDOGLUCANASE) |
| Description: GLUCOAMYLASE S1/S2 | Seq ID: 1071 |
| PRECURSOR (GLUCAN | Accession: P10978 |
| 1,4-ALPHA-GLUCOSIDASE) | Swissprot_id: POLX_TOBAC |
| (1,4-ALPHA-D-GLUCAN | Gi_number: 130582 |
| GLUCOHYDROLASE) | Description: Retrovirus-related Pol |
| Seq ID: 262 | polyprotein from transposon TNT |
| Accession: P05790 | 1-94 [Contains: Protease; |
| Swissprot_id: FBOH_BOMMO | Reverse transcriptase; |
| Gi_number: 9087216 | Endonuclease] |
| Description: FIBROIN HEAVY CHAIN | Seq ID: 1072 |
| PRECURSOR (FIB-H) (H-FIBROIN) | Accession: P33485 |
| Seq ID: 263 | Swissprot_id: VNUA_PRVKA |
| Accession: Q02817 | Gi_number: 465445 |
| Swissprot_id: MUC2_HUMAN | Description: PROBABLE NUCLEAR |
| Gi_number: 2506877 | ANTIGEN |
| Description: MUCIN 2 PRECURSOR | Seq ID: 1073 |
| (INTESTINAL MUCIN 2) | Accession: Q07423 |
| Seq ID: 264 | Swissprot_id: HEX6_RICCO |
| Accession: Q9NYV4 | Gi_number: 1708191 |
| Swissprot_id: CRK7_HUMAN | Description: HEXOSE CARRIER |
| Gi_number: 12643825 | PROTEIN HEX6 |
| Description: CELL DIVISION CYCLE 2- | Seq ID: 1074 |
| RELATED PROTEIN KINASE 7 | Accession: P13816 |
| (CDC2-RELATED PROTEIN | Swissprot_id: GARP_PLAFF |
| KINASE 7) (CRKRS) | Gi_number: 120943 |
| Seq ID: 265 | Description: GLUTAMIC ACID-RICH |
| Accession: Q42569 | PROTEIN PRECURSOR |
| Swissprot_id: C901_ARATH | Seq ID: 1075 |
| Gi_number: 5915851 | Accession: P93531 |
| Description: Cytochrome P450 90A1 | Swissprot_id: C7D7_SOLCH |
| Seq ID: 266 | Gi_number: 5915836 |
| Accession: Q19200 | Description: CYTOCHROME P450 71D7 |
| Swissprot_id: STO1_CAEEL | Seq ID: 1076 |
| Gi_number: 2493264 | Accession: Q00808 |
| Description: STO-1 PROTEIN | Swissprot_id: HET1_PODAN |
| Seq ID: 267 | Gi_number: 3023956 |
| Accession: P34579 | Description: Vegetatible incompatibility |
| Swissprot_id: UN47_CAEEL | protein HET-E-1 |
| Gi_number: 14917051 | Seq ID: 1077 |
| Description: Unc-47 protein | Accession: Q41819 |
| Seq ID: 268 | Swissprot_id: IAAG_MAIZE |
| Accession: O04681 | Gi_number: 2501499 |
| Swissprot_id: PT15_LYCES | Description: INDOLE-3-ACETATE |
| Gi_number: 7531180 | BETA-GLUCOSYLTRANSFERASE |
| Description: PATHOGENESIS- | (IAA-GLU |
| RELATED GENES TRANSCRIPTIONAL | SYNTHETASE) ((URIDINE |
| ACTIVATOR PT15 | 5′-DIPHOSPHATE- |
| Seq ID: 269 | GLUCOSE: INDOL-3-YLACETYL)- |
| Accession: P03211 | BETA-D-GLUCOSYL |
| Swissprot_id: EBN1_EBV | TRANSFERASE) |
| Gi_number: 119110 | Seq ID: 1078 |
| Description: EBNA-1 NUCLEAR | Accession: Q9UMN6 |
| PROTEIN | Swissprot_id: TRX2_HUMAN |
| Seq ID: 270 | Gi_number: 12643900 |
| Accession: P27884 | Description: TRITHORAX HOMOLOG 2 |
| Swissprot_id: CCAA_RABIT | (MIXED LINEAGE LEUKEMIA GENE |
| Gi_number: 399201 | HOMOLOG 2 |
| Description: VOLTAGE-DEPENDENT | PROTEIN) |
| P/Q-TYPE CALCIUM CHANNEL | Seq ID: 1079 |
| ALPHA-1A | Accession: P27934 |
| SUBUNIT (CALCIUM | Swissprot_id: AM3E_ORYSA |
| CHANNEL, L TYPE, ALPHA-1 | Gi_number: 113683 |
| POLYPEPTIDE | Description: ALPHA-AMYLASE |
| ISOFORM 4) (BRAIN | ISOZYME 3E PRECURSOR (1,4- |
| CALCIUM CHANNEL I) (BI) | ALPHA-D-GLUCAN |
| Seq ID: 271 | GLUCANOHYDROLASE) |
| Accession: Q02817 | Seq ID: 1080 |
| Swissprot_id: MUC2_HUMAN | Accession: P03211 |
| Gi_number: 2506877 | Swissprot_id: EBN1_EBV |
| Description: MUCIN 2 PRECURSOR | Gi_number: 119110 |
| (INTESTINAL MUCIN 2) | Description: EBNA-1 NUCLEAR |
| Seq ID: 272 | PROTEIN |
| Accession: P28968 | Seq ID: 1081 |
| Swissprot_id: VGLX_HSVEB | Accession: P42777 |
| Gi_number: 138350 | Swissprot_id: GBF4_ARATH |
| Description: GLYCOPROTEIN X | Gi_number: 1169863 |
| PRECURSOR | Description: G-box binding factor 4 |
| Seq ID: 273 | Seq ID: 1082 |
| Accession: P13983 | Accession: O89114 |
| Swissprot_id: EXTN_TOBAC | Swissprot_id: DJB5_MOUSE |
| Gi_number: 119714 | Gi_number: 18202246 |
| Description: Extensin precursor (Cell wall | Description: DnaJ homolog subfamily B |
| hydroxyproline-rich | member 5 (Heat shock protein |
| glycoprotein) | Hsp40-3) (Heat shock protein |
| Seq ID: 275 | cognate 40) (Hsc40) |
| Accession: P36024 | Seq ID: 1083 |
| Swissprot_id: SIS2_YEAST | Accession: P28656 |
| Gi_number: 548925 | Swissprot_id: NPL1_MOUSE |
| Description: SIS2 PROTEIN | Gi_number: 1709338 |
| (HALOTOLERANCE PROTEIN HAL3) | Description: Nucleosome assembly protein |
| Seq ID: 276 | 1-like 1 (NAP-1 related |
| Accession: O80337 | protein) (Brain protein DN38) |
| Swissprot_id: ERFI_ARATH | Seq ID: 1085 |
| Gi_number: 7531107 | Accession: Q9NR09 |
| Description: ETHYLENE RESPONSIVE | Swissprot_id: BIR6_HUMAN |
| ELEMENT BINDING FACTOR 1 | Gi_number: 12585192 |
| (ATERF1) | Description: BACULOVIRAL IAP |
| Seq ID: 277 | REPEAT-CONTAINING PROTEIN 6 |
| Accession: P33485 | (UBIQUITIN-CONJUGATING |
| Swissprot_id: VNUA_PRVKA | BIR-DOMAIN ENZYME APOLLON) |
| Gi_number: 465445 | Seq ID: 1086 |
| Description: PROBABLE NUCLEAR | Accession: P37702 |
| ANTIGEN | Swissprot_id: MYRO_ARATH |
| Seq ID: 278 | Gi_number: 585536 |
| Accession: Q9WTV7 | Description: Myrosinase precursor |
| Swissprot_id: RNFB_MOUSE | (Sinigrinase) (Thioglucosidase) |
| Gi_number: 13124535 | Seq ID: 1090 |
| Description: RING FINGER PROTEIN 12 | Accession: O35973 |
| (LIM DOMAIN INTERACTING RING | Swissprot_id: PER1_MOUSE |
| FINGER | Gi_number: 6093673 |
| PROTEIN) (RING FINGER LIM | Description: Period circadian protein 1 |
| DOMAIN-BINDING PROTEIN) (R-LIM) | (Circadian pacemaker protein |
| Seq ID: 279 | Rigui) (mPER) (M-Rigui) |
| Accession: P18583 | Seq ID: 1091 |
| Swissprot_id: SON_HUMAN | Accession: P05143 |
| Gi_number: 586013 | Swissprot_id: PRP3_MOUSE |
| Description: SON PROTEIN (SON3) | Gi_number: 131002 |
| Seq ID: 280 | Description: PROLINE-RICH PROTEIN |
| Accession: O43516 | MP-3 |
| Swissprot_id: WAIP_HUMAN | Seq ID: 1092 |
| Gi_number: 13124642 | Accession: Q9NYV4 |
| Description: WISKOTT-ALDRICH | Swissprot_id: CRK7_HUMAN |
| SYNDROME PROTEIN INTERACTING | Gi_number: 12643825 |
| PROTEIN (WASP | Description: CELL DIVISION CYCLE 2- |
| INTERACTING PROTEIN) | RELATED PROTEIN KINASE 7 |
| (PRPL-2 PROTEIN) | (CDC2-RELATED PROTEIN |
| Seq ID: 281 | KINASE 7) (CRKRS) |
| Accession: Q9W611 | Seq ID: 1093 |
| Swissprot_id: RBMS_CHICK | Accession: P50156 |
| Gi_number: 13124483 | Swissprot_id: TIPG_ORYSA |
| Description: RNA-binding protein with | Gi_number: 1729971 |
| multiple splicing homolog | Description: TONOPLAST INTRINSIC |
| (RBP-MS) (HEart, RRM | PROTEIN, GAMMA (GAMMA TIP) |
| Expressed Sequence) (Hermes) | (AQUAPORIN-TIP) |
| Seq ID: 282 | Seq ID: 1095 |
| Accession: Q03173 | Accession: Q9SFF9 |
| Swissprot_id: NDPP_MOUSE | Swissprot_id: GL17_ARATH |
| Gi_number: 1709249 | Gi_number: 18203443 |
| Description: NPC DERIVED PROLINE | Description: Germin-like protein subfamily |
| RICH PROTEIN 1 (NDPP-1) | 1 member 7 precursor |
| Seq ID: 284 | Seq ID: 1096 |
| Accession: P06544 | Accession: P32110 |
| Swissprot_id: THI1_ANASO | Swissprot_id: GTX6_SOYBN |
| Gi_number: 135761 | Gi_number: 417148 |
| Description: Thioredoxin 1 (TRX-1) | Description: PROBABLE |
| (Thioredoxin M) | GLUTATHIONE S-TRANSFERASE |
| Seq ID: 285 | (HEAT SHOCK PROTEIN |
| Accession: Q9WTV7 | 26A) (G2-4) |
| Swissprot_id: RNFB_MOUSE | Seq ID: 1097 |
| Gi_number: 13124535 | Accession: Q06003 |
| Description: RING FINGER PROTEIN 12 | Swissprot_id: GOLI_DROME |
| (LIM DOMAIN INTERACTING RING | Gi_number: 462193 |
| FINGER | Description: Goliath protein (G1 protein) |
| PROTEIN) (RING FINGER LIM | Seq ID: 1099 |
| DOMAIN-BINDING PROTEIN) (R-LIM) | Accession: P39163 |
| Seq ID: 286 | Swissprot_id: CHAC_ECOLI |
| Accession: Q40089 | Gi_number: 12644253 |
| Swissprot_id: ATP4_IPOBA | Description: CATION TRANSPORT |
| Gi_number: 2493046 | PROTEIN CHAC |
| Description: ATP synthase delta' chain, | Seq ID: 1101 |
| mitochondrial precursor | Accession: Q38924 |
| Seq ID: 287 | Swissprot_id: PPAF_ARATH |
| Accession: P36787 | Gi_number: 2499542 |
| Swissprot_id: VE2_HPV25 | Description: IRON(III)-ZINC(II) PURPLE |
| Gi_number: 549242 | ACID PHOSPHATASE PRECURSOR |
| Description: REGULATORY PROTEIN | (PAP) |
| E2 | Seq ID: 1102 |
| Seq ID: 288 | Accession: Q99090 |
| Accession: P70315 | Swissprot_id: CPR2_PETCR |
| Swissprot_id: WASP_MOUSE | Gi_number: 2842757 |
| Gi_number: 2499130 | Description: LIGHT-INDUCIBLE |
| Description: Wiskott-Aldrich syndrome | PROTEIN CPRF-2 |
| protein homolog (WASP) | Seq ID: 1103 |
| Seq ID: 289 | Accession: P52565 |
| Accession: P11675 | Swissprot_id: GDIR_HUMAN |
| Swissprot_id: IE18_PRVIF | Gi_number: 1707892 |
| Gi_number: 124178 | Description: Rho GDP-dissociation |
| Description: IMMEDIATE-EARLY | inhibitor 1 (Rho GDI 1) (Rho-GDI |
| PROTEIN IE180 | alpha) |
| Seq ID: 290 | Seq ID: 1105 |
| Accession: O08816 | Accession: O54956 |
| Swissprot_id: WASL_RAT | Swissprot_id: DPE2_MOUSE |
| Gi_number: 13431956 | Gi_number: 3913512 |
| Description: Neural Wiskott-Aldrich | Description: DNA POLYMERASE |
| syndrome protein (N-WASP) | EPSILON SUBUNIT B (DNA |
| Seq ID: 291 | POLYMERASE II |
| Accession: P17483 | SUBUNIT B) |
| Swissprot_id: HXB4_HUMAN | Seq ID: 1107 |
| Gi_number: 547692 | Accession: Q50634 |
| Description: HOMEOBOX PROTEIN | Swissprot_id: SECD_MYCTU |
| HOX-B4 (HOX-2F) (HOX-2.6) | Gi_number: 2498898 |
| Seq ID: 292 | Description: Protein-export membrane |
| Accession: Q53547 | protein secD |
| Swissprot_id: EST2_PSEFL | Seq ID: 1108 |
| Gi_number: 3023719 | Accession: P08548 |
| Description: CARBOXYLESTERASE 2 | Swissprot_id: LIN1_NYCCO |
| (ESTERASE II) | Gi_number: 126296 |
| Seq ID: 294 | Description: LINE-1 REVERSE |
| Accession: P13983 | TRANSCRIPTASE HOMOLOG |
| Swissprot_id: EXTN_TOBAC | Seq ID: 1110 |
| Gi_number: 119714 | Accession: Q9ZSK5 |
| Description: Extensin precursor (Cell wall | Swissprot_id: ZOG_PHALU |
| hydroxyproline-rich | Gi_number: 6226510 |
| glycoprotein) | Description: Zeatin O-glucosyltransferase |
| Seq ID: 295 | (Zeatin |
| Accession: P47735 | O-beta-D-glucosyltransferase) |
| Swissprot_id: RLK5_ARATH | Seq ID: 1112 |
| Gi_number: 1350783 | Accession: P28968 |
| Description: Receptor-like protein kinase 5 | Swissprot_id: VGLX_HSVEB |
| precursor | Gi_number: 138350 |
| Seq ID: 296 | Description: GLYCOPROTEIN X |
| Accession: P03211 | PRECURSOR |
| Swissprot_id: EBN1_EBV | Seq ID: 1119 |
| Gi_number: 119110 | Accession: P42768 |
| Description: EBNA-1 NUCLEAR | Swissprot_id: WASP_HUMAN |
| PROTEIN | Gi_number: 1722836 |
| Seq ID: 297 | Description: WISKOTT-ALDRICH |
| Accession: P23074 | SYNDROME PROTEIN (WASP) |
| Swissprot_id: POL_SFV1 | Seq ID: 1122 |
| Gi_number: 400825 | Accession: O08816 |
| Description: POL polyprotein [Contains: | Swissprot_id: WASL_RAT |
| Protease; Reverse | Gi_number: 13431956 |
| transcriptase; Endonuclease] | Description: Neural Wiskott-Aldrich |
| Seq ID: 298 | syndrome protein (N-WASP) |
| Accession: P09189 | Seq ID: 1125 |
| Swissprot_id: HS7C_PETHY | Accession: P21997 |
| Gi_number: 123650 | Swissprot_id: SSGP_VOLCA |
| Description: HEAT SHOCK COGNATE | Gi_number: 134920 |
| 70 KD PROTEIN | Description: SULFATED SURFACE |
| Seq ID: 299 | GLYCOPROTEIN 185 (SSG 185) |
| Accession: P43293 | Seq ID: 1126 |
| Swissprot_id: NAK_ARATH | Accession: P10220 |
| Gi_number: 1171642 | Swissprot_id: TEGU_HSV11 |
| Description: Probable serine/threonine- | Gi_number: 135576 |
| protein kinase NAK | Description: LARGE TEGUMENT |
| Seq ID: 300 | PROTEIN (VIRION PROTEIN UL36) |
| Accession: P08775 | Seq ID: 1127 |
| Swissprot_id: RPB1_MOUSE | Accession: P42158 |
| Gi_number: 133327 | Swissprot_id: KC1D_ARATH |
| Description: DNA-directed RNA | Gi_number: 1170622 |
| polymerase II largest subunit (RPB1) | Description: CASEIN KINASE I, DELTA |
| Seq ID: 301 | ISOFORM LIKE (CKI-DELTA) |
| Accession: P36787 | Seq ID: 1128 |
| Swissprot_id: VE2_HPV25 | Accession: Q9NZW4 |
| Gi_number: 549242 | Swissprot_id: DSPP_HUMAN |
| Description: REGULATORY PROTEIN | Gi_number: 17865470 |
| E2 | Description: Dentin sialophosphoprotein |
| Seq ID: 302 | precursor [Contains: Dentin |
| Accession: O60508 | phosphoprotein (Dentin |
| Swissprot_id: PR17_HUMAN | phosphophoryn) (DPP); Dentin |
| Gi_number: 17380181 | sialoprotein (DSP)] |
| Description: Pre-mRNA splicing factor | Seq ID: 1130 |
| PRP17 (hPRP17) (EH-binding | Accession: Q9Y5T5 |
| protein 3) (Ehb3) | Swissprot_id: UBPG_HUMAN |
| Seq ID: 303 | Gi_number: 6686071 |
| Accession: Q02817 | Description: Ubiquitin carboxyl-terminal |
| Swissprot_id: MUC2_HUMAN | hydrolase 16 (Ubiquitin |
| Gi_number: 2506877 | thiolesterase 16) (Ubiquitin- |
| Description: MUCIN 2 PRECURSOR | specific processing protease |
| (INTESTINAL MUCIN 2) | 16) (Deubiquitinating enzyme 16) |
| Seq ID: 304 | (Ubiquitin processing |
| Accession: Q39017 | protease UBP-M) |
| Swissprot_id: KDG1_ARATH | Seq ID: 1131 |
| Gi_number: 2494034 | Accession: Q02817 |
| Description: Diacylglycerol kinase 1 | Swissprot_id: MUC2_HUMAN |
| (Diglyceride kinase 1) (DGK 1) | Gi_number: 2506877 |
| (DAG kinase 1) | Description: MUCIN 2 PRECURSOR |
| Seq ID: 305 | (INTESTINAL MUCIN 2) |
| Accession: P51027 | Seq ID: 1133 |
| Swissprot_id: NRM1_CHICK | Accession: P08640 |
| Gi_number: 1709350 | Swissprot_id: AMYH_YEAST |
| Description: Natural resistance-associated | Gi_number: 728850 |
| macrophage protein 1 (NRAMP | Description: GLUCOAMYLASE S1/S2 |
| 1) | PRECURSOR (GLUCAN |
| Seq ID: 306 | 1,4-ALPHA-GLUCOSIDASE) |
| Accession: Q96423 | (1,4-ALPHA-D-GLUCAN |
| Swissprot_id: TCMO_GLYEC | GLUCOHYDROLASE) |
| Gi_number: 3915095 | Seq ID: 1134 |
| Description: TRANS-CINNAMATE 4- | Accession: P21997 |
| MONOOXYGENASE (CINNAMIC ACID | Swissprot_id: SSGP_VOLCA |
| 4-HYDROXYLASE) (CA4H) | Gi_number: 134920 |
| (C4H) (P450C4H) (CYTOCHROME P450 | Description: SULFATED SURFACE |
| 73) | GLYCOPROTEIN 185 (SSG 185) |
| Seq ID: 307 | Seq ID: 1135 |
| Accession: P02812 | Accession: P13983 |
| Swissprot_id: PRP2_HUMAN | Swissprot_id: EXTN_TOBAC |
| Gi_number: 130998 | Gi_number: 119714 |
| Description: Salivary proline-rich protein | Description: Extensin precursor (Cell wall |
| precursor (Clone CP7) | hydroxyproline-rich |
| [Contains: Basic peptide P-F] | glycoprotein) |
| Seq ID: 308 | Seq ID: 1137 |
| Accession: P12783 | Accession: P43293 |
| Swissprot_id: PGKY_WHEAT | Swissprot_id: NAK_ARATH |
| Gi_number: 129916 | Gi_number: 1171642 |
| Description: PHOSPHOGLYCERATE | Description: Probable serine/threonine- |
| KINASE, CYTOSOLIC | protein kinase NAK |
| Seq ID: 309 | Seq ID: 1141 |
| Accession: P17840 | Accession: P20026 |
| Swissprot_id: SLS3_BRAOL | Swissprot_id: MYB1_HORVU |
| Gi_number: 134532 | Gi_number: 127579 |
| Description: S-locus-specific glycoprotein | Description: Myb-related protein Hv1 |
| S13 precursor (SLSG-13) | Seq ID: 1143 |
| Seq ID: 310 | Accession: P13983 |
| Accession: Q9Z2A7 | Swissprot_id: EXTN_TOBAC |
| Swissprot_id: DGAT_MOUSE | Gi_number: 119714 |
| Gi_number: 17374647 | Description: Extensin precursor (Cell wall |
| Description: Diacylglycerol O- | hydroxyproline-rich |
| acyltransferase (Diglyceride | glycoprotein) |
| acyltransferase) | Seq ID: 1144 |
| Seq ID: 311 | Accession: P70315 |
| Accession: P38564 | Swissprot_id: WASP_MOUSE |
| Swissprot_id: MNBA_MAIZE | Gi_number: 2499130 |
| Gi_number: 1346559 | Description: Wiskott-Aldrich syndrome |
| Description: DNA-BINDING PROTEIN | protein homolog (WASP) |
| MNB1A | Seq ID: 1145 |
| Seq ID: 312 | Accession: P33313 |
| Accession: P10496 | Swissprot_id: CNS1_YEAST |
| Swissprot_id: GRP2_PHAVU | Gi_number: 465507 |
| Gi_number: 121632 | Description: CYCLOPHILIN SEVEN |
| Description: GLYCINE-RICH CELL | SUPPRESSOR 1 (STI1 STRESS- |
| WALL STRUCTURAL PROTEIN 1.8 | INDUCIBLE |
| PRECURSOR | PROTEIN HOMOLOG) |
| (GRP 1.8) | Seq ID: 1146 |
| Seq ID: 313 | Accession: P50172 |
| Accession: P40631 | Swissprot_id: DHI1_MOUSE |
| Swissprot_id: MLH_TETTH | Gi_number: 1706408 |
| Gi_number: 730030 | Description: Corticosteroid 11-beta- |
| Description: Micronuclear linker histone | dehydrogenase, isozyme 1 (11-DH) |
| polyprotein (MIC LH) | (11-beta-hydroxysteroid |
| [Contains: Micronuclear linker | dehydrogenase 1) (11-beta-HSD1) |
| histone-alpha; Micronuclear | (11beta-HSD1A) |
| linker histone-beta; Micronuclear | Seq ID: 1147 |
| linker histone-delta; | Accession: P08079 |
| Micronuclear linker histone- | Swissprot_id: GDB0_WHEAT |
| gamma] | Gi_number: 121099 |
| Seq ID: 315 | Description: GAMMA-GLIADIN |
| Accession: O24215 | PRECURSOR |
| Swissprot_id: DCAM_ORYSA | Seq ID: 1148 |
| Gi_number: 6166113 | Accession: P20026 |
| Description: S- | Swissprot_id: MYB1_HORVU |
| ADENOSYLMETHIONINE | Gi_number: 127579 |
| DECARBOXYLASE PROENZYME | Description: Myb-related protein Hv1 |
| (ADOMETDC) | Seq ID: 1149 |
| (SAMDC) | Accession: Q9UGP9 |
| Seq ID: 316 | Swissprot_id: WDR5_HUMAN |
| Accession: Q9LX45 | Gi_number: 12230771 |
| Swissprot_id: PIR4_ARATH | Description: WD-repeat protein 5 |
| Gi_number: 14195010 | Seq ID: 1150 |
| Description: Pirin-like protein At3g59260 | Accession: Q41276 |
| Seq ID: 317 | Swissprot_id: AP1_SINAL |
| Accession: P34913 | Gi_number: 3913047 |
| Swissprot_id: HYES_HUMAN | Description: Floral homeotic protein |
| Gi_number: 462369 | APETALA1 (MADS C) |
| Description: Soluble epoxide hydrolase | Seq ID: 1151 |
| (SEH) (Epoxide hydratase) | Accession: P49634 |
| (Cytosolic epoxide hydrolase) | Swissprot_id: UBIQ_ACACA |
| (CEH) | Gi_number: 1351348 |
| Seq ID: 318 | Description: UBIQUITIN |
| Accession: P13983 | Seq ID: 1153 |
| Swissprot_id: EXTN_TOBAC | Accession: P01103 |
| Gi_number: 119714 | Swissprot_id: MYB_CHICK |
| Description: Extensin precursor (Cell wall | Gi_number: 127591 |
| hydroxyproline-rich | Description: Myb proto-oncogene protein |
| glycoprotein) | (C-myb) |
| Seq ID: 320 | Seq ID: 1154 |
| Accession: Q9HTR0 | Accession: Q08446 |
| Swissprot_id: NOM2_PSEAE | Swissprot_id: SGT1_YEAST |
| Gi_number: 14285606 | Gi_number: 2498910 |
| Description: Probable multidrug resistance | Description: SGT1 PROTEIN |
| protein norM 2 (Na(+)/drug | Seq ID: 1156 |
| antiporter) (Multidrug-efflux | Accession: P42736 |
| transporter) | Swissprot_id: CDI3_ARATH |
| Seq ID: 321 | Gi_number: 1168862 |
| Accession: O43516 | Description: CADMIUM-INDUCED |
| Swissprot_id: WAIP_HUMAN | PROTEIN AS30 |
| Gi_number: 13124642 | Seq ID: 1158 |
| Description: WISKOTT-ALDRICH | Accession: P20025 |
| SYNDROME PROTEIN INTERACTING | Swissprot_id: MYB3_MAIZE |
| PROTEIN (WASP | Gi_number: 127582 |
| INTERACTING PROTEIN) | Description: Myb-related protein Zm38 |
| (PRPL-2 PROTEIN) | Seq ID: 1159 |
| Seq ID: 322 | Accession: P17483 |
| Accession: O43516 | Swissprot_id: HXB4_HUMAN |
| Swissprot_id: WAIP_HUMAN | Gi_number: 547692 |
| Gi_number: 13124642 | Description: HOMEOBOX PROTEIN |
| Description: WISKOTT-ALDRICH | HOX-B4 (HOX-2F) (HOX-2.6) |
| SYNDROME PROTEIN INTERACTING | Seq ID: 1163 |
| PROTEIN (WASP | Accession: Q09790 |
| INTERACTING PROTEIN) | Swissprot_id: APS1_SCHPO |
| (PRPL-2 PROTEIN) | Gi_number: 1175461 |
| Seq ID: 323 | Description: Diadenosine 5′,5′′′-P1,P6- |
| Accession: Q12446 | hexaphosphate hydrolase (Ap6A |
| Swissprot_id: LA17_YEAST | hydrolase) |
| Gi_number: 2498506 | Seq ID: 1164 |
| Description: PROLINE-RICH PROTEIN | Accession: O08808 |
| LAS17 | Swissprot_id: DIA1_MOUSE |
| Seq ID: 324 | Gi_number: 6014968 |
| Accession: Q00451 | Description: Diaphanous protein homolog |
| Swissprot_id: PRF1_LYCES | 1 (Diaphanous-related formin 1) |
| Gi_number: 1709767 | (DRF1) (mDIA1) (p140mDIA) |
| Description: 36.4 KD PROLINE-RICH | Seq ID: 1165 |
| PROTEIN | Accession: O65740 |
| Seq ID: 326 | Swissprot_id: DEF2_CAPAN |
| Accession: P39881 | Gi_number: 17373811 |
| Swissprot_id: CUT1_CANFA | Description: Defensin J1-2 precursor |
| Gi_number: 729093 | Seq ID: 1166 |
| Description: CCAAT displacement protein | Accession: O00763 |
| (Homeobox protein Clox) | Swissprot_id: COA2_HUMAN |
| (Clox-1) | Gi_number: 2493312 |
| Seq ID: 327 | Description: ACETYL-COA |
| Accession: P10162 | CARBOXYLASE 2 (ACC-BETA) |
| Swissprot_id: PRPL_HUMAN | [INCLUDES: BIOTIN |
| Gi_number: 131011 | CARBOXYLASE] |
| Description: SALIVARY PROLINE-RICH | Seq ID: 1167 |
| PROTEIN PO (ALLELE K) [CONTAINS: | Accession: O04716 |
| PEPTIDE P-D] | Swissprot_id: MSH6_ARATH |
| Seq ID: 329 | Gi_number: 6226648 |
| Accession: P70315 | Description: DNA mismatch repair protein |
| Swissprot_id: WASP_MOUSE | MSH6-1 (AtMsh6-1) |
| Gi_number: 2499130 | Seq ID: 1168 |
| Description: Wiskott-Aldrich syndrome | Accession: O08638 |
| protein homolog (WASP) | Swissprot_id: MYHB_MOUSE |
| Seq ID: 330 | Gi_number: 13431676 |
| Accession: P52154 | Description: MYOSIN HEAVY CHAIN, |
| Swissprot_id: RHO_MICLU | SMOOTH MUSCLE ISOFORM |
| Gi_number: 2507337 | (SMMHC) |
| Description: Transcription termination | Seq ID: 1170 |
| factor rho | Accession: P47990 |
| Seq ID: 332 | Swissprot_id: XDH_CHICK |
| Accession: P14897 | Gi_number: 1351438 |
| Swissprot_id: ELI9_HORVU | Description: XANTHINE |
| Gi_number: 119286 | DEHYDROGENASE/OXIDASE |
| Description: Low molecular mass early | [INCLUDES: XANTHINE |
| light-inducible protein HV90, | DEHYDROGENASE (XD); |
| chloroplast precursor (ELIP) | XANTHINE OXIDASE (XO) |
| Seq ID: 333 | (XANTHINE |
| Accession: Q39411 | OXIDOREDUCTASE)] |
| Swissprot_id: RL26_BRARA | Seq ID: 1171 |
| Gi_number: 3914740 | Accession: Q42877 |
| Description: 60S RIBOSOMAL PROTEIN | Swissprot_id: RPB2_LYCES |
| L26 | Gi_number: 11134656 |
| Seq ID: 335 | Description: DNA-directed RNA |
| Accession: P19837 | polymerase II 135 kDa polypeptide (RNA |
| Swissprot_id: SPD1_NEPCL | polymerase II subunit 2) |
| Gi_number: 1174414 | Seq ID: 1172 |
| Description: SPIDROIN 1 (DRAGLINE | Accession: Q05609 |
| SILK FIBROIN 1) | Swissprot_id: CTR1_ARATH |
| Seq ID: 336 | Gi_number: 1169128 |
| Accession: P46665 | Description: Serine/threonine-protein |
| Swissprot_id: HT14_ARATH | kinase CTR1 |
| Gi_number: 12230908 | Seq ID: 1173 |
| Description: Homeobox-leucine zipper | Accession: P04323 |
| protein HAT14 (HD-ZIP protein 14) | Swissprot_id: POL3_DROME |
| Seq ID: 337 | Gi_number: 130405 |
| Accession: P47815 | Description: Retrovirus-related Pol |
| Swissprot_id: IF1A_WHEAT | polyprotein from transposon 17.6 |
| Gi_number: 1352427 | [Contains: Protease; Reverse |
| Description: Eukaryotic translation | transcriptase; |
| initiation factor 1A (EIF-1A) | Endonuclease] |
| (EIF-4C) | Seq ID: 1174 |
| Seq ID: 338 | Accession: Q16531 |
| Accession: Q02817 | Swissprot_id: DDB1_HUMAN |
| Swissprot_id: MUC2_HUMAN | Gi_number: 12643730 |
| Gi_number: 2506877 | Description: DNA DAMAGE BINDING |
| Description: MUCIN 2 PRECURSOR | PROTEIN 1 (DAMAGE-SPECIFIC DNA |
| (INTESTINAL MUCIN 2) | BINDING |
| Seq ID: 340 | PROTEIN 1) (DDB P127 |
| Accession: P08399 | SUBUNIT) (DDBA) (UV-DAMAGED |
| Swissprot_id: PHX5_MOUSE | DNA-BINDING PROTEIN 1) |
| Gi_number: 2507093 | (UV-DDB 1) (XERODERMA |
| Description: PER-HEXAMER REPEAT | PIGMENTOSUM |
| PROTEIN 5 | GROUP E COMPLEMENTING |
| Seq ID: 341 | PROTEIN) (XPCE) (X-ASSOCIATED |
| Accession: Q61189 | PROTEIN 1) (XAP-1) |
| Swissprot_id: ICLN_MOUSE | Seq ID: 1175 |
| Gi_number: 13431571 | Accession: P10978 |
| Description: Chloride conductance | Swissprot_id: POLX_TOBAC |
| regulatory protein ICln I(Cln) | Gi_number: 130582 |
| (Chloride channel, nucleotide | Description: Retrovirus-related Pol |
| sensitive 1A) (Chloride ion | polyprotein from transposon TNT |
| current inducer protein) (ClCI) | 1-94 [Contains: Protease; |
| Seq ID: 342 | Reverse transcriptase; |
| Accession: Q02817 | Endonuclease] |
| Swissprot_id: MUC2_HUMAN | Seq ID: 1176 |
| Gi_number: 2506877 | Accession: Q9NR09 |
| Description: MUCIN 2 PRECURSOR | Swissprot_id: BIR6_HUMAN |
| (INTESTINAL MUCIN 2) | Gi_number: 12585192 |
| Seq ID: 343 | Description: BACULOVIRAL IAP |
| Accession: Q05193 | REPEAT-CONTAINING PROTEIN 6 |
| Swissprot_id: DYN1_HUMAN | (UBIQUITIN-CONJUGATING |
| Gi_number: 461976 | BIR-DOMAIN ENZYME APOLLON) |
| Description: Dynamin-1 | Seq ID: 1177 |
| Seq ID: 345 | Accession: P21448 |
| Accession: O60610 | Swissprot_id: MDR1_CRIGR |
| Swissprot_id: DIA1_HUMAN | Gi_number: 126924 |
| Gi_number: 6225268 | Description: Multidrug resistance protein 1 |
| Description: DIAPHANOUS PROTEIN | (P-glycoprotein 1) |
| HOMOLOG 1 (DIAPHANOUS- | Seq ID: 1178 |
| RELATED FORMIN 1) | Accession: P55180 |
| (DRF1) | Swissprot_id: GALE_BACSU |
| Seq ID: 346 | Gi_number: 1730193 |
| Accession: P03211 | Description: UDP-glucose 4-epimerase |
| Swissprot_id: EBN1_EBV | (Galactowaldenase) (UDP-galactose |
| Gi_number: 119110 | 4-epimerase) |
| Description: EBNA-1 NUCLEAR | Seq ID: 1179 |
| PROTEIN | Accession: Q12381 |
| Seq ID: 347 | Swissprot_id: PR01_SCHPO |
| Accession: P05142 | Gi_number: 12230438 |
| Swissprot_id: PRP2_MOUSE | Description: Pre-mRNA splicing factor |
| Gi_number: 130999 | prp1 |
| Description: Proline-rich protein MP-2 | Seq ID: 1180 |
| precursor | Accession: P08640 |
| Seq ID: 348 | Swissprot_id: AMYH_YEAST |
| Accession: P13983 | Gi_number: 728850 |
| Swissprot_id: EXTN_TOBAC | Description: GLUCOAMYLASE S1/S2 |
| Gi_number: 119714 | PRECURSOR (GLUCAN |
| Description: Extensin precursor (Cell wall | 1,4-ALPHA-GLUCOSIDASE) |
| hydroxyproline-rich | (1,4-ALPHA-D-GLUCAN |
| glycoprotein) | GLUCOHYDROLASE) |
| Seq ID: 350 | Seq ID: 1181 |
| Accession: P10323 | Accession: P47179 |
| Swissprot_id: ACRO_HUMAN | Swissprot_id: DAN4_YEAST |
| Gi_number: 113208 | Gi_number: 1352944 |
| Description: ACROSIN PRECURSOR | Description: Cell wall protein DAN4 |
| Seq ID: 351 | precursor |
| Accession: Q06666 | Seq ID: 1182 |
| Swissprot_id: T2_MOUSE | Accession: Q05609 |
| Gi_number: 730888 | Swissprot_id: CTR1_ARATH |
| Description: OCTAPEPTIDE-REPEAT | Gi_number: 1169128 |
| PROTEIN T2 | Description: Serine/threonine-protein |
| Seq ID: 352 | kinase CTR1 |
| Accession: P48634 | Seq ID: 1183 |
| Swissprot_id: BAT2_HUMAN | Accession: P22579 |
| Gi_number: 1352066 | Swissprot_id: SIN3_YEAST |
| Description: LARGE PROLINE-RICH | Gi_number: 2507475 |
| PROTEIN BAT2 (HLA-B-ASSOCIATED | Description: PAIRED AMPHIPATHIC |
| TRANSCRIPT 2) | HELIX PROTEIN |
| Seq ID: 354 | Seq ID: 1184 |
| Accession: P10569 | Accession: P58463 |
| Swissprot_id: MYSC_ACACA | Swissprot_id: FXP2_MOUSE |
| Gi_number: 127749 | Gi_number: 17433012 |
| Description: Myosin IC heavy chain | Description: Forkhead box protein P2 |
| Seq ID: 355 | Seq ID: 1185 |
| Accession: P14918 | Accession: P30181 |
| Swissprot_id: EXTN_MAIZE | Swissprot_id: TOP1_ARATH |
| Gi_number: 119712 | Gi_number: 267146 |
| Description: EXTENSIN PRECURSOR | Description: DNA topoisomerase I |
| (PROLINE-RICH GLYCOPROTEIN) | Seq ID: 1186 |
| Seq ID: 356 | Accession: P11087 |
| Accession: Q63262 | Swissprot_id: CA11_MOUSE |
| Swissprot_id: BRN1_RAT | Gi_number: 2506305 |
| Gi_number: 5915802 | Description: Collagen alpha 1(I) chain |
| Description: BRAIN-SPECIFIC | precursor |
| HOMEOBOX/POU DOMAIN PROTEIN | Seq ID: 1187 |
| 1 (BRN-1 | Accession: P45181 |
| PROTEIN) | Swissprot_id: PQQL_HAEIN |
| Seq ID: 357 | Gi_number: 1175759 |
| Accession: P37370 | Description: Probable zinc protease pqqL |
| Swissprot_id: VRP1_YEAST | Seq ID: 1188 |
| Gi_number: 2507155 | Accession: Q9QYY8 |
| Description: VERPROLIN | Swissprot_id: SPAS_MOUSE |
| Seq ID: 359 | Gi_number: 12230605 |
| Accession: P40603 | Description: Spastin |
| Swissprot_id: APG_BRANA | Seq ID: 1190 |
| Gi_number: 728868 | Accession: O75317 |
| Description: ANTER-SPECIFIC | Swissprot_id: UBPC_HUMAN |
| PROLINE-RICH PROTEIN APG | Gi_number: 6707738 |
| (PROTEIN CEX) | Description: Ubiquitin carboxyl-terminal |
| Seq ID: 361 | hydrolase 12 (Ubiquitin |
| Accession: Q95107 | thiolesterase 12) (Ubiquitin- |
| Swissprot_id: WASL_BOVIN | specific processing protease |
| Gi_number: 13431968 | 12) (Deubiquitinating enzyme 12) |
| Description: Neural Wiskott-Aldrich | (Ubiquitin hydrolyzing |
| syndrome protein (N-WASP) | enzyme 1) |
| Seq ID: 362 | Seq ID: 1191 |
| Accession: P08001 | Accession: Q55738 |
| Swissprot_id: ACRO_PIG | Swissprot_id: GYRA_SYNY3 |
| Gi_number: 113210 | Gi_number: 8469101 |
| Description: ACROSIN PRECURSOR (53 | Description: DNA gyrase subunit A |
| KD FUCOSE-BINDING PROTEIN) | Seq ID: 1192 |
| Seq ID: 363 | Accession: Q99614 |
| Accession: Q01484 | Swissprot_id: TTC1_HUMAN |
| Swissprot_id: ANK2_HUMAN | Gi_number: 12585378 |
| Gi_number: 1703310 | Description: TETRATRICOPEPTIDE |
| Description: ANKYRIN 2 (BRAIN | REPEAT PROTEIN 1 (TPR REPEAT |
| ANKYRIN) (ANKYRIN B) (ANKYRIN, | PROTEIN 1) |
| NONERYTHROID) | Seq ID: 1193 |
| Seq ID: 364 | Accession: P14328 |
| Accession: P28968 | Swissprot_id: SP96_DICDI |
| Swissprot_id: VGLX_HSVEB | Gi_number: 134780 |
| Gi_number: 138350 | Description: SPORE COAT PROTEIN |
| Description: GLYCOPROTEIN X | SP96 |
| PRECURSOR | Seq ID: 1194 |
| Seq ID: 365 | Accession: Q02817 |
| Accession: Q9WTV7 | Swissprot_id: MUC2_HUMAN |
| Swissprot_id: RNFB_MOUSE | Gi_number: 2506877 |
| Gi_number: 13124535 | Description: MUCIN 2 PRECURSOR |
| Description: RING FINGER PROTEIN 12 | (INTESTINAL MUCIN 2) |
| (LIM DOMAIN INTERACTING RING | Seq ID: 1195 |
| FINGER | Accession: P46607 |
| PROTEIN) (RING FINGER LIM | Swissprot_id: HGL2_ARATH |
| DOMAIN-BINDING PROTEIN) (R-LIM) | Gi_number: 2506525 |
| Seq ID: 366 | Description: Homeobox protein |
| Accession: Q9UMN6 | GLABRA2 (Homeobox-leucine zipper |
| Swissprot_id: TRX2_HUMAN | protein |
| Gi_number: 12643900 | ATHB-10) (HD-ZIP protein |
| Description: TRITHORAX HOMOLOG 2 | ATHB-10) |
| (MIXED LINEAGE LEUKEMIA GENE | Seq ID: 1196 |
| HOMOLOG 2 | Accession: Q01432 |
| PROTEIN) | Swissprot_id: AMD3_HUMAN |
| Seq ID: 367 | Gi_number: 399033 |
| Accession: P33479 | Description: AMP deaminase 3 (AMP |
| Swissprot_id: IE18_PRVKA | deaminase isoform E) (Erythrocyte AMP |
| Gi_number: 462387 | deaminase) |
| Description: IMMEDIATE-EARLY | Seq ID: 1197 |
| PROTEIN IE180 | Accession: Q63003 |
| Seq ID: 368 | Swissprot_id: 5E5_RAT |
| Accession: P08640 | Gi_number: 2498095 |
| Swissprot_id: AMYH_YEAST | Description: 5E5 ANTIGEN |
| Gi_number: 728850 | Seq ID: 1198 |
| Description: GLUCOAMYLASE S1/S2 | Accession: P10978 |
| PRECURSOR (GLUCAN | Swissprot_id: POLX_TOBAC |
| 1,4-ALPHA-GLUCOSIDASE) | Gi_number: 130582 |
| (1,4-ALPHA-D-GLUCAN | Description: Retrovirus-related Pol |
| GLUCOHYDROLASE) | polyprotein from transposon TNT |
| Seq ID: 369 | 1-94 [Contains: Protease; |
| Accession: P13917 | Reverse transcriptase; |
| Swissprot_id: 7SBG_SOYBN | Endonuclease] |
| Gi_number: 14549156 | Seq ID: 1199 |
| Description: BASIC 7S GLOBULIN | Accession: P34703 |
| PRECURSOR (BG) (SBG7S) | Swissprot_id: EMB5_CAEEL |
| Seq ID: 370 | Gi_number: 462008 |
| Accession: P25012 | Description: EMB-5 protein |
| Swissprot_id: CG22_SOYBN | Seq ID: 1201 |
| Gi_number: 116162 | Accession: Q9SYQ8 |
| Description: G2/mitotic-specific cyclin | Swissprot_id: CLV1_ARATH |
| S13-7 (B-like cyclin) | Gi_number: 12643323 |
| Seq ID: 371 | Description: RECEPTOR PROTEIN |
| Accession: P08640 | KINASE CLAVATA1 PRECURSOR |
| Swissprot_id: AMYH_YEAST | Seq ID: 1203 |
| Gi_number: 728850 | Accession: P08547 |
| Description: GLUCOAMYLASE S1/S2 | Swissprot_id: LIN1_HUMAN |
| PRECURSOR (GLUCAN | Gi_number: 126295 |
| 1,4-ALPHA-GLUCOSIDASE) | Description: LINE-1 REVERSE |
| (1,4-ALPHA-D-GLUCAN | TRANSCRIPTASE HOMOLOG |
| GLUCOHYDROLASE) | Seq ID: 1204 |
| Seq ID: 373 | Accession: P74361 |
| Accession: P14328 | Swissprot_id: CLPB_SYNY3 |
| Swissprot_id: SP96_DICDI | Gi_number: 2493734 |
| Gi_number: 134780 | Description: ClpB protein |
| Description: SPORE COAT PROTEIN | Seq ID: 1205 |
| SP96 | Accession: P11369 |
| Seq ID: 374 | Swissprot_id: POL2_MOUSE |
| Accession: P33479 | Gi_number: 130402 |
| Swissprot_id: IE18_PRVKA | Description: Retrovirus-related POL |
| Gi_number: 462387 | polyprotein [Contains: Reverse |
| Description: IMMEDIATE-EARLY | transcriptase; Endonuclease] |
| PROTEIN IE180 | Seq ID: 1206 |
| Seq ID: 375 | Accession: P29141 |
| Accession: P13983 | Swissprot_id: SUBV_BACSU |
| Swissprot_id: EXTN_TOBAC | Gi_number: 135023 |
| Gi_number: 119714 | Description: Minor extracellular protease |
| Description: Extensin precursor (Cell wall | VPR precursor |
| hydroxyproline-rich | Seq ID: 1207 |
| glycoprotein) | Accession: P04839 |
| Seq ID: 376 | Swissprot_id: C24B_HUMAN |
| Accession: Q03211 | Gi_number: 115211 |
| Swissprot_id: EXLP_TOBAC | Description: Cytochrome B-245 heavy |
| Gi_number: 544262 | chain (P22 phagocyte B-cytochrome) |
| Description: PISTIL-SPECIFIC | (Neutrophil cytochrome B, 91 kDa |
| EXTENSIN-LIKE PROTEIN | polypeptide) (CGD91-PHOX) |
| PRECURSOR (PELP) | (GP91-PHOX) (Heme binding |
| Seq ID: 377 | membrane glycoprotein GP91PHOX) |
| Accession: Q02817 | (Cytochrome B(558) beta chain) |
| Swissprot_id: MUC2_HUMAN | (Superoxide-generating |
| Gi_number: 2506877 | NADPH oxidase heavy cha> |
| Description: MUCIN 2 PRECURSOR | Seq ID: 1208 |
| (INTESTINAL MUCIN 2) | Accession: Q06548 |
| Seq ID: 379 | Swissprot_id: APKA_ARATH |
| Accession: P08640 | Gi_number: 1168470 |
| Swissprot_id: AMYH_YEAST | Description: Protein kinase APK1A |
| Gi_number: 728850 | Seq ID: 1209 |
| Description: GLUCOAMYLASE S1/S2 | Accession: Q13316 |
| PRECURSOR (GLUCAN | Swissprot_id: DMP1_HUMAN |
| 1,4-ALPHA-GLUCOSIDASE) | Gi_number: 7673998 |
| (1,4-ALPHA-D-GLUCAN | Description: DENTIN MATRIX ACIDIC |
| GLUCOHYDROLASE) | PHOSPHOPROTEIN 1 PRECURSOR |
| Seq ID: 380 | (DENTIN |
| Accession: P30962 | MATRIX PROTEIN-1) (DMP-1) |
| Swissprot_id: CCMC_BRAJA | Seq ID: 1211 |
| Gi_number: 399869 | Accession: Q9NQE7 |
| Description: HEME EXPORTER | Swissprot_id: TSSP_HUMAN |
| PROTEIN C (CYTOCHROME C-TYPE | Gi_number: 13633990 |
| BIOGENESIS | Description: THYMUS-SPECIFIC |
| PROTEIN CYCZ) | SERINE PROTEASE PRECURSOR |
| Seq ID: 381 | Seq ID: 1212 |
| Accession: P52551 | Accession: Q9NRA0 |
| Swissprot_id: MYBB_XENLA | Swissprot_id: SPH2_HUMAN |
| Gi_number: 6226654 | Gi_number: 17369316 |
| Description: Myb-related protein B (B- | Description: Sphingosine kinase 2 (SK 2) |
| Myb) (Myb-related protein 1) | (SPK 2) |
| (XMYB1) | Seq ID: 1213 |
| Seq ID: 382 | Accession: Q02817 |
| Accession: P10394 | Swissprot_id: MUC2_HUMAN |
| Swissprot_id: POL4_DROME | Gi_number: 2506877 |
| Gi_number: 130407 | Description: MUCIN 2 PRECURSOR |
| Description: Retrovirus-related Pol | (INTESTINAL MUCIN 2) |
| polyprotein from transposon 412 | Seq ID: 1214 |
| [Contains: Protease; Reverse | Accession: Q9SYQ8 |
| transcriptase; | Swissprot_id: CLV1_ARATH |
| Endonuclease] | Gi_number: 12643323 |
| Seq ID: 383 | Description: RECEPTOR PROTEIN |
| Accession: P17656 | KINASE CLAVATA1 PRECURSOR |
| Swissprot_id: CC02_CAEEL | Seq ID: 1215 |
| Gi_number: 115398 | Accession: Q14258 |
| Description: CUTICLE COLLAGEN 2 | Swissprot_id: Z147_HUMAN |
| Seq ID: 384 | Gi_number: 12585547 |
| Accession: P37370 | Description: Zinc finger protein 147 |
| Swissprot_id: VRP1_YEAST | (Estrogen responsive finger |
| Gi_number: 2507155 | protein) (Efp) |
| Description: VERPROLIN | Seq ID: 1216 |
| Seq ID: 385 | Accession: Q9EPQ0 |
| Accession: P03211 | Swissprot_id: NKX3_RAT |
| Swissprot_id: EBN1_EBV | Gi_number: 17865499 |
| Gi_number: 119110 | Description: Sodium/potassium/calcium |
| Description: EBNA-1 NUCLEAR | exchanger 3 precursor |
| PROTEIN | (Na(+)/K(+)/Ca(2+)-exchange |
| Seq ID: 386 | protein 3) (Fragment) |
| Accession: P24007 | Seq ID: 1217 |
| Swissprot_id: RBS_PYRPY | Accession: P40781 |
| Gi_number: 132153 | Swissprot_id: CYP4_CYNCA |
| Description: Ribulose bisphosphate | Gi_number: 729273 |
| carboxylase small chain, chloroplast | Description: CYPRO4 PROTEIN |
| precursor (RuBisCO small | Seq ID: 1218 |
| subunit) | Accession: P56344 |
| Seq ID: 388 | Swissprot_id: CYSA_CHLVU |
| Accession: Q01540 | Gi_number: 3023607 |
| Swissprot_id: AG_BRANA | Description: Probable sulfate transport |
| Gi_number: 399096 | ATP-binding protein cysA |
| Description: Agamous protein | Seq ID: 1219 |
| Seq ID: 389 | Accession: P46573 |
| Accession: Q9WTV7 | Swissprot_id: APKB_ARATH |
| Swissprot_id: RNFB_MOUSE | Gi_number: 12644274 |
| Gi_number: 13124535 | Description: PROTEIN KINASE APK1B |
| Description: RING FINGER PROTEIN 12 | Seq ID: 1220 |
| (LIM DOMAIN INTERACTING RING | Accession: P78621 |
| FINGER | Swissprot_id: SEPA_EMENI |
| PROTEIN) (RING FINGER LIM | Gi_number: 15214279 |
| DOMAIN-BINDING PROTEIN) (R-LIM) | Description: CYTOKINESIS PROTEIN |
| Seq ID: 390 | SEPA (FH1/2 PROTEIN) (FORCED |
| Accession: Q96502 | EXPRESSION INHIBITION OF |
| Swissprot_id: COL2_ARATH | GROWTH A) |
| Gi_number: 17433030 | Seq ID: 1221 |
| Description: Zinc finger protein | Accession: Q13614 |
| CONSTANS-LIKE 2 | Swissprot_id: MTR2_HUMAN |
| Seq ID: 391 | Gi_number: 12644410 |
| Accession: O60610 | Description: MYOTUBULARIN- |
| Swissprot_id: DIA1_HUMAN | RELATED PROTEIN 2 |
| Gi_number: 6225268 | Seq ID: 1222 |
| Description: DIAPHANOUS PROTEIN | Accession: P93329 |
| HOMOLOG 1 (DIAPHANOUS- | Swissprot_id: NO20_MEDTR |
| RELATED FORMIN 1) | Gi_number: 3914142 |
| (DRF1) | Description: EARLY NODULIN 20 |
| Seq ID: 392 | PRECURSOR (N-20) |
| Accession: P08723 | Seq ID: 1223 |
| Swissprot_id: SPBP_RAT | Accession: Q9XHL5 |
| Gi_number: 134789 | Swissprot_id: HMD3_ORYSA |
| Description: Prostatic spermine-binding | Gi_number: 11133198 |
| protein precursor (SBP) | Description: 3-hydroxy-3-methylglutaryl- |
| Seq ID: 393 | coenzyme A reductase 3 (HMG-CoA |
| Accession: Q9LRI7 | reductase 3) |
| Swissprot_id: OSR8_ORYSA | Seq ID: 1224 |
| Gi_number: 15214171 | Accession: P79051 |
| Description: Hydrophobic protein OSR8 | Swissprot_id: RH16_SCHPO |
| Seq ID: 394 | Gi_number: 14195095 |
| Accession: Q27294 | Description: DNA REPAIR PROTEIN |
| Swissprot_id: CAZ_DROME | RHP16 (RAD16 HOMOLOG) |
| Gi_number: 8928004 | Seq ID: 1225 |
| Description: RNA-binding protein cabeza | Accession: P39968 |
| (Sarcoma-associated RNA-binding | Swissprot_id: VAC8_YEAST |
| fly homolog) (P19) | Gi_number: 731400 |
| Seq ID: 395 | Description: Vacuolar protein 8 |
| Accession: P08640 | Seq ID: 1226 |
| Swissprot_id: AMYH_YEAST | Accession: Q9QYY8 |
| Gi_number: 728850 | Swissprot_id: SPAS_MOUSE |
| Description: GLUCOAMYLASE S1/S2 | Gi_number: 12230605 |
| PRECURSOR (GLUCAN | Description: Spastin |
| 1,4-ALPHA-GLUCOSIDASE) | Seq ID: 1227 |
| (1,4-ALPHA-D-GLUCAN | Accession: Q06850 |
| GLUCOHYDROLASE | Swissprot_id: CDP1_ARATH |
| Seq ID: 396 | Gi_number: 729092 |
| Accession: P21997 | Description: Calcium-dependent protein |
| Swissprot_id: SSGP_VOLCA | kinase, isoform AK1 (CDPK) |
| Gi_number: 134920 | Seq ID: 1228 |
| Description: SULFATED SURFACE | Accession: Q9TV36 |
| GLYCOPROTEIN 185 (SSG 185) | Swissprot_id: FBN1_PIG |
| Seq ID: 397 | Gi_number: 13626617 |
| Accession: P03211 | Description: Fibrillin 1 precursor |
| Swissprot_id: EBN1_EBV | Seq ID: 1229 |
| Gi_number: 119110 | Accession: P05659 |
| Description: EBNA-1 NUCLEAR | Swissprot_id: MYSN_ACACA |
| PROTEIN | Gi_number: 127758 |
| Seq ID: 398 | Description: Myosin II heavy chain, non |
| Accession: O00268 | muscle |
| Swissprot_id: T2D3_HUMAN | Seq ID: 1231 |
| Gi_number: 3024681 | Accession: P08548 |
| Description: TRANSCRIPTION | Swissprot_id: LIN1_NYCCO |
| INITIATION FACTOR TFIID 135 KDA | Gi_number: 126296 |
| SUBUNIT | Description: LINE-1 REVERSE |
| (TAFII-135) (TAFII135) (TAFII- | TRANSCRIPTASE HOMOLOG |
| 130) (TAFII130) | Seq ID: 1233 |
| Seq ID: 399 | Accession: Q46948 |
| Accession: P23225 | Swissprot_id: THIJ_ECOLI |
| Swissprot_id: GLSF_MAIZE | Gi_number: 6686342 |
| Gi_number: 121446 | Description: 4-methyl-5(B-hydroxyethyl)- |
| Description: Ferredoxin-dependent | thiazole monophosphate |
| glutamate synthase, chloroplast | biosynthesis enzyme |
| precursor (Fd-GOGAT) | Seq ID: 1235 |
| Seq ID: 400 | Accession: P52706 |
| Accession: P34811 | Swissprot_id: MDL1_PRUSE |
| Swissprot_id: EFGC_SOYBN | Gi_number: 1708971 |
| Gi_number: 461999 | Description: (R)-MANDELONITRILE |
| Description: ELONGATION FACTOR G, | LYASE ISOFORM 1 PRECURSOR |
| CHLOROPLAST PRECURSOR (EF-G) | (HYDROXYNITRILE LYASE 1) |
| Seq ID: 401 | ((R)-OXYNITRILASE 1) |
| Accession: Q02978 | Seq ID: 1236 |
| Swissprot_id: M2OM_HUMAN | Accession: O23066 |
| Gi_number: 400210 | Swissprot_id: C862_ARATH |
| Description: MITOCHONDRIAL 2- | Gi_number: 5915846 |
| OXOGLUTARATE/MALATE CARRIER | Description: Cytochrome P450 86A2 |
| PROTEIN (OGCP) | Seq ID: 1237 |
| Seq ID: 402 | Accession: Q41144 |
| Accession: P28284 | Swissprot_id: STC_RICCO |
| Swissprot_id: ICP0_HSV2H | Gi_number: 3915039 |
| Gi_number: 124135 | Description: SUGAR CARRIER |
| Description: Trans-acting transcriptional | PROTEIN C |
| protein ICP0 (VMW118 protein) | Seq ID: 1238 |
| Seq ID: 403 | Accession: O88508 |
| Accession: Q9SK53 | Swissprot_id: DM3A_MOUSE |
| Swissprot_id: COL8_ARATH | Gi_number: 17374900 |
| Gi_number: 17433082 | Description: DNA (cytosine-5)- |
| Description: Zinc finger protein constans- | methyltransferase 3A (DNA |
| like 8 | methyltransferase MmuIIIA) |
| Seq ID: 404 | (DNA MTase MmuIIIA) (M.MmuIIIA) |
| Accession: P93236 | Seq ID: 1239 |
| Swissprot_id: ABA2_LYCES | Accession: Q42534 |
| Gi_number: 5902706 | Swissprot_id: PME2_ARATH |
| Description: Zeaxanthin epoxidase, | Gi_number: 17865767 |
| chloroplast precursor | Description: Pectinesterase 2 precursor |
| Seq ID: 405 | (Pectin methylesterase 2) (PE |
| Accession: Q9SSU8 | 2) |
| Swissprot_id: PSY_DAUCA | Seq ID: 1240 |
| Gi_number: 8928282 | Accession: P13526 |
| Description: Phytoene synthase, | Swissprot_id: ARLC_MAIZE |
| chloroplast precursor | Gi_number: 114156 |
| Seq ID: 406 | Description: ANTHOCYANIN |
| Accession: P37821 | REGULATORY LC PROTEIN |
| Swissprot_id: 1A1C_MALDO | Seq ID: 1241 |
| Gi_number: 3041658 | Accession: O00401 |
| Description: 1- | Swissprot_id: WASL_HUMAN |
| AMINOCYCLOPROPANE-1- | Gi_number: 13431960 |
| CARBOXYLATE SYNTHASE (ACC | Description: Neural Wiskott-Aldrich |
| SYNTHASE) | syndrome protein (N-WASP) |
| (S-ADENOSYL-L- | Seq ID: 1242 |
| METHIONINE | Accession: Q02817 |
| METHYLTHIOADENOSINE-LYASE) | Swissprot_id: MUC2_HUMAN |
| Seq ID: 408 | Gi_number: 2506877 |
| Accession: P48125 | Description: MUCIN 2 PRECURSOR |
| Swissprot_id: RK1_CYAPA | (INTESTINAL MUCIN 2) |
| Gi_number: 1350623 | Seq ID: 1243 |
| Description: Cyanelle 50S ribosomal | Accession: P34693 |
| protein L1 | Swissprot_id: SYT1_CAEEL |
| Seq ID: 410 | Gi_number: 464829 |
| Accession: Q9WZV3 | Description: SYNAPTOTAGMIN I |
| Swissprot_id: DNAJ_THEMA | Seq ID: 1244 |
| Gi_number: 11132549 | Accession: P21997 |
| Description: Chaperone protein dnaJ | Swissprot_id: SSGP_VOLCA |
| Seq ID: 411 | Gi_number: 134920 |
| Accession: P29344 | Description: SULFATED SURFACE |
| Swissprot_id: RR1_SPIOL | GLYCOPROTEIN 185 (SSG 185) |
| Gi_number: 133872 | Seq ID: 1245 |
| Description: 30S ribosomal protein S1, | Accession: P25777 |
| chloroplast precursor (CS1) | Swissprot_id: ORYB_ORYSA |
| Seq ID: 414 | Gi_number: 129232 |
| Accession: Q42463 | Description: ORYZAIN BETA CHAIN |
| Swissprot_id: DCL_LYCES | PRECURSOR |
| Gi_number: 6014934 | Seq ID: 1246 |
| Description: DCL PROTEIN, | Accession: P16166 |
| CHLOROPLAST PRECURSOR | Swissprot_id: UFO1_MAIZE |
| (DEFECTIVE CHLOROPLASTS | Gi_number: 136743 |
| AND LEAVES PROTEIN) | Description: Flavonol 3-O- |
| Seq ID: 415 | glucosyltransferase (UDP-glucose |
| Accession: Q08298 | flavonoid |
| Swissprot_id: RD22_ARATH | 3-O-glucosyltransferase) (Bronze- |
| Gi_number: 1172874 | 1) (BZ-MCC allele) |
| Description: DEHYDRATION- | Seq ID: 1247 |
| RESPONSIVE PROTEIN RD22 | Accession: Q42586 |
| PRECURSOR | Swissprot_id: PYR5_ARATH |
| Seq ID: 416 | Gi_number: 2499945 |
| Accession: P23326 | Description: Uridine 5′-monophosphate |
| Swissprot_id: RK35_SPIOL | synthase (UMP synthase) |
| Gi_number: 132918 | [Includes: Orotate |
| Description: 50S RIBOSOMAL PROTEIN | phosphoribosyltransferase (OPRtase); |
| L35, CHLOROPLAST PRECURSOR | Orotidine 5′-phosphate |
| (CL35) | decarboxylase (OMPdecase)] |
| Seq ID: 417 | Seq ID: 1248 |
| Accession: O59742 | Accession: O42904 |
| Swissprot_id: IF3X_SCHPO | Swissprot_id: PR31_SCHPO |
| Gi_number: 14916997 | Gi_number: 12230414 |
| Description: Probable eukaryotic | Description: Pre-mRNA splicing factor |
| translation initiation factor 3 135 | prp31 |
| kDa subunit (eIF3 p135) | Seq ID: 1250 |
| (Translation initiation factor | Accession: P54001 |
| eIF3, p135 subunit) | Swissprot_id: P4HA_RAT |
| Seq ID: 418 | Gi_number: 1709530 |
| Accession: O54408 | Description: PROLYL 4- |
| Swissprot_id: RELA_BACSU | HYDROXYLASE ALPHA SUBUNIT |
| Gi_number: 6647736 | PRECURSOR |
| Description: GTP | Seq ID: 1251 |
| PYROPHOSPHOKINASE (ATP: GTP 3′- | Accession: P25011 |
| PYROPHOSPHOTRANSFERASE) | Swissprot_id: CG21_SOYBN |
| (PPGPP SYNTHETASE I) | Gi_number: 116157 |
| ((P)PPGPP SYNTHETASE) | Description: G2/mitotic-specific cyclin |
| Seq ID: 419 | S13-6 (B-like cyclin) |
| Accession: Q9SHI1 | Seq ID: 1252 |
| Swissprot_id: IF2C_ARATH | Accession: Q99615 |
| Gi_number: 13627881 | Swissprot_id: TTC2_HUMAN |
| Description: Translation initiation factor | Gi_number: 6831707 |
| IF-2, chloroplast precursor | Description: TETRATRICOPEPTIDE |
| Seq ID: 420 | REPEAT PROTEIN 2 (TPR REPEAT |
| Accession: Q9JIK5 | PROTEIN 2) |
| Swissprot_id: DD21_MOUSE | Seq ID: 1253 |
| Gi_number: 13959325 | Accession: P16081 |
| Description: NUCLEOLAR RNA | Swissprot_id: NIA1_ORYSA |
| HELICASE II (NUCLEOLAR RNA | Gi_number: 128186 |
| HELICASE GU) (RH | Description: NITRATE REDUCTASE 1 |
| II/GU) (DEAD BOX PROTEIN | (NR1) |
| 21) | Seq ID: 1254 |
| Seq ID: 421 | Accession: P49299 |
| Accession: P14328 | Swissprot_id: CYSZ_CUCMA |
| Swissprot_id: SP96_DICDI | Gi_number: 1345933 |
| Gi_number: 134780 | Description: CITRATE SYNTHASE, |
| Description: SPORE COAT PROTEIN | GLYOXYSOMAL PRECURSOR (GCS) |
| SP96 | Seq ID: 1255 |
| Seq ID: 422 | Accession: P32857 |
| Accession: O81117 | Swissprot_id: PTM1_YEAST |
| Swissprot_id: C941_VICSA | Gi_number: 417551 |
| Gi_number: 17366212 | Description: Protein PTM1 precursor |
| Description: Cytochrome P450 94A1 | Seq ID: 1256 |
| (P450-dependent fatty acid | Accession: P41214 |
| omega-hydroxylase) | Swissprot_id: LIGA_HUMAN |
| Seq ID: 423 | Gi_number: 13638201 |
| Accession: P37107 | Description: LIGATIN |
| Swissprot_id: SR5C_ARATH | (HEPATOCELLULAR CARCINOMA- |
| Gi_number: 586038 | ASSOCIATED ANTIGEN 56) |
| Description: Signal recognition particle 54 | Seq ID: 1257 |
| kDa protein, chloroplast | Accession: P27483 |
| precursor (SRP54) (54 chloroplast | Swissprot_id: GRP_ARATH |
| protein) (54CP) (FFC) | Gi_number: 121640 |
| Seq ID: 424 | Description: GLYCINE-RICH CELL |
| Accession: Q59914 | WALL STRUCTURAL PROTEIN |
| Swissprot_id: HRDD_STRGR | PRECURSOR |
| Gi_number: 17366575 | Seq ID: 1259 |
| Description: RNA polymerase principal | Accession: P10978 |
| sigma factor hrdD | Swissprot_id: POLX_TOBAC |
| Seq ID: 425 | Gi_number: 130582 |
| Accession: P42895 | Description: Retrovirus-related Pol |
| Swissprot_id: ENO2_MAIZE | polyprotein from transposon TNT |
| Gi_number: 1169528 | 1-94 [Contains: Protease; |
| Description: ENOLASE 2 (2- | Reverse transcriptase; |
| PHOSPHOGLYCERATE | Endonuclease] |
| DEHYDRATASE 2) | Seq ID: 1260 |
| (2-PHOSPHO-D-GLYCERATE | Accession: Q9R9N3 |
| HYDRO-LYASE 2) | Swissprot_id: ODP2_RHIME |
| Seq ID: 426 | Gi_number: 8474223 |
| Accession: P38564 | Description: Dihydrolipoamide |
| Swissprot_id: MNBA_MAIZE | acetyltransferase component of pyruvate |
| Gi_number: 1346559 | dehydrogenase complex (E2) |
| Description: DNA-BINDING PROTEIN | Seq ID: 1261 |
| MNB1A | Accession: P09406 |
| Seq ID: 427 | Swissprot_id: RU17_XENLA |
| Accession: O49939 | Gi_number: 134091 |
| Swissprot_id: TL40_SPIOL | Description: U1 small nuclear |
| Gi_number: 10720315 | ribonucleoprotein 70 kDa (U1 snRNP 70 kDa) |
| Description: Peptidyl-prolyl cis-trans | (snRNP70) (U1-70K) |
| isomerase, chloroplast precursor | Seq ID: 1262 |
| (40 kDa thylakoid lumen PPIase) | Accession: P27937 |
| (40 kDa thylakoid lumen | Swissprot_id: AM3B_ORYSA |
| rotamase) | Gi_number: 113680 |
| Seq ID: 429 | Description: ALPHA-AMYLASE |
| Accession: O67695 | ISOZYME 3B PRECURSOR (1,4- |
| Swissprot_id: RF2_AQUAE | ALPHA-D-GLUCAN |
| Gi_number: 6225943 | GLUCANOHYDROLASE) |
| Description: Peptide chain release factor 2 | Seq ID: 1263 |
| (RF-2) | Accession: P06865 |
| Seq ID: 430 | Swissprot_id: HEXA_HUMAN |
| Accession: P32945 | Gi_number: 123079 |
| Swissprot_id: PPQ1_YEAST | Description: Beta-hexosaminidase alpha |
| Gi_number: 417746 | chain precursor |
| Description: SERINE/THREONINE | (N-acetyl-beta-glucosaminidase) |
| PROTEIN PHOSPHATASE PPQ | (Beta-N-acetylhexosaminidase) |
| Seq ID: 432 | (Hexosaminidase A) |
| Accession: Q9MUU5 | Seq ID: 1264 |
| Swissprot_id: RK5_MESVI | Accession: Q42798 |
| Gi_number: 14548222 | Swissprot_id: C931_SOYBN |
| Description: Chloroplast 50S ribosomal | Gi_number: 3913192 |
| protein L5 | Description: CYTOCHROME P450 93A1 |
| Seq ID: 433 | Seq ID: 1265 |
| Accession: Q02817 | Accession: P09406 |
| Swissprot_id: MUC2_HUMAN | Swissprot_id: RU17_XENLA |
| Gi_number: 2506877 | Gi_number: 134091 |
| Description: MUCIN 2 PRECURSOR | Description: U1 small nuclear |
| (INTESTINAL MUCIN 2) | ribonucleoprotein 70 kDa (U1 snRNP 70 kDa) |
| Seq ID: 434 | (snRNP70) (U1-70K) |
| Accession: O94903 | Seq ID: 1266 |
| Swissprot_id: POSC_HUMAN | Accession: P08640 |
| Gi_number: 12230426 | Swissprot_id: AMYH_YEAST |
| Description: Proline synthetase co- | Gi_number: 728850 |
| transcribed bacterial homolog | Description: GLUCOAMYLASE S1/S2 |
| protein | PRECURSOR (GLUCAN |
| Seq ID: 435 | 1,4-ALPHA-GLUCOSIDASE) |
| Accession: P57708 | (1,4-ALPHA-D-GLUCAN |
| Swissprot_id: ISPF_PSEAE | GLUCOHYDROLASE) |
| Gi_number: 12643672 | Seq ID: 1267 |
| Description: 2C-METHYL-D- | Accession: O95405 |
| ERYTHRITOL 2,4- | Swissprot_id: MADI_HUMAN |
| CYCLODIPHOSPHATE SYNTHASE | Gi_number: 15214067 |
| (MECPS) | Description: MOTHERS AGAINST |
| Seq ID: 436 | DECAPENTAPLEGIC HOMOLOG |
| Accession: Q9SEC2 | INTERACTING |
| Swissprot_id: MSRA_LACSA | PROTEIN (MADH- |
| Gi_number: 12230349 | INTERACTING PROTEIN) (SMAD |
| Description: Peptide methionine sulfoxide | ANCHOR FOR |
| reductase | RECEPTOR ACTIVATION) |
| (Protein-methionine-S-oxide | (RECEPTOR ACTIVATION ANCHOR) |
| reductase) (Peptide Met(O) | (HSARA) |
| reductase) | (NOVEL SERINE PROTEASE) |
| Seq ID: 439 | (NSP) |
| Accession: Q9WZV3 | Seq ID: 1268 |
| Swissprot_id: DNAJ_THEMA | Accession: P21997 |
| Gi_number: 11132549 | Swissprot_id: SSGP_VOLCA |
| Description: Chaperone protein dnaJ | Gi_number: 134920 |
| Seq ID: 440 | Description: SULFATED SURFACE |
| Accession: P30260 | GLYCOPROTEIN 185 (SSG 185) |
| Swissprot_id: CC27_HUMAN | Seq ID: 1269 |
| Gi_number: 12644198 | Accession: Q05859 |
| Description: PROTEIN CDC27HS (CELL | Swissprot_id: FOR4_MOUSE |
| DIVISION CYCLE PROTEIN 27 | Gi_number: 544344 |
| HOMOLOG) | Description: FORMIN 4 (LIMB |
| (H-NUC) | DEFORMITY PROTEIN) |
| Seq ID: 441 | Seq ID: 1270 |
| Accession: O46894 | Accession: O04940 |
| Swissprot_id: RK3_GUITH | Swissprot_id: CDS1_SOLTU |
| Gi_number: 3914660 | Gi_number: 3121837 |
| Description: CHLOROPLAST 50S | Description: PHOSPHATIDATE |
| RIBOSOMAL PROTEIN L3 | CYTIDYLYLTRANSFERASE (CDP- |
| Seq ID: 442 | DIGLYCERIDE |
| Accession: P25864 | SYNTHETASE) (CDP- |
| Swissprot_id: RK9_ARATH | DIGLYCERIDE |
| Gi_number: 133028 | PYROPHOSPHORYLASE) |
| Description: 50S ribosomal protein L9, | (CDP-DIACYLGLYCEROL |
| chloroplast precursor (CL9) | SYNTHASE) (CDS) |
| Seq ID: 443 | (CTP: PHOSPHATIDATE |
| Accession: Q03211 | CYTIDYLYLTRANSFERASE) |
| Swissprot_id: EXLP_TOBAC | (CDP-DAG SYNTHASE) (CDP-DG |
| Gi_number: 544262 | SYNTHETASE) |
| Description: PISTIL-SPECIFIC | Seq ID: 1271 |
| EXTENSIN-LIKE PROTEIN | Accession: Q46948 |
| PRECURSOR (PELP) | Swissprot_id: THIJ_ECOLI |
| Seq ID: 446 | Gi_number: 6686342 |
| Accession: O59742 | Description: 4-methyl-5(B-hydroxyethyl)- |
| Swissprot_id: IF3X_SCHPO | thiazole monophosphate |
| Gi_number: 14916997 | biosynthesis enzyme |
| Description: Probable eukaryotic | Seq ID: 1272 |
| translation initiation factor 3 135 | Accession: P15268 |
| kDa subunit (eIF3 p135) | Swissprot_id: MOSA_MAIZE |
| (Translation initiation factor | Gi_number: 127243 |
| eIF3, p135 subunit) | Description: AUTONOMOUS |
| Seq ID: 447 | TRANSPOSABLE ELEMENT EN-1 |
| Accession: P74070 | MOSAIC PROTEIN |
| Swissprot_id: EFTS_SYNY3 | (SUPPRESSOR-MUTATOR |
| Gi_number: 2494280 | SYSTEM PROTEIN) (SPM) |
| Description: Elongation factor Ts (EF-Ts) | Seq ID: 1274 |
| Seq ID: 448 | Accession: P34881 |
| Accession: Q42546 | Swissprot_id: DNM1_ARATH |
| Swissprot_id: DPNP_ARATH | Gi_number: 462650 |
| Gi_number: 3913518 | Description: DNA (cytosine-5)- |
| Description: 3′(2′),5′-bisphosphate | methyltransferase AthI (DNA |
| nucleotidase | methyltransferase AthI) (DNA |
| (3′(2′),5-bisphosphonucleoside | Metase AthI) (M. AthI) |
| 3′(2′)-phosphohydrolase) | Seq ID: 1276 |
| (DPNPase) | Accession: Q58849 |
| Seq ID: 449 | Swissprot_id: AROD_METJA |
| Accession: Q55806 | Gi_number: 11386641 |
| Swissprot_id: SYT_SYNY3 | Description: 3-dehydroquinate dehydratase |
| Gi_number: 2501062 | (3-dehydroquinase) (Type I |
| Description: Threonyl-tRNA synthetase | DHQase) |
| (Threonine--tRNA ligase) (ThrRS) | Seq ID: 1277 |
| Seq ID: 450 | Accession: P55039 |
| Accession: P21997 | Swissprot_id: DRG2_HUMAN |
| Swissprot_id: SSGP_VOLCA | Gi_number: 1706518 |
| Gi_number: 134920 | Description: Developmentally regulated |
| Description: SULFATED SURFACE | GTP-binding protein 2 (DRG 2) |
| GLYCOPROTEIN 185 (SSG 185) | Seq ID: 1278 |
| Seq ID: 451 | Accession: P18161 |
| Accession: P40477 | Swissprot_id: KYK2_DICDI |
| Swissprot_id: N159_YEAST | Gi_number: 125874 |
| Gi_number: 731862 | Description: TYROSINE-PROTEIN |
| Description: Nucleoporin NUP159 | KINASE 2 |
| (Nuclear pore protein NUP159) | Seq ID: 1279 |
| Seq ID: 453 | Accession: Q02817 |
| Accession: P51106 | Swissprot_id: MUC2_HUMAN |
| Swissprot_id: DFRA_HORVU | Gi_number: 2506877 |
| Gi_number: 1706372 | Description: MUCIN 2 PRECURSOR |
| Description: DIHYDROFLAVONOL-4- | (INTESTINAL MUCIN 2) |
| REDUCTASE (DFR) | Seq ID: 1280 |
| (DIHYDROKAEMPFEROL | Accession: Q01594 |
| 4-REDUCTASE) | Swissprot_id: ALLN_ALLSA |
| Seq ID: 454 | Gi_number: 399028 |
| Accession: P11893 | Description: ALLIIN LYASE |
| Swissprot_id: RK24_PEA | PRECURSOR (ALLIINASE) (CYSTEINE |
| Gi_number: 132819 | SULPHOXIDE |
| Description: 50S RIBOSOMAL PROTEIN | LYASE) |
| L24, CHLOROPLAST PRECURSOR | Seq ID: 1281 |
| (CL24) | Accession: O87708 |
| Seq ID: 455 | Swissprot_id: CLPX_CAUCR |
| Accession: P37370 | Gi_number: 6225165 |
| Swissprot_id: VRP1_YEAST | Description: ATP-dependent Clp protease |
| Gi_number: 2507155 | ATP-binding subunit clpX |
| Description: VERPROLIN | Seq ID: 1282 |
| Seq ID: 456 | Accession: O43791 |
| Accession: P82244 | Swissprot_id: SPOP_HUMAN |
| Swissprot_id: RK34_SPIOL | Gi_number: 8134708 |
| Gi_number: 14285713 | Description: Speckle-type POZ protein |
| Description: 50S ribosomal protein L34, | Seq ID: 1283 |
| chloroplast precursor | Accession: O43791 |
| Seq ID: 457 | Swissprot_id: SPOP_HUMAN |
| Accession: Q13823 | Gi_number: 8134708 |
| Swissprot_id: NGP1_HUMAN | Description: Speckle-type POZ protein |
| Gi_number: 3334276 | Seq ID: 1284 |
| Description: Autoantigen NGP-1 | Accession: P17731 |
| Seq ID: 458 | Swissprot_id: HIS8_BACSU |
| Accession: Q12238 | Gi_number: 3123224 |
| Swissprot_id: UV31_SCHPO | Description: HISTIDINOL-PHOSPHATE |
| Gi_number: 3024789 | AMINOTRANSFERASE (IMIDAZOLE |
| Description: UV-INDUCED PROTEIN | ACETOL-PHOSPHATE |
| UVI31 | TRANSAMINASE) |
| Seq ID: 459 | Seq ID: 1285 |
| Accession: Q42569 | Accession: O08333 |
| Swissprot_id: C901_ARATH | Swissprot_id: K6P1_STRCO |
| Gi_number: 5915851 | Gi_number: 3122290 |
| Description: Cytochrome P450 90A1 | Description: 6-phosphofructokinase 1 |
| Seq ID: 461 | (Phosphofructokinase 1) |
| Accession: P11892 | (Phosphohexokinase 1) (ATP- |
| Swissprot_id: RK25_PEA | PFK) |
| Gi_number: 132825 | Seq ID: 1286 |
| Description: 50S RIBOSOMAL PROTEIN | Accession: Q12196 |
| CL25, CHLOROPLAST PRECURSOR | Swissprot_id: RIO1_YEAST |
| Seq ID: 462 | Gi_number: 2500508 |
| Accession: P78426 | Description: RIO1 PROTEIN |
| Swissprot_id: HK61_HUMAN | Seq ID: 1287 |
| Gi_number: 6016211 | Accession: Q02817 |
| Description: HOMEOBOX PROTEIN | Swissprot_id: MUC2_HUMAN |
| NKX-6.1 | Gi_number: 2506877 |
| Seq ID: 463 | Description: MUCIN 2 PRECURSOR |
| Accession: P08640 | (INTESTINAL MUCIN 2) |
| Swissprot_id: AMYH_YEAST | Seq ID: 1288 |
| Gi_number: 728850 | Accession: O43791 |
| Description: GLUCOAMYLASE S1/S2 | Swissprot_id: SPOP_HUMAN |
| PRECURSOR (GLUCAN | Gi_number: 8134708 |
| 1,4-ALPHA-GLUCOSIDASE) | Description: Speckle-type POZ protein |
| (1,4-ALPHA-D-GLUCAN | Seq ID: 1289 |
| GLUCOHYDROLASE) | Accession: P49972 |
| Seq ID: 464 | Swissprot_id: SR52_LYCES |
| Accession: P16301 | Gi_number: 1711512 |
| Swissprot_id: LCAT_MOUSE | Description: SIGNAL RECOGNITION |
| Gi_number: 125994 | PARTICLE 54 KD PROTEIN 2 (SRP54) |
| Description: PHOSPHATIDYLCHOLINE- | Seq ID: 1290 |
| STEROL ACYLTRANSFERASE | Accession: P43293 |
| PRECURSOR | Swissprot_id: NAK_ARATH |
| (LECITHIN-CHOLESTEROL | Gi_number: 1171642 |
| ACYLTRANSFERASE) | Description: Probable serine/threonine- |
| (PHOSPHOLIPID- | protein kinase NAK |
| CHOLESTEROL ACYLTRANSFERASE) | Seq ID: 1291 |
| Seq ID: 465 | Accession: P48612 |
| Accession: P43293 | Swissprot_id: PELO_DROME |
| Swissprot_id: NAK_ARATH | Gi_number: 1352736 |
| Gi_number: 1171642 | Description: PELOTA PROTEIN |
| Description: Probable serine/threonine- | Seq ID: 1292 |
| protein kinase NAK | Accession: P55081 |
| Seq ID: 466 | Swissprot_id: MFA1_HUMAN |
| Accession: O04226 | Gi_number: 1709012 |
| Swissprot_id: P5CS_ORYSA | Description: Microfibrillar-associated |
| Gi_number: 6225820 | protein 1 |
| Description: Delta 1-pyrroline-5- | Seq ID: 1293 |
| carboxylate synthetase (P5CS) | Accession: Q08466 |
| [Includes: Glutamate 5-kinase | Swissprot_id: KC22_ARATH |
| (Gamma-glutamyl kinase) | Gi_number: 13638265 |
| (GK); Gamma-glutamyl | Description: CASEIN KINASE II, ALPHA |
| phosphate reductase (GPR) | CHAIN 2 (CK II) |
| (Glutamate-5-semialdehyde | Seq ID: 1294 |
| dehydrogenase) | Accession: Q42712 |
| (Glutamyl-gamma-semialdehyde | Swissprot_id: FATA_CORSA |
| dehydrogenase)] | Gi_number: 8469219 |
| Seq ID: 467 | Description: Oleoyl-acyl carrier protein |
| Accession: O81395 | thioesterase, chloroplast |
| Swissprot_id: DRTS_MAIZE | precursor (18:0-acyl-carrier |
| Gi_number: 6685381 | protein thioesterase) |
| Description: BIFUNCTIONAL | (18:0-ACP thioesterase) (Acyl- |
| DIHYDROFOLATE REDUCTASE- | [acyl-carrier protein] |
| THYMIDYLATE SYNTHASE | hydrolase) (Fragment) |
| (DHFR-TS) [INCLUDES: | Seq ID: 1295 |
| DIHYDROFOLATE REDUCTASE; | Accession: P41892 |
| THYMIDYLATE | Swissprot_id: CC7_SCHPO |
| SYNTHASE] | Gi_number: 1168817 |
| Seq ID: 468 | Description: Cell division control protein 7 |
| Accession: P42566 | Seq ID: 1296 |
| Swissprot_id: EP15_HUMAN | Accession: P43035 |
| Gi_number: 1169540 | Swissprot_id: LIS1_MOUSE |
| Description: Epidermal growth factor | Gi_number: 1170795 |
| receptor substrate 15 (Protein | Description: PLATELET-ACTIVATING |
| EPS15) (AF-1P protein) | FACTOR ACETYLHYDROLASE IB |
| Seq ID: 470 | ALPHA |
| Accession: P52306 | SUBUNIT (PAF |
| Swissprot_id: GDS1_HUMAN | ACETYLHYDROLASE 45 KDA |
| Gi_number: 1707895 | SUBUNIT) (PAF-AH 45 KDA |
| Description: RAP1 GTPASE-GDP | SUBUNIT) (PAF-AH |
| DISSOCIATION STIMULATOR 1 (SMG | ALPHA) (PAFAH ALPHA) |
| P21 | (LISSENCEPHALY-1 |
| STIMULATORY GDP/GTP | PROTEIN) (LIS-1) |
| EXCHANGE PROTEIN) (SMG GDS | Seq ID: 1297 |
| PROTEIN) | Accession: P22503 |
| Seq ID: 471 | Swissprot_id: GUN_PHAVU |
| Accession: P38631 | Gi_number: 1346225 |
| Swissprot_id: GLS1_YEAST | Description: ENDOGLUCANASE |
| Gi_number: 1346146 | PRECURSOR (ENDO-1,4-BETA- |
| Description: 1,3-BETA-GLUCAN | GLUCANASE) |
| SYNTHASE COMPONENT GLS1 | (ABSCISSION CELLULASE) |
| (1,3-BETA-D-GLUCAN-UDP | Seq ID: 1298 |
| GLUCOSYLTRANSFERASE) (CND1 | Accession: P95982 |
| PROTEIN) | Swissprot_id: SYY_SULSO |
| (CWN53 PROTEIN) (FKS1 | Gi_number: 2501078 |
| PROTEIN) (PAPULACANDIN B | Description: Tyrosyl-tRNA synthetase |
| SENSITIVITY | (Tyrosine--tRNA ligase) (TyrRS) |
| PROTEIN 1) | Seq ID: 1300 |
| Seq ID: 472 | Accession: O49923 |
| Accession: Q42510 | Swissprot_id: ADK_PHYPA |
| Swissprot_id: EM30_ARATH | Gi_number: 17366025 |
| Gi_number: 2498329 | Description: Adenosine kinase (AK) |
| Description: PATTERN FORMATION | (Adenosine 5′-phosphotransferase) |
| PROTEIN EMB30 | Seq ID: 1301 |
| Seq ID: 473 | Accession: O08816 |
| Accession: P47735 | Swissprot_id: WASL_RAT |
| Swissprot_id: RLK5_ARATH | Gi_number: 13431956 |
| Gi_number: 1350783 | Description: Neural Wiskott-Aldrich |
| Description: Receptor-like protein kinase 5 | syndrome protein (N-WASP) |
| precursor | Seq ID: 1302 |
| Seq ID: 474 | Accession: Q99KV1 |
| Accession: P20305 | Swissprot_id: DJBB_MOUSE |
| Swissprot_id: GELS_PIG | Gi_number: 17375610 |
| Gi_number: 121118 | Description: DnaJ homolog subfamily B |
| Description: Gelsolin precursor, plasma | member 11 precursor |
| (Actin-depolymerizing factor) | Seq ID: 1305 |
| (ADF) (Brevin) | Accession: Q99758 |
| Seq ID: 475 | Swissprot_id: ABC3_HUMAN |
| Accession: P46607 | Gi_number: 7387524 |
| Swissprot_id: HGL2_ARATH | Description: ATP-binding cassette, sub- |
| Gi_number: 2506525 | family A, member 3 (ATP-binding |
| Description: Homeobox protein | cassette transporter 3) (ATP- |
| GLABRA2 (Homeobox-leucine zipper | binding cassette 3) (ABC-C |
| protein | transporter) |
| ATHB-10) (HD-ZIP protein | Seq ID: 1307 |
| ATHB-10) | Accession: P43291 |
| Seq ID: 477 | Swissprot_id: ASK1_ARATH |
| Accession: P40541 | Gi_number: 1168529 |
| Swissprot_id: IRR1_YEAST | Description: Serine/threonine-protein |
| Gi_number: 731791 | kinase ASK1 |
| Description: IRR1 PROTEIN | Seq ID: 1309 |
| Seq ID: 478 | Accession: P42730 |
| Accession: P18493 | Swissprot_id: H101_ARATH |
| Swissprot_id: PPOL_BOVIN | Gi_number: 1170149 |
| Gi_number: 130779 | Description: HEAT SHOCK PROTEIN |
| Description: POLY [ADP-RIBOSE] | 101 |
| POLYMERASE (PARP) (ADPRT) | Seq ID: 1310 |
| (NAD(+) | Accession: P30148 |
| ADP- | Swissprot_id: TALB_ECOLI |
| RIBOSYLTRANSFERASE) (POLY[ADP- | Gi_number: 401158 |
| RIBOSE] SYNTHETASE) | Description: Transaldolase B |
| Seq ID: 479 | Seq ID: 1311 |
| Accession: P15792 | Accession: P37370 |
| Swissprot_id: KPK1_PHAVU | Swissprot_id: VRP1_YEAST |
| Gi_number: 125568 | Gi_number: 2507155 |
| Description: Protein kinase PVPK-1 | Description: VERPROLIN |
| Seq ID: 480 | Seq ID: 1312 |
| Accession: P48980 | Accession: Q9X1I8 |
| Swissprot_id: BGAL_LYCES | Swissprot_id: KAD_THEMA |
| Gi_number: 1352077 | Gi_number: 9910756 |
| Description: Beta-galactosidase precursor | Description: Adenylate kinase (ATP-AMP |
| (Lactase) | transphosphorylase) |
| (EXO-(1-->4)-beta-D- | Seq ID: 1313 |
| galactanase) | Accession: P03211 |
| Seq ID: 481 | Swissprot_id: EBN1_EBV |
| Accession: O60610 | Gi_number: 119110 |
| Swissprot_id: DIA1_HUMAN | Description: EBNA-1 NUCLEAR |
| Gi_number: 6225268 | PROTEIN |
| Description: DIAPHANOUS PROTEIN | Seq ID: 1314 |
| HOMOLOG 1 (DIAPHANOUS- | Accession: Q04629 |
| RELATED FORMIN 1) | Swissprot_id: PSLA_YEAST |
| (DRF1) | Gi_number: 18202481 |
| Seq ID: 482 | Description: PSL10 protein |
| Accession: P39014 | Seq ID: 1315 |
| Swissprot_id: MT30_YEAST | Accession: P70315 |
| Gi_number: 730077 | Swissprot_id: WASP_MOUSE |
| Description: MET30 protein | Gi_number: 2499130 |
| Seq ID: 484 | Description: Wiskott-Aldrich syndrome |
| Accession: Q01577 | protein homolog (WASP) |
| Swissprot_id: PKPA_PHYBL | Seq ID: 1316 |
| Gi_number: 3122617 | Accession: Q9D832 |
| Description: Serine/threonine protein | Swissprot_id: DJB4_MOUSE |
| kinase PKPA | Gi_number: 18202849 |
| Seq ID: 485 | Description: DnaJ homolog subfamily B |
| Accession: P29141 | member 4 |
| Swissprot_id: SUBV_BACSU | Seq ID: 1318 |
| Gi_number: 135023 | Accession: O07597 |
| Description: Minor extracellular protease | Swissprot_id: DAAA_BACSU |
| VPR precursor | Gi_number: 3121979 |
| Seq ID: 486 | Description: D-alanine aminotransferase |
| Accession: P47735 | (D-aspartate aminotransferase) |
| Swissprot_id: RLK5_ARATH | (D-amino acid aminotransferase) |
| Gi_number: 1350783 | (D-amino acid |
| Description: Receptor-like protein kinase 5 | transaminase) (DAAT) |
| precursor | Seq ID: 1319 |
| Seq ID: 487 | Accession: P13686 |
| Accession: P51849 | Swissprot_id: PPA5_HUMAN |
| Swissprot_id: DCP3_ORYSA | Gi_number: 130722 |
| Gi_number: 1706331 | Description: Tartrate-resistant acid |
| Description: PYRUVATE | phosphatase type 5 precursor |
| DECARBOXYLASE ISOZYME 3 (PDC) | (TR-AP) (Tartrate-resistant acid |
| Seq ID: 488 | ATPase) (TrATPase) |
| Accession: Q43207 | Seq ID: 1320 |
| Swissprot_id: FKB7_WHEAT | Accession: P06921 |
| Gi_number: 3023751 | Swissprot_id: VE2_HPV05 |
| Description: 70 kDa peptidylprolyl | Gi_number: 1352839 |
| isomerase (Peptidylprolyl cis-trans | Description: REGULATORY PROTEIN |
| isomerase) (Cyclophilin) (PPiase) | E2 |
| Seq ID: 489 | Seq ID: 1321 |
| Accession: P47997 | Accession: P29518 |
| Swissprot_id: G11A_ORYSA | Swissprot_id: BT1_MAIZE |
| Gi_number: 1346057 | Gi_number: 231654 |
| Description: Protein kinase G11A | Description: Brittle-1 protein, chloroplast |
| Seq ID: 490 | precursor |
| Accession: O15523 | Seq ID: 1322 |
| Swissprot_id: DDXY_HUMAN | Accession: Q12899 |
| Gi_number: 6014945 | Swissprot_id: Z173_HUMAN |
| Description: DEAD-box protein 3, Y- | Gi_number: 17380344 |
| chromosomal | Description: Zinc finger protein 173 (Acid |
| Seq ID: 491 | finger protein) (AFP) |
| Accession: Q38997 | Seq ID: 1323 |
| Swissprot_id: KI10_ARATH | Accession: P74667 |
| Gi_number: 6166239 | Swissprot_id: DAPF_SYNY3 |
| Description: SNF1-related protein kinase | Gi_number: 2494041 |
| KIN10 (AKIN10) | Description: Diaminopimelate epimerase |
| Seq ID: 492 | (DAP epimerase) |
| Accession: P52707 | Seq ID: 1324 |
| Swissprot_id: MDL3_PRUSE | Accession: P93531 |
| Gi_number: 1708972 | Swissprot_id: C7D7_SOLCH |
| Description: (R)-MANDELONITRILE | Gi_number: 5915836 |
| LYASE ISOFORM 3 PRECURSOR | Description: CYTOCHROME P450 71D7 |
| (HYDROXYNITRILE LYASE 3) | Seq ID: 1325 |
| ((R)-OXYNITRILASE 3) | Accession: P52425 |
| Seq ID: 493 | Swissprot_id: GPDA_CUPLA |
| Accession: Q02817 | Gi_number: 1708025 |
| Swissprot_id: MUC2_HUMAN | Description: GLYCEROL-3-PHOSPHATE |
| Gi_number: 2506877 | DEHYDROGENASE [NAD+] |
| Description: MUCIN 2 PRECURSOR | Seq ID: 1326 |
| (INTESTINAL MUCIN 2) | Accession: Q01042 |
| Seq ID: 494 | Swissprot_id: IE68_HSVSA |
| Accession: P38631 | Gi_number: 266334 |
| Swissprot_id: GLS1_YEAST | Description: IMMEDIATE-EARLY |
| Gi_number: 1346146 | PROTEIN |
| Description: 1,3-BETA-GLUCAN | Seq ID: 1327 |
| SYNTHASE COMPONENT GLS1 | Accession: P21997 |
| (1,3-BETA-D-GLUCAN-UDP | Swissprot_id: SSGP_VOLCA |
| GLUCOSYLTRANSFERASE) (CND1 | Gi_number: 134920 |
| PROTEIN) | Description: SULFATED SURFACE |
| (CWN53 PROTEIN) (FKS1 | GLYCOPROTEIN 185 (SSG 185) |
| PROTEIN) (PAPULACANDIN B | Seq ID: 1329 |
| SENSITIVITY | Accession: P10978 |
| PROTEIN 1) | Swissprot_id: POLX_TOBAC |
| Seq ID: 495 | Gi_number: 130582 |
| Accession: P54278 | Description: Retrovirus-related Pol |
| Swissprot_id: PMS2_HUMAN | polyprotein from transposon TNT |
| Gi_number: 1709685 | 1-94 [Contains: Protease; |
| Description: PMS1 protein homolog 2 | Reverse transcriptase; |
| (DNA mismatch repair protein PMS2) | Endonuclease] |
| Seq ID: 496 | Seq ID: 1332 |
| Accession: Q02637 | Accession: O60315 |
| Swissprot_id: CEB_DROME | Swissprot_id: SIP1_HUMAN |
| Gi_number: 1345723 | Gi_number: 13124503 |
| Description: CCAAT/ENHANCER | Description: ZINC FINGER HOMEOBOX |
| BINDING PROTEIN (C/EBP) (SLOW | PROTEIN 1B (SMAD INTERACTING |
| BORDER CELL | PROTEIN |
| PROTEIN) | 1) |
| Seq ID: 497 | Seq ID: 1333 |
| Accession: Q40671 | Accession: O10296 |
| Swissprot_id: CG2B_ORYSA | Swissprot_id: IAP1_NPVOP |
| Gi_number: 3913236 | Gi_number: 2497245 |
| Description: G2/mitotic-specific cyclin 2 | Description: Apoptosis inhibitor 1 (IAP-1) |
| (B-like cyclin) (CYCOS2) | Seq ID: 1334 |
| Seq ID: 498 | Accession: P37370 |
| Accession: Q02096 | Swissprot_id: VRP1_YEAST |
| Swissprot_id: PGLR_PERAE | Gi_number: 2507155 |
| Gi_number: 400758 | Description: VERPROLIN |
| Description: Polygalacturonase precursor | Seq ID: 1335 |
| (PG) (Pectinase) | Accession: Q9UBV2 |
| Seq ID: 499 | Swissprot_id: SE1L_HUMAN |
| Accession: Q07474 | Gi_number: 13878770 |
| Swissprot_id: MAD2_PETHY | Description: SEL-1 HOMOLOG |
| Gi_number: 729976 | PRECURSOR (SUPPRESSOR OF LIN- |
| Description: Floral homeotic protein | 12-LIKE |
| PMADS 2 | PROTEIN) (SEL-1L) |
| Seq ID: 500 | Seq ID: 1338 |
| Accession: P18583 | Accession: Q40680 |
| Swissprot _id: SON_HUMAN | Swissprot_id: EF1B_ORYSA |
| Gi_number: 586013 | Gi_number: 6166140 |
| Description: SON PROTEIN (SON3) | Description: ELONGATION FACTOR 1- |
| Seq ID: 501 | BETA (EF-1-BETA) |
| Accession: Q61548 | Seq ID: 1339 |
| Swissprot_id: A180_MOUSE | Accession: P14328 |
| Gi_number: 2492687 | Swissprot_id: SP96_DICDI |
| Description: CLATHRIN COAT | Gi_number: 134780 |
| ASSEMBLY PROTEIN AP180 | Description: SPORE COAT PROTEIN |
| (CLATHRIN COAT | SP96 |
| ASSOCIATED PROTEIN | Seq ID: 1341 |
| AP180) (PHOSPHOPROTEIN F1-20) (91 KDA | Accession: P14328 |
| SYNAPTOSOMAL- | Swissprot_id: SP96_DICDI |
| ASSOCIATED PROTEIN) | Gi_number: 134780 |
| Seq ID: 502 | Description: SPORE COAT PROTEIN |
| Accession: P50809 | SP96 |
| Swissprot_id: VE2_HPV36 | Seq ID: 1342 |
| Gi_number: 1718125 | Accession: O22815 |
| Description: REGULATORY PROTEIN | Swissprot_id: MLO5_ARATH |
| E2 | Gi_number: 6137253 |
| Seq ID: 503 | Description: MLO-like protein 5 (AtMlo5) |
| Accession: Q00624 | Seq ID: 1343 |
| Swissprot_id: ASO_BRANA | Accession: Q02817 |
| Gi_number: 114268 | Swissprot_id: MUC2_HUMAN |
| Description: L-ascorbate oxidase homolog | Gi_number: 2506877 |
| precursor (Ascorbase) | Description: MUCIN 2 PRECURSOR |
| Seq ID: 504 | (INTESTINAL MUCIN 2) |
| Accession: O22467 | Seq ID: 1345 |
| Swissprot_id: MSI1_ARATH | Accession: P78621 |
| Gi_number: 3122387 | Swissprot_id: SEPA_EMENI |
| Description: WD-40 repeat protein MSI1 | Gi_number: 15214279 |
| Seq ID: 505 | Description: CYTOKINESIS PROTEIN |
| Accession: Q13459 | SEPA (FH1/2 PROTEIN) (FORCED |
| Swissprot_id: MY9B_HUMAN | EXPRESSION INHIBITION OF |
| Gi_number: 14548118 | GROWTH A) |
| Description: MYOSIN IXB | Seq ID: 1347 |
| (UNCONVENTIONAL MYOSIN-9B) | Accession: Q12849 |
| Seq ID: 508 | Swissprot_id: GRF1_HUMAN |
| Accession: Q9HB07 | Gi_number: 2500579 |
| Swissprot_id: MYG1_HUMAN | Description: G-rich sequence factor-1 |
| Gi_number: 14194963 | (GRSF-1) |
| Description: MYG1 protein | Seq ID: 1349 |
| Seq ID: 509 | Accession: P08393 |
| Accession: P05100 | Swissprot_id: ICP0_HSV11 |
| Swissprot_id: 3MG1_ECOLI | Gi_number: 124134 |
| Gi_number: 112785 | Description: Trans-acting transcriptional |
| Description: DNA-3-methyladenine | protein ICP0 (Immediate-early |
| glycosylase I (3-methyladenine-DNA | protein IE110) (VMW110) |
| glycosylase I, constitutive) (TAG | (Alpha-0 protein) |
| I) (DNA-3-methyladenine | Seq ID: 1350 |
| glycosidase I) | Accession: Q9UMN6 |
| Seq ID: 511 | Swissprot_id: TRX2_HUMAN |
| Accession: O24356 | Gi_number: 12643900 |
| Swissprot_id: MEN8_SILLA | Description: TRITHORAX HOMOLOG 2 |
| Gi_number: 6016542 | (MIXED LINEAGE LEUKEMIA GENE |
| Description: MEN-8 protein precursor | HOMOLOG 2 |
| Seq ID: 512 | PROTEIN) |
| Accession: P40013 | Seq ID: 1352 |
| Swissprot_id: BIM1_YEAST | Accession: P11219 |
| Gi_number: 731441 | Swissprot_id: AGI_ORYSA |
| Description: BIM1 PROTEIN | Gi_number: 113509 |
| Seq ID: 514 | Description: LECTIN PRECURSOR |
| Accession: P30755 | (AGGLUTININ) |
| Swissprot_id: H2B1_MAIZE | Seq ID: 1353 |
| Gi_number: 399853 | Accession: P04146 |
| Description: HISTONE H2B.1 | Swissprot_id: COPI_DROME |
| Seq ID: 516 | Gi_number: 13124684 |
| Accession: P08985 | Description: Copia protein [Contains: |
| Swissprot_id: H2AV_DROME | Copia VLP protein; Copia protease] |
| Gi_number: 121989 | Seq ID: 1354 |
| Description: HISTONE H2A VARIANT | Accession: P93531 |
| Seq ID: 517 | Swissprot_id: C7D7_SOLCH |
| Accession: P28968 | Gi_number: 5915836 |
| Swissprot_id: VGLX_HSVEB | Description: CYTOCHROME P450 71D7 |
| Gi_number: 138350 | Seq ID: 1355 |
| Description: GLYCOPROTEIN X | Accession: P28968 |
| PRECURSOR | Swissprot_id: VGLX_HSVEB |
| Seq ID: 519 | Gi_number: 138350 |
| Accession: Q05654 | Description: GLYCOPROTEIN X |
| Swissprot_id: RDPO_SCHPO | PRECURSOR |
| Gi_number: 1710054 | Seq ID: 1357 |
| Description: RETROTRANSPOSABLE | Accession: P76004 |
| ELEMENT TF2 155 KDA PROTEIN | Swissprot_id: YCGM_ECOLI |
| Seq ID: 525 | Gi_number: 9789812 |
| Accession: P04323 | Description: Protein ycgM |
| Swissprot_id: POL3_DROME | Seq ID: 1358 |
| Gi_number: 130405 | Accession: P33296 |
| Description: Retrovirus-related Pol | Swissprot_id: UBC6_YEAST |
| polyprotein from transposon 17.6 | Gi_number: 464983 |
| [Contains: Protease; Reverse | Description: UBIQUITIN- |
| transcriptase; | CONJUGATING ENZYME E2-28.4 KD |
| Endonuclease] | (UBIQUITIN-PROTEIN |
| Seq ID: 526 | LIGASE) (UBIQUITIN |
| Accession: P29375 | CARRIER PROTEIN) |
| Swissprot_id: RBB2_HUMAN | Seq ID: 1360 |
| Gi_number: 1710032 | Accession: P51530 |
| Description: Retinoblastoma-binding | Swissprot_id: DN2L_HUMAN |
| protein 2 (RBBP-2) | Gi_number: 2506893 |
| Seq ID: 527 | Description: DNA2-like homolog (DNA |
| Accession: P14233 | replication helicase-like homolog) |
| Swissprot_id: TGAB_TOBAC | Seq ID: 1362 |
| Gi_number: 135670 | Accession: P05143 |
| Description: TGACG-SEQUENCE | Swissprot_id: PRP3_MOUSE |
| SPECIFIC DNA-BINDING PROTEIN | Gi_number: 131002 |
| TGA-1B (HSBF) | Description: PROLINE-RICH PROTEIN |
| Seq ID: 529 | MP-3 |
| Accession: P05423 | Seq ID: 1363 |
| Swissprot_id: BN51_HUMAN | Accession: P93411 |
| Gi_number: 115081 | Swissprot_id: CG1C_ORYSA |
| Description: BN51 protein | Gi_number: 3334144 |
| Seq ID: 530 | Description: G1/S-SPECIFIC CYCLIN C- |
| Accession: P08640 | TYPE |
| Swissprot_id: AMYH_YEAST | Seq ID: 1365 |
| Gi_number: 728850 | Accession: O15145 |
| Description: GLUCOAMYLASE S1/S2 | Swissprot_id: AR21_HUMAN |
| PRECURSOR (GLUCAN | Gi_number: 3121765 |
| 1,4-ALPHA-GLUCOSIDASE) | Description: ARP2/3 COMPLEX 21 KDA |
| (1,4-ALPHA-D-GLUCAN | SUBUNIT (P21-ARC) (ACTIN- |
| GLUCOHYDROLASE) | RELATED |
| Seq ID: 532 | PROTEIN 2/3 COMPLEX |
| Accession: P44389 | SUBUNIT 3) |
| Swissprot_id: RS15_HAEIN | Seq ID: 1366 |
| Gi_number: 1173205 | Accession: P37398 |
| Description: 30S ribosomal protein S15 | Swissprot_id: VIV_ORYSA |
| Seq ID: 533 | Gi_number: 586238 |
| Accession: P40619 | Description: VIVIPAROUS PROTEIN |
| Swissprot_id: HMGL_PHANI | HOMOLOG |
| Gi_number: 729736 | Seq ID: 1367 |
| Description: HMG1/2-LIKE PROTEIN | Accession: P25032 |
| Seq ID: 535 | Swissprot_id: EMP1_WHEAT |
| Accession: P43214 | Gi_number: 119319 |
| Swissprot_id: MPP2_PHLPR | Description: DNA-BINDING EMBP-1 |
| Gi_number: 1171009 | PROTEIN |
| Description: POLLEN ALLERGEN PHL P | Seq ID: 1368 |
| 2 PRECURSOR (PHL P II) | Accession: Q43716 |
| Seq ID: 536 | Swissprot_id: UFOG_PETHY |
| Accession: Q9Y6D5 | Gi_number: 2501497 |
| Swissprot_id: BIG2_HUMAN | Description: Flavonol 3-O- |
| Gi_number: 13123996 | glucosyltransferase (UDP-glucose |
| Description: BREFELDIN A-INHIBITED | flavonoid |
| GUANINE NUCLEOTIDE-EXCHANGE | 3-O-glucosyltransferase) |
| PROTEIN | (Anthocyanin rhamnosyl |
| 2 (BREFELDIN A-INHIBITED | transferase) |
| GEP 2) | Seq ID: 1369 |
| Seq ID: 537 | Accession: P52285 |
| Accession: P12957 | Swissprot_id: FP21_DICDI |
| Swissprot_id: CALD_CHICK | Gi_number: 1706890 |
| Gi_number: 2506984 | Description: GLYCOPROTEIN FP21 |
| Description: CALDESMON (CDM) | PRECURSOR |
| Seq ID: 538 | Seq ID: 1370 |
| Accession: Q9FJR0 | Accession: P21997 |
| Swissprot_id: RNT1_ARATH | Swissprot_id: SSGP_VOLCA |
| Gi_number: 18202906 | Gi_number: 134920 |
| Description: Regulator of nonsense | Description: SULFATED SURFACE |
| transcripts 1 homolog | GLYCOPROTEIN 185 (SSG 185) |
| Seq ID: 539 | Seq ID: 1372 |
| Accession: Q14562 | Accession: P40602 |
| Swissprot_id: DDX8_HUMAN | Swissprot_id: APG_ARATH |
| Gi_number: 3023637 | Gi_number: 728867 |
| Description: ATP-dependent helicase | Description: ANTER-SPECIFIC |
| DDX8 (RNA helicase HRH1) (DEAH-box | PROLINE-RICH PROTEIN APG |
| protein 8) | PRECURSOR |
| Seq ID: 540 | Seq ID: 1373 |
| Accession: Q9Y4I1 | Accession: P36044 |
| Swissprot_id: MY5A_HUMAN | Swissprot_id: MNN4_YEAST |
| Gi_number: 13431722 | Gi_number: 3915759 |
| Description: MYOSIN VA (MYOSIN 5A) | Description: MNN4 PROTEIN |
| (DILUTE MYOSIN HEAVY CHAIN, | Seq ID: 1376 |
| NON-MUSCLE) (MYOSIN | Accession: P34127 |
| HEAVY CHAIN 12) (MYOXIN) | Swissprot_id: MYBH_DICDI |
| Seq ID: 541 | Gi_number: 462671 |
| Accession: Q9LRE6 | Description: Myb-like protein |
| Swissprot_id: DPOD_ORYSA | Seq ID: 1377 |
| Gi_number: 13124219 | Accession: P20025 |
| Description: DNA polymerase delta | Swissprot_id: MYB3_MAIZE |
| catalytic subunit | Gi_number: 127582 |
| Seq ID: 542 | Description: Myb-related protein Zm38 |
| Accession: Q15477 | Seq ID: 1379 |
| Swissprot_id: SKIW_HUMAN | Accession: P28968 |
| Gi_number: 3123284 | Swissprot_id: VGLX_HSVEB |
| Description: HELICASE SKI2W | Gi_number: 138350 |
| (HELICASE-LIKE PROTEIN) (HLP) | Description: GLYCOPROTEIN X |
| Seq ID: 543 | PRECURSOR |
| Accession: P50533 | Seq ID: 1382 |
| Swissprot_id: XCPE_XENLA | Accession: O15194 |
| Gi_number: 1722856 | Swissprot_id: NIF1_HUMAN |
| Description: CHROMOSOME | Gi_number: 17865502 |
| ASSEMBLY PROTEIN XCAP-E | Description: Nuclear LIM interactor- |
| Seq ID: 544 | interacting factor 1 |
| Accession: P47735 | (NLI-interacting factor 1) (NIF- |
| Swissprot_id: RLK5_ARATH | like protein) (YA22 |
| Gi_number: 1350783 | protein) (HYA22) |
| Description: Receptor-like protein kinase 5 | Seq ID: 1384 |
| precursor | Accession: P13027 |
| Seq ID: 545 | Swissprot_id: ARRS_MAIZE |
| Accession: P78706 | Gi_number: 114217 |
| Swissprot_id: RCO1_NEUCR | Description: ANTHOCYANIN |
| Gi_number: 2494901 | REGULATORY R-S PROTEIN |
| Description: TRANSCRIPTIONAL | Seq ID: 1385 |
| REPRESSOR RCO-1 | Accession: P52285 |
| Seq ID: 546 | Swissprot_id: FP21_DICDI |
| Accession: P47735 | Gi_number: 1706890 |
| Swissprot_id: RLK5_ARATH | Description: GLYCOPROTEIN FP21 |
| Gi_number: 1350783 | PRECURSOR |
| Description: Receptor-like protein kinase 5 | Seq ID: 1389 |
| precursor | Accession: P80073 |
| Seq ID: 547 | Swissprot_id: MYB2_PHYPA |
| Accession: P25822 | Gi_number: 462669 |
| Swissprot_id: PUM_DROME | Description: Myb-related protein Pp2 |
| Gi_number: 131605 | Seq ID: 1391 |
| Description: MATERNAL PUMILIO | Accession: P14328 |
| PROTEIN | Swissprot_id: SP96_DICDI |
| Seq ID: 548 | Gi_number: 134780 |
| Accession: P23394 | Description: SPORE COAT PROTEIN |
| Swissprot_id: PR28_YEAST | SP96 |
| Gi_number: 1172596 | Seq ID: 1392 |
| Description: PRE-MRNA SPLICING | Accession: Q00765 |
| FACTOR RNA HELICASE PRP28 | Swissprot_id: DP1_HUMAN |
| (HELICASE CA8) | Gi_number: 232007 |
| Seq ID: 549 | Description: POLYPOSIS LOCUS |
| Accession: P31948 | PROTEIN 1 (TB2 PROTEIN) |
| Swissprot_id: IEFS_HUMAN | Seq ID: 1394 |
| Gi_number: 400042 | Accession: Q9ZDW6 |
| Description: Stress-induced- | Swissprot_id: FER2_RICPR |
| phosphoprotein 1 (STI1) | Gi_number: 7227897 |
| (Hsp70/Hsp90-organizing | Description: Ferredoxin, 2Fe-2S |
| protein) (Transformation-sensitive | Seq ID: 1397 |
| protein IEF SSP 3521) | Accession: Q40374 |
| Seq ID: 551 | Swissprot_id: PR1_MEDTR |
| Accession: P07742 | Gi_number: 2500715 |
| Swissprot_id: RIR1_MOUSE | Description: PATHOGENESIS- |
| Gi_number: 132609 | RELATED PROTEIN PR-1 PRECURSOR |
| Description: Ribonucleoside-diphosphate | Seq ID: 1399 |
| reductase M1 chain | Accession: P33488 |
| (Ribonucleotide reductase large | Swissprot_id: ABP4_MAIZE |
| chain) | Gi_number: 461451 |
| Seq ID: 552 | Description: AUXIN-BINDING PROTEIN |
| Accession: Q08759 | 4 PRECURSOR (ABP) |
| Swissprot_id: MYB_XENLA | Seq ID: 1400 |
| Gi_number: 730090 | Accession: P10220 |
| Description: Myb protein | Swissprot_id: TEGU_HSV11 |
| Seq ID: 553 | Gi_number: 135576 |
| Accession: P51798 | Description: LARGE TEGUMENT |
| Swissprot_id: CLC7_HUMAN | PROTEIN (VIRION PROTEIN UL36) |
| Gi_number: 12644301 | Seq ID: 1403 |
| Description: CHLORIDE CHANNEL | Accession: P52499 |
| PROTEIN 7 (CLC-7) | Swissprot_id: RCC1_CANAL |
| Seq ID: 554 | Gi_number: 1710046 |
| Accession: Q9R0N7 | Description: RCC1 protein |
| Swissprot_id: SYT7_MOUSE | Seq ID: 1404 |
| Gi_number: 18203408 | Accession: P10243 |
| Description: Synaptotagmin VII (SytVII) | Swissprot_id: MYBA_HUMAN |
| Seq ID: 555 | Gi_number: 1171089 |
| Accession: Q43704 | Description: Myb-related protein A (A- |
| Swissprot_id: MCM3_MAIZE | Myb) |
| Gi_number: 2497820 | Seq ID: 1405 |
| Description: DNA replication licensing | Accession: P45344 |
| factor MCM3 homolog (Replication | Swissprot_id: YADR_HAEIN |
| origin activator) (ROA protein) | Gi_number: 1175501 |
| Seq ID: 556 | Description: Protein HI1723 |
| Accession: P93648 | Seq ID: 1406 |
| Swissprot_id: LON2_MAIZE | Accession: P20967 |
| Gi_number: 3914006 | Swissprot_id: ODO1_YEAST |
| Description: Lon protease homolog 2, | Gi_number: 730221 |
| mitochondrial precursor | Description: 2-OXOGLUTARATE |
| Seq ID: 557 | DEHYDROGENASE E1 COMPONENT, |
| Accession: P20724 | MITOCHONDRIAL |
| Swissprot_id: ELYA_BACSP | PRECURSOR (ALPHA- |
| Gi_number: 119309 | KETOGLUTARATE |
| Description: Alkaline elastase YaB | DEHYDROGENASE) |
| precursor | Seq ID: 1408 |
| Seq ID: 558 | Accession: P42798 |
| Accession: O59933 | Swissprot_id: RS1A_ARATH |
| Swissprot_id: ER25_CANAL | Gi_number: 1173218 |
| Gi_number: 6015108 | Description: 40S ribosomal protein S15A |
| Description: C-4 methyl sterol oxidase | Seq ID: 1413 |
| Seq ID: 559 | Accession: Q9ZNV5 |
| Accession: Q9QUR6 | Swissprot_id: CEN_ARATH |
| Swissprot_id: PPCE_MOUSE | Gi_number: 17366125 |
| Gi_number: 13633250 | Description: CENTRORADIALIS-like |
| Description: Prolyl endopeptidase (Post- | protein |
| proline cleaving enzyme) (PE) | Seq ID: 1415 |
| Seq ID: 560 | Accession: P81489 |
| Accession: P40798 | Swissprot_id: PRPP_HUMAN |
| Swissprot_id: STC_DROME | Gi_number: 3914451 |
| Gi_number: 730843 | Description: SALIVARY PROLINE-RICH |
| Description: Shuttle craft protein | PROTEIN II-1 |
| Seq ID: 561 | Seq ID: 1416 |
| Accession: P38630 | Accession: P15941 |
| Swissprot_id: RFC1_YEAST | Swissprot_id: MUC1_HUMAN |
| Gi_number: 584899 | Gi_number: 547937 |
| Description: Activator 1.95 kDa subunit | Description: MUCIN 1 PRECURSOR |
| (Replication factor C 95 kDa | (POLYMORPHIC EPITHELIAL MUCIN) |
| subunit) (Cell division control | (PEM) |
| protein 44) | (PEMT) (EPISIALIN) (TUMOR- |
| Seq ID: 562 | ASSOCIATED MUCIN) |
| Accession: Q9SYQ8 | (CARCINOMA-ASSOCIATED |
| Swissprot_id: CLV1_ARATH | MUCIN) (TUMOR-ASSOCIATED |
| Gi_number: 12643323 | EPITHELIAL |
| Description: RECEPTOR PROTEIN | MEMBRANE ANTIGEN) |
| KINASE CLAVATA1 PRECURSOR | (EMA) (H23AG) (PEANUT-REACTIVE |
| Seq ID: 564 | URINARY |
| Accession: P13983 | MUCIN) (PUM) (BREAST |
| Swissprot_id: EXTN_TOBAC | CARCINOMA-ASSOCIA> |
| Gi_number: 119714 | Seq ID: 1417 |
| Description: Extensin precursor (Cell wall | Accession: P03360 |
| hydroxyproline-rich | Swissprot_id: POL_AVIRE |
| glycoprotein) | Gi_number: 130584 |
| Seq ID: 565 | Description: POL polyprotein [Contains: |
| Accession: P08640 | Reverse transcriptase; |
| Swissprot_id: AMYH_YEAST | Endonuclease] |
| Gi_number: 728850 | Seq ID: 1419 |
| Description: GLUCOAMYLASE S1/S2 | Accession: P23246 |
| PRECURSOR (GLUCAN | Swissprot_id: SFPQ_HUMAN |
| 1,4-ALPHA-GLUCOSIDASE) | Gi_number: 1709851 |
| (1,4-ALPHA-D-GLUCAN | Description: SPLICING FACTOR, |
| GLUCOHYDROLASE) | PROLINE-AND GLUTAMINE-RICH |
| Seq ID: 566 | (POLYPYRIMIDINE TRACT- |
| Accession: P38605 | BINDING PROTEIN-ASSOCIATED |
| Swissprot_id: CAS1_ARATH | SPLICING |
| Gi_number: 584882 | FACTOR) (PTB-ASSOCIATED |
| Description: CYCLOARTENOL | SPLICING FACTOR) (PSF) |
| SYNTHASE (2,3-EPOXYSQUALENE-- | (DNA-BINDING P52/P100 |
| CYCLOARTENOL | COMPLEX, 100 KDA SUBUNIT) |
| CYCLASE) | Seq ID: 1420 |
| Seq ID: 567 | Accession: Q61768 |
| Accession: Q9SA34 | Swissprot_id: KINH_MOUSE |
| Swissprot_id: IMH2_ARATH | Gi_number: 2497519 |
| Gi_number: 14194878 | Description: KINESIN HEAVY CHAIN |
| Description: Probable inosine-5′- | (UBIQUITOUS KINESIN HEAVY |
| monophosphate dehydrogenase (IMP | CHAIN) |
| dehydrogenase) (IMPDH) (IMPD) | (UKHC) |
| Seq ID: 568 | Seq ID: 1421 |
| Accession: P43293 | Accession: P08640 |
| Swissprot_id: NAK_ARATH | Swissprot_id: AMYH_YEAST |
| Gi_number: 1171642 | Gi_number: 728850 |
| Description: Probable serine/threonine- | Description: GLUCOAMYLASE S1/S2 |
| protein kinase NAK | PRECURSOR (GLUCAN |
| Seq ID: 569 | 1,4-ALPHA-GLUCOSIDASE) |
| Accession: P25386 | (1,4-ALPHA-D-GLUCAN |
| Swissprot_id: USO1_YEAST | GLUCOHYDROLASE) |
| Gi_number: 137175 | Seq ID: 1422 |
| Description: Intracellular protein transport | Accession: P08640 |
| protein USO1 | Swissprot_id: AMYH_YEAST |
| Seq ID: 571 | Gi_number: 728850 |
| Accession: P10163 | Description: GLUCOAMYLASE S1/S2 |
| Swissprot_id: PRP4_HUMAN | PRECURSOR (GLUCAN |
| Gi_number: 131005 | 1,4-ALPHA-GLUCOSIDASE) |
| Description: SALIVARY PROLINE-RICH | (1,4-ALPHA-D-GLUCAN |
| PROTEIN PO PRECURSOR (ALLELE S) | GLUCOHYDROLASE) |
| Seq ID: 572 | Seq ID: 1423 |
| Accession: P38994 | Accession: P16157 |
| Swissprot_id: MSS4_YEAST | Swissprot_id: ANK1_HUMAN |
| Gi_number: 1709144 | Gi_number: 113884 |
| Description: Probable | Description: Ankyrin 1 (Erythrocyte |
| phosphatidylinositol-4-phosphate 5-kinase | ankyrin) (Ankyrin R) |
| MSS4 | Seq ID: 1424 |
| (1-phosphatidylinositol-4- | Accession: P54121 |
| phosphate kinase) (PIP5K) | Swissprot_id: AIG2_ARATH |
| (PtdIns(4)P-5-kinase) | Gi_number: 1703220 |
| (Diphosphoinositide kinase) | Description: AIG2 protein |
| Seq ID: 573 | Seq ID: 1425 |
| Accession: P37898 | Accession: P26810 |
| Swissprot_id: AAP1_YEAST | Swissprot_id: POL_MLVF5 |
| Gi_number: 728771 | Gi_number: 130641 |
| Description: ALANINE/ARGININE | Description: POL POLYPROTEIN |
| AMINOPEPTIDASE | [CONTAINS: PROTEASE; REVERSE |
| Seq ID: 574 | TRANSCRIPTASE; |
| Accession: P53683 | RIBONUCLEASE H] |
| Swissprot_id: CDP2_ORYSA | Seq ID: 1426 |
| Gi_number: 1705734 | Accession: P23246 |
| Description: Calcium-dependent protein | Swissprot_id: SFPQ_HUMAN |
| kinase, isoform 2 (CDPK 2) | Gi_number: 1709851 |
| Seq ID: 576 | Description: SPLICING FACTOR, |
| Accession: P17814 | PROLINE-AND GLUTAMINE-RICH |
| Swissprot_id: 4CL1_ORYSA | (POLYPYRIMIDINE TRACT- |
| Gi_number: 112802 | BINDING PROTEIN-ASSOCIATED |
| Description: 4-coumarate--CoA ligase 1 | SPLICING |
| (4CL 1) (4-coumaroyl-CoA | FACTOR) (PTB-ASSOCIATED |
| synthase 1) | SPLICING FACTOR) (PSF) |
| Seq ID: 577 | (DNA-BINDING P52/P100 |
| Accession: P42704 | COMPLEX, 100 KDA SUBUNIT) |
| Swissprot_id: L130_HUMAN | Seq ID: 1427 |
| Gi_number: 1730078 | Accession: Q06548 |
| Description: 130 kDa leucine-rich protein | Swissprot_id: APKA_ARATH |
| (LRP 130) (GP130) | Gi_number: 1168470 |
| Seq ID: 578 | Description: Protein kinase APK1A |
| Accession: P78963 | Seq ID: 1428 |
| Swissprot_id: SKB1_SCHPO | Accession: Q02496 |
| Gi_number: 12644354 | Swissprot_id: MUC1_MOUSE |
| Description: SHK1 KINASE-BINDING | Gi_number: 547938 |
| PROTEIN 1 | Description: Mucin 1 precursor |
| Seq ID: 579 | (Polymorphic epithelial mucin) (PEMT) |
| Accession: P80073 | (Episialin) |
| Swissprot_id: MYB2_PHYPA | Seq ID: 1429 |
| Gi_number: 462669 | Accession: P08640 |
| Description: Myb-related protein Pp2 | Swissprot_id: AMYH_YEAST |
| Seq ID: 580 | Gi_number: 728850 |
| Accession: P29458 | Description: GLUCOAMYLASE S1/S2 |
| Swissprot_id: CC21_SCHPO | PRECURSOR (GLUCAN |
| Gi_number: 6226565 | 1,4-ALPHA-GLUCOSIDASE) |
| Description: CDC21 PROTEIN | (1,4-ALPHA-D-GLUCAN |
| Seq ID: 581 | GLUCOHYDROLASE) |
| Accession: P52707 | Seq ID: 1430 |
| Swissprot_id: MDL3_PRUSE | Accession: O00268 |
| Gi_number: 1708972 | Swissprot_id: T2D3_HUMAN |
| Description: (R)-MANDELONITRILE | Gi_number: 3024681 |
| LYASE ISOFORM 3 PRECURSOR | Description: TRANSCRIPTION |
| (HYDROXYNITRILE LYASE 3) | INITIATION FACTOR TFIID 135 KDA |
| ((R)-OXYNITRILASE 3) | SUBUNIT |
| Seq ID: 582 | (TAFII-135) (TAFII135) (TAFII- |
| Accession: P25439 | 130) (TAFII130) |
| Swissprot_id: BRM_DROME | Seq ID: 1431 |
| Gi_number: 115132 | Accession: Q02817 |
| Description: HOMEOTIC GENE | Swissprot_id: MUC2_HUMAN |
| REGULATOR (BRAHMA PROTEIN) | Gi_number: 2506877 |
| Seq ID: 583 | Description: MUCIN 2 PRECURSOR |
| Accession: Q99614 | (INTESTINAL MUCIN 2) |
| Swissprot_id: TTC1_HUMAN | Seq ID: 1432 |
| Gi_number: 12585378 | Accession: O18746 |
| Description: TETRATRICOPEPTIDE | Swissprot_id: HSP1_PLAMS |
| REPEAT PROTEIN 1 (TPR REPEAT | Gi_number: 3023963 |
| PROTEIN 1) | Description: Sperm protamine P1 |
| Seq ID: 584 | Seq ID: 1433 |
| Accession: P45672 | Accession: P08640 |
| Swissprot_id: NIR3_AZOBR | Swissprot_id: AMYH_YEAST |
| Gi_number: 1171716 | Gi_number: 728850 |
| Description: NIFR3-LIKE PROTEIN | Description: GLUCOAMYLASE S1/S2 |
| Seq ID: 585 | PRECURSOR (GLUCAN |
| Accession: P07153 | 1,4-ALPHA-GLUCOSIDASE) |
| Swissprot_id: RIB1_RAT | (1,4-ALPHA-D-GLUCAN |
| Gi_number: 132560 | GLUCOHYDROLASE) |
| Description: Dolichyl- | Seq ID: 1434 |
| diphosphooligosaccharide--protein | Accession: Q02817 |
| glycosyltransferase 67 kDa | Swissprot_id: MUC2_HUMAN |
| subunit precursor (Ribophorin | Gi_number: 2506877 |
| I) (RPN-I) | Description: MUCIN 2 PRECURSOR |
| Seq ID: 586 | (INTESTINAL MUCIN 2) |
| Accession: Q38741 | Seq ID: 1435 |
| Swissprot_id: SBP1_ANTMA | Accession: Q9SJL6 |
| Gi_number: 6094239 | Swissprot_id: GS27_ARATH |
| Description: SQUAMOSA-PROMOTER | Gi_number: 11132470 |
| BINDING PROTEIN 1 | Description: Probable 27 kDa Golgi |
| Seq ID: 587 | SNARE protein (Golgi SNAP receptor |
| Accession: P21447 | complex member 2) |
| Swissprot_id: MDR3_MOUSE | Seq ID: 1436 |
| Gi_number: 266517 | Accession: P21997 |
| Description: Multidrug resistance protein 3 | Swissprot_id: SSGP_VOLCA |
| (P-glycoprotein 3) (MDR1A) | Gi_number: 134920 |
| Seq ID: 588 | Description: SULFATED SURFACE |
| Accession: P52706 | GLYCOPROTEIN 185 (SSG 185) |
| Swissprot_id: MDL1_PRUSE | Seq ID: 1439 |
| Gi_number: 1708971 | Accession: P10587 |
| Description: (R)-MANDELONITRILE | Swissprot_id: MYHB_CHICK |
| LYASE ISOFORM 1 PRECURSOR | Gi_number: 3915778 |
| (HYDROXYNITRILE LYASE 1) | Description: Myosin heavy chain, gizzard |
| ((R)-OXYNITRILASE 1) | smooth muscle |
| Seq ID: 589 | Seq ID: 1441 |
| Accession: P21997 | Accession: O96614 |
| Swissprot_id: SSGP_VOLCA | Swissprot_id: SER1_GALME |
| Gi_number: 134920 | Gi_number: 9087201 |
| Description: SULFATED SURFACE | Description: Sericin-1 (Silk gum protein 1) |
| GLYCOPROTEIN 185 (SSG 185) | Seq ID: 1445 |
| Seq ID: 591 | Accession: P28968 |
| Accession: P70362 | Swissprot_id: VGLX_HSVEB |
| Swissprot_id: UFD1_MOUSE | Gi_number: 138350 |
| Gi_number: 2501439 | Description: GLYCOPROTEIN X |
| Description: Ubiquitin fusion degradation | PRECURSOR |
| protein 1 homolog (UB fusion | Seq ID: 1448 |
| protein 1) | Accession: Q9UKN7 |
| Seq ID: 592 | Swissprot_id: MY15_HUMAN |
| Accession: P05522 | Gi_number: 13124361 |
| Swissprot_id: GUN1_PERAE | Description: Myosin XV (Unconventional |
| Gi_number: 121784 | myosin-15) |
| Description: ENDOGLUCANASE 1 | Seq ID: 1449 |
| PRECURSOR (ENDO-1,4-BETA- | Accession: Q02817 |
| GLUCANASE) | Swissprot_id: MUC2_HUMAN |
| (ABSCISSION CELLULASE 1) | Gi_number: 2506877 |
| Seq ID: 593 | Description: MUCIN 2 PRECURSOR |
| Accession: Q40286 | (INTESTINAL MUCIN 2) |
| Swissprot_id: UFO4_MANES | Seq ID: 1450 |
| Gi_number: 2501493 | Accession: Q13303 |
| Description: Flavonol 3-O- | Swissprot_id: KVB2_HUMAN |
| glucosyltransferase 4 (UDP-glucose | Gi_number: 18202496 |
| flavonoid | Description: Voltage-gated potassium |
| 3-O-glucosyltransferase 4) | channel beta-2 subunit (K+ channel |
| (Fragment) | beta-2 subunit) (Kv-beta-2) |
| Seq ID: 594 | (HKvbeta2) |
| Accession: P52409 | Seq ID: 1451 |
| Swissprot_id: E13B_WHEAT | Accession: P27884 |
| Gi_number: 1706551 | Swissprot_id: CCAA_RABIT |
| Description: GLUCAN ENDO-1,3-BETA- | Gi_number: 399201 |
| GLUCOSIDASE PRECURSOR | Description: VOLTAGE-DEPENDENT |
| ((1->3)-BETA-GLUCAN | P/Q-TYPE CALCIUM CHANNEL |
| ENDOHYDROLASE) ((1->3)-BETA- | ALPHA-1A |
| GLUCANASE) | SUBUNIT (CALCIUM |
| (BETA-1,3- | CHANNEL, L TYPE, ALPHA-1 |
| ENDOGLUCANASE) | POLYPEPTIDE |
| Seq ID: 595 | ISOFORM 4) (BRAIN |
| Accession: P19706 | CALCIUM CHANNEL I) (BI) |
| Swissprot_id: MYSB_ACACA | Seq ID: 1452 |
| Gi_number: 1171093 | Accession: P18583 |
| Description: Myosin heavy chain IB | Swissprot_id: SON_HUMAN |
| (Myosin heavy chain IL) | Gi_number: 586013 |
| Seq ID: 596 | Description: SON PROTEIN (SON3) |
| Accession: P13728 | Seq ID: 1453 |
| Swissprot_id: SGS3_DROYA | Accession: P04146 |
| Gi_number: 134469 | Swissprot_id: COPI_DROME |
| Description: Salivary glue protein SGS-3 | Gi_number: 13124684 |
| precursor | Description: Copia protein [Contains: |
| Seq ID: 597 | Copia VLP protein; Copia protease] |
| Accession: P16258 | Seq ID: 1454 |
| Swissprot_id: OXYB_RABIT | Accession: P13983 |
| Gi_number: 129309 | Swissprot_id: EXTN_TOBAC |
| Description: OXYSTEROL-BINDING | Gi_number: 119714 |
| PROTEIN | Description: Extensin precursor (Cell wall |
| Seq ID: 599 | hydroxyproline-rich |
| Accession: P52409 | glycoprotein) |
| Swissprot_id: E13B_WHEAT | Seq ID: 1456 |
| Gi_number: 1706551 | Accession: O08808 |
| Description: GLUCAN ENDO-1,3-BETA- | Swissprot_id: DIA1_MOUSE |
| GLUCOSIDASE PRECURSOR | Gi_number: 6014968 |
| ((1->3)-BETA-GLUCAN | Description: Diaphanous protein homolog |
| ENDOHYDROLASE) ((1->3)-BETA- | 1 (Diaphanous-related formin 1) |
| GLUCANASE) | (DRF1) (mDIA1) (p140mDIA) |
| (BETA-1,3- | Seq ID: 1457 |
| ENDOGLUCANASE) | Accession: P29836 |
| Seq ID: 600 | Swissprot_id: ICP0_HSVBK |
| Accession: P28968 | GI_number: 266331 |
| Swissprot_id: VGLX_HSVEB | Description: Trans-acting transcriptional |
| Gi_number: 138350 | protein ICP0 (P135 protein) |
| Description: GLYCOPROTEIN X | (IER 2.9/ER2.6) |
| PRECURSOR | Seq ID: 1462 |
| Seq ID: 601 | Accession: Q9UKN7 |
| Accession: P78371 | Swissprot_id: MY15_HUMAN |
| Swissprot_id: TCPB_HUMAN | Gi_number: 13124361 |
| Gi_number: 6094436 | Description: Myosin XV (Unconventional |
| Description: T-complex protein 1, beta | myosin-15) |
| subunit (TCP-1-beta) (CCT-beta) | Seq ID: 1463 |
| Seq ID: 602 | Accession: Q05860 |
| Accession: Q62520 | Swissprot_id: FMN1_MOUSE |
| Swissprot_id: ZIC2_MOUSE | Gi_number: 544346 |
| Gi_number: 3183503 | Description: Formin 1 isoforms I/II/III |
| Description: Zinc finger protein ZIC2 | (Limb deformity protein) |
| (Zinc finger protein of the | Seq ID: 1465 |
| cerebellum 2) | Accession: Q05085 |
| Seq ID: 603 | Swissprot_id: CHL1_ARATH |
| Accession: Q9NYH9 | Gi_number: 544018 |
| Swissprot_id: HC66_HUMAN | Description: Nitrate/chlorate transporter |
| Gi_number: 18203325 | Seq ID: 1467 |
| Description: Hepatocellular carcinoma- | Accession: Q9NVW2 |
| associated antigen 66 | Swissprot_id: RNFB_HUMAN |
| Seq ID: 604 | Gi_number: 13124522 |
| Accession: Q61084 | Description: RING FINGER PROTEIN 12 |
| Swissprot_id: M3K3_MOUSE | (LIM DOMAIN INTERACTING RING |
| Gi_number: 2499641 | FINGER |
| Description: MITOGEN-ACTIVATED | PROTEIN) (RING FINGER LIM |
| PROTEIN KINASE KINASE KINASE 3 | DOMAIN-BINDING PROTEIN) (R-LIM) |
| (MAPK/ERK | (NY-REN-43 ANTIGEN) |
| KINASE KINASE 3) (MEK | Seq ID: 1469 |
| KINASE 3) (MEKK 3) | Accession: O58263 |
| Seq ID: 606 | Swissprot_id: PFDA_PYRHO |
| Accession: Q59695 | Gi_number: 12230417 |
| Swissprot_id: ACOC_PSEPU | Description: Prefoldin alpha subunit |
| Gi_number: 7531037 | (GimC alpha subunit) |
| Description: DIHYDROLIPOAMIDE | Seq ID: 1470 |
| ACETYLTRANSFERASE COMPONENT | Accession: P27572 |
| OF ACETOIN | Swissprot_id: NU4M_WHEAT |
| CLEAVING SYSTEM | Gi_number: 128766 |
| (ACETOIN DEHYDROGENASE E2 | Description: NADH-UBIQUINONE |
| COMPONENT) | OXIDOREDUCTASE CHAIN 4 |
| Seq ID: 607 | Seq ID: 1471 |
| Accession: P49902 | Accession: O08808 |
| Swissprot_id: 5NTC_HUMAN | Swissprot_id: DIA1_MOUSE |
| Gi_number: 1703012 | Gi_number: 6014968 |
| Description: Cytosolic purine 5′- | Description: Diaphanous protein homolog |
| nucleotidase | 1 (Diaphanous-related formin 1) |
| Seq ID: 608 | (DRF1) (mDIA1) (p140mDIA) |
| Accession: P71684 | Seq ID: 1474 |
| Swissprot_id: GCH2_MYCTU | Accession: P08742 |
| Gi_number: 3915713 | Swissprot_id: COX1_MAIZE |
| Description: RIBOFLAVIN | Gi_number: 1169027 |
| BIOSYNTHESIS PROTEIN RIBA | Description: CYTOCHROME C |
| [INCLUDES: GTP | OXIDASE POLYPEPTIDE I |
| CYCLOHYDROLASE II; 3,4- | Seq ID: 1476 |
| DIHYDROXY-2-BUTANONE 4- | Accession: P54970 |
| PHOSPHATE | Swissprot_id: ILL2_ARATH |
| SYNTHASE (DHBP | Gi_number: 1708462 |
| SYNTHASE)] | Description: IAA-AMINO ACID |
| Seq ID: 609 | HYDROLASE HOMOLOG 2 |
| Accession: P35585 | PRECURSOR |
| Swissprot_id: A1M1_MOUSE | Seq ID: 1480 |
| Gi_number: 543817 | Accession: O00233 |
| Description: Adaptor-related protein | Swissprot_id: PSD9_HUMAN |
| complex 1, mu 1 subunit (Clathrin | Gi_number: 12230943 |
| coat assembly protein AP47) | Description: 26S proteasome regulatory |
| (Clathrin coat associated | subunit p27 (26S proteasome |
| protein AP47) (Golgi adaptor AP- | non-ATPase subunit 9) |
| 1 47 kDa protein) (HA1 47 kDa | Seq ID: 1481 |
| subunit) (Clathrin assembly | Accession: P21519 |
| protein assembly protein | Swissprot_id: MAM_DROME |
| complex 1 medium chain) | Gi_number: 126721 |
| Seq ID: 610 | Description: NEUROGENIC PROTEIN |
| Accession: P27644 | MASTERMIND |
| Swissprot_id: PGLR_AGRTU | Seq ID: 1487 |
| Gi_number: 129937 | Accession: P12978 |
| Description: POLYGALACTURONASE | Swissprot_id: EBN2_EBV |
| (PECTINASE) (PGL) | Gi_number: 119111 |
| Seq ID: 611 | Description: EBNA-2 NUCLEAR |
| Accession: P55180 | PROTEIN |
| Swissprot_id: GALE_BACSU | Seq ID: 1489 |
| Gi_number: 1730193 | Accession: P93329 |
| Description: UDP-glucose 4-epimerase | Swissprot_id: NO20_MEDTR |
| (Galactowaldenase) (UDP-galactose | Gi_number: 3914142 |
| 4-epimerase) | Description: EARLY NODULIN 20 |
| Seq ID: 612 | PRECURSOR (N-20) |
| Accession: P47179 | Seq ID: 1490 |
| Swissprot_id: DAN4_YEAST | Accession: Q07878 |
| Gi_number: 1352944 | Swissprot_id: VP13_YEAST |
| Description: Cell wall protein DAN4 | Gi_number: 2499125 |
| precursor | Description: VACUOLAR PROTEIN |
| Seq ID: 613 | SORTING-ASSOCIATED PROTEIN |
| Accession: P40124 | VPS13 |
| Swissprot_id: CAP1_MOUSE | Seq ID: 1491 |
| Gi_number: 729032 | Accession: P41410 |
| Description: ADENYLYL CYCLASE- | Swissprot_id: RA54_SCHPO |
| ASSOCIATED PROTEIN 1 (CAP 1) | Gi_number: 3123262 |
| Seq ID: 614 | Description: DNA REPAIR PROTEIN |
| Accession: P26368 | RHP54 (RAD54 HOMOLOG) |
| Swissprot_id: U2AF_HUMAN | Seq ID: 1492 |
| Gi_number: 267188 | Accession: P10978 |
| Description: Splicing factor U2AF 65 kDa | Swissprot_id: POLX_TOBAC |
| subunit (U2 auxiliary factor | Gi_number: 130582 |
| 65 kDa subunit) (U2 SNRNP | Description: Retrovirus-related Pol |
| auxiliary factor large subunit) | polyprotein from transposon TNT |
| Seq ID: 615 | 1-94 [Contains: Protease; |
| Accession: P57604 | Reverse transcriptase; |
| Swissprot_id: AROB_BUCAI | Endonuclease] |
| Gi_number: 11131261 | Seq ID: 1493 |
| Description: 3-dehydroquinate synthase | Accession: P14922 |
| Seq ID: 616 | Swissprot_id: SSN6_YEAST |
| Accession: O04111 | Gi_number: 117936 |
| Swissprot_id: CHSY_PERFR | Description: GLUCOSE REPRESSION |
| Gi_number: 5921781 | MEDIATOR PROTEIN |
| Description: CHALCONE SYNTHASE | Seq ID: 1494 |
| (NARINGENIN-CHALCONE | Accession: P08640 |
| SYNTHASE) | Swissprot_id: AMYH_YEAST |
| Seq ID: 618 | Gi_number: 728850 |
| Accession: P35336 | Description: GLUCOAMYLASE S1/S2 |
| Swissprot_id: PGLR_ACTCH | PRECURSOR (GLUCAN |
| Gi_number: 548488 | 1,4-ALPHA-GLUCOSIDASE) |
| Description: Polygalacturonase precursor | (1,4-ALPHA-D-GLUCAN |
| (PG) (Pectinase) | GLUCOHYDROLASE) |
| Seq ID: 620 | Seq ID: 1495 |
| Accession: P29599 | Accession: Q05654 |
| Swissprot_id: SUBB_BACLE | Swissprot_id: RDPO_SCHPO |
| Gi_number: 267046 | Gi_number: 1710054 |
| Description: SUBTILISIN BL | Description: RETROTRANSPOSABLE |
| (ALKALINE PROTEASE) | ELEMENT TF2 155 KDA PROTEIN |
| Seq ID: 623 | Seq ID: 1496 |
| Accession: P43588 | Accession: Q9SYQ8 |
| Swissprot_id: MPR1_YEAST | Swissprot_id: CLV1_ARATH |
| Gi_number: 1171012 | Gi_number: 12643323 |
| Description: Proteasome regulatory subunit | Description: RECEPTOR PROTEIN |
| RPN11 (MPR1 protein) | KINASE CLAVATA1 PRECURSOR |
| Seq ID: 624 | Seq ID: 1497 |
| Accession: P34547 | Accession: Q24492 |
| Swissprot_id: UBPX_CAEEL | Swissprot_id: RFA1_DROME |
| Gi_number: 14917050 | Gi_number: 2498844 |
| Description: Probable ubiquitin carboxyl- | Description: REPLICATION PROTEIN A |
| terminal hydrolase R10E11.3 | 70 KDA DNA-BINDING SUBUNIT (RP- |
| (Ubiquitin thiolesterase) | A) |
| (Ubiquitin-specific processing | (RF-A) (REPLICATION |
| protease) (Deubiquitinating | FACTOR-A PROTEIN 1) (SINGLE- |
| enzyme) | STRANDED |
| Seq ID: 625 | DNA-BINDING PROTEIN) |
| Accession: Q9LHA4 | (DMRPA1) |
| Swissprot_id: V0D2_ARATH | Seq ID: 1498 |
| Gi_number: 12585471 | Accession: Q05654 |
| Description: Probable vacuolar ATP | Swissprot_id: RDPO_SCHPO |
| synthase subunit d 2 (V-ATPase d | Gi_number: 1710054 |
| subunit 2) (Vacuolar proton pump | Description: RETROTRANSPOSABLE |
| d subunit 2) | ELEMENT TF2 155 KDA PROTEIN |
| Seq ID: 627 | Seq ID: 1499 |
| Accession: Q9H2C0 | Accession: P10394 |
| Swissprot_id: GAN_HUMAN | Swissprot_id: POL4_DROME |
| Gi_number: 13626745 | Gi_number: 130407 |
| Description: Gigaxonin | Description: Retrovirus-related Pol |
| Seq ID: 631 | polyprotein from transposon 412 |
| Accession: P32323 | [Contains: Protease; Reverse |
| Swissprot_id: AGA1_YEAST | transcriptase; |
| Gi_number: 416592 | Endonuclease] |
| Description: A-AGGLUTININ | Seq ID: 1500 |
| ATTACHMENT SUBUNIT | Accession: P29375 |
| PRECURSOR | Swissprot_id: RBB2_HUMAN |
| Seq ID: 633 | Gi_number: 1710032 |
| Accession: P23246 | Description: Retinoblastoma-binding |
| Swissprot_id: SFPQ_HUMAN | protein 2 (RBBP-2) |
| Gi_number: 1709851 | Seq ID: 1501 |
| Description: SPLICING FACTOR, | Accession: P40477 |
| PROLINE-AND GLUTAMINE-RICH | Swissprot_id: N159_YEAST |
| (POLYPYRIMIDINE TRACT- | Gi_number: 731862 |
| BINDING PROTEIN-ASSOCIATED | Description: Nucleoporin NUP159 |
| SPLICING | (Nuclear pore protein NUP159) |
| FACTOR) (PTB-ASSOCIATED | Seq ID: 1502 |
| SPLICING FACTOR) (PSF) | Accession: P10394 |
| (DNA-BINDING P52/P100 | Swissprot_id: POL4_DROME |
| COMPLEX, 100 KDA SUBUNIT) | Gi_number: 130407 |
| Seq ID: 635 | Description: Retrovirus-related Pol |
| Accession: Q40687 | polyprotein from transposon 412 |
| Swissprot_id: GBB_ORYSA | [Contains: Protease; Reverse |
| Gi_number: 3023843 | transcriptase; |
| Description: GUANINE NUCLEOTIDE- | Endonuclease] |
| BINDING PROTEIN BETA SUBUNIT | Seq ID: 1503 |
| Seq ID: 636 | Accession: Q9NZW4 |
| Accession: P23950 | Swissprot_id: DSPP_HUMAN |
| Swissprot_id: TISB_MOUSE | Gi_number: 17865470 |
| Gi_number: 135863 | Description: Dentin sialophosphoprotein |
| Description: Butyrate response factor 1 | precursor [Contains: Dentin |
| (TIS11B protein) | phosphoprotein (Dentin |
| Seq ID: 637 | phosphophoryn) (DPP); Dentin |
| Accession: O43502 | sialoprotein (DSP)] |
| Swissprot_id: R51C_HUMAN | Seq ID: 1504 |
| Gi_number: 3914534 | Accession: P28968 |
| Description: DNA repair protein RAD51 | Swissprot_id: VGLX_HSVEB |
| homolog 3 | Gi_number: 138350 |
| Seq ID: 638 | Description: GLYCOPROTEIN X |
| Accession: P23902 | PRECURSOR |
| Swissprot_id: FABB_HORVU | Seq ID: 1505 |
| Gi_number: 119784 | Accession: P08640 |
| Description: 3-oxoacyl-[acyl-carrier- | Swissprot_id: AMYH_YEAST |
| protein] synthase I, chloroplast | Gi_number: 728850 |
| precursor (Beta-ketoacyl-ACP | Description: GLUCOAMYLASE S1/S2 |
| synthase I) (KAS I) | PRECURSOR (GLUCAN |
| Seq ID: 639 | 1,4-ALPHA-GLUCOSIDASE) |
| Accession: P24074 | (1,4-ALPHA-D-GLUCAN |
| Swissprot_id: RECA_RHILV | GLUCOHYDROLASE) |
| Gi_number: 132236 | Seq ID: 1506 |
| Description: RecA protein (Recombinase | Accession: P18583 |
| A) | Swissprot_id: SON_HUMAN |
| Seq ID: 640 | Gi_number: 586013 |
| Accession: P08640 | Description: SON PROTEIN (SON3) |
| Swissprot_id: AMYH_YEAST | Seq ID: 1508 |
| Gi_number: 728850 | Accession: P08640 |
| Description: GLUCOAMYLASE S1/S2 | Swissprot_id: AMYH_YEAST |
| PRECURSOR (GLUCAN | Gi_number: 728850 |
| 1,4-ALPHA-GLUCOSIDASE) | Description: GLUCOAMYLASE S1/S2 |
| (1,4-ALPHA-D-GLUCAN | PRECURSOR (GLUCAN |
| GLUCOHYDROLASE) | 1,4-ALPHA-GLUCOSIDASE) |
| Seq ID: 641 | (1,4-ALPHA-D-GLUCAN |
| Accession: Q09172 | GLUCOHYDROLASE) |
| Swissprot_id: P2C2_SCHPO | Seq ID: 1510 |
| Gi_number: 1171963 | Accession: P49118 |
| Description: PROTEIN PHOSPHATASE | Swissprot_id: BIP_LYCES |
| 2C HOMOLOG 2 (PP2C-2) | Gi_number: 1346172 |
| Seq ID: 642 | Description: Luminal binding protein |
| Accession: P25010 | precursor (BiP) (78 kDa |
| Swissprot_id: CG2A_DAUCA | glucose-regulated protein |
| Gi_number: 116167 | homolog) (GRP 78) |
| Description: G2/MITOTIC-SPECIFIC | Seq ID: 1513 |
| CYCLIN C13-1 (A-LIKE CYCLIN) | Accession: P35817 |
| Seq ID: 643 | Swissprot_id: BDF1_YEAST |
| Accession: Q9Y5K3 | Gi_number: 5921175 |
| Swissprot_id: CTPU_HUMAN | Description: BDF1 PROTEIN |
| Gi_number: 12643330 | Seq ID: 1514 |
| Description: CHOLINEPHOSPHATE | Accession: P19683 |
| CYTIDYLYLTRANSFERASE B | Swissprot_id: ROC4_NICSY |
| (PHOSPHORYLCHOLINE | Gi_number: 133248 |
| TRANSFERASE B) | Description: 31 kDa ribonucleoprotein, |
| (CTP: PHOSPHOCHOLINE | chloroplast precursor |
| CYTIDYLYLTRANSFERASE B) | Seq ID: 1515 |
| (CT B) (CCT B) (CCT-BETA) | Accession: P25822 |
| Seq ID: 644 | Swissprot_id: PUM_DROME |
| Accession: Q92373 | Gi_number: 131605 |
| Swissprot_id: RFA2_SCHPO | Description: MATERNAL PUMILIO |
| Gi_number: 2498849 | PROTEIN |
| Description: Replication factor-A protein 2 | Seq ID: 1516 |
| (Single-stranded | Accession: Q9SYQ8 |
| DNA-binding protein P30 | Swissprot_id: CLV1_ARATH |
| subunit) | Gi_number: 12643323 |
| Seq ID: 645 | Description: RECEPTOR PROTEIN |
| Accession: P15705 | KINASE CLAVATA1 PRECURSOR |
| Swissprot_id: STI1_YEAST | Seq ID: 1517 |
| Gi_number: 134975 | Accession: O97159 |
| Description: HEAT SHOCK PROTEIN | Swissprot_id: CHDM_DROME |
| STI1 | Gi_number: 13124018 |
| Seq ID: 646 | Description: CHROMODOMAIN |
| Accession: P50160 | HELICASE-DNA-BINDING PROTEIN |
| Swissprot_id: TS2_MAIZE | MI-2 HOMOLOG |
| Gi_number: 1717794 | (DMI-2) |
| Description: SEX DETERMINATION | Seq ID: 1518 |
| PROTEIN TASSELSEED 2 | Accession: P04929 |
| Seq ID: 647 | Swissprot_id: HRPX_PLALO |
| Accession: Q9Y2U8 | Gi_number: 123530 |
| Swissprot_id: MAN1_HUMAN | Description: HISTIDINE-RICH |
| Gi_number: 13629600 | GLYCOPROTEIN PRECURSOR |
| Description: INNER NUCLEAR | Seq ID: 1520 |
| MEMBRANE PROTEIN MAN1 | Accession: P08393 |
| Seq ID: 648 | Swissprot_id: ICP0_HSV11 |
| Accession: Q9ZCV3 | Gi_number: 124134 |
| Swissprot_id: RL25_RICPR | Description: Trans-acting transcriptional |
| Gi_number: 6225985 | protein ICP0 (Immediate-early |
| Description: Probable 50S ribosomal | protein IE110) (VMW110) |
| protein L25 | (Alpha-0 protein) |
| Seq ID: 649 | Seq ID: 1522 |
| Accession: Q9GZU7 | Accession: P43293 |
| Swissprot_id: NIF3_HUMAN | Swissprot_id: NAK_ARATH |
| Gi_number: 17865510 | Gi_number: 1171642 |
| Description: Nuclear LIM interactor- | Description: Probable serine/threonine- |
| interacting factor 3 | protein kinase NAK |
| (NLI-interacting factor 3) (NLI- | Seq ID: 1525 |
| IF) | Accession: P26599 |
| Seq ID: 650 | Swissprot_id: PTB_HUMAN |
| Accession: P46573 | Gi_number: 131528 |
| Swissprot_id: APKB_ARATH | Description: Polypyrimidine tract-binding |
| Gi_number: 12644274 | protein (PTB) (Heterogeneous |
| Description: PROTEIN KINASE APK1B | nuclear ribonucleoprotein I) |
| Seq ID: 652 | (hnRNP I) (57 kDa RNA-binding |
| Accession: P29383 | protein PPTB-1) |
| Swissprot_id: AGL3_ARATH | Seq ID: 1526 |
| Gi_number: 3915599 | Accession: P04323 |
| Description: AGAMOUS-LIKE MADS | Swissprot_id: POL3_DROME |
| BOX PROTEIN AGL3 | Gi_number: 130405 |
| Seq ID: 653 | Description: Retrovirus-related Pol |
| Accession: P32679 | polyprotein from transposon 17.6 |
| Swissprot_id: NFI_ECOLI | [Contains: Protease; Reverse |
| Gi_number: 2506912 | transcriptase; |
| Description: Endonuclease V | Endonuclease] |
| (Deoxyinosine 3′endonuclease) | Seq ID: 1528 |
| Seq ID: 654 | Accession: P47179 |
| Accession: P29675 | Swissprot_id: DAN4_YEAST |
| Swissprot_id: TSF3_HELAN | Gi_number: 1352944 |
| Gi_number: 267177 | Description: Cell wall protein DAN4 |
| Description: POLLEN SPECIFIC | precursor |
| PROTEIN SF3 | Seq ID: 1529 |
| Seq ID: 656 | Accession: Q63003 |
| Accession: P36520 | Swissprot_id: 5E5_RAT |
| Swissprot_id: RM10_YEAST | Gi_number: 2498095 |
| Gi_number: 1710599 | Description: 5E5 ANTIGEN |
| Description: 60S RIBOSOMAL PROTEIN | Seq ID: 1530 |
| L10, MITOCHONDRIAL PRECURSOR | Accession: Q94981 |
| (YML10) | Swissprot_id: ARI1_DROME |
| Seq ID: 657 | Gi_number: 18202622 |
| Accession: O48556 | Description: Ariadne-1 protein (Ari-1) |
| Swissprot_id: IPYR_MAIZE | Seq ID: 1533 |
| Gi_number: 4033424 | Accession: P08640 |
| Description: Soluble inorganic | Swissprot_id: AMYH_YEAST |
| pyrophosphatase (Pyrophosphate | Gi_number: 728850 |
| phospho-hydrolase) (PPase) | Description: GLUCOAMYLASE S1/S2 |
| Seq ID: 658 | PRECURSOR (GLUCAN |
| Accession: P52565 | 1,4-ALPHA-GLUCOSIDASE) |
| Swissprot_id: GDIR_HUMAN | (1,4-ALPHA-D-GLUCAN |
| Gi_number: 1707892 | GLUCOHYDROLASE) |
| Description: Rho GDP-dissociation | Seq ID: 1534 |
| inhibitor 1 (Rho GDI 1) (Rho-GDI | Accession: P19837 |
| alpha) | Swissprot_id: SPD1_NEPCL |
| Seq ID: 659 | Gi_number: 1174414 |
| Accession: P29834 | Description: SPIDROIN 1 (DRAGLINE |
| Swissprot_id: GRP2_ORYSA | SILK FIBROIN 1) |
| Gi_number: 232183 | Seq ID: 1535 |
| Description: GLYCINE-RICH CELL | Accession: P21997 |
| WALL STRUCTURAL PROTEIN 2 | Swissprot_id: SSGP_VOLCA |
| PRECURSOR | Gi_number: 134920 |
| Seq ID: 660 | Description: SULFATED SURFACE |
| Accession: O81263 | GLYCOPROTEIN 185 (SSG 185) |
| Swissprot_id: KITH_ORYSA | Seq ID: 1537 |
| Gi_number: 7674094 | Accession: P07237 |
| Description: Thymidine kinase | Swissprot_id: PDI_HUMAN |
| Seq ID: 661 | Gi_number: 2507460 |
| Accession: P03211 | Description: PROTEIN DISULFIDE |
| Swissprot_id: EBN1_EBV | ISOMERASE PRECURSOR (PDI) |
| Gi_number: 119110 | (PROLYL |
| Description: EBNA-1 NUCLEAR | 4-HYDROXYLASE BETA |
| PROTEIN | SUBUNIT) (CELLULAR THYROID |
| Seq ID: 662 | HORMONE |
| Accession: P28968 | BINDING PROTEIN) (P55) |
| Swissprot_id: VGLX_HSVEB | Seq ID: 1538 |
| Gi_number: 138350 | Accession: P08640 |
| Description: GLYCOPROTEIN X | Swissprot_id: AMYH_YEAST |
| PRECURSOR | Gi_number: 728850 |
| Seq ID: 663 | Description: GLUCOAMYLASE S1/S2 |
| Accession: P52298 | PRECURSOR (GLUCAN |
| Swissprot_id: CB20_HUMAN | 1,4-ALPHA-GLUCOSIDASE) |
| Gi_number: 1705651 | (1,4-ALPHA-D-GLUCAN |
| Description: 20 KDA NUCLEAR CAP | GLUCOHYDROLASE) |
| BINDING PROTEIN (NCBP 20 KDA | Seq ID: 1539 |
| SUBUNIT) | Accession: P40602 |
| (CBP20) | Swissprot_id: APG_ARATH |
| Seq ID: 665 | Gi_number: 728867 |
| Accession: P33485 | Description: ANTER-SPECIFIC |
| Swissprot_id: VNUA_PRVKA | PROLINE-RICH PROTEIN APG |
| Gi_number: 465445 | PRECURSOR |
| Description: PROBABLE NUCLEAR | Seq ID: 1540 |
| ANTIGEN | Accession: P48731 |
| Seq ID: 667 | Swissprot_id: ATH1_ARATH |
| Accession: P51109 | Gi_number: 1351999 |
| Swissprot_id: DFRA_MEDSA | Description: Homeobox protein ATH1 |
| Gi_number: 1706375 | Seq ID: 1542 |
| Description: DIHYDROFLAVONOL-4- | Accession: P02845 |
| REDUCTASE (DFR) | Swissprot_id: VIT2_CHICK |
| (DIHYDROKAEMPFEROL | Gi_number: 138595 |
| 4-REDUCTASE) | Description: VITELLOGENIN II |
| Seq ID: 668 | PRECURSOR (MAJOR |
| Accession: P33050 | VITELLOGENIN) [CONTAINS: |
| Swissprot_id: C13_MAIZE | LIPOVITELLIN I (LVI); |
| Gi_number: 416731 | PHOSVITIN (PV); LIPOVITELLIN II |
| Description: Pollen specific protein C13 | (LVII); YGP40] |
| precursor | Seq ID: 1543 |
| Seq ID: 669 | Accession: Q02817 |
| Accession: O04003 | Swissprot_id: MUC2_HUMAN |
| Swissprot_id: LG1_MAIZE | Gi_number: 2506877 |
| Gi_number: 6016502 | Description: MUCIN 2 PRECURSOR |
| Description: LIGULELESS1 PROTEIN | (INTESTINAL MUCIN 2) |
| Seq ID: 670 | Seq ID: 1544 |
| Accession: Q9LJ98 | Accession: O08816 |
| Swissprot_id: PFD2_ARATH | Swissprot_id: WASL_RAT |
| Gi_number: 12230458 | Gi_number: 13431956 |
| Description: Probable prefoldin subunit 2 | Description: Neural Wiskott-Aldrich |
| Seq ID: 672 | syndrome protein (N-WASP) |
| Accession: P23535 | Seq ID: 1545 |
| Swissprot_id: E13B_PHAVU | Accession: P23116 |
| Gi_number: 119006 | Swissprot_id: IF3A_MOUSE |
| Description: GLUCAN ENDO-1,3-BETA- | Gi_number: 6686292 |
| GLUCOSIDASE, BASIC ISOFORM | Description: EUKARYOTIC |
| ((1->3)-BETA-GLUCAN | TRANSLATION INITIATION FACTOR |
| ENDOHYDROLASE) ((1->3)-BETA- | 3 SUBUNIT 10 |
| GLUCANASE) | (EIF-3 THETA) (EIF3 P167) |
| (BETA-1,3- | (EIF3 P180) (EIF3 P185) (P162 |
| ENDOGLUCANASE) | PROTEIN) (CENTROSOMIN) |
| Seq ID: 674 | Seq ID: 1546 |
| Accession: P08799 | Accession: P23246 |
| Swissprot_id: MYS2_DICDI | Swissprot_id: SFPQ_HUMAN |
| Gi_number: 127774 | Gi_number: 1709851 |
| Description: Myosin II heavy chain, non | Description: SPLICING FACTOR, |
| muscle | PROLINE-AND GLUTAMINE-RICH |
| Seq_ID: 675 | (POLYPYRIMIDINE TRACT- |
| Accession: Q9Y5K1 | BINDING PROTEIN-ASSOCIATED |
| Swissprot_id: SP11_HUMAN | SPLICING |
| Gi_number: 7674367 | FACTOR) (PTB-ASSOCIATED |
| Description: SPO11 protein homolog | SPLICING FACTOR) (PSF) |
| Seq ID: 676 | (DNA-BINDING P52/P100 |
| Accession: Q63003 | COMPLEX, 100 KDA SUBUNIT) |
| Swissprot_id: 5E5_RAT | Seq ID: 1548 |
| Gi_number: 2498095 | Accession: P28284 |
| Description: 5E5 ANTIGEN | Swissprot_id: ICP0_HSV2H |
| Seq ID: 677 | Gi_number: 124135 |
| Accession: O42354 | Description: Trans-acting transcriptional |
| Swissprot_id: MDM2_BRARE | protein ICP0 (VMW118 protein) |
| Gi_number: 8472496 | Seq ID: 1549 |
| Description: Ubiquitin-protein ligase E3 | Accession: P08640 |
| Mdm2 (P53-binding protein | Swissprot_id: AMYH_YEAST |
| Mdm2) (Double minute 2 protein) | Gi_number: 728850 |
| Seq ID: 678 | Description: GLUCOAMYLASE S1/S2 |
| Accession: O43516 | PRECURSOR (GLUCAN |
| Swissprot_id: WAIP_HUMAN | 1,4-ALPHA-GLUCOSIDASE) |
| Gi_number: 13124642 | (1,4-ALPHA-D-GLUCAN |
| Description: WISKOTT-ALDRICH | GLUCOHYDROLASE) |
| SYNDROME PROTEIN INTERACTING | Seq ID: 1550 |
| PROTEIN (WASP | Accession: Q02817 |
| INTERACTING PROTEIN) | Swissprot_id: MUC2_HUMAN |
| (PRPL-2 PROTEIN) | Gi_number: 2506877 |
| Seq ID: 680 | Description: MUCIN 2 PRECURSOR |
| Accession: P12978 | (INTESTINAL MUCIN 2) |
| Swissprot_id: EBN2_EBV | Seq ID: 1551 |
| Gi_number: 119111 | Accession: P28968 |
| Description: EBNA-2 NUCLEAR | Swissprot_id: VGLX_HSVEB |
| PROTEIN | Gi_number: 138350 |
| Seq ID: 682 | Description: GLYCOPROTEIN X |
| Accession: P09789 | PRECURSOR |
| Swissprot_id: GRP1_PETHY | Seq ID: 1553 |
| Gi_number: 121627 | Accession: P21997 |
| Description: GLYCINE-RICH CELL | Swissprot_id: SSGP_VOLCA |
| WALL STRUCTURAL PROTEIN 1 | Gi_number: 134920 |
| PRECURSOR | Description: SULFATED SURFACE |
| Seq ID: 683 | GLYCOPROTEIN 185 (SSG 185) |
| Accession: P82659 | Seq ID: 1554 |
| Swissprot_id: THGF_HELAN | Accession: P18583 |
| Gi_number: 11387188 | Swissprot_id: SON_HUMAN |
| Description: Flower-specific gamma- | Gi_number: 586013 |
| thionin precursor (Defensin SD2) | Description: SON PROTEIN (SON3) |
| Seq ID: 684 | Seq ID: 1555 |
| Accession: P48731 | Accession: P08640 |
| Swissprot_id: ATH1_ARATH | Swissprot_id: AMYH_YEAST |
| Gi_number: 1351999 | Gi_number: 728850 |
| Description: Homeobox protein ATH1 | Description: GLUCOAMYLASE S1/S2 |
| Seq ID: 686 | PRECURSOR (GLUCAN |
| Accession: P52409 | 1,4-ALPHA-GLUCOSIDASE) |
| Swissprot_id: E13B_WHEAT | (1,4-ALPHA-D-GLUCAN |
| Gi_number: 1706551 | GLUCOHYDROLASE) |
| Description: GLUCAN ENDO-1,3-BETA- | Seq ID: 1556 |
| GLUCOSIDASE PRECURSOR | Accession: P13290 |
| ((1->3)-BETA-GLUCAN | Swissprot_id: VGLG_HSV2H |
| ENDOHYDROLASE) ((1->3)-BETA- | Gi_number: 138297 |
| GLUCANASE) | Description: GLYCOPROTEIN G |
| (BETA-1,3- | Seq ID: 1557 |
| ENDOGLUCANASE) | Accession: O43791 |
| Seq ID: 688 | Swissprot_id: SPOP_HUMAN |
| Accession: Q02224 | Gi_number: 8134708 |
| Swissprot_id: CENE_HUMAN | Description: Speckle-type POZ protein |
| Gi_number: 399227 | Seq ID: 1559 |
| Description: CENTROMERIC PROTEIN | Accession: O43516 |
| E (CENP-E PROTEIN) | Swissprot_id: WAIP_HUMAN |
| Seq ID: 690 | Gi_number: 13124642 |
| Accession: P41892 | Description: WISKOTT-ALDRICH |
| Swissprot_id: CC7_SCHPO | SYNDROME PROTEIN INTERACTING |
| Gi_number: 1168817 | PROTEIN (WASP |
| Description: Cell division control protein 7 | INTERACTING PROTEIN) |
| Seq ID: 691 | (PRPL-2 PROTEIN) |
| Accession: Q9NYV4 | Seq ID: 1560 |
| Swissprot_id: CRK7_HUMAN | Accession: P43335 |
| Gi_number: 12643825 | Swissprot_id: PHS_PSEAE |
| Description: CELL DIVISION CYCLE 2- | Gi_number: 1172494 |
| RELATED PROTEIN KINASE 7 | Description: Pterin-4-alpha-carbinolamine |
| (CDC2-RELATED PROTEIN | dehydratase (PHS) |
| KINASE 7) (CRKRS) | (4-alpha-hydroxy-tetrahydropterin |
| Seq ID: 692 | dehydratase) (Pterin |
| Accession: Q02224 | carbinolamine dehydratase) |
| Swissprot_id: CENE_HUMAN | (PCD) |
| Gi_number: 399227 | Seq ID: 1562 |
| Description: CENTROMERIC PROTEIN | Accession: P04694 |
| E (CENP-E PROTEIN) | Swissprot_id: ATTY_RAT |
| Seq ID: 693 | Gi_number: 114714 |
| Accession: Q27991 | Description: Tyrosine aminotransferase (L- |
| Swissprot_id: MYHA_BOVIN | tyrosine:2-oxoglutarate |
| Gi_number: 13431706 | aminotransferase) (TAT) |
| Description: Myosin heavy chain, | Seq ID: 1563 |
| nonmuscle type B (Cellular myosin | Accession: O82768 |
| heavy chain, type B) (Nonmuscle | Swissprot_id: HIS2_ARATH |
| myosin heavy chain-B) | Gi_number: 11132859 |
| (NMMHC-B) | Description: Histidine biosynthesis |
| Seq ID: 694 | bifunctional protein hisIE, |
| Accession: P04265 | chloroplast precursor [Includes: |
| Swissprot_id: K2C2_XENLA | Phosphoribosyl-AMP |
| Gi_number: 125099 | cyclohydrolase (PRA-CH); |
| Description: Keratin, type II cytoskeletal I | Phosphoribosyl-ATP |
| (Clone PUF164) | pyrophosphatase (PRA-PH)] |
| Seq ID: 695 | Seq ID: 1564 |
| Accession: P17180 | Accession: P41878 |
| Swissprot_id: PER3_ARMRU | Swissprot_id: PAD1_SCHPO |
| Gi_number: 129812 | Gi_number: 3334476 |
| Description: Peroxidase C3 precursor | Description: PROTEIN PAD1/SKS1 |
| Seq ID: 696 | Seq ID: 1566 |
| Accession: Q02224 | Accession: P22793 |
| Swissprot_id: CENE_HUMAN | Swissprot_id: TRHY_SHEEP |
| Gi_number: 399227 | Gi_number: 586122 |
| Description: CENTROMERIC PROTEIN | Description: Trichohyalin |
| E (CENP-E PROTEIN) | Seq ID: 1567 |
| Seq ID: 697 | Accession: P22420 |
| Accession: P54274 | Swissprot_id: VE2_HPV47 |
| Swissprot_id: TRF1_HUMAN | Gi_number: 137682 |
| Gi_number: 2507149 | Description: REGULATORY PROTEIN |
| Description: Telomeric repeat binding | E2 |
| factor 1 | Seq ID: 1568 |
| Seq ID: 698 | Accession: P27320 |
| Accession: O50044 | Swissprot_id: FER_SYNY3 |
| Swissprot_id: KDSA_PEA | Gi_number: 2507573 |
| Gi_number: 6647535 | Description: Ferredoxin I |
| Description: 2-DEHYDRO-3- | Seq ID: 1569 |
| DEOXYPHOSPHOOCTONATE | Accession: P08393 |
| ALDOLASE | Swissprot_id: ICP0_HSV11 |
| (PHOSPHO-2-DEHYDRO-3- | Gi_number: 124134 |
| DEOXYOCTONATE ALDOLASE) | Description: Trans-acting transcriptional |
| (3-DEOXY-D-MANNO- | protein ICP0 (Immediate-early |
| OCTULOSONIC ACID 8-PHOSPHATE | protein IE110) (VMW110) |
| SYNTHETASE) | (Alpha-0 protein) |
| (KDO-8-PHOSPHATE | Seq ID: 1570 |
| SYNTHETASE) (KDO 8-P SYNTHASE) | Accession: P10569 |
| Seq ID: 699 | Swissprot_id: MYSC_ACACA |
| Accession: P04323 | Gi_number: 127749 |
| Swissprot_id: POL3_DROME | Description: Myosin IC heavy chain |
| Gi_number: 130405 | Seq ID: 1571 |
| Description: Retrovirus-related Pol | Accession: P31271 |
| polyprotein from transposon 17.6 | Swissprot_id: HXAD_HUMAN |
| [Contains: Protease; Reverse | Gi_number: 2828197 |
| transcriptase; | Description: Homeobox protein Hox-A13 |
| Endonuclease] | (Hox-1J) |
| Seq ID: 700 | Seq ID: 1572 |
| Accession: Q41853 | Accession: P48384 |
| Swissprot_id: RSH1_MAIZE | Swissprot_id: THIM_PEA |
| Gi_number: 3024577 | Gi_number: 1351239 |
| Description: HOMEOBOX PROTEIN | Description: THIOREDOXIN M-TYPE, |
| ROUGH SHEATH 1 | CHLOROPLAST PRECURSOR (TRX-M) |
| Seq ID: 701 | Seq ID: 1573 |
| Accession: P28968 | Accession: P28968 |
| Swissprot_id: VGLX_HSVEB | Swissprot_id: VGLX_HSVEB |
| Gi_number: 138350 | Gi_number: 138350 |
| Description: GLYCOPROTEIN X | Description: GLYCOPROTEIN X |
| PRECURSOR | PRECURSOR |
| Seq ID: 703 | Seq ID: 1576 |
| Accession: P28968 | Accession: Q02817 |
| Swissprot_id: VGLX_HSVEB | Swissprot_id: MUC2_HUMAN |
| Gi_number: 138350 | Gi_number: 2506877 |
| Description: GLYCOPROTEIN X | Description: MUCIN 2 PRECURSOR |
| PRECURSOR | (INTESTINAL MUCIN 2) |
| Seq ID: 704 | Seq ID: 1578 |
| Accession: P04634 | Accession: Q02283 |
| Swissprot_id: LIPG_RAT | Swissprot_id: HAT5_ARATH |
| Gi_number: 126307 | Gi_number: 399900 |
| Description: TRIACYLGLYCEROL | Description: Homeobox-leucine zipper |
| LIPASE, LINGUAL PRECURSOR | protein HAT5 (HD-ZIP protein 5) |
| (LINGUAL LIPASE) | (HD-ZIP protein ATHB-1) |
| Seq ID: 705 | Seq ID: 1580 |
| Accession: O24475 | Accession: P08393 |
| Swissprot_id: TSD1_ABIGR | Swissprot_id: ICP0_HSV11 |
| Gi_number: 17367924 | Gi_number: 124134 |
| Description: Pinene synthase, chloroplast | Description: Trans-acting transcriptional |
| precursor (Beta-geraniolene | protein ICP0 (Immediate-early |
| synthase) ((−)-(1S,5S)-pinene | protein IE110) (VMW110) |
| synthase) | (Alpha-0 protein) |
| Seq ID: 706 | Seq ID: 1585 |
| Accession: P15233 | Accession: P03186 |
| Swissprot_id: PERC_ARMRU | Swissprot_id: TEGU_EBV |
| Gi_number: 129816 | Gi_number: 135574 |
| Description: Peroxidase C1C precursor | Description: LARGE TEGUMENT |
| Seq ID: 707 | PROTEIN |
| Accession: Q02817 | Seq ID: 1586 |
| Swissprot_id: MUC2_HUMAN | Accession: Q9Y7B6 |
| Gi_number: 2506877 | Swissprot_id: PANB_EMENI |
| Description: MUCIN 2 PRECURSOR | Gi_number: 8134629 |
| (INTESTINAL MUCIN 2) | Description: 3-methyl-2-oxobutanoate |
| Seq ID: 708 | hydroxymethyltransferase |
| Accession: O57593 | (Ketopantoate |
| Swissprot_id: SUR1_FUGRU | hydroxymethyltransferase) |
| Gi_number: 6094369 | Seq ID: 1588 |
| Description: SURFEIT LOCUS PROTEIN 1 | Accession: Q06003 |
| Seq ID: 710 | Swissprot_id: GOLI_DROME |
| Accession: Q9JK11 | Gi_number: 462193 |
| Swissprot_id: RTN4_RAT | Description: Goliath protein (G1 protein) |
| Gi_number: 17367410 | Seq ID: 1591 |
| Description: Reticulon 4 (Neurite | Accession: P26861 |
| outgrowth inhibitor) (Nogo protein) | Swissprot_id: RM06_MARPO |
| (Foocen) (Glut4 vesicle 20 kDa | Gi_number: 417682 |
| protein) | Description: MITOCHONDRIAL 60S |
| Seq ID: 711 | RIBOSOMAL PROTEIN L6 |
| Accession: P14328 | Seq ID: 1592 |
| Swissprot_id: SP96_DICDI | Accession: O00401 |
| Gi_number: 134780 | Swissprot_id: WASL_HUMAN |
| Description: SPORE COAT PROTEIN | Gi_number: 13431960 |
| SP96 | Description: Neural Wiskott-Aldrich |
| Seq ID: 713 | syndrome protein (N-WASP) |
| Accession: O52535 | Seq ID: 1593 |
| Swissprot_id: CAH_KLEPN | Accession: P09065 |
| Gi_number: 5915869 | Swissprot_id: HME1_MOUSE |
| Description: Carbonic anhydrase precursor | Gi_number: 462292 |
| (Carbonate dehydratase) | Description: Homeobox protein engrailed- |
| Seq ID: 714 | 1 (Mo-En-1) |
| Accession: P35250 | Seq ID: 1595 |
| Swissprot_id: AC14_HUMAN | Accession: P33485 |
| Gi_number: 2507300 | Swissprot_id: VNUA_PRVKA |
| Description: ACTIVATOR 1 40 KDA | Gi_number: 465445 |
| SUBUNIT (REPLICATION FACTOR C | Description: PROBABLE NUCLEAR |
| 4O KDA | ANTIGEN |
| SUBUNIT) (A1 40 KDA | Seq ID: 1597 |
| SUBUNIT) (RF-C 40 KDA SUBUNIT) | Accession: Q05063 |
| (RFC40) | Swissprot_id: LYOX_CHICK |
| Seq ID: 715 | Gi_number: 462560 |
| Accession: P57078 | Description: Protein-lysine 6-oxidase |
| Swissprot_id: ANR3_HUMAN | precursor (Lysyl oxidase) |
| Gi_number: 10719883 | |
| Description: Serine/threonine-protein | |
| kinase ANKRD3 (Ankyrin repeat | |
| domain protein 3) (PKC-delta- | |
| interacting protein kinase) | |
| Seq ID: 716 | |
| Accession: P42768 | |
| Swissprot_id: WASP_HUMAN | |
| Gi_number: 1722836 | |
| Description: WISKOTT-ALDRICH | |
| SYNDROME PROTEIN (WASP) | |
| Seq ID: 717 | |
| Accession: Q94915 | |
| Swissprot_id: REG2_DROME | |
| Gi_number: 6093951 | |
| Description: RHYTHMICALLY | |
| EXPRESSED GENE 2 PROTEIN (DREG- | |
| 2) | |
| Seq ID: 718 | |
| Accession: P03211 | |
| Swissprot_id: EBN1_EBV | |
| Gi_number: 119110 | |
| Description: EBNA-1 NUCLEAR | |
| PROTEIN | |
| Seq ID: 719 | |
| Accession: P43214 | |
| Swissprot_id: MPP2_PHLPR | |
| Gi_number: 1171009 | |
| Description: POLLEN ALLERGEN PHL P | |
| 2 PRECURSOR (PHL P II) | |
| Seq ID: 720 | |
| Accession: P14947 | |
| Swissprot_id: MPL2_LOLPR | |
| Gi_number: 126386 | |
| Description: Pollen allergen Lol p 2-A (Lol | |
| p II-A) | |
| Seq ID: 721 | |
| Accession: P08640 | |
| Swissprot_id: AMYH_YEAST | |
| Gi_number: 728850 | |
| Description: GLUCOAMYLASE S1/S2 | |
| PRECURSOR (GLUCAN | |
| 1,4-ALPHA-D-GLUCOSIDASE) | |
| (1,4-ALPHA-D-GLUCAN | |
| GLUCOHYDROLASE) | |
| Seq ID: 722 | |
| Accession: Q9WVK4 | |
| Swissprot_id: EHD1_MOUSE | |
| Gi_number: 18203578 | |
| Description: EH-domain containing protein | |
| 1 (mPAST1) | |
| Seq ID: 723 | |
| Accession: P46573 | |
| Swissprot_id: APKB_ARATH | |
| Gi_number: 12644274 | |
| Description: PROTEIN KINASE APK1B | |
| Seq ID: 724 | |
| Accession: P05790 | |
| Swissprot_id: FBOH_BOMMO | |
| Gi_number: 9087216 | |
| Description: FIBROIN HEAVY CHAIN | |
| PRECURSOR (FIB-H) (H-FIBROIN) | |
| Seq ID: 725 | |
| Accession: P41900 | |
| Swissprot_id: T2FB_DROME | |
| Gi_number: 1729817 | |
| Description: TRANSCRIPTION | |
| INITIATION FACTOR IIF, BETA | |
| SUBUNIT | |
| (TFIIF-BETA) | |
| Seq ID: 726 | |
| Accession: Q9FUD1 | |
| Swissprot_id: PROA_ORYSA | |
| Gi_number: 14423855 | |
| Description: Profilin A | |
| Seq ID: 727 | |
| Accession: P16265 | |
| Swissprot_id: NU3M_MAIZE | |
| Gi_number: 1352562 | |
| Description: NADH-UBIQUINONE | |
| OXIDOREDUCTASE CHAIN 3 | |
| Seq ID: 728 | |
| Accession: P10978 | |
| Swissprot_id: POLX_TOBAC | |
| Gi_number: 130582 | |
| Description: Retrovirus-related Pol | |
| polyprotein from transposon TNT | |
| 1-94 [Contains: Protease; | |
| Reverse transcriptase; | |
| Endonuclease] | |
| Seq ID: 729 | |
| Accession: P17840 | |
| Swissprot_id: SLS3_BRAOL | |
| Gi_number: 134532 | |
| Description: S-locus-specific glycoprotein | |
| S13 precursor (SLSG-13) | |
| Seq ID: 730 | |
| Accession: P29375 | |
| Swissprot_id: RBB2_HUMAN | |
| Gi_number: 1710032 | |
| Description: Retinoblastoma-binding | |
| protein 2 (RBBP-2) | |
| Seq ID: 731 | |
| Accession: P26792 | |
| Swissprot_id: INV1_DAUCA | |
| Gi_number: 124712 | |
| Description: BETA- | |
| FRUCTOFURANOSIDASE, | |
| INSOLUBLE ISOENZYME 1 | |
| PRECURSOR | |
| (SUCROSE-6-PHOSPHATE | |
| HYDROLASE 1) (INVERTASE 1) (CELL | |
| WALL | |
| BETA-FRUCTOSIDASE 1) | |
| Seq ID: 732 | |
| Accession: Q60809 | |
| Swissprot_id: CNO7_MOUSE | |
| Gi_number: 3219782 | |
| Description: CCR4-NOT transcription | |
| complex, subunit 7 (CCR4-associated | |
| factor 1) (CAF1) | |
| Seq ID: 734 | |
| Accession: O35587 | |
| Swissprot_id: TM21_MESAU | |
| Gi_number: 3915123 | |
| Description: Transmembrane protein | |
| Tmp21 precursor (21 kDa | |
| Transmembrane trafficking | |
| protein) (Integral membrane | |
| protein p23) | |
| Seq ID: 735 | |
| Accession: P29675 | |
| Swissprot_id: TSF3_HELAN | |
| Gi_number: 267177 | |
| Description: POLLEN SPECIFIC | |
| PROTEIN SF3 | |
| Seq ID: 738 | |
| Accession: P21997 | |
| Swissprot_id: SSGP_VOLCA | |
| Gi_number: 134920 | |
| Description: SULFATED SURFACE | |
| GLYCOPROTEIN 185 (SSG 185) | |
| Seq ID: 739 | |
| Accession: P03211 | |
| Swissprot_id: EBN1_EBV | |
| Gi_number: 119110 | |
| Description: EBNA-1 NUCLEAR | |
| PROTEIN | |
| Seq ID: 740 | |
| Accession: Q9U7E0 | |
| Swissprot_id: ATRX_CAEEL | |
| Gi_number: 17367114 | |
| Description: Transcriptional regulator | |
| ATRX homolog (X-linked nuclear | |
| protein-1) | |
| Seq ID: 741 | |
| Accession: P00412 | |
| Swissprot_id: COX2_MAIZE | |
| Gi_number: 1706052 | |
| Description: CYTOCHROME C | |
| OXIDASE POLYPEPTIDE II | |
| Seq ID: 742 | |
| Accession: P28284 | |
| Swissprot_id: ICP0_HSV2H | |
| Gi_number: 124135 | |
| Description: Trans-acting transcriptional | |
| protein ICP0 (VMW118 protein) | |
| Seq ID: 745 | |
| Accession: P52824 | |
| Swissprot_id: KDGT_HUMAN | |
| Gi_number: 1708624 | |
| Description: Diacylglycerol kinase, theta | |
| (Diglyceride kinase) | |
| (DGK-theta) (DAG kinase theta) | |
| Seq ID: 746 | |
| Accession: O59816 | |
| Swissprot_id: ODP2_SCHPO | |
| Gi_number: 3914192 | |
| Description: DIHYDROLIPOAMIDE | |
| ACETYLTRANSFERASE COMPONENT | |
| OF PYRUVATE | |
| DEHYDROGENASE | |
| COMPLEX, MITOCHONDRIAL | |
| PRECURSOR (E2) | |
| (PDC-E2) | |
| Seq ID: 747 | |
| Accession: Q9NY64 | |
| Swissprot_id: GTR8_HUMAN | |
| Gi_number: 17367002 | |
| Description: Solute carrier family 2, | |
| facilitated glucose transporter, | |
| member 8 (Glucose transporter | |
| type 8) (Glucose transporter | |
| type X1) | |
| Seq ID: 748 | |
| Accession: P54873 | |
| Swissprot_id: HMCS_ARATH | |
| Gi_number: 1708236 | |
| Description: | |
| HYDROXYMETHYLGLUTARYL-COA | |
| SYNTHASE (HMG-COA SYNTHASE) | |
| (3-HYDROXY-3- | |
| METHYLGLUTARYL COENZYME A | |
| SYNTHASE) | |
| Seq ID: 749 | |
| Accession: Q38997 | |
| Swissprot_id: KI10_ARATH | |
| Gi_number: 6166239 | |
| Description: SNF1-related protein kinase | |
| KIN10 (AKIN10) | |
| Seq ID: 750 | |
| Accession: P39958 | |
| Swissprot_id: GDI1_YEAST | |
| Gi_number: 729566 | |
| Description: SECRETORY PATHWAY | |
| GDP DISSOCIATION INHIBITOR | |
| Seq ID: 751 | |
| Accession: P08640 | |
| Swissprot_id: AMYH_YEAST | |
| Gi_number: 728850 | |
| Description: GLUCOAMYLASE S1/S2 | |
| PRECURSOR (GLUCAN | |
| 1,4-ALPHA-GLUCOSIDASE) | |
| (1,4-ALPHA-D-GLUCAN | |
| GLUCOHYDROLASE) | |
| Seq ID: 753 | |
| Accession: Q00808 | |
| Swissprot_id: HET1_PODAN | |
| Gi_number: 3023956 | |
| Description: Vegetatible incompatibility | |
| protein HET-E-1 | |
| Seq ID: 754 | |
| Accession: P21997 | |
| Swissprot_id: SSGP_VOLCA | |
| Gi_number: 134920 | |
| Description: SULFATED SURFACE | |
| GLYCOPROTEIN 185 (SSG 185) | |
| Seq ID: 755 | |
| Accession: P27484 | |
| Swissprot_id: GRP2_NICSY | |
| Gi_number: 121631 | |
| Description: Glycine-rich protein 2 | |
| Seq ID: 757 | |
| Accession: O64748 | |
| Swissprot_id: COPE_ARATH | |
| Gi_number: 6647445 | |
| Description: Probable coatomer epsilon | |
| subunit (Epsilon-coat protein) | |
| (Epsilon-COP) | |
| Seq ID: 758 | |
| Accession: P40989 | |
| Swissprot_id: GLS2_YEAST | |
| Gi_number: 1707982 | |
| Description: 1,3-BETA-GLUCAN | |
| SYNTHASE COMPONENT GLS2 | |
| (1,3-BETA-D-GLUCAN-UDP | |
| GLUCOSYLTRANSFERASE) | |
| Seq ID: 760 | |
| Accession: P54654 | |
| Swissprot_id: CAP_DICDI | |
| Gi_number: 1705592 | |
| Description: ADENYLYL CYCLASE- | |
| ASSOCIATED PROTEIN (CAP) | |
| Seq ID: 761 | |
| Accession: P54927 | |
| Swissprot_id: MYO2_LYCES | |
| Gi_number: 1709204 | |
| Description: Myo-inositol-1(or 4)- | |
| monophosphatase 2 (IMPase 2) (IMP 2) | |
| (Inositol monophosphatase 2) | |
| Seq ID: 762 | |
| Accession: P38994 | |
| Swissprot_id: MSS4_YEAST | |
| Gi_number: 1709144 | |
| Description: Probable | |
| phosphatidylinositol-4-phosphate 5-kinase | |
| MSS4 | |
| (1-phosphatidylinositol-4- | |
| phosphate kinase) (PIP5K) | |
| (PtdIns(4)P-5-kinase) | |
| (Diphosphoinositide kinase) | |
| Seq ID: 764 | |
| Accession: Q9SWE7 | |
| Swissprot_id: VATE_CITLI | |
| Gi_number: 12585492 | |
| Description: Vacuolar ATP synthase | |
| subunit E (V-ATPase E subunit) | |
| (Vacuolar proton pump E subunit) | |
| (CLVE-1) | |
| Seq ID: 765 | |
| Accession: P22227 | |
| Swissprot_id: ZF42_MOUSE | |
| Gi_number: 132461 | |
| Description: Zinc finger protein 42 (Zfp- | |
| 42) (REX-1 protein) (Reduced | |
| expression-1 protein) | |
| Seq ID: 766 | |
| Accession: P91428 | |
| Swissprot_id: COQ4_CAEEL | |
| Gi_number: 3121872 | |
| Description: UBIQUINONE | |
| BIOSYNTHESIS PROTEIN COQ4 | |
| HOMOLOG | |
| Seq ID: 767 | |
| Accession: P16924 | |
| Swissprot_id: P4HA_CHICK | |
| Gi_number: 129365 | |
| Description: PROLYL 4- | |
| HYDROXYLASE ALPHA SUBUNIT | |
| Seq ID: 768 | |
| Accession: P40318 | |
| Swissprot_id: SSM4_YEAST | |
| Gi_number: 730835 | |
| Description: SSM4 PROTEIN | |
| Seq ID: 769 | |
| Accession: P38546 | |
| Swissprot_id: RAN1_LYCES | |
| Gi_number: 585777 | |
| Description: GTP-BINDING NUCLEAR | |
| PROTEIN RAN1 | |
| Seq ID: 770 | |
| Accession: P33050 | |
| Swissprot_id: C13_MAIZE | |
| Gi_number: 416731 | |
| Description: Pollen specific protein C13 | |
| precursor | |
| Seq ID: 771 | |
| Accession: P25071 | |
| Swissprot_id: TCH3_ARATH | |
| Gi_number: 17380537 | |
| Description: Calmodulin-related protein 3, | |
| touch-induced | |
| Seq ID: 777 | |
| Accession: P28968 | |
| Swissprot_id: VGLX_HSVEB | |
| Gi_number: 138350 | |
| Description: GLYCOPROTEIN X | |
| PRECURSOR | |
| Seq ID: 778 | |
| Accession: P10401 | |
| Swissprot_id: POLY_DROME | |
| Gi_number: 130583 | |
| Description: RETROVIRUS-RELATED | |
| POL POLYPROTEIN FROM | |
| TRANSPOSON GYPSY | |
| [CONTAINS: REVERSE | |
| TRANSCRIPTASE; ENDONUCLEASE] | |
| Seq ID: 779 | |
| Accession: P08640 | |
| Swissprot_id: AMYH_YEAST | |
| Gi_number: 728850 | |
| Description: GLUCOAMYLASE S1/S2 | |
| PRECURSOR (GLUCAN | |
| 1,4-ALPHA-GLUCOSIDASE) | |
| (1,4-ALPHA-D-GLUCAN | |
| GLUCOHYDROLASE) | |
| Seq ID: 781 | |
| Accession: P10978 | |
| Swissprot_id: POLX_TOBAC | |
| Gi_number: 130582 | |
| Description: Retrovirus-related Pol | |
| polyprotein from transposon TNT | |
| 1-94 [Contains: Protease; | |
| Reverse transcriptase; | |
| Endonuclease] | |
| Seq ID: 790 | |
| Accession: P53776 | |
| Swissprot_id: LHX4_MOUSE | |
| Gi_number: 8247937 | |
| Description: LIM/HOMEOBOX | |
| PROTEIN LHX4 | |
| Seq ID: 791 | |
| Accession: O35344 | |
| Swissprot_id: IMA3_MOUSE | |
| Gi_number: 3122277 | |
| Description: Importin alpha-3 subunit | |
| (Karyopherin alpha-3 subunit) | |
| (Importin alpha Q2) | |
| Seq ID: 792 | |
| Accession: Q01577 | |
| Swissprot_id: PKPA_PHYBL | |
| Gi_number: 3122617 | |
| Description: Serine/threonine protein | |
| kinase PKPA | |
| Seq ID: 793 | |
| Accession: P14328 | |
| Swissprot_id: SP96_DICDI | |
| Gi_number: 134780 | |
| Description: SPORE COAT PROTEIN | |
| SP96 | |
| Seq ID: 794 | |
| Accession: P53683 | |
| Swissprot_id: CDP2_ORYSA | |
| Gi_number: 1705734 | |
| Description: Calcium-dependent protein | |
| kinase, isoform 2 (CDPK 2) | |
| Seq ID: 795 | |
| Accession: P05492 | |
| Swissprot_id: ATP0_OENBI | |
| Gi_number: 114408 | |
| Description: ATP synthase alpha chain, | |
| mitochondrial | |
| Seq ID: 796 | |
| Accession: P30175 | |
| Swissprot_id: ADF_LILLO | |
| Gi_number: 231509 | |
| Description: Actin-depolymerizing factor | |
| (ADF) | |
| Seq ID: 797 | |
| Accession: P04146 | |
| Swissprot_id: COPI_DROME | |
| Gi_number: 13124684 | |
| Description: Copia protein [Contains: | |
| Copia VLP protein; Copia protease] | |
| Seq ID: 798 | |
| Accession: P08547 | |
| Swissprot_id: LIN1_HUMAN | |
| Gi_number: 126295 | |
| Description: LINE-1 REVERSE | |
| TRANSCRIPTASE HOMOLOG | |

[0692] TABLE 12

| | | | | | |
|---|---|---|---|---|---|
| | | | | PCR | |
| | | | | product | |
| Promoter | | | | size | |
| Name | Unigene Number | forward primer | reverse primer | (bp) | Description |

| | | | | | |
|---|---|---|---|---|---|
| RC1 | AC00713825/ | TACAAAAAAGCAGGCT | TACAAGAAAGCTGGGTC | 1970 | |
| | 12797_s_at | CAAATTTTGGGTCATG | TTCTCCTATCTGCATAAA | | |
| | | GATTAGTTTCACGC | ATGGTATTTCACA | | |
| | | SEQ ID NO 6002 | SEQ ID NO 6003 | | |
| RC2 | AC000132.6/ | TACAAAAAAGCAGGCT | TACAAGAAAGCTGGGTG | 1003 | |
| | 16420_at | CAAGCCGCTTTCACTT | GCTTATTTGCACCGGTAT | | |
| | | GACGGAACTTGC | AAAGTTAGGGATC | | |
| | | SEQ ID NO 6004 | SEQ ID NO 6005 | | |
| RC3 | WT755/ | TACAAAAAAGCAGGCT | TACAAGAAAGCTGGGTC | 1260 | |
| | 14701_s_at | AGGCAACCCACCCTTC | CACGATGCAGAATAAAG | | |
| | | GGTGGTTG | GCATAAATTCAGAAGCA | | |
| | | SEQ ID NO 6006 | SEQ ID NO 6007 | | |
| RC4 | AF08012011/ | TACAAAAAAGCAGGCT | TACAAGAAAGCTGGGTA | 1970 | |
| | 16935_s_at | GGCACCTTCAAGTACC | TCCAAACTACTCTCCGC | | |
| | | AGTTTCCTTGAAATG | GAAGTGTGTG | | |
| | | SEQ ID NO 6008 | SEQ ID NO 6009 | | |
| RC5 | Z151571/ | TACAAAAAAGCAGGCT | TACAAGAAAGCTGGGTC | 1897 | |
| | 16982_at | GCAACGAATTTAATGG | GCAGAGGCTTATATAGA | | |
| | | TGCAATCGGATCATG | GGGGAG | | |
| | | SEQ ID NO 6010 | SEQ ID NO 6011 | | |
| RC6 | AL023094323/ | TACAAAAAAGCAGGCT | TACAAGAAAGCTGGGTC | 952 | |
| | 16515_s_at | GCTCTAGCTTTAGTCC | TTGCTTCCTCTTCTCTCT | | |
| | | CGGTTTGGTAACACC | CCTCTCCGATG | | |
| | | SEQ ID NO 6012 | SEQ ID NO 6013 | | |
| RC7 | ATU5629/ | TACAAAAAAGCAGGCT | TACAAGAAAGCTGGGTC | 1940 | |
| | 15180_s_at | GTCGACGTTACATGAG | CTCGGGTGTTTTGGTTT | | |
| | | GAACTTTCTTGTGC | GGAGAG | | |
| | | SEQ ID NO 6014 | SEQ ID NO 6015 | | |
| RC8 | AF063901/ | TACAAAAAAGCAGGCT | TACAAGAAAGCTGGGTC | 1276 | |
| | 14737_s_at | CAGGCCATACAGCTCT | ACACACACACACACAAAG | | |
| | | ATCGCCTCAGCCAG | GCCCATCAGGCCC | | |
| | | SEQ ID NO 6016 | SEQ ID NO 6017 | | |
| RC9 | OS001432 | TACAAAAAAGCAGGCT | TACAAGAAAGCTGGGTG | 2050 | Similar to gi\|3461812\|gb\|AAC32906.1\| |
| | | GCATCCTCAACATACT | TGGAGGAGCACGCAGAG | | putative basic blue protein |
| | | GAAACAATGTACTAAC | GA | | (plantacyanin) [Arabidopsis thaliana] |
| | | SEQ ID NO 6018 | SEQ ID NO 6019 | | |
| RC10 | OS004268 | TACAAAAAAGCAGGCT | TACAAGAAAGCTGGGTT | 1947 | Similar to YPU3_RHOCA P26159 |
| | | ATGCCAGCCAAATTGC | GCCGGCCGGTGGGCTG | | RHODOBACTER CAPSULATUS |
| | | CGGCCAAAGTGCCAAC | GTGCCT | | (RHODOPSEUDOMONAS |
| | | SEQ ID NO 6020 | SEQ ID NO 6021 | | CAPSULATA). HYPOTHETICAL 5.8 |
| | | | | | KD PROTEIN IN PUHA 5 REGION |
| | | | | | (0RF55). |
| RC11 | OS004356 | TACAAAAAAGCAGGCT | TACAAGAAAGCTGGGTC | 1929 | Similar to SAHH_PYRFU P50251 |
| | | CCAATATGGATACAAT | GTCCATCTTTCCTTGCTC | | PYROCOCCUS FURIOSUS. |
| | | CCGAGTAGTCCTTGTC | CTCTCACT | | ADENOSYLHOMOCYSTEINASE (EC |
| | | G | SEQ ID NO 6023 | | 3.3.1.1) (S-ADENOSYL-L- |
| | | SEQ ID NO 6022 | | | HOMOCYSTEINEHYDROLASE) |
| | | | | | (ADOHCYASE) (FRAGMENT). |
| RC12 | OS005221_r_at | TACAAAAAAGCAGGCT | TACAAGAAAGCTGGGTT | 2053 | |
| | | CGAGCAGGTATCGAGC | GTCACCCACCCCAATCA | | |
| | | ATTGCCGTC | AGCTAAGCTATCT | | |
| | | SEQ ID NO 6024 | SEQ ID NO 6025 | | |
| RC13 | OS024307_r_at | TACAAAAAAGCAGGCT | TACAAGAAAGCTGGGTG | 2000 | Similar to gi\|8777294\|dbj\|BAA96884.1\| |
| | | ATGTGTAACACGCATG | TTGGATGAGGAGAAGGA | | gb\|AAD26867.1˜gene_id:MAB16.4˜ |
| | | GTGTGATGG | TGGATGG | | similar to unknown protein |
| | | SEQ ID NO 6026 | SEQ ID NO 6027 | | [Arabidopsis thaliana] |
| RC14 | OS014617.1_f_at | TACAAAAAAGCAGGCT | TACAAGAAAGCTGGGTG | 1989 | Similar to gi\|4191792\|gb\|AAD10161.1\| |
| | | GTGCTGTAATAGCTTG | CTTAGTAGTAGTAATTGT | | hypothetical protein [Arabidopsis |
| | | CCTTTGCTAAATC | TATTGTCTCCGG | | thaliana] |
| | | SEQ ID NO 6028 | SEQ ID NO 6029 | | |
| RC15 | OS025078.1_r_at | TACAAAAAAGCAGGCT | TACAAGAAAGCTGGGTT | 1934 | Similar to |
| | | AGCATCAAGAACCAGT | AAGGGGGTGTTTGGATA | | gi\|5932544\|gb\|AAD56999.1\|AC00946 |
| | | GAACGATGG | TAGGGTG | | 5_13 hypothetical protein |
| | | SEQ ID NO 6030 | SEQ ID NO 6031 | | [Arabidopsis thaliana] |
| RC16 | OS003603.1_r_at | TACAAAAAAGCAGGCT | TACAAGAAAGCTGGGTTT | 1951 | Similar to YCE2_YEAST P25572 |
| | | GAACTCTGGTCGTCAT | GGAGAGCTCGAGAGAGA | | SACCHAROMYCES CEREVISIAE |
| | | CACCACACC | GGGTTG | | (BAKER S YEAST). HYPOTHETICAL |
| | | SEQ ID NO 6032 | SEQ ID NO 6033 | | 13.3 KD PROTEIN IN PD\|1-GLK1 |
| | | | | | INTERGENIC REGION. |
| RC17 | OS_OF010093_ | TACAAAAAAGCAGGCT | TACAAGAAAGCTGGGTA | 1923 | Open Reading Frame |
| | r_at | GCGCAAAACGGTATAG | GAGACTGGTAGTAGCAG | | OS_ORF010093 ST(R) HTC060970- |
| | | GTCTGAACG | GGGGTGG | | A01.F.4 FRAME: 1 ORF: 2 LEN: 891 |
| | | SEQ ID NO 6034 | SEQ ID NO 6035 | | |
| RC18 | OS019298_r_at | TACAAAAAAGCAGGCT | TACAAGAAAGCTGGGTC | 1927 | Similar to YR01_CAEEL Q10014 |
| | | CGCATATCTTATTGCTC | TGCTCGGCGAGGCAGG | | CAENORHABDITIS ELEGANS. |
| | | CGTAGTTCGTATGAG | G | | HYPOTHETICAL 26.0 KD PROTEIN |
| | | SEQ ID NO 6036 | SEQ ID NO 6037 | | T25E4.1 IN CHROMOSOME II |
| | | | | | PRECURSOR. |
| RC19 | OS004151_r_at | TACAAAAAAGCAGGCT | TACAAGAAAGCTGGGTC | 1965 | Similar to gi\|3406035\|gb\|AAC29139.1\| |
| | | ACGATCAGACTCCTAA | ATTGCGGCCAAAGCAAA | | TINY [Arabidopsis thaliana] |
| | | TTGCCGCTC | GC | | |
| | | SEQ ID NO 6038 | SEQ ID NO 6039 | | |
| RC20 | OS012854_r_at | TACAAAAAAGCAGGCT | TACAAGAAAGCTGGGTTT | 1991 | Similar to YY19_HUMAN P09002 |
| | | CTCGGAACACGAAAAC | CCGATCTCTTCCCATTTC | | HOMO SAPIENS (HUMAN). |
| | | CAACTCAAC | CATTC | | HYPOTHETICAL Y- |
| | | SEQ ID NO 6040 | SEQ ID NO 6041 | | CHROMOSOMAL 19 KD PROTEIN. |
| RC21 | OS023348_r_at | TACAAAAAAGCAGGCT | TACAAGAAAGCTGGGTC | 1985 | Similar to Y168_HUMAN P50749 |
| | | GGCATAGGATTATGAA | ATCCTTAGATGCGCGGC | | HOMO SAPIENS (HUMAN). |
| | | TGGATGGTGC | CAG | | HYPOTHETICAL PROTEIN |
| | | SEQ ID NO 6042 | SEQ ID NO 6043 | | KIAA0168. |
| RC22 | OS003824_r_at | TACAAAAAAGCAGGCT | TACAAGAAAGCTGGGTG | 1992 | Similar to gi\|8096630\| |
| | | GGAGCATGTACTCTTT | CGGCCCGATGCGATCGG | | dbj\|BAA96201.1\|hypothetical protein |
| | | ATAACTAACTTTACATG | SEQ ID NO 6045 | | [Oryza sativa] |
| | | SEQ ID NO 6044 | | | |
| RC23 | OS007113_r_at | TACAAAAAAGCAGGCT | TACAAGAAAGCTGGGTG | 1970 | Similar to |
| | | GTGATATACGCATAAG | AGCACGTGGTGCGAGGG | | gi\|6553904\|gb\|AAF16570.1\|AC012563 |
| | | GAATTATTTCCTCCG | AAG | | _23 hypothetical protein |
| | | SEQ ID NO 6046 | SEQ ID NO 6047 | | [Arabidopsis thaliana] |
| RC24 | OS008815_r_at | TACAAAAAAGCAGGCT | TACAAGAAAGCTGGGTG | 1940 | Similar to |
| | | TTCGAAATCGTGCATT | CTAGCAAGGGAGAGGTA | | gi\|1785674\|emb\|CAA69779.1\| orf153a |
| | | CAACAAAGC | GCGGAAG | | [Arabidopsis thaliana] |
| | | SEQ ID NO 6048 | SEQ ID NO 6049 | | |
| RC25 | OS004598_r_at | TACAAAAAAGCAGGCT | TACAAGAAAGCTGGGTG | 1976 | Similar to LSHB_MOUSE 009108 |
| | | CTGTCACCGTCTTGAC | CGAACTAGATGGCGAGA | MUS MUSCULUS (MOUSE). | |
| | | CCGACTTC | TTTGGTC | | LUTROPIN BETA CHAIN |
| | | SEQ ID NO 6050 | SEQ ID NO 6051 | | PRECURSOR (LUTEINIZING |
| | | | | | HORMONE) (LSH-B) (LH- |
| | | | | | B)(FRAGMENT). |
| RC26 | OS021684_r_at | TACAAAAAAGCAGGCT | TACAAGAAAGCTGGGTA | 1913 | Similar to IHA_SHEEP P38440 |
| | | GTACCCATGCCTTGCA | AGTCGCGCCACATTGCT | | OVIS ARIES (SHEEP). INHIBIN |
| | | ACAATGTCC | GTCATC | | ALPHA CHAIN (FRAGMENT). |
| | | SEQ ID NO 6052 | SEQ ID NO 6053 | | |
| RC27 | OS_ORF001938_ | TACAAAAAAGCAGGCT | TACAAGAAAGCTGGGTC | 1949 | Open Reading Frame |
| | r_at | GCAAGGTGGACAATGT | AGAAGAGGAGTGATGGA | | OS_ORF001938 HTC011169-A01.13 |
| | | GTGGAGTTC | GAAGAAGGC | | FRAME: 1 ORF: 2 LEN: 1011 |
| | | SEQ ID NO 6054 | SEQ ID NO 6055 | | |
| RC28 | OS_ORF013133_ | TACAAAAAAGCAGGCT | TACAAGAAAGCTGGGTG | 1976 | Open Reading Frame |
| | r_at | GGGACCCATAGTCACT | CAGTCCCCTCCTCTTGC | | OS_ORF013133 HTC083102- |
| | | GGGTGTTTG | AGC | | A01.R.9 FRAME: −3 ORF: 2 LEN: 684 |
| | | SEQ ID NO 6056 | SEQ ID NO 6057 | | |
| RC29 | OS005221_r_at | TACAAAAAAGCAGGCT | TACAAGAAAGCTGGGTT | 1957 | Similar to |
| | | TGGAGGAACGAAGCAG | GTCACCCACCCCAATCA | | gi\|8099126\|dbj\|BAA90498.1\| rice |
| | | TAGCACAAG | AGCTAAG | | ESTs AA754121, AW155454, D48581 |
| | | SEQ ID NO 6058 | SEQ ID NO 6059 | | correspond to a region of the |
| | | | | | predicated gene; unknown protein |
| | | | | | [Oryza sativa] |
| RC30 | OS_ORF001266_ | TACAAAAAAGCAGGCT | TACAAGAAAGCTGGGTC | 1920 | Open Reading Frame |
| | r_at | CAAGCTCACCGGCGTC | CACCGCCATCGACTCCT | | OS_ORF001266 HTC007198-A01.6 |
| | | GTACTC | ACTG | | FRAME: −2 ORF: 1 LEN: 669 |
| | | SEQ ID NO 6060 | SEQ ID NO 6061 | | |
| RC31 | OS_ORF013948_ | TACAAAAAAGCAGGCT | TACAAGAAAGCTGGGTG | 1946 | Open Reading Frame |
| | r_at | CCCGTCAGTTTAAATAT | CCAGGGGCAAGGGTAG | | OS_ORF013948 HTC089691- |
| | | AGGCACCCG | GAGAG | | A01.R.17 FRAME: 2 ORF: 4 LEN: 738 |
| | | SEQ ID NO 6062 | SEQ ID NO 6063 | | |
| RC32 | OS_ORF014602_ | TACAAAAAAGCAGGCT | TACAAGAAAGCTGGGTG | 1997 | Open Reading Frame containing a |
| | r_at | CTCCAATCCTCGTCAA | TTGGACTGACATGTGGG | | Sage tag sequence near 3 end |
| | | TCCCATC | GC | | OS_ORF014602 ST(F) HTC094277- |
| | | SEQ ID NO 6064 | SEQ ID NO 6065 | | A01.F.15 FRAME: 3 ORF: 1 LEN: 546 |
| RC33 | OS009022_r_at | TACAAAAAAGCAGGCT | TACAAGAAAGCTGGGTG | 1999 | Similar to |
| | | GTACATGTACCTGCAT | CCACGTACGTTACGATC | | gi\|5006851\|gb\|AAD37696.1\|AF145727 |
| | | CAGAATCTAGTTC | AGTAAC | | _1 homeodomain leucine zipper |
| | | SEQ ID NO 6066 | SEQ ID NO 6067 | | protein [Oryza sativa] |
| RC34 | OS_ORF001266_ | CACCCGGAGAAGCTCA | GTATGTTCGCCGTGGCC | 1843 | Similar to gi\|3461812\|gb\|AAC32906.1\| |
| | r_at | CGCCCTTG | ATTTG | | putative basic blue protein |
| | | SEQ ID NO 6068 | SEQ ID NO 6069 | | (plantacyanin) |
| | | | | | [Arabidopsis thaliana] |
| RC35 | OS002956.1_s_ | CACCCTTGCGTGCAAT | GAAATCGAACCGGACCC | 1212 | Similar to YPU3_RHOCA P26159 |
| | at | GATAGATGGTG | GAAC | | RHODOBACTER CAPSULATUS |
| | | SEQ ID NO 6070 | SEQ ID NO 6071 | | (RHODOPSEUDOMONAS |
| | | | | | CAPSULATA). HYPOTHETICAL 5.8 |
| | | | | | KD PROTEIN IN PUHA 5 REGION |
| | | | | | (ORF55). |
| RC36 | OS008536.1_r_ | CACCAGACACTGCAGA | CCATGAGATAGATGTGG | 1926 | Similar to SAHH_PYRFU P50251 |
| | at | GATCCTCTTG | ATGAGGTCC | | PYROCOCCUS FURIOSUS. |
| | | SEQ ID NO 6072 | SEQ ID NO 6073 | | ADENOSYLHOMOCYSTEINASE (EC |
| | | | | | 3.3.1.1) (S-ADENOSYL-L- |
| | | | | | HOMOCYSTEINEHYDROLASE) |
| | | | | | (ADOHOYASE) (FRAGMENT). |
| RC37 | OS009022_r_ | CACCAGACGAGTCTAG | CACCCATCACAAGCCAAT | Doublecheck | |
| | at | TGTCCATATAG | GCAGAAGC | 3′ primer | |
| | | SEQ ID NO 6074 | SEQ ID NO 6075 | | |
| RC38 | OS022635_r_ | CACCTCCGGTGTACTT | GACAAAGGAGTAGGATC | 1890 | Similar to gi\|8777294\|dbj\|BAA96884.1\| |
| | at | CGAGATAGTC | AATGCATGC | | gb\|AAD26867.1-gene_id:MAB16.4- |
| | | SEQ ID NO 6076 | SEQ ID NO 6077 | | similar to unknown protein |
| | | | | | [Arabidopsis thaliana] |

### References

[0693] Abel et al., Science, 232:738 (1986).

[0694] Aharoni et al., Plant Cell, 5:613 (2000).

[0695] Altschul et al. Nucleic Acids Res., 25:3389 (1997).

[0696] Altschul et al., J. Mol. Biol., 215:403 (1990).

[0697] An et al., EMBO J., 4:277 (1985).

[0698] Aoyama et al., Plant Journal, 11:605 (1997).

[0699] AtMas, et al, Plant Mol. Biol., 2:335 (1983).

[0700] Auch & Reth, Nucleic Acids Research, 18:6743 (1990).

[0701] Ballas et al., Nucleic Acids Res., 17:7891 (1989).

[0702] Bansal et al., Proc. Natl. Acad. Sci. USA, 89:3654 (1992).

[0703] Barkai-Golan et al., Arch. Microbiol., 116:119 (1978).

[0704] Barton et al., Plant Physiol., 85:1103 (1987).

[0705] Batzer et al., Nucleic Acid Res., 19:5081 (1991).

[0706] Beals et al., Plant Cell, 9:1527 (1997).

[0707] Belanger et al., Genetics, 129:863 (1991).

[0708] Bernal-Lugo and Leopold, Plant Physiol., 98:1207 (1992).

[0709] Bevan et al., Nucl. Acids Res., 11:369 (1983).

[0710] Bevan et al., Nature, 304:184 (1983).

[0711] Bevan, Nucl. Acids Res., 12:8711 (1984).

[0712] Bird et al., Plant Molecular Biology, 11:651 (1988).

[0713] Bisaro, Homologous Recomb. Gene Silencing Plants, pp. 219-70, Paszkowski & Jerzy (eds.) (1994).

[0714] Blackman et al., Plant Physiol., 100:225 (1992).

[0715] Blochlinger & Diggelmann, Mol Cell Biol, 4:2929 (1984).

[0716] Bol et al., Ann. Rev. Phytopath., 28:113 (1990).

[0717] Bouchez et al., EMBO J., 8:4197 (1989).

[0718] Bouchez et al., EMBO Journal, 8:4197 (1989).

[0719] Bourouis et al., EMBO J., 2:1099 (1983).

[0720] Bowler et al., Ann. Rev. Plant Physiol., 43:83 (1992).

[0721] Branson and Guss, Proc. North Central Branch Entomological Society of America (1972).

[0722] Broakgert et al., Science, 245:110 (1989).

[0723] Brown et al., PNAS USA, 97:262 (2000).

[0724] Byrne et al. Plant Cell Tissue and Organ Culture, 8:3 (1987).

[0725] Callis et al., Genes and Develop., 1:1183 (1987).

[0726] Callis et al., J. Biol. Chem., 265:12486 (1990).

[0727] Campbell and Gowri, Plant Physiol., 92:1 (1990).

[0728] Castrsana et al., EMBO J., 7:1929 (1988).

[0729] Chandler et al., Plant Cell, 1:1175 (1989).

[0730] Chee et al. Plant Physiol., 91:1212 (1989).

[0731] Chee et al., Methods Mol. Biol., 44:101 (1995).

[0732] Christou et al. Proc. Natl. Acad. Sci USA, 86:7500 (1989).

[0733] Christou et al., Biotechnology, 9:957 (1991).

[0734] Christou et al., Plant Physiol., 87:671 (1988).

[0735] Coe et al., In: Corn and Corn Improvement, Sprague et al. (eds.) pp. 81-258 (1988).

[0736] Cordero et al., Plant J., 6:141 (1994).

[0737] Corpet et al. Nucleic Acids Res., 16:10881 (1988).

[0738] Coxson et al., Biotropica, 24:121 (1992).

[0739] Crameri et al., Nature Biotech., 15:436 (1997).

[0740] Crameri et al., Nature, 391:288 (1998).

[0741] Crossway et al., BioTechniques, 4:320 (1986).

[0742] Cuozzo et al., Bio/Technology, 6:549 (1988).

[0743] Cutler et al., J. Plant Physiol., 135:351 (1989).

[0744] Czako et al., Mol. Gen. Genet., 235:33 (1992).

[0745] Czapla and Lang, J. Econ. Entomol., 83:2480 (1990).

[0746] Datta et al., Bio/Technology, 8:736 (1990).

[0747] Davies et al., Plant Physiol., 93:588 (1990).

[0748] Dayhoff et al., Atlas of Protein Sequence and Structure, Natl. Biomed. Res. Found., Washington, C. D. (1978).

[0749] De Blaere et al., Meth. Enzymol., 143:277 (1987).

[0750] De Block et al. Plant Physiol., 91:694 (1989).

[0751] De Block et al., EMBO Journal, 6:2513 (1987).

[0752] Della-Cioppa et al., Plant Physiology, 84:965-968 (1987).

[0753] Dellaporta et al., in Chromosome Structure and Function, Plenum Press, 263-282 (1988).

[0754] Dennis et al., Nucleic Acids Res., 12:3983 (1984).

[0755] Depicker et al., Plant Cell Reports, 7:63 (1988).

[0756] DeRisi et al., Science, 278:680 (1997).

[0757] Desprez et al., Plant J., 14:643 (1998).

[0758] Diekman & Fischer, EMBO, 7:3315 (1988).

[0759] Duggan et al., Nat. Genet., 21:10 (1999).

[0760] Dunn et al., Can. J. Plant Sci., 61:583 (1981).

[0761] Dure et al., Plant Mol. Biol., 12:475 (1989).

[0762] Eisen et al., PNAS USA, 95:14863 (1998).

[0763] Ellis et al., EMBO Journal, 6:3203 (1987).

[0764] Elroy-Stein et al., Proc. Natl. Acad. Sci. U.S.A., 86:6126 (1989).

[0765] English et al., Plant Cell, 8:179 (1996).

[0766] Erdmann et al., J. Gen. Microbiol., 138:363 (1992).

[0767] Everett et al., Bio/Technology, 5:1201(1987).

[0768] Fitzpatrick, Gen. Engineering News, 22:7 (1993).

[0769] Franken et al., EMBO J., 10:2605 (1991).

[0770] Fromm et al., Nature (London), 319:791 (1986).

[0771] Fromm et al., Bio/Technology, 8:833 (1990).

[0772] Gallie et al., Nucleic Acids Res., 15:3257 (1987).

[0773] Gallie et al., The Plant Cell, 1:301 (1989).

[0774] Gan et al., Science, 270:1986 (1995).

[0775] Gatehouse et al., J. Sci. Food Agric., 35:373 (1984).

[0776] Gatz, Current Opinion in Biotechnology, 7:168 (1996).

[0777] Gatz, Annu. Rev. Plant Physiol. Plant Mol. Biol., 48:89 (1997).

[0778] Gelfand, eds., PCR Strategies Academic Press, New York (1995).

[0779] Gelvin et al., Plant Molecular Biology Manual, (1990).

[0780] Giege et al., Plant J., 15:721 (1998).

[0781] Gordon-Kamm et al., Plant Cell, 2:603 (1990).

[0782] Goring et al, PNAS, 88:1770 (1991).

[0783] Graham et al., Biochem. Biophys. Res. Comm., 101:1164 (1981).

[0784] Graham et al., J. Biol. Chem., 260:6555 (1985).

[0785] Graham et al., J. Biol. Chem., 260:6561 (1985).

[0786] Gritz et al., Gene, 25:179 (1983).

[0787] Gruber, et al., Vectors for Plant Transformation, in: Methods in Plant Molecular Biology & Biotechnology” in Glich et al., (Eds. pp. 89-119, CRC Press, 1993).

[0788] Guerineau et al., Mol. Gen. Genet., 262:141 (1991).

[0789] Guerrero et al., Plant Mol. Biol., 15:11 (1990).

[0790] Gupta et al., PNAS, 90:1629 (1993).

[0791] Haines and Higgins (eds.), Nucleic Acid Hybridization, IRL Press, Oxford, U.K.

[0792] Hammock et al., Nature, 344:458 (1990).

[0793] Hemenway et al., EMBO Journal, 7:1273 (1988).

[0794] Henikoff & Henikoff, Proc. Natl. Acad. Sci. USA, 89:10915 (1989).

[0795] Hiei et al., Plant J., 6:271 (1994).

[0796] Higgins et al., CABIOS, 5:151 (1989).

[0797] Higgins et al., Gene, 73:237 (1988).

[0798] Hilder et al., Nature, 330:160 (1987).

[0799] Hinchee et al. Bio/Technology 6:915 (1988).

[0800] Hoekema, In: The Binary Plant Vector System. Offset-drukkerij Kanters B. V.; Alblasserdam (1985).

[0801] Huang et al., CABIOS, 8:155 (1992).

[0802] Hudspeth & Grula, Plant Molec. Biol., 12, 579 (1989).

[0803] Hughes et al., J. Mol. Biol., 296:1205 (2000).

[0804] Ikeda et al., J. Bacteriol., 169:5612 (1987).

[0805] Ikuta et al., Biotech., 8:241 (1990).

[0806] Ingelbrecht et al., Plant Cell, 1:671 (1989).

[0807] Innis et al., PCR Protocols: A Guide to Methods and Applications, Academic Press, Inc., San Diego, Calif. (1990).

[0808] Innis and Gelfand, eds., PCR Methods Manual (Academic Press, New York) (1999).

[0809] Innis et al., eds., PCR Protocols: A Guide to Methods and Applications (Academic Press, New York (1995).

[0810] Jefferson et al, EMBO J, 6: 3901-3907 (1987).

[0811] Jobling et al., Nature, 325:622 (1987).

[0812] John et al., Proc. Natl. Acad. Sci. USA, 89:5769 (1992).

[0813] Johnson et al., PNAS USA, 86:9871 (1989)

[0814] Joshi et al., Nucleic Acid Res., 15:9627 (1987).

[0815] Kaasen et al., J. Bacteriol., 174:889 (1992).

[0816] Kagaya et al., Nucleic Acids Res., 27:470 (1999).

[0817] Karlin and Altschul, Proc. Natl. Acad Sci. USA, 87:2264 (1990).

[0818] Karlin and Altschul, Proc. Natl. Acad. Sci. USA, 90:5873 (1993).

[0819] Karsten et al., Botanica Marina, 35:11 (1992).

[0820] Katz et al., J. Gen. Microbiol., 129:2703 (1983).

[0821] Kehoe et al., Trends Plant Sci., 4:38 (1999).

[0822] Keller et al., EMBO Journal, 8:1309 (1989).

[0823] Keller et al., Genes Dev., 3:1639 (1989).

[0824] Klein et al., Nature, 327:70 (1987).

[0825] Klein et al., Bio/Technoloy, 6:559 (1988).

[0826] Klein et al., Plant Physiol., 91:440 (1988).

[0827] Klein et al., Proc. Natl. Acad. Sci. USA, 85:4305 (1988).

[0828] Knauf, et al., Genetic Analysis of Host Range Expression by Agrobacterium In: Molecular Genetics of the Bacteria-Plant Interaction, Puhler, A. ed., Springer-Verlag, New York, 1983.

[0829] Koehl P. and Delarue M., Curr. Opin. Struct. Biol., 6:222 (1996).

[0830] Kohler et al., Plant Mol. Biol., 29:1293 (1995).

[0831] Koster and Leopold, Plant Physiol., 88:829 (1988).

[0832] Koziel et al., Biotechnology, 11:194 (1993).

[0833] Kridl et al., Seed Science Research, 1:209 (1991).

[0834] Kriz et al., Mol. Gen. Genet., 207:90 (1987).

[0835] Kunkel et al., Methods in Enzymol., 154:367 (1987).

[0836] Kunkel, Proc. Natl. Acad. Sci. USA, 82:488 (1985).

[0837] Lam et al., Plant Cell, 1:1147 (1989).

[0838] Landolt, Biosystematic Investigation on the Family of Duckweeds: The family of Lemnaceae—A Monograph Study. Geobatanischen Inistitut ETH, Stiftung Rubel, Zurich (1986).

[0839] Langridge et al., Proc. Natl Acad. Sci. U.S.A., 86:3219 (1989).

[0840] Langridge et al., Cell, 34:1015 (1983).

[0841] Lashkari et al., PNAS USA, 94:8945 (1997).

[0842] Laufs et al., PNAS, 87:7752 (1990).

[0843] Lawton et al., Mol. Cell Biol., 7:335 (1987).

[0844] Lee and Saier, J. Bacteriol., 153 (1982).

[0845] Lesyng B. and McCammon J A, Pharmocol. Ther., 60:149 (1993).

[0846] Levings, Science, 250:942 (1990).

[0847] Lindsey et al., Transgenic Research, 2:3347 (1993).

[0848] Lindstrom et al., Der. Genet., 11:160 (1990).

[0849] Lockhart et al., Nat. Biotechnol, 14:1649 (1996).

[0850] Lockhart and Winzeler, Nature, 405:827 (2000).

[0851] Lommel et al., Virology, 181:382 (1991).

[0852] Loomis et al., J. Expt. Zool., 252:9 (1989).

[0853] Lorz et al., Mol. Gen. Genet., 199:178 (1985).

[0854] Lyznik et al., Nucleic Acids Res., 21:969 (1993).

[0855] Ma et al., Nature, 334 :631 (1988).

[0856] Macejak et al., Nature, 353:90 (1991).

[0857] Maki et al., Methods in Plant Molecular Biology & Biotechnology, Glich et al., 67-88 CRC Press, (1993).

[0858] Maleck et al., Nat. Genet., 26:403 (2000).

[0859] Mansson et al., Gen. Genet., 200:356 (1985).

[0860] Mariani et al, Nature, 347:737 (1990).

[0861] Martinez et al., J. Mol. Biol., 208:551 (1989).

[0862] McBride et al., Plant Molecular Biology, 14:266 (1990).

[0863] McBride et al., PNAS USA, 91:7301 (1994).

[0864] McCabe et al., Bio/Technology, 6:923 (1988).

[0865] McElroy et al., Mol. Gen. Genet., 231:150 (1991).

[0866] Meinkoth and Wahl, Anal. Biochem., 138:267 (1984).

[0867] Messing and Vierra, Gene, 19:259 (1982).

[0868] Michael et al., J. Mol. Biol., 26 :585 (1990).

[0869] Mogen et al., Plant Cell, 2:1261 (1990).

[0870] Moore et al., J. Mol. Biol., 272:336 (1997).

[0871] Mundy and Chua, EMBO J., 7:2279 (1988).

[0872] Munroe et al., Gene, 91:151 (1990).

[0873] Murakami et al., Mol. Gen. Genet., 205:42 (1986).

[0874] Murata et al., FEBS Lett., 296:187 (1992).

[0875] Murdock et al., Phytochemistry, 29:85 (1990).

[0876] Murray et al., Nucleic Acids Res., 17:477 (1989).

[0877] Myers and Miller, CABIOS, 4:11 (1988).

[0878] Napoli et al., Plant Cell, 2:279 (1990).

[0879] Narasimhulu et al, Plant Cell, 8: 873-886, (1996).

[0880] Needleman and Wunsch, J. Mol. Biol., 48:443-453 (1970).

[0881] Newman et al., Plant Physiol., 106:1241 (1994).

[0882] Niedz et al., Plant Cell Reports, 14:403 (1995).

[0883] Odell et al., Mol. Gen. Genet., 113:369 (1990).

[0884] Odell et al., Homologous Recomb. Gene Silencing Plants, 219-70, Paszkowski & Jerzy (eds) (1994).

[0885] Odell et al., Nature, 313:810 (1985).

[0886] Ohtsuka et al., J. Biol. Chem., 260:2605 (1985).

[0887] Ow et al., Science, 234:856 (1986).

[0888] Pacciotti et al., Bio/Technology, 3:241 (1985).

[0889] Park et al., J. Plant Biol., 38:365 (1985).

[0890] Paszkowski et al., EMBO J., 3:2717 (1984).

[0891] Pear et al., Plant Molecular Biology, 13:639 (1989).

[0892] Pearson and Lipman, Proc. Natl. Acad. Sci., 85:2444 (1988).

[0893] Pearson et al., Meth. Mol. Biol., 24:307 (1994).

[0894] Perlak et al., Proc. Natl. Acad. Sci. USA, 88:3324 (1991).

[0895] Phillips et al., In Corn & Corn Improvement, 3rd Edition 10 Sprague et al. (Eds. pp. 345-387)(1988).

[0896] Phi-Van et al., Mol. Cell. Biol., 10:2302 (1990).

[0897] Piatkowski et al., Plant Physiol., 94:1682 (1990).

[0898] Potrykus et al., Mol. Gen. Genet., 199:183 (1985).

[0899] Potrykus, Trends Biotech., 7:269 (1989).

[0900] Poulsen et al., Mol. Gen. Genet., 205:193 (1986).

[0901] Prasher et al., Biochem. Biophys. Res. Comm., 126:1259 (1985).

[0902] Proudfoot, Cell, 64:671 (1991).

[0903] Quigley et al., J. Mol. Evol., 29:412 (1989).

[0904] Ralston et al., Genetics, 119:185 (1988).

[0905] Reed et al., J. Gen. Microbiol., 130:1 (1984).

[0906] Reina et al., Nucleic Acids Res., 18:6425 (1990).

[0907] Reina et al., Nucleic Acids Res., 18:7449 (1990).

[0908] Reymond et al., Plant Cell, 12:707 (2000).

[0909] Richmond et al., Curr Opin Plant Biol., 3:108 (2000).

[0910] Riggs et al., Proc. Natl. Acad. Sci. USA, 83:5602 (1986).

[0911] Rossi et al., Biophys. J., 80:480 (2001).

[0912] Rossolini et al., Mol. Cell. Probes, 8:91 (1994).

[0913] Rothstein et al., Gene, 53:153 (1987).

[0914] Ruiz, Plant Cell, 10:937 (1998).

[0915] Safak et al., Mol. Cell Biol., 19:2712 (1999).

[0916] Sambrook et al., Molecular Cloning: A Laboratory Manual (2d ed., Cold Spring Harbor Laboratory Press, Plainview, N.Y.) (1989).

[0917] Sanfacon et al., Genes Dev., 5:141 (1991).

[0918] Sanford et al., Particulate Science and Technology, 5:27 (1987).

[0919] Schaffer et al., Curr Opin Biotechnol., 11:162 (2000).

[0920] Schena et al., Science, 270:467 (1995).

[0921] Schenk et al., PNAS USA, 97:11655 (2000).

[0922] Schmidhauser and Helinski, J. Bacteriol., 164:446 (1985).

[0923] Schwob et al., Plant J., 4:423 (1993).

[0924] Shagan et al., Plant Physiol., 101:1397 (1993).

[0925] Shapiro, Mobile Genetic Elements, Academic Press, N.Y. (1983).

[0926] Shimamoto et al., Nature, 338:274 (1989).

[0927] Simpson, Plant Mol. Biol., 19:699 (1985).

[0928] Skriver and Mundy, Plant Cell, 2:503 (1990).

[0929] Skuzeski et al., Plant Molec. Biol. 15: 65-79 (1990).

[0930] Slater et al., Plant Mol. Biol., 5:137 (1985).

[0931] Smith et al., Adv. Appl. Math., 2:482.(1981).

[0932] Smith et al., Mol. Gen. Genet., 224:447 (1990).

[0933] Smith et al., Planta, 168:94 (1986).

[0934] Southern et al., Nature Genet., 21:5-9 (1999).

[0935] Spencer et al., Theor. Appl. Genet, 79:625 (1990).

[0936] Stalker et al., Science, 242:419 (1988).

[0937] Staub et al., EMBO J., 12:601 (1993).

[0938] Staub et al., Plant Cell, 4:39 (1992).

[0939] Steifel et al., The Plant Cell, 2:785 (1990).

[0940] Stemmer, Nature, 370:389 (1994).

[0941] Stemmer, Proc. Natl. Acad. Sci. USA, 91:10747 (1994).

[0942] Stief et al., Nature, 341:343 (1989).

[0943] Stouggard, The Plant Journal, 3:755 (1993).

[0944] Sukhapinda et al., Plant Mol. Biol., 8:209 (1987).

[0945] Sullivan et al., Mol. Gen. Genet., 215:431 (1989).

[0946] Surles et al., Protein Sci., 3:198 (1994).

[0947] Sutcliffe, PNAS USA, 75:3737 (1978).

[0948] Svab et al., Proc. Natl. Acad. Sci. USA, 87:8526 (1990).

[0949] Svab et al., Proc. Natl. Acad. Sci. USA, 90:913 (1993).

[0950] Tamayo et al., PNAS USA, 96:2907 (1999).

[0951] Tarczynski et al., PNAS USA, 89:2600 (1992).

[0952] Thillet et al., J. Biol. Chem., 263:12500 (1988).

[0953] Thompson et al., EMBO J, 6:2519 (1987).

[0954] Tijssen, Laboratory Techniques in Biochemistry and Molecular Biology-Hybridization with Nucleic Acid Probes, Elsevier, N.Y. (1993).

[0955] Tomes et al., Plant Cell, Tissue and Organ Culture: Fundamental Methods, Springer Verlag, Berlin (1995).

[0956] Tomic et al., NAR, 12:1656 (1990).

[0957] Tremousaygue et al., Plant J., 20:553 (1999).

[0958] Turner et al., Molecular Biotechnology, 3:225 (1995).

[0959] Twell et al., Plant Physiol., 91:1270 (1989).

[0960] Ugaki et al., Nucl. Acids Res., 19:371 (1991).

[0961] Ulmasov et al., Plant Mol. Biol., 35:417 (1997).

[0962] Upender et al., Biotechniques, 18:29 (1995).

[0963] Vaeck et al., Nature, 328:33 (1989).

[0964] van der Krol et al., Plant Cell, 2:291 (1990).

[0965] vanTunen et al., EMBO J., 7:1257 (1988).

[0966] Vasil et al., Biotechnology, 11:1553 (1993).

[0967] Vasil et al., Mol. Microbiol., 3:371 (1989).

[0968] Vasil et al., Plant Physiol., 91:1575 (1989).

[0969] Vernon and Bohnert, EMBO J., 11:2077 (1992).

[0970] Vodkin, Prog. Clin. Biol. Res., 138:87 (1983).

[0971] Vogel et al., EMBO J., 11:157 (1992).

[0972] Walker and Gaastra, eds., Techniques in Molecular Biology, MacMillan Publishing Company, New York (1983).

[0973] Wandelt et al., Nucleic Acids Res., 17:2354 (1989).

[0974] Wang et al., Mol. Cell. Biol., 12:3399 (1992).

[0975] Waterman, M. S. Introduction to Computational Biology: Maps, sequences and genomes. Chapman & Hall. London (1995).

[0976] Watson et al., Corn: Chemistry and Technology (1987).

[0977] Watrud et al., in Engineered Organisms and the Environment (1985).

[0978] Weeks et al., Plant Physiol., 102:1077 (1993).

[0979] Weissinger et al., Annual Rev. Genet., 22:421 (1988).

[0980] Wenzler et al., Plant Mol. Biol., 13:347 (1989).

[0981] White et al, Nucl Acids Res, 18, 1062 (1990).

[0982] Wolter et al., EMBO Journal, 11:4685 (1992).

[0983] Wyn-Jones and Storey, Physiology and Biochemistry of Drought Resistance in Plants, Paleg et al. (eds.), pp. 171-204 (1981).

[0984] Xiang and Guerra, Plant Physiol., 102:287 (1993).

[0985] Yamaguchi-Shinozaki et al., Plant Cell Physiol., 33:217 (1992).

[0986] Yamamoto et al., Nucleic Acids Res., 18:7449 (1990).

[0987] Yanagisawa and Schmidt, Plant J., 17:209 (1999).

[0988] Yanagisawa et al., Plant J., 21:281-288 (2000).

[0989] Yuan et al., Plant J., 15:821 (1998).

[0990] Zhang et al., Proc. Natl. Acad. Sci. USA, 94:4504 (1997).

[0991] Zhu et al., Nat. Biotechnol., 18:555-558 (2000).

[0992] Zhu et al., Plant Physiol., 124:1472 (2000).

[0993] Zhu et al., Proc. Natl. Acad. Sci. USA, 96:8768-8773 (1999).

[0994] Zukowsky et al., PNAS USA, 80:1101 (1983).

[0995] All publications, patents and patent applications are incorporated herein by reference. While in the foregoing specification this invention has been described in relation to certain preferred embodiments thereof, and many details have been set forth for purposes of illustration, it will be apparent to those skilled in the art that the invention is susceptible to additional embodiments and that certain of the details described herein may be varied considerably without departing from the basic principles of the invention.

What is claimed is:

1. An isolated polynucleotide comprising a plant nucleotide sequence that directs seed-specific or seed-preferential transcription of an operatively linked nucleic acid segment, said plant nucleotide sequence comprising:
(a) a sequence selected from the group consisting of SEQ ID NOs:2275-2672, 5959, 5972, 5973, 5977-5990 and 6001 or a fragment thereof having substantially the same activity as the full-length nucleotide sequence;
(b) a sequence having substantial similarity to (a);
(c) a sequence of at least 15 nucleotides capable of hybridizing to (a) or the complement thereof;
(d) a sequence of at least 15 nucleotides capable of hybridizing to (a) nucleic acid comprising 50 to 200 or more consecutive nucleotides of a nucleotide sequence given in SEQ ID NOs:2275-2672, 5959, 5972, 5973, 5977-5990 and 6001 or the complement thereof;
(e) a sequence complementary to (a), (b) or (c); or
(f) a reverse complement of (a), (b) or (c).

2. An isolated polynucleotide comprising a plant nucleotide sequence that directs seed-specific or seed-preferential transcription of an operatively linked nucleic acid segment, wherein said plant nucleotide sequence has at least 90% sequence identity to any one of SEQ ID NOs:2275-2672, 5959, 5972, 5973, 5977-5990 and 6001.

3. An isolated polynucleotide comprising a plant nucleotide sequence that directs seed-specific or seed-preferential transcription of an operatively linked nucleic acid segment, wherein said plant nucleotide sequence hybridizes under high stringency conditions to the complement of any one of SEQ ID NOs:2275-2672, 5959, 5972, 5973, 5977-5990 and 6001.

4. An isolated polynucleotide comprising a plant nucleotide sequence that directs seed-specific or seed-preferential transcription of an operatively linked nucleic acid segment, wherein said plant nucleotide sequence hybridizes under very high stringency conditions to the complement of any one of SEQ ID NOs:2275-2672, 5959, 5972, 5973, 5977-5990 and 6001.

4. A recombinant vector comprising the polynucleotide of claim 1.

5. An expression cassette comprising the polynucleotide of claim 1 operatively linked to an open reading frame.

6. The expression cassette of claim 6 operably linked to other suitable regulatory sequences.

7. The expression cassette of claim 6 wherein the open reading frame is in an antisense orientation relative to the nucleotide sequence which directs transcription.

8. The expression cassette of claim 6 wherein the open reading frame is in sense orientation relative to the nucleotide sequence which directs transcription.

9. A recombinant vector comprising the expression cassette of claim 6.

10. A host cell comprising the expression cassette of claim 6.

11. The host cell of claim 11 wherein the cell is selected from the group consisting of a yeast, a bacterium, a fungi, an animal cell or a plant cell.

12. The host cell of claim 12 wherein said cell is a plant cell.

13. A transformed plant, the genome of which is augmented with the expression cassette of claim 6.

14. A transformed plant comprising transformed plant cells, said cells comprising the expression cassette of claim 6.

15. The transformed plant of claim 14, wherein said plant is a cereal.

16. The transformed plant of claim 15, wherein said plant is a cereal.

17. The transformed plant of claim 14 wherein said plant is selected from the group consisting of maize, soybean, barley, alfalfa, sunflower, canola, soybean, cotton, peanut, sorghum, tobacco, sugarbeet, rice and wheat.

18. The transformed plant of claim 14, wherein said plant is selected from the group consisting of maize, barley, sorghum, rice and wheat.

19. The transformed plant of claim 15 wherein said plant is selected from the group consisting of maize, soybean, barley, alfalfa, sunflower, canola, soybean, cotton, peanut, sorghum, tobacco, sugarbeet, rice and wheat.

20. The transformed plant of claim 15, wherein said plant is selected from the group consisting of maize, barley, sorghum, rice and wheat.

21. A method for augmenting a plant genome, comprising:
(a) contacting plant cells with the expression cassette of claim 15 so as to yield a transformed plant cell; and
(b) regenerating the transformed plant cell to provide a differentiated transformed plant, wherein the differentiated transformed plant expresses the open reading frame in the cells of the plant.

22. A transformed plant prepared by the method of claim 22.

23. A product of the plant of claim 23, wherein said product comprises the expression cassette or the gene product encoded by the open reading frame.

24. The product of claim 24, said product selected from the group consisting of a seed, fruit, vegetable, plant extract, transgenic plant, and a progeny plant.

25. A method to identify a gene, the expression of which is altered in seed comprising:
(a) contacting a plurality of isolated nucleic acid samples on a solid substrate with a probe comprising plant nucleic acid corresponding to RNA isolated from seed so as to form a complex, wherein each sample comprises a plurality of oligonucleotides corresponding to at least a portion of one plant gene; and
(b) comparing complex formation in a) with complex formation between a second plurality of isolated nucleic acid samples on a solid substrate contacted with a second probe comprising plant nucleic acid corresponding to RNA that is not from seed, so as to identify which samples correspond to genes that are expressed in seed, wherein the identified genes are orthologs of Oryza genes comprising a sequence which is substantially similar to a sequence selected from the group consisting of SEQ ID NOs:2275-2672, 5959, 5972, 5973, 5977-5990 and 6001 and SEQ ID NOs:1020-1597, 5927, 5940, 5941, 5945-5958.

26. An isolated polynucleotide comprising a plant nucleotide sequence that directs constitutive transcription of an operatively linked nucleic acid segment in a plant cell, wherein said plant nucleotide sequence is from a gene encoding a polypeptide that is substantially similar to a polypeptide encoded by an Oryza gene comprising a promoter selected from the group consisting of SEQ ID NOs:1598-1885 and 5960-5971.

27. An isolated polynucleotide comprising a plant nucleotide sequence that directs constitutive transcription of an operatively linked nucleic acid segment in a plant cell, wherein said plant nucleotide sequence comprises
(a) a sequence selected from the group consisting of SEQ ID NOs:1598-1885 and 5960-5971, or a fragment thereof having substantially the same activity as the full-length nucleotide sequence;
(b) a sequence having substantial similarity to (a);
(c) a sequence of at least 15 nucleotides capable of hybridizing to (a) or the complement thereof;
(d) a sequence of at least 15 nucleotides capable of hybridizing to a nucleic acid comprising 50 to 200 or more consecutive nucleotides of a nucleotide sequence given in SEQ ID NOs:1598-1885 and 5960-5971, or the complement thereof,
(e) a sequence complementary to (a), (b) or (c); or
(f) a reverse complement of (a), (b) or (c).

28. An isolated polynucleotide comprising a plant nucleotide sequence that directs constitutive transcription of an operatively linked nucleic acid segment in a plant cell, wherein said plant nucleotide sequence hybridizes under high stringency conditions to the complement of any one of SEQ ID NOs:1598-1885 and 5960-5971.

29. An isolated polynucleotide comprising a plant nucleotide sequence that directs constitutive transcription of an operatively linked nucleic acid segment in a plant cell, wherein said plant nucleotide sequence is at least 90% identical to any one of SEQ ID NOs:1598-1885 and 5960-5971 or a fragment thereof.

30. An expression cassette comprising the polynucleotide of claim 28.

31. As host cell comprising the expression cassette of claim 31.

32. A transgenic plant comprising the expression cassette of claim 31.

33. An isolated polynucleotide comprising a plant nucleotide sequence that directs leaf- and/or stem-specific or -preferential transcription of an operatively linked nucleic acid segment, wherein said plant nucleotide sequence is from a gene encoding a polypeptide that is substantially similar to a polypeptide encoded by an Oryza gene comprising a promoter selected from the group consisting of SEQ ID NOs:1886-1918.

34. An isolated polynucleotide comprising a plant nucleotide sequence that directs leaf- and/or stem-specific or -preferential transcription of an operatively linked nucleic acid segment in a plant cell, wherein said plant nucleotide sequence comprises
(a) a nucleotide sequence selected from the group consisting of SEQ ID NOs: 1886-1918 or a fragment thereof having substantially the same activity as the full-length nucleotide sequence;
(b) a nucleotide sequence having substantial similarity to (a);
(c) a nucleotide sequence of at least 15 nucleotides capable of hybridizing to (a) or the complement thereof;
(d) a nucleotide sequence of at least 15 nucleotides capable of hybridizing to a nucleic acid comprising 50 to 200 or more consecutive nucleotides of a nucleotide sequence given in SEQ ID NOs: 1886-1918 or the complement thereof;
(e) a nucleotide sequence complementary to (a), (b) or (c); or
(f) a nucleotide sequence which is a reverse complement of (a), (b) or (c).

35. An isolated polynucleotide comprising a plant nucleotide sequence that directs leaf- and/or stem-specific or -preferential transcription of an operatively linked nucleic acid segment, which plant nucleotide sequence hybridizes under high stringency conditions to the complement any one of SEQ ID NOs:1886-1918.

36. An isolated polynucleotide comprising a plant nucleotide sequence that directs leaf- and/or stem-specific transcription of an operatively linked nucleic acid segment, wherein said plant nucleotide sequence has at least 90% identity to any one of SEQ ID NOs:1886-1918.

37. An expression cassette comprising the polynucleotide of claim 35.

38. A host cell comprising the expression cassette of claim 38.

39. A transgenic plant comprising the expression cassette of claim 38.

40. An isolated polynucleotide comprising a plant nucleotide sequence that directs leaf- and/or stem-specific transcription of an operatively linked nucleic acid segment, where in said plant nucleotide sequence is SEQ ID NO:2554 or a fragment thereof.

41. An expression cassette comprising the polynucleotide of claim 41.

42. A host cell comprising the expression cassette of claim 42.

43. A transgenic plant comprising the expression cassette of claim 42.

44. An isolated polynucleotide comprising a plant nucleotide sequence that directs panicle-specific or panicle-preferential transcription of an operatively linked nucleic acid segment, wherein said plant nucleotide sequence is from a gene encoding a polypeptide that is substantially similar to a polypeptide encoded by an Oryza gene comprising a promoter selected from the group consisting of SEQ ID NOs: 1919-2085.

45. An isolated polynucleotide comprising a plant nucleotide sequence that directs panicle-specific or panicle-preferential transcription of an operatively linked nucleic acid segment in a plant cell, wherein said plant nucleotide sequence comprises
(a) a nucleotide sequence selected from the group consisting of SEQ ID NOs: 1919-2085 or a fragment thereof having substantially the same activity as the full-length nucleotide sequence;
(b) a nucleotide sequence having substantial similarity to (a);
(c) a nucleotide sequence of at least 15 nucleotides capable of hybridizing to (a) or the complement thereof;
(d) a nucleotide sequence of at least 15 nucleotides capable of hybridizing to a nucleic acid comprising 50 to 200 or more consecutive nucleotides of a nucleotide sequence given in SEQ ID NOs: 1919-2085 or the complement thereof;
(e) a nucleotides sequence which is complementary to (a), (b) or (c); or
(f) a nucleotide sequence which is a reverse complement of (a), (b) or (c).

46. An isolated polynucleotide comprising a plant nucleotide sequence that directs panicle-specific or panicle-preferential transcription of an operatively linked nucleic acid segment, which plant nucleotide sequence hybridizes under high stringency conditions to the complement of any one of SEQ ID NOs:1919-2085.

47. An isolated polynucleotide comprising a plant nucleotide sequence that directs panicle-specific or panicle-preferential transcription of an operatively linked nucleic acid segment, which plant nucleotide sequence hybridizes under very high stringency conditions to the complement of any one of SEQ ID NOs:1919-2085.

48. An isolated polynucleotide comprising a plant nucleotide sequence that directs panicle-specific or panicle-preferential transcription of an operatively linked nucleic acid segment, wherein said plant nucleotide sequence has at least 90% identity to any one of SEQ ID NOs:1919-2085 or a fragment thereof.

49. An expression cassette comprising the polynucleotide of claim 46.

50. A host cell comprising the expression cassette of claim 50.

51. A transgenic plant comprising the expression cassette of claim 50.

52. An isolated polynucleotide comprising a plant nucleotide sequence that directs root-specific or root preferential transcription of an operatively linked nucleic acid segment, wherein said plant nucleotide sequence is from a gene encoding a polypeptide that is substantially similar to a polypeptide encoded by an Oryza gene comprising a promoter selected from the group consisting of SEQ ID NOs:2144-2274.

53. An isolated polynucleotide comprising a plant nucleotide sequence that directs root-specific or root preferential transcription of an operatively linked nucleic acid segment in a plant cell, wherein said plant nucleotide sequence comprises
(a) a nucleotide sequence selected from the group consisting of SEQ ID NOs: 2144-2274 or a fragment thereof having substantially the same activity as the full-length nucleotide sequence;
(b) a nucleotide sequence having substantial similarity to (a);
(c) a nucleotide sequence of at least 15 nucleotides capable of hybridizing to (a) or the complement thereof;
(d) a nucleotide sequence of at least 15 nucleotides capable of hybridizing to a nucleic acid comprising 50 to 200 or more consecutive nucleotides of a nucleotide sequence given in SEQ ID NOs: 2144-2274 or the complement thereof;
(e) a nucleotide sequence complementary to (a), (b) or (c); or
(f) a nucleotide sequence which is a reverse complement of (a), (b) or (c).

54. An isolated polynucleotide comprising a plant nucleotide sequence that directs root-specific or root preferential transcription of an operatively linked nucleic acid segment, which plant nucleotide sequence hybridizes under high stringency conditions to the complement of any one of SEQ ID NOs:2144-2274.

55. An isolated polynucleotide comprising a plant nucleotide sequence that directs root-specific or root preferential transcription of an operatively linked nucleic acid segment, wherein said nucleotide sequence has at least 90% identity to any one of SEQ ID NOs:2144-2274.

56. An isolated polynucleotide comprising a plant nucleotide sequence that directs root-specific or root preferential transcription of an operatively linked nucleic acid segment, which plant nucleotide sequence is selected from the group consisting of SEQ ID NOs:2144-2274 or a fragment thereof.

57. An expression cassette comprising the polynucleotide of claim 54.

58. A host cell comprising the expression cassette of claim 58.

59. A transgenic plant comprising the expression cassette of claim 58.

60. An isolated polynucleotide comprising a plant nucleotide sequence that directs pollen-specific or pollen-preferential transcription of an operatively linked nucleic acid segment, wherein said plant nucleotide sequence is from a gene encoding a polypeptide that is substantially similar to a polypeptide encoded by an Oryza gene comprising a promoter selected from the group consisting of SEQ ID NOs:2086-2143.

61. An isolated polynucleotide comprising a plant nucleotide sequence that directs pollen-specific or pollen-preferential transcription of an operatively linked nucleic acid segment in a plant cell, wherein said plant nucleotide sequence comprises
(a) a nucleotide sequence selected from the group consisting of SEQ ID NOs: 2086-2143 or a fragment thereof having substantially the same activity as the full-length nucleotide sequence;
(b) a nucleotide sequence having substantial similarity to (a);
(c) a nucleotide sequence of at least 15 nucleotides capable of hybridizing to (a) or the complement thereof;
(d) a nucleotide sequence of at least 15 nucleotides capable of hybridizing to a nucleic acid comprising 50 to 200 or more consecutive nucleotides of a nucleotide sequence given in SEQ ID NOs: 2086-2143 or the complement thereof;
(e) a nucleotide sequence complementary to (a), (b) or (c); or
(f) a nucleotide sequence which is a reverse complement of (a), (b) or (c).

62. An isolated polynucleotide comprising a plant nucleotide sequence that directs pollen-specific or pollen-preferential transcription of an operatively linked nucleic acid segment, wherein said plant nucleotide sequence hybridizes under high stringency conditions to the complement of any one of SEQ ID NOs:2086-2143.

63. An isolated polynucleotide comprising a plant nucleotide sequence that directs pollen-specific or pollen-preferential transcription of an operatively linked nucleic acid segment, wherein said nucleotide sequence has at least 90% identity to of any one of SEQ ID NOs:2086-2143 or a fragment thereof.

64. An expression cassette comprising the polynucleotide of claim 62.

65. A host cell comprising the expression cassette of claim 65.

66. A transgenic plant comprising the expression cassette of claim 66.

67. A method to identify a gene, the expression of which is altered in seed comprising:
(a) contacting a plurality of isolated nucleic acid samples on a solid substrate with a probe comprising plant nucleic acid corresponding to RNA isolated from seed so as to form a complex, wherein each sample comprises a plurality of oligonucleotides corresponding to at least a portion of one plant gene; and
(b) comparing complex formation in a) with complex formation between a second plurality of isolated nucleic acid samples on a solid substrate contacted with a second probe comprising plant nucleic acid corresponding to RNA that is not from seed, so as to identify which samples correspond to genes that are expressed in seed, wherein the identified genes are orthologs of Oryza genes comprising a sequence which is substantially similar to a sequence selected from the group consisting of SEQ ID NOs:2275-2672, 5959, 5972, 5973, 5977-5990 and 6001 and SEQ ID NOs:1020-1597, 5927, 5940, 5941, 5945-5958.

68. A method to identify a gene, the expression of which is constitutive in a plant cell, comprising:
(a) contacting a plurality of isolated nucleic acid samples on a solid substrate with a probe comprising plant nucleic acid corresponding to RNA isolated from two or more tissues or at two or more developmental stages of a plant so as to form a complex, wherein each sample comprises a plurality of oligonucleotides corresponding to at least a portion of one plant gene; and
(b) comparing complex formation in the samples so as to identify which samples correspond to genes that are expressed in two or more tissues or at two or more developmental stages of the plant, wherein the identified genes are orthologs of Oryza genes comprising a sequence which is substantially similar to a sequence selected from the group consisting of SEQ ID NOs:1-398 and 5928-5939 and SEQ ID NOs:1598-1885 and 5960-5971.

69. A method to identify a gene, the expression of which is altered in leaf- and/or stem comprising:
(a) contacting a plurality of isolated nucleic acid samples on a solid substrate with a probe comprising plant nucleic acid corresponding to RNA isolated from leaf- and/or stem so as to form a complex, wherein each sample comprises a plurality of oligonucleotides corresponding to at least a portion of one plant gene; and
(b) comparing complex formation in a) with complex formation between a second plurality of isolated nucleic acid samples on a solid substrate contacted with a second probe comprising plant nucleic acid corresponding to RNA that is not from leaf and/or stem, so as to identify which samples correspond to genes that are expressed in leaf and/or stem, wherein the identified genes are orthologs of Oryza genes comprising a sequence which is substantially similar to a sequence selected from the group consisting of SEQ ID NOs:399-464 and SEQ ID NOs:1886-1918.

70. A method to identify a gene, the expression of which is altered in panicle comprising:
(a) contacting a plurality of isolated nucleic acid samples on a solid substrate with a probe comprising plant nucleic acid corresponding to RNA isolated from panicle so as to form a complex, wherein each sample comprises a plurality of oligonucleotides corresponding to at least a portion of one plant gene; and
(b) comparing complex formation in a) with complex formation between a second plurality of isolated nucleic acid samples on a solid substrate contacted with a second probe comprising plant nucleic acid corresponding to RNA that is not from panicle, so as to identify which samples correspond to genes that are expressed in panicle, wherein the identified genes are orthologs of Oryza genes comprising a sequence which is substantially similar to a sequence selected from the group consisting of SEQ ID NOs:465-720 and SEQ ID NOs:1919-2085.

71. A method to identify a gene, the expression of which is altered in pollen comprising:
(a) contacting a plurality of isolated nucleic acid samples on a solid substrate with a probe comprising plant nucleic acid corresponding to RNA isolated from pollen so as to form a complex, wherein each sample comprises a plurality of oligonucleotides corresponding to at least a portion of one plant gene; and
(b) comparing complex formation in a) with complex formation between a second plurality of isolated nucleic acid samples on a solid substrate contacted with a second probe comprising plant nucleic acid corresponding to RNA that is not from pollen, so as to identify which samples correspond to genes that are expressed in pollen, wherein the identified genes are orthologs of Oryza genes comprising a sequence which is substantially similar to a sequence selected from the group consisting of SEQ ID NOs:721-800 and SEQ ID NOs:2086-2143.

72. A method to identify a gene, the expression of which is altered in root comprising:
(a) contacting a plurality of isolated nucleic acid samples on a solid substrate with a probe comprising plant nucleic acid corresponding to RNA isolated from root so as to form a complex, wherein each sample comprises a plurality of oligonucleotides corresponding to at least a portion of one plant gene; and
(b) comparing complex formation in a) with complex formation between a second plurality of isolated nucleic acid samples on a solid substrate contacted with a second probe comprising plant nucleic acid corresponding to RNA that is not from root, so as to identify which samples correspond to genes that are expressed in root, wherein the identified genes are orthologs of Oryza genes comprising a sequence which is substantially similar to a sequence selected from the group consisting of SEQ ID NOs:801-1019 and SEQ ID NOs:2144-2274.

73. A computer-readable medium having stored thereon a data structure comprising:
a. sequence data for at least one polynucleotide having at least 70% nucleic acid sequence identity to a polynucleotide selected from the group consisting of any of the sequences listed in the Sequence Listing, and the complement thereof; and
b. a module receiving the nucleic acid molecule which compares the nucleic acid sequence of the molecule to at least one other nucleic acid sequence.

74. The computer readable medium of claim 66 wherein the medium is selected from the group consisting of magnetic tape, optical disk, CD-ROM, random access memory, volatile memory, non-volatile memory and bubble memory.

75. A computer-readable medium having stored thereon computer executable instructions for performing a method comprising:
a. receiving the sequence data for a nucleic acid molecule that has at least 70% nucleic acid sequence identity to a nucleotide molecule selected from the group consisting of any of the sequences listed in the Sequence Listing, and the complement thereof; and
b. comparing the sequence of the nucleic acid molecule to at least one other nucleic acid sequence.

76. The computer readable medium of claim 68 wherein the medium is selected from the group consisting of magnetic tape, optical disk, CD-ROM, random access memory, volatile memory, non-volatile memory and bubble memory.

The application's sequence listing, which the Patent Office published only in electronic form, follows.

SEQUENCE LISTING (6077 sequences)

SEQ ID NO: 1 - DNA, 1951 bp, Oryza sativa
atggcgggcaagggcgagggtccggccatcggcatcgaccttggcacgacctactcgtgcgtgggcgtttggcagcacgaccgcgtggagatcatcgccaacgaccagggcaaccgcaccaccccctcctacgtcggcttcaccgactccgagaggctcatcggagatgctgccaagaaccaggtcgccatgaaccccatcaacaccgtctttggatgccaagcgtctcattggcaggaggtttagcgatgcttctgttcagagtgacattaagctctggcccttcaaggtgattgctggacctggtgacaagcctatgattgttgtccagtacaagggtgaggagaagcagtttgctgcagaagagatctcctccatggtcctcatcaagatgcgtgagattgctgaggcctaccttggcaccaccatcaagaatgccgttgtcactgttcctgcctacttcaatgactcccagaggcaggccaccaaggatgctggagtgattgctggtctcaatgtcatgcgtatcatcaacgagccgactgctgcagctattgcctatggtcttgataagaaggccaccagcgttggtgagaagaatgtcctcatctttgaccttggaggtggtacctttgatgtctccctccttaccattgaggagggtatctttgaggtcaaggccacagctggtgacacccatcttggtggtgaagattttgacaatcgtatggtcaaccactttgtgcaagaattcaagaggaagaacaagaaggatatcactggcaaccccagggctctcaggaggttgaggacagcttgtgagagggcaaagaggaccctgtcctccactgcccagaccaccattgagatcgattccctgtatgagggcatcgacttctactcaaccatcacccgtgccaggtttgaggagctcaacatggatctcttcaggaagtgtatggagcctgtggagaagtgcctcagggatgctaagatggacaagagctctgttcatgatgttgtccttgttggtggctccactaggatcccgagggtgcagcagctcctgcaggatttcttcaacggcaaggagctttgcaagaacatcaacccagatgaggctgttgcttatggtgctgctgtccaggctgccatcttgagtggtgagggcaacgagaaggtccaggacctcctcctgttggatgttacccctctctctctcggtttggagactgctggtggtgtcatgaccgttttgatcccaaggaacaccaccattcccaccaagaaggagcaggtcttctccacctactccgacaaccagcctggtgtgctcatccaggtttatgagggtgagaggaccaggacacgtgacaacaacctgctggggaagtttgagctctctggaatccctcctgctcccaggggtgttccacagatcactgtttgcttcgacattgatgccaatggtatcctgaacgtgtctgctgaggacaagaccaccgggcagaagaacaagatcaccattaccaacgacaagggcaggcttagcaaggaggagattgagaagatggtccaggaggccgagaagtacaagtcagaggatgaggagcacaagaagaaggtggagtccaagaacgcgctggagaactacgcctacaacatgcgcaacaccatcaaggatgagaagatcgcctcgaagctcccggcagcggacaagaagaagatcgaggatgccatcgaccaggccatccagtggctggacggcaaccagctcgctgaggctgatgagttcgatgacaagatgaaggagctggagggcatctgcaaccccatcatcgccaagatgtaccagggcgctggcgcggacatggccggcggcatggacgaggacgatgctcccccggctggcggcagcggtgctggccccaagatcgaggaggtcgactaa

SEQ ID NO: 2 - DNA, 1694 bp, Oryza sativa
  N_region (577)..(577): n = any nucleotide
  N_region (580)..(580): n = any nucleotide
  N_region (584)..(584): n = any nucleotide
  N_region (590)..(590): n = any nucleotide
  N_region (612)..(612): n = any nucleotide
  N_region (614)..(614): n = any nucleotide
  N_region (1034)..(1034): n = any nucleotide
  N_region (1159)..(1159): n = any nucleotide
  N_region (1601)..(1601): n = any nucleotide
atggccggcgggaagaagctgaggccgctcgcccgcggcatggggatgccgtgctagggcacccagcggcggcgcgcgcggccggcgacggtggctcccgaggcgacgcgagtttcccccaggcggcgcgcgggctcagggcagcgcgagctcaagacgtgggtctccgaccgcctcgcggtccagctcgtcggtggagatgaggagggagcgggagtggcggcgggtgcgggagcagcagtcgcggtgcggggaggtggcgggcgggacggcggcggagtgcgccgcgcttgtcgtcctcgcggccgtccacgtccccgccacgccgtctgtggtgggcgccgccgcggtgtccgctccacgaagcggaaggagatgggcgagctcctcgccctggacgtcgcctccccaaggtcgctggccgtcgcggccaccaaggctaggaaggtagaggccgagttcccagccacgcccatgaccgaacacctcgtcgacatggagaagcaggtgtgggcgagcttctacagcgccggcttctggaggagcccctcgcaacgagaggacaggagccgtggtngtngctnggcaangccatcgttgagctcgccggcnanggcgagcggcacggccgggactcagccggcgagggcaaccggcgtcgctgggactcagccggcaagggcaaccggcgctaccgggactcggccagcgtgggcaaccggagaagacaagcgtacgtgcgtcgaactatggcaatccgcaagcaattagtgcaagtgcaaccgaaaaagatcgagatgtggcagtggcagcctccgcctctccatccaggggtcgtcaccatggcgaagcacaagctacagttggaggacctgtcgcagacgtgccggcgagaccactactgcgtcaggtgcgtccacgccttctgctcccactgctgcgatgaccaccacttcgtcccgctcggctcccacatcgtcatccccatcgccggtgtcgacgccgccaccggcaagcccgtcatccccgcgcantaccctcgccgccccgacctgcccatcaccgacttcgtcatcggtctcatcaacgccaacgacttcgccgaggagcaccccagggacgcctactgcatgtactgcttcatggccttctccaccgngctctgccaccaccaccacacctgcgccgccgactgcgtcctccgcatcgtccgaagccacgacggccgccactgcgtccgctgcaccggcgacgagccgtggttcccttacatggagagcgtcctgggcgaccccgtggctgtcgaggaggaggagggcgacgacggcgaggtggtggctgtgctgctgctgctgcccgtgctgaggaggagctcaccgaccgcgtgcgtacactgcggcggcgaggtgcccaaacacatgcgccgctcggtgctctgctcgccggcctgcgacgcggcccaccaactggaggtcgcccagcgcagggagcgcagggacgccgtgctcgccgcgcgccgcctcgccaagctgaacatccatgccgtttgatcaattcttgtactgtattagcgctcattgatttgatctcgtaattctcanatctgtatgttgacccgtgtcttttttttttcgactccccgtgtctataaactattattagtaaattactttcgtgccggcaatatcttttaa

SEQ ID NO: 3 - DNA, 1450 bp, Oryza sativa
cgcagagaaaggcgtcttcgtactcgcctctctccgcgccccgccgccatgagggagtgcatctcgatccacatcgggcaggccggtatccaggtcgggaacgcgtgctgggagctctattgcctcgagcatggcatccagcagcctgatggacagatgcccggtgacaagaccgttgggggaggtgatgatgcttttaacaccttcttcagtgagactggtgctgggaagcatgtcccccgtgctgtcttcgtcgatcttgagcctaccgtgattgatgaggtgaggactggtgactaccgccagctcttccaccctgagcagctcatcagtggcaaggaggatgcagccaacaactttgcccgtggtcactacaccattggcaaggagattgttgatctgtgccttgaccgcatcaggaagcttgccgacaactgcactggtctccagggcttccttgtgttcaacgctgttggaggaggaacgggctccggtctcggttcccttctccttgagcgtctctctgtggactatggcaagaagtccaagctcgggttcaccgtgtacccgtcccctcaggtctccacctctgtggttgagccatacaacagtgtcctctccacccactccctccttgagcacaccgatgtcgctgtcctgctcgacaatgaggccatctatgacatctgccgccgctccctcgacattgagcgcccaacctacaccaacctcaacaggcttgtgtcccagcaggtcatctcctcactgactgcctccctgaggttcgatggtgctctgaatgtggatgtcaacgagttccaaaccaacctggtgccctacccgaggatccacttcatgctttcctcctacgccccggtgatctcggccgagaaggcctaccacgagcagctctccgtggcggagatcaccaacagcgccttcgagccgtcctccatgatggccaagtgcgacccgcgccacggcaagtacatggcgtgctgcctgatgtaccgcggcgacgtggtccccaaggacgtgaacgccgcggtggccaccatcaagacgaagcgcaccatccagttcgtggactggtgccccacggggttcaagtgcggcatcaactaccagccgcccagcgtcgtcccggggggagacctggccaaggtgcagagggccgtgtgcatgatctccaactccaccagcgtcgtcgaggtgttctcccgcatcgacatcaagttcgacctcatgtactccaagcgcgccttcgtccactggtacgtcggcgagggcatggaggagggggagttctccgaggcccgcgaggacctcgccgcgctggagaaggactacgaggaggtcggctccgagttcgacgatggtgacgagggtgatgagggtgacgagtactagagttgattactgctgctatcctatgatctgtccgtgtggg

SEQ ID NO: 4 - DNA, 1146 bp, Oryza sativa
atgcagatctttgtgaagactctcactggcaagaccataacccttgaggttgagtcctcggataccattgacaatgtaaaggccaagatccaggacaaggagggaatcccaccggaccagcagcgtctcatcttcgctggcaagcagcttgaagatgggcgcacgcttgctgactacaacatccagaaggaatccaccctccaccttgtcctccgcctccggggaggcatgcaaatctttgtcaagaccttgactggcaagactatcacccttgaggttgagtcttctgatactattgacaacgttaaggcaaagatccaggacaaggaagggattcccccggaccagcagcgtctgatctttgctggcaagcagctcgaggatggtaggacccttgctgactacaacatccagaaggagtccacccttcaccttgttctccgcctaaggggaggaatgcagatcttcgtgaagacccttactggcaagaccattacgcttgaggttgagtcatcagacacgatcgacaacgtgaaggcgaagatccaggacaaggagggcattcccccagatcagcagcgtcttatttttgccggcaagcagctggaggatggcaggaccctcgctgactacaacatccagaaggagtccacccttcaccttgttctgcgcctaaggggtggaatgcagattttcgtcaagactctcactggcaagactattaccctggaggttgagagctcagacaccattgacaacgtgaaggcgaagatccaggataaggagggcatccccccggaccagcagagactcatcttcgctggtaagcagctggaggatggccgcacccttgccgactacaacattcagaaggagtctaccctacacttggtgctccgcctcaggggtggtatgcagatcttcgtcaagactcttactggcaagaccattactctggaggttgagagctccgataccatcgacaatgtgaaggctaagatccaggacaaggaaggtattcccccagaccagcagcgcctgatcttcgccggcaagcagctggaagatggccgtaccctcgccgactacaacattcagaaggagtctaccctccacctggtgctccgcctcaggggtggtcagtaa

SEQ ID NO: 5 - DNA, 1042 bp, Oryza sativa
atgatcacgggtacctcccaggctgactgtgccgtgctcatcattgactccaccactggtggttttgaggctggtatctccaaggatggccagacccgtgagcacgctcttcttgctttcactcttggtgtgaagcagatgatctgctgctgcaacaaggatggatgccaccactcccaagtactccaaggcccgttacgatgaaatcgtgaaggaagtctcatcctacctgaagaaggtcggctacaaccctgacaagattcccttcgttcccatctctgggtttgagggtgacaacatgattgagaggtccaccaaccttgactggtacaagggccccaccttgcttgaggctcttgaccagatcaacgagcccaagaggccatcagacaagcccctgcgtcttccccttcaggacgtgtacaagatcggtggtattggcaccgtgcctgtgggtcgtgttgagactggagtcctcaagcctggtatggtggtgacctttggtcccagcggcctgaccactgaggtcaagtcggttgagatgcaccacgaggctctccaggaggctcttcctggtgacaacgtcgggttcaacgtgaagaacgttgcggtgaaggatctgaagcgtgggtacgtggcctccaactccaaggatgaccctgccaaggaggctgccagcttcacctcccaggtgatcatcatgaaccaccctggccagatcggcaacggctacgccccagtgctggactgccacacctcccacattgccgtcaagtttgctgagctggtgaccaagatcgacagacgatctggtaaggagctggagaaggagcccaagttcctcaagaacggtgatgctggtatggttaagatgattcccaccaagcccatggttgtggagaccttctctgagtaccctcctcttggtcgttttgccgtgcgtgacatgaggcaaacggtggctgttggcgtcatcaagaacgtggagaagaaggacccaaccggtgccaaggtgaccaaggctgccgccaagaagaaatga

SEQ ID NO: 6 - DNA, 738 bp, Oryza sativa
  N_region (217)..(217): n = any nucleotide
atggctgacaaggcgctgacgtcgacgatgacgtcatcgccggcggcggctcggcacctcgtgctcgctggcgaacgacggtgcggcggcgcaaacggagggcaccaacgcgaagagctcggctcggcgaactcaccgagcacttggacgatggcaaacgacgacggatgacgacggcggcaaggttaaggcggcggcggtcttcgggtcgccggtnacggcggtgctccggtgggaaacggcggcaacggaggggtggatgaggtgctgctcctcctcgcgagcccgatggtggcgacgacgaccgatggcggcagctgcaacggcggcgcggcgcggctggaccgacggcggcggtggagaacttcggggcgacggagtcggcggcgctccgacgatctgcggcagaaacggaggacgggacaaggacggcggcgaccttgcgaacctggcgacggccttcccgagtgacggcggcgactggagcagcggcgcagcacggccggactcacggcgacggcaacggcgcacgagctaacgtggaggcggcgctacaagcgacggcgggctaaggcgaaggtggcggcggatagaggaggtcccggggatccttttgtaggggctaggaggcggtgacagaggcccacggcgaccggcggcgagatggaaggttttagggttttggaaagagaagctaaccaaatcggcattgattccgacgatttccaaacgaattag

SEQ ID NO: 7 - DNA, 705 bp, Oryza sativa
atggtgggacccacgtgtgctccacatgtcatcctcactcctccccttcttcctcctctctcccctttcttcatctctctcccctctcctctctcaggcgtgctggagagggagcggcacgcggtggtgccggtgggagagggagcagcgcacgcccttcgccgtaaccagcctcctcactctcgtcggcgccgccggcagcagcggagcggtgcgcggatctggagaaagagggaggggagaaaggagaatacaacctcgtcgtcgctcctctcttctccaccgccaccaagctcgtcagcggccacccgccggagagaggagcttccccttccccttcttccacccgaacggcactatcacgtgccccttcgtccccagtgctctggctccgcaacgcggcagcgagggacccatggatcgccgcgccggcgagggaggtcgcgggtgtgggggccgtcaccgccgggtgcccggcccgctcctcctcgccccactccggccgccgccactccttgcctctccggccgccaccactcctccccgccgctccaccgccgccaccactccatcccggcgcttcggctggagagagaagagggagagagaggagagagaggggatagtcagaaggggtagtgactagtgaggattataggtggggttcacgtgggcccaaccatttttttattattgtgtgtgtga

SEQ ID NO: 8 - DNA, 688 bp, Oryza sativa
  N_region (129)..(129): n = any nucleotide
  N_region (187)..(187): n = any nucleotide
gtggaggggcggcgtcagcgcgctagagcaggcggagcggcggcgtctccgggcgagcgcggctgcggcaggtggcggacgagcgggcaagcggcggctcagcggcggcgtcttcgggcgcgggcggancagagggccgggggacgcgccggagctccgtccgctcccgtcgctgcggcgcgccacnacgctgggctcctctgatgagtgcgacggcggcgggaaccagcggcgagaagaacagcacgccagagcgacctagggctaggagtagagcgctgctcgccgccggtcttggggaagcggcggcgtcggggagagtggagagagaggcattcgactgccacccccctctgattcctccgccaccggcggcgacatctctgtcggccgcggggatcccctcccggaacaggagcccgtcccggatcccgccaccacctcccgccgcggttgcccacagtccgccgccgctctcgccggctgtcgcctcgctcctgcctgcttcgcatgccgctgccgctctcgccggccgtcgccccgcccgtctcggctcgtccaagaagacgagagaagagaagaaagggaaaaaagaagggatgtgggcccgcaccgttttctctcacttacatgtgggcccacgtattttatttatttatttttgctgactaaaatgccacgtcagtga

SEQ ID NO: 9 - DNA, 514 bp, Oryza sativa
atgttggtctaccaggatctgcttaccgggtgacgagctcctgtcggattcgttcccctacagagagatcgagaacggcatcctctgggaagtcgatggcaagcagtgggtcgttcaaggagctattgatgtggacattggtgccaacccatctgctgagggtggtggtgatgatgagggtgttgatgaccaagctgtgaaggtggtcgacattgtggacaccttccgtcttcagcaggagcaacctccttttgacaagaagcagtttgtgaccttcatgaagcgctacatcaagaacctctccgccaagctggatgcggaaaagcaagaggaattcaagaagaacattgagggtgccaccaagtacttgcttggaaagctcaaggaccttcagttctttgttggtgagagcatgcatgatgatggcggcttggtgtttgcctactacaaggacggagccaccgacccaaccttcctttacttctctcatgggctgaaggaggtcaagtgctga

SEQ ID NO: 10 - DNA, 499 bp, Oryza sativa
atggcggcgccggatgttgagtaccgctgcttcgtcggcggcctcgcctgggccaccgacgaccgctccctcgaagccgccttctccaccttcggcgagatcctcgagtccaagatcatcaacgatcgggagacggggaggtcgcgcgggttcgggttcgtgacgttctcgagcgagcaggccatgcgcgacgccatcgaggggatgaacggcaaggagctcgacggccgcaacatcaccgtcaacgaggcccagtcgcgccgctccggaggcggaggcggaggcggctacggccagcgcggcggaggcggaggctacggtggcggcggcggctacggtggtggcggcggcggtggccggcaactccgacgggaactggaggaactgaggcggcggcggcggcggcggggggagacatgagagatggaggaggaggaaggcgatggatacatgggctgatgttagaggcccggacggttcattgggccgtcggatttag

SEQ ID NO: 11 - DNA, 422 bp, Oryza sativa
atgtgggccccacatgccagcctcactcctctcttcttccctctcccttctctctcttcttccctttcccctctctctctccttccgggcagaggacggcgcgggtgggcgtcggagcaggcgagctccggcggcggcggcgggcgtggtcggcgccgccccccgaccggagcgccgcctgtccgcgtgaaggcgagtagcgcggcgacgccctggaagacgccatcgacgccgccatccgtgtcgccgccaccgaccacccggacgccctcccgcccgccgtgctggacgccgcccggcgagaggagggagcagagagatggggattggggagagccggagagaggaggaagaagaggattggattcggtcatttgagaatgacatatggggcccacgtgggccccaccatatttttttaa

SEQ ID NO: 12 - DNA, 366 bp, Oryza sativa
atggcccggatcgacccggggccgatcggacgggcggtggcgacccggctcggctcggctcaaggccagccgaccggccacggcgatggcgacggcgcgcgcgcgcgaacgcgttgccagcgacggcaaccggtggcggaggcgacggcgcaaaggcgacgcgaaggcggcggcgctaagcggcggctaggaaggagagggaggggaatagaggggagaggaagcctcaccgagtggccggcgcggaggaagatgacagcgaacggcgatggcaagccacgggaggacgacggcaaccggcggacgggcttcggtgagacacctcctccccttcctctccctctcccgcgccgcctagccgcttag

SEQ ID NO: 13 - DNA, 312 bp, Oryza sativa
atgtctgggagaggcaagggcggcaaggggctcgggaagggcggcgcgaagaggcacaggaaggtgctgcgcgacaacatccaggggatcacgaagccggcgatccggaggctggcgaggaggggcggcgtgaagcgcatctccgggctgatctacgaggagacccgcggcgtgctcaagatcttcctcgagaacgtcatccgcgacgccgtcacctacacggagcacgcccgccgcaagaccgtcaccgccatggacgtcgtctacgcgctcaagcgccagggccgcaccctctacggattcggcggctag

SEQ ID NO: 14 - DNA, 1281 bp, Oryza sativa
  N_region (393)..(393): n = any nucleotide
  N_region (401)..(401): n = any nucleotide
  N_region (721)..(721): n = any nucleotide
  N_region (1236)..(1236): n = any nucleotide
atggccaccgcgaagccagcctctccctcgccgccgccgagcaccgccgtcgtcccggccgccaataccgcagcagccgcggacaagccggcggtcgagcagctcctggaggtggcggaggacgaggtcgtcatcgacttcaagcccaacgccaagtgccgcgctgacctccgcctccgctcgctgcacccgtccctccccgtcgccttcaaggtccagacctcctcccctctcaagttcctcgtcagccccccgcgcggcgccgtgcagccgctctcgtcggcctccctccgcgtcgtgctccgcccgcagcagcacgctcccgcgtccttcccgcgctcccgaggcgaccgcttcctcgtgctctcctccctctccgccgcgcacctcgantcctccgnctcctccagcgccgctaccggcggcaccaccgccatccgcctccgcgtgttcttcggcgggccgtacctgctccgcctcgcggcggaagccggggacgccgcggccgtgcgcctcatcctgcgccggcagccgcacctcctgccgctcctggagcccgaggcggcggtgcccgacggcgccgagcagtgggcgccactgcacgcggtggccgcgaggggggacaccggggaggtgaggcgcctggggccggactcgatgggagcgcgcgaccgtgaggggaggaccgccctccacgttgccgccgcggccggggaggcgnaggcggcggcggcgctggtggacatgggcgccgacgccgcggcgaccgacgcgcgcgggaggactccactggacgtcgcgcgcgagaagggctatcaagaagtggtggacgtcctggaacggtgggaactggtcatgacggcggcgaggcgaggcgacctccagagcctcgagtccctcctcagcaagcgcgccggcgtccggggacgtgaccagtacggcctgacggcgctccaccttgctgccatcaaagggcactgcgacgtgatcgcgctgctcgccgggtcaggctgcatggacatcgagtgcgaggacgtggaagggcaccgcccgctgcacctcgccgtcgaaggcggcagcgccgaggccgtcgagctgctgctcgacatgggcgccgaagtgcacgccgccaccaggcggggcgcgacgccgctccagatggccgtgacgatggggtacgaggccatcgcgctgctgctgcgaggccgtggcgccgacgaggcggccgcgccggcnttgtgcatcgcgtcctcgtcttcctcctcgatatcgtgtgcgtag

SEQ ID NO: 15 - DNA, 534 bp, Oryza sativa
atggtggccgtgctcgccctcctctccaccggcctctccctctccctctcccgcgcggacctcgccgctgtcgtcgtcgctgagccgcggctgctctgcgcgaaggccgaccgtgcgtcgtcgcgcttctccgcccgcccgaccgcgatggtggtcgtgctcgccctcctctccaccggcctctccctctccctctcccgcgcggacctcgctgccgttgtcatcgccgagccgcggctgctctgcgcgaaggccgacaccatcgccgccagcgctcggttgggtcatcccgtccgtcgtcgtcgccgagcccaccgccgccgacgtcgcccgagcccgccgccgtcgctgtcgcccgagccgtctaccgccgccgtcggcgagccccccgcagccgctcatcgacgccatcaaggaggccggtggcgaccacgtccggaggtgagggcagaggcggcgtcggtcatggttgttgcaaacggcgttgtcggtggttgcaaatggcgctcatcccatccctccctcgttccttga

SEQ ID NO: 16 - DNA, 348 bp, Oryza sativa
ccgagcggcgacacggacggcaggcgcggacaggcgcggcagaggctgacggcagcggcgaccaggcggtcggccaccacggcacgcgcgcgcgggaagcaacgggcggcgcggcgatttgagcggcgcggctcgggcacgcgtgctgactcgcggcgcagacggcgcaggcgcggcacgggcggcgaccgcacgggcgcgtgcatgcgaacaacggcgcgcgggaagcagcagcgagggagcggagagggagggctcggctcggcgcggctcatgcgcacgcgcgcgcggcgcgcgggcagagcggagaagagggagggagagagagagagcgagagagagagatag

SEQ ID NO: 17 - DNA, 2037 bp, Oryza sativa
atggcgtgggcgcgcgtcgagtcgcgctgccccttctgcaaggcccgcttccgcaccatcacccgcccgcccgtccccggccgcttcccttcccagcgcgtcgtcgccgtccccgagcgcaaccaggcttgcaacccttcgggcaatggcagcagcactgtagacgctgatctctatgcaaacaccagctgtagcgtatgtaacctctccaatgatgatgaactgctgatgttgtgcgagctctgcgattctgctgtgcacacttactgtgccggtctaggcactgaaattcctgagggtgactggttctgtacggactgcatgacagccaaggaggagcattcgaggtgtgagattgacgatgacaattctagtgatcatggtgaatttaaaatcaccattgaagttccaatagctgatccagttgctgctccttccatttcggatattgtggatgagggtcactctccaaatttagtacaaaggtcaagtgtgcagagcaacaggccttccatttctgatccagttccttccatttatgatattgtggatgacgattacaccacaattccaataggcaggggtatttccgttggaccacaatgccctgaatctcctcaggagcgagaaaatagtcgggtgtgttcgcatgcccgttctcgcattgagtctgagagagctagaacactgcgtaactctcgcaatcttggtagccgtataagggaactgcgtgagaactggtctgctctccgttcaggttcgattgggtttgcaacacaattacacaataggagaaggggaaatggtgctggtacttgtgatattgaagaacgccatcggtccacaacaaccttcatggaggtggctgcttcctcatctggtcatgctaaaaaaatttcacctaagaatagttctgatgtgcacaaggcatggaaaatgctagaaatggcaaaatcatctggtgggaagaagaaacctgacaacccttcctccctcaattgcagtgttccattctccatggggaatagatcgacttcatacagcccaattgatgcaattttaggacataagaataacaagctgtatgatggaataactcagaaaaacaacgcggaacaacaccgtagtacaaacatggaaaataaacctccaacaatgaattttggagaatgccgtaaactgcaggagaaattccatgggtcagctcatggaagaacaccttctacaattatgaggcaggaaagtttgactggtaaagtttcctcatcaagcaataatgagaagcataatcgtagtataaacatggaaaataggcctccaacagtgaattttggagaacaccgtaaactgcaagagagtgcatcagttcatggaagaataccttctacagttatgatgcaggaaaatttgaatggtaaagttgcctcatcaagcaataatgaggatgcaggtcaaatatttgaatcttcacgtgacgtaagcagaccagagaaatccaaaccagttgtatcctgtccgcttacgttcagtttactatctggccagtccatggtgacctcatcacaacaattaagacctggatggagccaatctaccgaaatggtaagctctcaggaaccatcagccactgcggcatctattgacatcggtacagctggagcaaacgacaaagttaaaggttctagaccagatcgtcttgagcgcaagagaaaacttggttctgaaacacatgatgacaagggatccaagagatctatgtcaagttgtaaaataagaaaaagtgatatttcatttttggccatacgtgagttgaagctgctcaatatagacaaaacttatggttctgacaccttcaaggaagttgctcgagcagcaacgcatactgttttggcctcctgtggattggaacattcaccatcggtagctcttgcactcccaagaccgttacttaaggtgaaacatcctgcaacagatagtgtagacagtgtagacatgttgtacattctgtaccatgttaaggaagtcattagaatgtga

SEQ ID NO: 18 - DNA, 1239 bp, Oryza sativa
  N_region (99)..(99): n = any nucleotide
atggctctatctggaataactggactgatagagtttcttgcagtatttgtttattgcccttgccgtgttgtaatactaacagttggtgttggggtgggntgggggcgtgtaatagtggaggagtatggtactagcgcccttatttgcctaagggcagatgatttgattggtcaggacattattatcttggtcgtactgtggaaatgggtttgggaggctatagcggtagacgacgcgtccagaccgtgtgcgtgcgtgcgtgtggctaaagaaaggagttgttcagagatgatggatgggatcaagtgggcaagtgctcaacaaatcaagcaagcagagagtagtagatcgagtgatcggaggatggggtcgcggtacgaggtggaggtgacggtgtcgtcggcgcgggacctcaagaacgtcaactggcgcaacggcgacctcaagccctacgccgtgctctgggtcgacgacggcgccaagtgctccacccgcgtcgacctcgacaacgccgacaaccccaactgggacgacaagctcaccctccctctccccccctcctcccgcctcgacgacgccctcctctacctcgacgtcgtccacgccaacgccgccgagggcgtcaagccgctcgtcggctccgcccgcctcccgctccgcgacgtcctcgacgacgccggcgtaggcgcccgcgtctcccgctccctccgcctcaagcgcccctccggccgcccccagggacgcctcgacctccgcctcgccgtccgcgagtccgcgcgctactacgacccctcgccctacccggctccctacggccaacccgccggaacacgcgacccctatggcgccccgcctccggcctacagctccggctcaggcgggcagtacccgtacggtggtggctacggctcaggcgggtacgcggcgccgccggcagggtacccgagcgcctacggggcgccgccacagccagcgtacggcggcgcgcctcctgtggcggcgtacggtgcagcaggtggggcgccggtggttgtggaggagacgaagaagaagagcaagatggggatggggacagggctggcggtgggcgcggcggcgggcgtgctgggagggctggcgctggccggcggcgcgagctacctggaggacaagttcgaggagggcgtggcggagaaggtggaggacgatctcgacagagacgacgactacgccgccggcggctacgacgacgactattaa

SEQ ID NO: 19 - DNA, 1050 bp, Oryza sativa
atgcagcctcgttggcagcggcgacgagcggacacggcatcggcggcggcgtcgtcggcggcggtggtgacgagcggacgcggcatcggtggcggcgacaagcggacgcggcctcggtggcggcggcgaccggcggacgcggcttcggcggaggcggcggcgacgagcggacgtggcctcgtcggggttcttgctagttcattgctagttcatgcgtcggggacccggggagaggttgcggtaggtcagatcatgtatggtgcacaacaccaccggtggggagatgcagccggaggcccagctaccagcccatcgcgcaaccagaaaagccccaaaccgtcttatttctcatcaggctcatcaaaccaggccatcctccacgcggtcccccctccggccacgcccacgcctgcgccgcatccggaatcttcgggcccacggataaaacgagacagcgtccccggaatcgaatctcccgtgtgcatccatcgatccaccacctctcccgacgctgctcactcgcgtactacagtactcctatactactacaccgcggcgcgtgcggtgaaacgtgtcccgtctccccgagctacgtgtacgtgttacccacgcgccatgcggtccctcgtctcccgcaccgcgccccccgcgcgcccgacgtcgctgcggggccgtggcgccggtgccgtcgcggctggccatggacaggccacgtttggccgtcgcgccgttcacggcggctggctcgtcgcgatccgtctccgcgcacggtgccggtgcggcggcgggacggagccggtggaggcccggaaggagagggaaggaggaccggggaagggggaggaggaggaggaggaggccgcggcggcggaggagctggaggtgctggaggaggaggccatgggcggtggcgacgaggggcgccgccccacggactacgaccgccgcgcgcacatcttcgaggagagctcccgggtgttcagcgcactgaagcaccggcacgacgacggccacggcttgaacggcgaccacggcgccgcggcggcttag

SEQ ID NO: 20 - DNA, 624 bp, Oryza sativa
  N_region (537)..(537): n = any nucleotide
atggccgacgaaggcgagctcctcgccggcggcgagcccgtccggccgccgcggctggaggacgcggggctcgaggactgcgccctcccgccggagtccatcgccgaggccttctccctcgccgccatggccgtctcgtcccgcctcgcccatttctccctctccgacgacgacgacgacgacgacgaggacctcctcctcccgccgcgtggcggcggccccgggggatgcgtggaagactcgggcccgacgtgcggggacatcccggatgccctcgtcggggtgggaggcgaccgcgggagcggcgccgacgaggtcttggtggtcggcggcggaaccgttgagggcggagacgaggtggtcgtcggagggcccggggacgaggaggatagggttgtggtggtcggggaggagcggggcgaaaagcttggttctgacaatggctgcgtcgaggggatccgggaaggaatcgctgattcggatcccggagaaggcaatggagaagaagggaaggagaaggaggaggagaaggtggangtggtggtgggctttggaaaaggcgatcttggggggaaaatttcgcgtgagcccgattgggaactctactactacctttgggcatag

SEQ ID NO: 21 - DNA, 482 bp, Oryza sativa
  N_region (44)..(44): n = any nucleotide
  N_region (98)..(98): n = any nucleotide
  N_region (105)..(105): n = any nucleotide
  N_region (120)..(120): n = any nucleotide
  N_region (176)..(176): n = any nucleotide
  N_region (310)..(313): n = any nucleotide
  N_region (480)..(480): n = any nucleotide
atgggtgggagggtatttctgtcctttcctgtttcacgagaggnaaaaaatcgtcgggtaagcatcggcgcctggaccggcgctcgagggggacggcngcgggcngacggacgtgcggcngcggcgactggacgcgcgctcgagggggacggcggtgggcggacagacgcatggcngtggcaacggctggggggggctggacgcgacaggctcgagggggctggcggcgggcggacggacgcctggcggcggcggcggctggacgtgcggcggctgaagggggctagatgcggcgggctcgagggggacnnnngcaggcagactgacgcgcggcggcggcggccggctacgtcagcctcgattggcgacgatgacggcggcggccggctggatgggcgacggtggcggccggctggatgcacgacggcggcggcggcggcctcgattggcgacgagctggatgcgcgggctcgatgcgtnac

SEQ ID NO: 22 - DNA, 474 bp, Oryza sativa
  N_region (116)..(116): n = any nucleotide
  N_region (118)..(118): n = any nucleotide
  N_region (364)..(364): n = any nucleotide
ggacggcggagcggcgcgaagccggcggagagggaggcggaggcggagacggcggaacgcgaaggaggagtcggcggcggcgggtccgaagtcgtgcagctccggccgccgctccntnctctcccgtcggccgccacgggccgctcctctgccatcggccgccgcgccacgctttgcccgaggcccgccgcagctgcttcctcggatccaaggctgcctcattctgagcgtcctcgctgccgagatccaagggcgccgccactgcttccccggacgacctcgactcccgcgggctctccgccgccgctccgaccgccgtcgtgccgccgttgtcccgccagcttcgcgcgccgccgctccggcngccgtcgtgccgccgttgcccccgccggcttcgcgcgccgccgctccgaccgctgtcgtgccgccgctggccaccgctccgtccacgtggggaaaagagaagtaggatag

SEQ ID NO: 23 - DNA, 462 bp, Oryza sativa
  N_region (247)..(247): n = any nucleotide
atgaatgtgccggtccgcctgcgaaaatctattttcgcaggcgaacctcttaagcggcgccgcttaagagtctcaaaacccaccccctccctctcccctctcctcccctcccctctcctccccacggccggcctctcccacggcggctacagcgcggaaagcggcggggcggcgcgcggcgtccggcggcttggggcggcggtggtggctcccctcccccctccctcccagatctgggaggagggangggggaggccggcggcggcggcgacgacgacgacggcgcagggccgcggcgacgacgacgagcgggggccgcggcggcggctctcctcccccctccctcccagatctggccggaggagggaggagggaggccggcggcggcggctacggcgcggggcggcggcggctcccctcccccctccctcccagattataacatctcagcctagggcttaa

SEQ ID NO: 24 - DNA, 321 bp, Oryza sativa
atgttcatgaaattcatcggcggtggaggcagcagcatcgactacggctatggcggcggcatcggctacggctacggcgacatcggcaacatcggctatggctatggcggcggcggctgcatcggctacggtagcggaggcggcggcatcgactacggctacagcggcggcatcggcggcggcggagcgtatccgtacgcggggaggccggatccgtcgcttgccactgcggggaggccggatccgtcgccggcgacctcggggatgacggcggcgggctacgggaaggcggcgacaacgatggtgttgatttttgattag

SEQ ID NO: 25 - DNA, 5877 bp, Oryza sativa
  N_region (674)..(674): n = any nucleotide
  N_region (5856)..(5856): n = any nucleotide
ggcgagcttaggaggagcagcggtggcgagcgagcctgggaggagcgacggcggcaggcgaacttgggaggagtaggagcggcggcggcgggtgagcgcggcgcggcgacaacaggcgagtgtaggaggagcgtcggcagtgggcgagcctgggacaagcggcagcagtgaaggcgggcgagagaaggaggagcagcggcaagcgagcgcggcgatgacaagtaaagtggcggcggcggcgggcgaggttgaaggcggcggttgagagtagagagagaagagagaaagaatgagagagggtgaaaaggataaggaagaaaaaagaaaaaaaatcaaagggtagaaccgtacttacacagccgtttctctctccaattctcccagatataataaaataatctcgtgggtgtccagcaactaattactatttttttgcggtaattagtagcggcgctgacgggcgagcttaggaggagtagcggtggtgagcaagtttgggaggagcgacggcggcgggcgaacctgagaggagtaggagtgacgatggtgggtgagtgcggcgggcggagcggcgacgacgggcgagcgcaggaggaggtgcggcggcagcgggcgaggttgaaggcgtcggttgagaaagaatgagagagggaggaaaggataaggaagaaaangaaaaaaaaaatcaaagggtagaaccgtacttacactgccgtttctctctagtgtccagcaactaattactagttttttacggtgccctgcagcagaaacgcgttacggtgtctcttagctaattacacatttttttatatccggtagcaaattttaccaaaacaaaaggcatgatctttctttaaaaaaaaggaaaaaaaaagaacaagcaagaatcatacgatgcagccgctcccttgctagtacatgacgccaacaatccaacatatacatgcaaataaatctatccaaaaaccggcacgaaatcaaaagaaaaattatctgcttgagctcaccaaccatttttatatcggcaatggcggatgggggtaaccccaccggcgagccggagccacctcggcccccttcctcgtgtataaataagggccccggccatggcaatcctcgcaccaatccattccacctccgttaaccccgttcgttttatttgcgtttacttcgtttcttgggaaggcacttccttctcttcctaggaagcaggcttgaggagccaagaggaagaggagagcaatgggggaagctgccggcgaccgcgtcctgagccgcctccacagcgtcagggagcgcatcggcgactccctctccgcccaccccaatgagctcgtcgccgtcttcaccagcaggctggttaacctcggaaagggaatgcttcaggcccaccagatcattgctgagtacaacaacgcaatctctgaggctgatcgtgagaagctgaaggacggtgcttttgaggatgtcctgaggagtgcacaggcaggaggggattgttatctccccatgggttgcccttgccatccgcccgaggcccggtgtctgggagtatgtgagggtcaatgtgagcgagctcgctgttgagttgctgacagtccccgagtacttgcagttcaaggaacagcttgtggaagaagggcaccaacaacaactttgtgcttgagctggatttcgagccattcaatgcctccttccctcgtccttctctgtcgaagtccattggcaatggtgtgcagttcctcaacaggcatctgtcatcgaagctcttccatgacaaggagagcatgtacccactgctcaacttccttcgtgcacacaactacaagggcatggaccatgatgttgaatgacagaatccgcagtctcagtgctctccaaggtgctctgaggaaggctgaggagcatctttctggtctttcagcagacaccccttactcagaattccaccacagtacaggttccaggaacttggtctggagaagggttggggtgactgtgccaagcgttcccaggagaccattcacctccttttggaccttcttgaggcccctgatccgtccaccctcgagaagttccttggaacaatcccaatggtgttcaatgttgtcattatgtccccacacggttacttcgcgcaagccaatgtcttgggttaccctgacactggagggcagaaggttgtctacattttggaccaagtccgtgctatggagaatgagatgcttctgaggatcaagcagcaaggtctcaatattacaccacgcatccttattgtcaccaggttgctccctgatgcaactggcaccacctgcggtcagcgtcttgagaaggtccttggcaccgagcacacccacatcctacgtgtgcctttcagaactgaaaatggaattgttcgcaagtggatctcacgttttgaagtctggccgtacctggaaacattcactgatgatgtcgcgcacgaaattgctggagagctccaggccaatcctgacttgatcatcggaaactacagtgacggaaaccttgttgcatgcttgcttgcacacaagatgggtgttacccattgtaccattgcccatgcgcttgagaaaaccaagtaccccaactctgacctctactggaagaagtttgaggatcactaccacttctcatgccagttcacaactgacttgattgcgatgaaccacgctgacttcatcatcaccagtaccttccaagagattgccggaaacaaggacactgttggtcagtatgagtctcacatggcattcaccatgcctggtctgtaccgtgttgtccacggtattgatgtttttgacccgaagtttaacattgtctcgcctggtgcggacatgtccatctacttcccttactctgagtctcgtaagaggctcacctccctccacccagagattgaggagttgctctacagcgaagttgacaacaacgagcacaagtttatgctgaaggacaggaacaagccaatcatcttctccatggctcgtcttgaccgtgtcaagaacttgactggtctggttgagctgtatggtcgcaaccctcgcctgcaagagctggttaaccttgtggttgtctgtggtgaccatggcaacccatctaaggacaaggaggagcaggctgagttcaagaagatgtttgaccttattgagcaatacaacttgaatggccacatccgctggatctccgcgcagatgaaccgtgtccgcaacggtgagctctaccgttacatctgcgacaccaagggtgcttttgtgcagcagcccgctttctacgaggcattcggtctcactgttgttgagtccatgacctgtggtctcccgacattcgcaaccgcctatggtggtccagctgagatcatcgtgaacggagtgtctggcttccacattgacccataccagggtgacaaggcctcggcgctgctcgttgagttctttgagaagtgccaggaagaccccagccactggaccaagatctcgcagggcggtcttcagcgtatcgaggagaaatacacctggaagctctactctgagaggctgatgaccctcaccggcgtctacggattctggaagtacgtctcgaacctggagaggcgtgaaacccgccgctaccttgagatgctgtatgccctcaagtaccgcaccatggctagcaccgtcccgttggccgtcgagggcgagccgtcgaacaagtgagctggccaacatctcaggctgagactctgaaagaggagagcattggagtttctttgctttgtttccattctctggtttcagagatgaaaagagaagagagatatttcaggatgctttgcattcctaggcactgctctttttccttaagaaagtaaggtcgattgaatttgggagttttctagtttgatttagttgggggtgagttcagtggaatgtggtgtgtggttggtgctctgtctcctcttgttattgggatgttacctatgaataatagaaacggccttggtgccgtttctgcaataatatattgtagcatccttgtttccaagaaaaaattgtcactgaaatgctcacttctccttggggttatcttactgtttatttatgtttcaccaatcgaaatccttactgtgcatctttgactataaaacatatgatttcctagattttttttttactccctccatttcatattataagttgtttgacttttttctagtcaaacgggaaataacctcaaggcacccagcacgacgattttctcttccttcttagacacaatcacgcagcgatacttggccacctgggaatacgagatattgatactttttctaacctttttcattgtttttatcccttttacttatatgttatttaaactaatatttttaatcaaatagataattaaattttttacccaaaacaaacatattatcaaaatatattaaatgttaattgtaaggaaactaattttgtgtggtagatattaaatatattttaatataaactggtcaaaattaagtaaatttgactaggaaaaatgtccaaacgacttataacataaaatggagggagtagtaattatcatgacatattaataatattagttagtagtaatttttacacgtatattagtaattactgtgagttactagtaacattatatattactacaaatatttacaattttattagaaaaacatttgagagtggcatttgttatgaatccgatggacataatgcactaaatatttttatgagtgacctaccatatctacaaatgtgttgcttaaaaaggtatgagtatttatttcctacttttttatataaataaatgtaagaaaaaaatatatcgttaatgtatatgtctatctaaaaagtaatttcatcacattaaaacatttaataaattttgtggtattgtaaaataataagatattctatctaaactagttttaagtcgttaacacatatgtaaacagttttacattacatgtaaattagtttttattccctaatgggcaaccgatgagtctcttattatctactttaatagcagactcttcagctataaatactcgtcattattcaatactaatatattgtcggtcttaaaaagtatgagtatagtttaactccatagtgttgccacaaatattcatcataataatggtattactttcgatgctaaaatgtatgtatattttttattcaccttatctaaatatccaataagtatttaggaccatttgtaagaatcctaggttataggacaagtgtttccaagaaaaccttttttttttggaaaacatggatatgttcaagtattaatcactaaacattggcttattaataaaaatccattatctagaaaaatgaaccactaaaccatccattttcctgcatgttttgtgcaaataacagtaggttgaactgtggcaatagctaaatagcgccatgtccatttgtgaatgtaaatatgttcgtgagaagtacttccttccttcacaaatataagagattttgggtttatatttttatccacaggattctactaaccaccactcattatttaattcacttaattttacatcactaccctcatcatttaataagaagtattatagtctttttttccccttcatctttactcatttcttcgaaaaattctcaacataaaatagaatgtggtctattgcctggacaaaggcacaacaaatttaaacaaacatttgttcatatttgttgtattaggctatttcatatcctgtcgtagtctttaaaaacaaacctagaaaggccctaatttagggggtgcccaaacaccccctaacctaacatgtctgtaccatcatcaccntggtactacagtattatctag

SEQ ID NO: 26 - DNA, 2404 bp, Oryza sativa
atggctcctgaggcggcggcggcggccttgaagccgatgaaggcaacgtcggacggcgtgttccagggggaggaccccctggaagcggccctgcctctggccatcgtgcagatttgcatcgtcgtcgtgctcacccgcgtgctcgccttcttcctccgcccgctccggcagccgcgcgtcatcgcggagatcatcgtacgttcagggcggcatcatgctcggcccgtccgcgatcggccggaacagcgcgttcatcaacacggtgttccccaagcagagcctcacggtgctcgacaccctcgccaacatcggcctcctcttcttcctcttcctcgtcggcctcgagctcgacctccgcgccatccgccgcacgggagctggcgcgctcgccatcgccgtcgccggcatctccctccccttcgtcctcgggatcggcacctccgtcgtcctccagaacaccgtcaaccgcggcgtccccacggggcccttcctcgtcttcatgggcgtcgccctctccatcaccgcgttcccggtgctggcgcgcatcctcgccgagctcaagctgctcaccaccgacctcggccgcatggccatgtccgcggcggccgtgaacgacgtcgccgcgtggatactcctcgcgctcgccatcgcgttgtcgggctccggctcgcctttcgtgtcgctctgggtgctcctcagcggcgtcggcttcgtcctctcgtcgttcttcttcatccggccgctgctctcgtggatggcgcggcgatcccccgagggcgagcccgtgaaggagctatacatatgcacgacgctcaccatcgtgctcgccgccggcttcatcaccgacaccatcggcatccacgcgctgttcggcgccttcatcgtcggcatcatcgtgcccaaggaagggcccttcgctggcgtcctcctggagaaggtggaggacctcatctctggcctcttcctgccgctctacttcgtgtcgagtggcctcaagaccaacgtcctgaccatcaagggcggggactcgtgggggctcctcgtgctcgtcgtcgcgacggcgtgcatcggcaagatcggcggcacagtgctcgcgtcgctcatcgtgcgtgtgccgctccgtgaggcggtgacgctcggggtgctgatgaacaccaaggggctcgtggagctcatcgtgctcaacatcggcaaggaccggcacgtcctcaacgacgagaccttcgccatcctcgtgctcatggcgctcataaacaccttcatcaccacgccgctggtgatggccatctacaagccggcgcggcgcgcccccccgtacaagaaccgcgccgtccagcgcccgaaccccgacgacgagctccgcatgatggtgtgcttccacagcacgcgaaacatccccaccatgatcaacctcatggagtcgtcgcgtgggacgcggcggcgcggcatcaccgtgtacgccatgcacctcgtcgagctctcggagcggtcgtccgccatcaacatggtccacaaggcgcggcgcaacgggatgccgttctggaaccggcggcgcaacggggacggcgaccagctcgtcgtcgcgttcgagacgtaccagcagctgagccacgtgtccattcgcgccatgacggccatctccgacctccacaccatccacgaggacgtggtcaccagcgcgcaccagaagcgcgccgcgctcatcgtgctccccttccacaagctccaccagatggacggccacatggagtccctcggcgacgagtaccagcacatcaaccagcgggtgctccaccacgcgccgtgctccgtcggcatcctcgtcgaccgcggcctcggcggcgccgcgcaggtcgccgccagcgacgtgtcctacaacatcgtcgtcctcttcttcggcggccgggacgaccgcgaggccctctcctacgccacgcgcatggtcgagcacccgggcatcgcactccacgtgatacgcttcgtcccagagtccggcggcggcggcgcgaacgacaaagccgcggcggacgatgcgttcctcgcagagttccgcggcaaagtcgccggcgggaacgactccatccggtacgaggagaggacgtccagagggaaggcggacgtggtggaggcgatcaaggcgatgggtccgaccaacctgttcctcgttggacaggggtcgccgtgcgcgccgctgatggaaccgagcgctgagtgcccggagctcgggccggtggggagctacctggcgatgccggacttctcgacggtggcgtcggtgctggtgatgaagcagtacgacccgacggcggagcactacgaactcgtcgaggagtcgcggacaccgccgtggacatcgacacaccggggcctcgtagagggtgatgcccttagtcgtaagtcgtaa

SEQ ID NO: 27 - DNA, 2387 bp, Oryza sativa
  N_region (435)..(435): n = any nucleotide
  N_region (440)..(440): n = any nucleotide
atggggaagcgcgcgcgccacggcggctccggcaggtcccactccccctacttcgagtcccagctccgccgcctcatcaccgacggcggactctcctcctcctccgccgaggacgtcgccatcgccctccgctcccgcttccccgagttccgccgccacaagctcgaccccttcacctccgccgtccgccgcgccctcaactccatcccctccgactcccactccgactccgccgacgactcccacgcctccactccctcccaacgccgccgccgccgcccccgccacgacgcccatgccaccgcctcatcctccacctccctctccgacgacgccgcgcacccaccgcctccccccatctacgacgtcaccaagtccatgctccgcacccagtacgcctcccagactcccaagcgagacaccggcagcaaccancagcnggaaatcgagatcgccgccgagaagccccgccgattaatcacctccgatggcggcgccggcggcgaggccaagccggagtccgctccacctagcgaaggaggcgatagagggggcaaggggcccacgttttcggatcttggggggatggagtcggtgatagagcagctaatgatggaggtggtggtgcccctatgccatccggaggtgccgcgctggcttggggttaagcctgtggctgggctgctgctgcacgggccaccaggctgcggcaagaccacgctcgctcatgccatcgccaatgagaccggcgtgccattctacaagatatcggcgccggaggttgtgtccggggtctctgggggcttctgaggaaaacatcagaagcctgtttaagaaggcgtacaggactgctccatcaattgtatttatagatgagatagatgcgattgcatccaagagggagaatctgcaacgggaaatggaacgacggatagttacacagttaatgacatgcatggatgaataccaccaacaaattggctctggtagcggtgatgtgggttcagagtcagctgaaaagaaacctggctatgttattgtcattggagctacaaatagacctgacgctgttgaccaagcacttcgtaggccaggaaggtttgatcgagagatctctcttggtgttccagatgagtatgcacggaaaaagatacttatgatgcttacccggaatcttcgactggaaggtcagttggacttgttgaagatagcaagggccacatcaagctttgttggtgcggacttgaaggcattggtggataaagcggggaatctagcaatgaagagaataattgatagaagaagagctcagttttgtcaggagcatgatgaaaacagcaagcacgactggtggagacaaccttgggatgcaaatgagatagagggcctgagtattacaatggatgattttgagaggaagcaaccaagatggttcaaccatctttgagaagagaaggattttcttctatccctgatgtcacatgggatgacgttggaggccttgattcgctaaggaaagagtttgaccgctacattatccgatgtatcaagcaacctgaagaatataaggtgaacatacttacagacatttggattgaatatgcaagctggctttttgctgtttggaccacccggttgtgggaaaacactgatagcaaaagcagttgcgcatgaggcaggggcaaattttattcatattaagaggggccagagctgttgaacaagtatgttggtgagagtgaatcagaagttaggaaaattttcatccgtgcacaaactaatacaccatgcatcctgttttttgacgagagttgcttattgaacttgatggtgctggtgaacggaaagcagaattgatgtgatagatgatgcagcacttcgacctggtagatttggcaagaaacattatgtacctttacctggtgctgatgagcgggtttcgatattgagagccctcgctcggaacaaaccgatctcctccagtgttgatttgggtgcactggcacgtagagaggaatgcaaaaatctcactggtgctgacctagcatcaatgggaacctatgggacattttgtgaatgaagcagccatggcagcattggaagagaggctggagttcctggagaatggggaatcgtcaatgagctcatcatctgcgattgagctccctcattttgaacgtgctctagcaaaaatgcagccatcagtatctgaacagagcgaggagatgtacatcagattgtcatggtcaacccttttgatgacacgtttcaccttggttttgttctttggtcacaacagcaaaggagacactacgaggcgttgtgcaagaaatactccgcaagctgatatatattgcgccatgcttacagagatccatgtcctctga

SEQ ID NO: 28 - DNA, 2103 bp, Oryza sativa
atggcgtcggagaccgagacgttcgccttccaggccgagatcaaccagctgctgtccctcatcatcaacaccttctactccaacaaggagatcttcctccgcgagctcatctccaactcctccgatgcattggataagattaggttcgagagcctcacggacaagagcaagctcgatgcgcagccggagctgttcatccacattgtccccgacaaggctagcaacaccctgtcgatcatcgacagtggtgtcggcatgaccaagtcggacctcgtcaacaacctcggtaccatcgccaggtcggggaccaaggagttcatggaggcgctcgctgctggtgctgatgtgtccatgattgggcagtttggtgtcgggttctactccgcctaccttgttgctgagagggttgttgtgaccaccaagcacaacgacgacgagcagtatgtgtgggagtcacaggccggtgggtccttcactgttacacgtgatacctctggtgagcagcttggacggggtactaagatcaccctctacctcaaggatgatcagcagctggaataccttgaggaacgtcgcctcaaggatctggtgaagaagcattctgagttcatcagctaccctatctccttatggactgagaagacaaccgagaaggagatttctgatgatgaagacgaggaagagaagaaggatgctgaggagggaaaggttgaggatgttgatgaggagaaggaagagaaagagaagaaaaagaagaagatcaaggaagtctctcatgagtggaacgtgatgaacaagcagaaacctatttggttgaggaagccagaggagatcaccaaggaagagtatgctgctttctacaagagcttgacaaacgactgggaggaacatctggctgtcaagcacttctctgtggagggtcagcttgaattcaaggccatcctgtttgtaccaaagagagcgccatttgacctctttgacaccaggaagaagcaaaacaacatcaagctgtacgtacgccgggtgtttatcatggacaactgtgaggagttgatcccagagtggctcagctttgtcaagggcattgttgattctgaagaccttcccctcaacatctcacgtgagatgctccagcagaacaagatcctgaaggtgatccgcaagaaccttgtgaagaagtgcgtggagctcttctttgagatcgctgagaacaaggaagactacaacaagttctacgaggccttctccaagaatctcaagcttggcatccatgaggactccaccaacaggaccaagattgctgagctcctgaggtatcactccaccaagagtggtgatgagttgaccagcctcaaggactacgtaacccggatgaaggagggccagagtgagatctattacatcactggtgagagcaagaaggctgttgagaactcccccttccttgagaagctgaagaagaagggatatgaggtcctgtacatggttgatgccattgatgagtacgctgttggtcagcttaaggagtttgagggcaagaagctcgtctctgccaccaaggaaggtctgaagcttgatgagagtgaggacgagaagaagcggcaggaggaactcaaggagaagttcgagggtctgtgcaaggtgatcaaggaggtgctcggtgacaaggtggagaaggttgttgtctctgaccgtgtggtggactctccctgctgtctagtcactggggagtatggctggactgctaacatggagaggatcatgaaggcccaggctctgagggactccagcatggccggctacatgtcgagcaagaagaccatggagatcaacccggagaattccatcatggacgagctccgcaagcgtgccgatgctgacaagaacgacaagtctgtgaaggacctggtgatgctgctcttcgagactgccctcctgacctccggcttcagccttgaggaccccaacaccttcggcaccaggatccaccggatgctcaagctcggcctgagcatcgacgaggacgagtctgctgaggctgacgccgacatgccgccgctggaggacgacgccggcgagagcaagatggaggaggtcgactaa

SEQ ID NO: 29 - DNA, 1869 bp, Oryza sativa
  N_region (1813)..(1813): n = any nucleotide
  N_region (1832)..(1832): n = any nucleotide
  N_region (1843)..(1843): n = any nucleotide
  N_region (1847)..(1847): n = any nucleotide
  N_region (1868)..(1868): n = any nucleotide
atggccaaggaggcaatggcgacaccgacacggccgcaggtcagggagacgtggccggcgggtggcggcggcggcggcggtggttggatgggcgttggctccggcgagagggtggcgagcgcgtacgacctcgtggagcagatgcactacctgtacgtgcgcgtcgtcagggcgcgcgggctcacggcggcggcgagcacggtcgccggcggcggcgggtgcaacccgtacgtggaggtgcggctcgggaactaccggggcacaacgcggcaccacgagcggaaggcggcgccggagtggaaccaggtgttcgccttctcgcgggagcgcgtccaggcctcggtgctcgaggtgttcgtcagggacaaggacgccgtggcggcggcgcccgtgcgcgtgccgccggacagcccgctcgcgccgcagtggtaccgcctcgaggacgtcggcggcggaggcggcagggcggtgcagggagaggtcatgctcgcggtgtgggtcggcacgcaggccgacgaggcgttcgcggacgcgtggcacgccggcgcggcgtcggtgcgcggaggcggcgacggcgtggcggccgtgcagagcacgcggtccaaggtgtacgtgacgccgaagctgtggtacctccggataagcgtgctcgaggcgcaggacgtcgtcccgggcgccgtcgccggcgcaggcggcgacaagggacggcacggcgaggccttcgtcgtcgtcaaggtgcaagtcggcggcgtgacgctccggaccaagccgtgctgccgcccgacgagcccatcgtggaacgaggagctggtgttcgtcgtggcggagccgttcgacgagccggcggtgctcgtcatcgaggcccgggcggcgcacccgggcaaggacgagatcgtcagccgcgccgtgctgccgctcaccctcttcgagaggcgcctcgaccggcgcggcgcggccgcggccacgcacacgcagtcgcagtggttcagcctggagccgttccccgccttcgccggccgcgtgcacctccgggcgtgcctcgacggcgcctaccacgtcatggacgagcccgccatgtacgccagcgacacgcgccccacggcgaggcagctgtggcgcccgcccatcggcgtgctcgaggtcggcgtcctcggcgcgcagggcctccccccgatgaagaccgccgccgacggcggccggggcaccaccgacgcgtactgcgtcgccaagtacggccacaagtgggtgcgcacccgcaccgtcgtcgactcctccaccccgcggtggaacgagcagtacacctgggaggtctacgacccgtgcacggtgctcacgctcgccgtgttcgacaactgcaacctcggcaatggcggcggcggcggcaaggaccagaggatcggcaaggtgaggatacgcctctcgacgctggagatggacagggtgtacaccaacgcgcaccggctcgtggtgctgcacccgtcggggttgcgcaagaacggcgacgtctgcctcgccgtgcgcctcacctgcctgtccctcgccagcgtcttgcgcctctacggcgagccgctcctccccggggcgcactacgtccaccccttcgccgtcgcgcagctcgacggcctcaggcggcaggcggtgggcgtcgtggcggcgcggctgggccgcgccgagccgccgctgcggcgggaggtcgtggagtacatgctcgacgccggctcccacctgtggagcatccggcggagcagggccaacttcctccgcgccaaggcgctgctctccggcgccgccggcgcggcccgttggctcgccnacttttgccactggaggancccgcgaagangatncttggggcacttctgctcgtna

SEQ ID NO: 30 - DNA, 1759 bp, Oryza sativa
  N_region (1584)..(1584): n = any nucleotide
  N_region (1587)..(1587): n = any nucleotide
  N_region (1602)..(1602): n = any nucleotide
atgataacgggggcggacttctaccacgtgatgacggcgatggtgccgctgtacgtggcgatgatcctggcgtacgggtcggtgaagtggtggcgcatcttcacgcccgaccagtgctccgggatcaaccgcttcgtggcgctcttcgccgtcccgctcctctccttccacttcatctccaccaacaacccctacaccatgaacctccgcttcatcgccgccgacaccctgcagaagctcatcgtcctcgcgctcctcaccctgtggagccacctctcccgccgcggctccctcgagtggaccatcaccctcttctccctctccacgctgcccaacacgctcgtcatggggatcccgctgctgaaggggatgtacggggagttctccggtagcctcatggtgcagatcgtggtgctccagtgcatcatctggtacacgctgatgctcttcatgttcgagtaccgcggcgccaggatcctcatcaccgagcagttcccggacaccgcgggcgccatcgcgtccatcgtcgtggacgccgacgtcgtgtcgctcgacgggcggagggacatgatcgagacggaggccgaggtgaaggaggacggcaagatacacgtcaccgtgcgccgctccaacgcgtcgcgctccgacgtctactcgcggcgctccatggggttctccagcaccacgccgcggccgagcaacctcaccaacgccgagatctactcgctgcagtcgtcgcgcaacccgacgccgcggggctccagcttcaaccacactgacttctactccatggtcgggcgcagctccaacttcgccgccggggacgcgttcggggtgcgcaccggcgccaagccgcggccgtccaactacgaggaggacgcggcggcgcccaacaaggccggcagcaatacccggcgcccaacccggccatggcggcgccgcccaagcccaagaaggcggccaacggccaggccaagggcgaggacggcaaagacctccacatgttcgtctggagctccagcgcgtcgcccgtgtccgacgtcttcggcaacggcgccgagtacaacgacgccgccgccgtcaaggaggacggcgtggagagggacgacttcagcttcgggaacagaggcgtcgccgagagggacgcggaggccggcgacgagaagagcgtggcggcggcggtgtcggcggcgccgacggcgatgccgccgacgagcgtgatgacgcggctcatcctgatcatggtgtggcgcaagctcatccgcaaccccaacacctactccagcctcatcggcctcatctggtcgctcgtctgcttccgcaggtggaacttcgagatgccggcgatcatcctgaaatccatctccatcctctccgacgccggcctcggcatggccatgttcagcctcggggctgttcatggcgctgcagccgcggatcatcgcgtgcgggaacaaggtggcgacgttcgccatggcggtgcggttcctgaccggcccggccgtcatggccgccgcctccatcgccgtcggcctccgcggcacgctcctccacgtcgccatcgtgcagcaggcagcgttgccncanggcattgtccccttngtcttcgccaaggagtacagcgtgcaccccgacattctcagcacggcgtcatctttggcatgctcatcgcgctgcccaatcacgctggtgtactacatcctgctggggctgtgactgtgaacaaccaccaccaagaacagcatgtttttgcaggtga

SEQ ID NO: 31 - DNA, 1681 bp, Oryza sativa
cgcagagaaaggcgtcttcgtactcgcctctctccgcgcctccgcgcttttcctcctcctctcccctctctcccttctccgccgccgtcgcagcatcaacccaatccgccgccatgagggagtgcatctcgatccacatcggccaggccggtatccaggtcgggaacgcgtgctgggagctctactgcctcgagcatggcatccagcaggctgatggtcagatgcccagtgacaggactgttggtggaggtgatgatgctttcaacaccttcttcagtgagactggtgctgggaagcatgttccccgtgctgtatttgttgatcttgagcctactgtgattgatgaggtgaggactggttgctaccgccagctcttccaccctgagcagctcatcaatggcaaggaggatgcagctaacaactttgcccgtggtcactacaccagttggcaaggagattgttgatctgtgccttgaccgcatcaggaagcttgctgacaactgcactggtctccaaggtttccttgtgttcaacgctgttggaggtggaacgggctctggtcttggttcccttctcctggagcgcctttctgtggactatggcaagaagtccaagcttgggttcactgtgtacccatcccctcaggtctccacctctgtggttgagccatacaacagtgtcctctctacccactccctccttgagcacactgatgttgctgttctgcttgataatgaggccatctatgacatctgccgccgctcccttgacattgagcgcccaacctacaccaacctcaacaggcttgtgtctcagcaggttatctcatccctgaccgcctccctgaggtttgatggtgctctgaacgtggatgtcaatgagttccagaccaaccttgtgccctacccaaggatccacttcatgctttcgtcctacgctccagtgatctctgcggagaaggcctaccatgagcaactctctgttgccgagatcaccaacagtgccttcgagccatcctccatgatggccaagtgcgaccctcgccacggcaagtacatggcctgctgcctcatgtaccgcggcgatgtcgtgcccaaggacgtgaacgccgccgtcgccaccatcaagaccaagcgcaccatccagttcgtggactggtgcccgacggggttcaagtgcggcatcaactaccagccgcccagcgtcgtccccagcggcgacctcgccaaggtgcagagggccgtgtgcatgatctccaactccaccagcgtcgtggaggtgttctcccgcatcgaccacaagttcgacctcatgtactccaagcgcgccttcgtccactggtacgtgggtgagggcatggaggagggtgagttctctgaggcccgtgaggatctcgccgcgttggagaaggactacgaggaggttggcgctgagtccgacgagaatgaggatggcgatgatggtgacgagtactagaggagtcgtcgtcgtctgggggcttgatgttctgtgtgtcaaggcctgattgataactgctgctatcccatgatctgccagtgtggagttatcctgttgccgtgtgcgtgtgtcttcgagacatttgcttgtggtgatctgatgtttggggcttaatgggcttacaaccctcgttgttgtaacctgtgtgccctgttttatgtga

SEQ ID NO: 32 - DNA, 1450 bp, Oryza sativa
  N_region (376)..(376): n = any nucleotide
  N_region (382)..(382): n = any nucleotide
  N_region (582)..(582): n = any nucleotide
atggagtcggatcaggggaagctgttcatcggcggcatctcgtgggagaccaccgaggagaagctccgcgaccacttcgccgcctacggcgacgtctcccaggccgccgtcatgcgcgacaagctcaccggccgcccccgcggcttcggcttcgtcgtcttctccgacccttcctccgtcgacgccgccctcgtcgacccccacaccctcgacggccgcacggtatcccctctcaaaccctagcgaatattcgcgttggattccctcctctcaagggttgatgtgaagcgggcgctctcgcgggaggagcagcaggccgcgaaggcggcgaaccctagcgcgggggggaggcacgcctccggtgggggcggtggtnggggangcgccggtggtggtggtggtggcggcggtggtgacgccggcggtgcgcggacgaagaagatcttcgtcggcgggctgccctccaacctgacggaggacgagttccggcagtacttccagacctacggggtcgtcaccgacgtcgtcgtcatgtacgaccagaacacgcagcggccgagggggttcgggttcatcaccttngacgcggaggacgccgttgaccgcgtgctgcacaagaccttccatgacctgagcgggaagatggtggaggttgaagcgcgccctgcccagggaggccaaccctggctccggcagtggtggccgttccatgggaggcggcggtgggggttaccagagtaacaatgggccgaactccaattctgggggctatgatagcagaggtgacgctagcaggtatggtcaggcgcagcagggtagtggtggttatcccggttatggtgctggaggatatggtgctggtacggttggttatggatatgggcatgctaaccctggaactgcgtatgggaattatggggctggaggatttggaggtgttcctgctgggtatggtgggcattatggcaatccaaatgcgcctggttcaggttaccagggtggtcctccaggagcaaacagaggaccatggggtggtcaagctccgtctggttatggcactgggagttatggtggcaatgcaggctatgctgcttggaacaactcttctgctggaggtaatgcacccactagtcaggccgctggtgcaggcacaggctatgggagccagggctatggatatggtggatatggaggagatgcatcgtatggtaatcatggtggatatgggggttatggaggaaggggagatggtgctggcaatccagctgctggcggtggatctgggtatggtgctggctatggaagcgggaatggcggttctggttatccaaatgcttgggctgatccttcacaaggtggagggtttggggcttcagtcaatggagtgtctgaaggccaatcaaattatggcagtggttatggtggtgtgcaacctagggttgctcagtaa

SEQ ID NO: 33 - DNA, 1406 bp, Oryza sativa
gccgaccgtagggacctccgagcgaaaccactgagagcgaatgctaccaaagagggtcgtgaaagagaagaccaccgtcttcagctcctgctgcctcgtcggggcaggtaccgaacacggtcgacgcggcgaaggcagccgcagcggctagcgcgctccagaccagggcggagaccctttcgacaggccagctgctggtgccccaagccgcttcgtcatagccggcaacggtttcgaccgcgctcgccgccgcacaagtcaaccccgacctctaagcacatgtcgaagccgacatggaggccatgcgccggaacatgacgcgactccaagacatggttcgtcagatgcaagaacagcagcaggcgtataagacggcgaggcaggccaaggtcgcttcggctccaatcctccagtattcggcgggctacatcccaccccaagtctacccgcaagcaccaatccagccccatccgccacaagccatgcaaatgccagtatacttcactgggcagcctccaaccacagcaatgcaaccggcccctcatgtgcagccgcaagctcagccggtcgctgcccaaggagcaaaccaagaaccaaactaggtcaccatggcatggacccagccgacgttcgacccatccatggcggcccaccaagcatcaccgatcagggctaggcagccgaacactgtggcccagccgcatgcgcaagccatgacctcgcccttcgccacgccatatccacagcaaggtgccgcgaacagggcggggggcgaaaaggggctaccactgagtgggggaatcaagatccgtccaatcccaccccagttcaagttcccacccgtcccacgctattcgggcgaaacggatctaaaagagttcttgtccatctacgagtccgcgatcgaagccgctcatggagacgaaaataccaaggcgaaggtaatacatctcgctctagacggcatcgcccgttctttgtacttcaatttaccagctaacagcatttactcatagaagcaattgcgcgatgtctttgtccttaactttcgaggcacctacgaggagccgaagacgcagcagcatctactcggtattcgcaagaggcctggggaattgataagggagtacatgcgtcgcttctcgcaagcccgatgtcaagtgcaggacataactgaggcgtccgtcatcaacgccgcttcggccgggctgctcgagggcaaactcacaagaaaaatcgccaacaaagagccgcaaacgcttgagcacctacttcgcatcattgacgggtacgtgtcacgcccggaatttctatccaaaattccaaacgcttacatgtgtgttaagccctcgtccaggaatcaaccgaggcacacaatgacaatattgataatagagtacaaataa

SEQ ID NO: 34 - DNA, 1405 bp, Oryza sativa
  N_region (901)..(902): n = any nucleotide
atggcgagcggcggcggcggcgtgaggctgaaggccgggacgcggccgccgtgggtggggctagcggcggcggtgtgggtgcagatggcggcggggaacgcgtacacgttcccgctctactcgccggcgatcaaggcggcgctggggtacacgcagcagcagctcgccgtgctgggcgtcgccaaggacgtcggcgagaacttcggcgtcgtcgccggcgtgctctgcaacagcttcccgccctgggtggtgctgctcgtcggcgcggccttctgcttcgtcggctacggcgcgctctggctcgccctagcaatggcaacaaacagcaacgcgtggttcctgacagccgtgctggtgaccaacatgcgcaacttcccgctccgccgcggcgtcgtcgccggcctcctcaagggctacatcggcgtcagcgccgccctcttcacccaggtcttctccggcgtgctccaccgctcgccgacgagcctcctcctcctcctcgccaccggcctccccaccatatgcctcgccaccatgccgtctacctcgtgacaaccaccgtcctcggcaacgccatcaaactctccgatgcaaccagctacacgcttttcatcgtcaccgtgcttctgcttcttgcgccgctcgcgatcccggtgaagatgacattgttcaggagtaagaggcggcggccgaggagaggggaggacttcgagttcagtgaggcgcttgtcaaggctgatttctggctgctgttcgttggatacttcattggagttggaacgggtgtcaccgtgctgaacaatctggcacagattggtgttgctgctggtattggtgacactacggttttgttgtccctgtttgcgcttggtaacttctttggccgccttggtggaggtgcaanntcagagaaatttgtcaggttaggtcgacattgttggttcctaggccaatatggatggcgttgacgcaaaccgtcctcgtcgtcgcttacctctgtttggcctatactctcggcccagccgtcgcctacgcttgcacggccaccgttggcctttgctacggcgtgcaattctcagtgatgattccaacgacctcagagctgttcgggctcaagaacttcggcctcttctacaacctcatgtccctggcgaacccgctcggcgcagcgctcttctccggtgagctcactggtcgactatacgacgaggaggccgcgaggcaacaacattctggtggtgtgtgccttggcccaggatgcttcagggccgcgttcgtggtgctcgccggtgcctgctcggtggggacggcggtgagcttggtattggcggcaaggatacagccggtttacatggctctctactctggcgggtcgttcaggttgcctaacgcgtcacagcaacattga

SEQ ID NO: 35 - DNA, 1332 bp, Oryza sativa
atggccgtgcggcaccacctccttccggggtctcctcgccgccgcaccgcacacaacctctcatcttcctccctccgcaaaagctccgaagcctccctcctccacaaggttccctgcgccgccctccgctccctcctcgccaatctcaacgacgtcctcctcaccaccaggctcttcctcctcttccccgccgtcctcctcgccatcgccgccacttacctccacttcggacagcaggtgtgggtgtttgtgcttagcttaatcggcctcgttcctcttgctgagcgactcagcttcctcaccgacagattgcattttacaccggtcctactggtgggaggactactgaacgcgacatttgggaacgtgacggaggtgataatcgcgctgttggcgctgcgagaaggaaagattgaggtggtgaaatgctccctgctgggatccatcctctccaacctgctgcttgtcctcggcacctccctcttcctcgccggcatcgccaacctccgcgcccaccagccgtacgacaccaagcaagctcacgtcaacaccgccctcctcatgctcgccgtcctctgccactccctgccgctcatgctcaggtacgccgtcacctccggcgaccacgccatcgtctccggcgacgccgccctccacctgtcgcgtgcctgcagcatcctcatgctcatcgcctacctggcctacctcttcttccaactcaacacgcatcgccagctgtttgagccccaacaggttgaggatgatgacgacgatgatttagtgatcgctcaagatgatgagccagtactgggattctcgagtgccatgatttggctggctctcatgactctcctgactgcgctcttgtcagggtatgttgtgagcacaattgaggcggcctcagaatcatgggaactatcagtgagcttcattagcatcatcttgcttcccatcgttgggaacgcagcagagcatgccggtgccgtcatatttgctctcaagaacgatattactctcggagtgtctttgggctctgccacacagatctccatgtttgtggttccagtgagtgtgattgtagcctggactatgggaatcccaatggatcttgatttcaacctgctggagactggctctctgtttctagcaatattagtgacagccttcaccctccagcaggagggagaatcacattatctgaagggattgattcttgtcctgtgctacgctgtcatcagcgtgtgctttttcgttataagacggcgttctgcaggtatatgttatgttatgtactttctactacagtatgtaggaagcactactagacagtag

SEQ ID NO: 36 - DNA, 1251 bp, Oryza sativa
atggaggagcagcagcaggtggaggtggaggtggaggtgccgtcctacttcgtgtgccccatctcgctgcagatcatgcgcgacccggtgacgctccccaccggcatcacctacgaccgcgacggcatcgagcgatggctcctcaccgccggcacctgcccgctcaccaagcagcccgtgccgcccgactgcgaccccacgcccaaccacaccctgcgccgcctcatccagtcgtggtgcgccctccacgccgaccatggcgtcgacctcgtccccacccccaagccccccgccgaccgcgcccgcgtcgccgacctcgtctcccgcctccgcgccgccacgagctccgctgccctcctcgacgcgctgcgcgagctcagggacgttgccgccgagagcgagcgtaacaggaagctcctcgccgccgtccccggcgcggtggatgttctggccgccgtcgtcgtcgcgtcgtgtcgagacgccaaggccgcgtgcgacgaggccctcgagatcgtctgctcgctggagctctcggagcggtgcctggcgcggctcgtcgagaggaacgaggagctcgtcgacgcgctcgtcgccacgctgcagcggacgaacaccacgtcccgggcgcacgcggcgctgctcctggaggccgtgacggcggtcatgccgtcgaacaggctggtgtccctcccggaggaggtgttcggtgaggcggtgcagctgctccgcgacagggtatcgagcccggcgacgagggcggcgctgcacgtgctggtcggcacgacgtcgtggggccgcaaccgcgtgaaggcggtggacgccggcgcggtggcggtgctggtcgacatgctcctggacgggccagtcgagcggcgcgggtgcgagctggccctggcggcgctggaccggatgtgcgggtgcgcggaggggcgggcggcgctggtgtcgcacggcgcgggcgtggcggtggtggggaggaaggtgctgagggtgtcggaggtgcgagcgccagaagcgtgcggtgctgcggtcggtggcgaggcacgcggcgacggcggcggtggtgcaggagatggggcagacgggggcggtggagaagctgtgcgtggtggcgcagtcggagcagtgcggggagaggacgcgggagcgggcgcgggagacgctgcggctgcacgccagagcgtggaggaactcgccctgcttgcagcctcacctccaggccctctacccttcttgctgatcgaattctga

SEQ ID NO: 37 - DNA, 1156 bp, Oryza sativa
atggacaagaagaataacatccgtaatatgtccgtcattgctcatgtggaccacggtaacactgttgctatggttggtttggatcagttcaatgaagttctcagtgtcccctgttgtgcgtgttgctgttcagtgcaaggttgcctctgatctgcccaagcttgttgagggtttgaagcgtctggcgaagtctgatcctatggtgctctgtactattgaggagtctggtgagcatatcattgctggtgctggagagcttcaccttgaaatttgcttgaaggatctgatcattgtttccccacctgttgtttctttccgtgagactgtccttgagaagtcgtgccgtactgttatgagcaagtccccgaacaagcacaaccgtctctacatggaagctcgccccttggaggagggattggctgaggccattgatgacggtcgtattggcccacgtgatgatcccaaggtgcgctccaagatcctgtctgaggagttcggctgggacaaggatcttgcaaagaagatttggtgttttggacctgagacaactggccccaacatggtggttgatatgtgtaagggagttcagtatctgaatgaaatcaaggattccgttgtggctggtttccagtgggcatcaaaggagggtgctctggctgaggagaacatgcgtggtatctgctttgaggtgtgcgatgttgttctccatgctgatgctattcacagaggtggtggccaggtcattcccacggccaggagggtcatctatgcttctcagctcacagcaaagcccaggcttcttgagcccgtctacctggtggagatccaggcccctgagaatgcccttggtggtatctatggtgttctgaaccagaagagaggacatgtgttcgaggagatgcagaggcctggtacccctctgtacaacatcaaggcttacctccctgtcatcgagtcctttgggttctcaagccagcttagggctgcgacatctggccaggccttcccccagtgtgtgttcgaccattgggacatgatgacctctgatcctcttgaagctggctcgcaggcttcaaccctggtgcaggatatccgcaagaggaagggtctcaaggagcagatgactcccctctccgatttcgaggacaagctctaa

SEQ ID NO: 38 - DNA, 1129 bp, Oryza sativa
atggactccgtccgctccggcccctacggccacatcttccgcccggacaacttcgtcttcggccagtccggcgccggcaacaactgggccaagggacactacaccgagggcgccgagctcatcgacgccgtcctcgacgtcgtacgaaaggaggccgagaactgcgactgcctccaaggggttccaggtttgccactcgcttggcggcggcacggggtccggcatgggcacgctcctcatctccaagatccgggaggagtaccccgaccggatgatgctcaccttctccgtcttcccctcgcccaaggtctccgacaccgtggtggagccctacaacgccaccctctccgtccaccagctcgtcgagaacgccgacgagtgcatggtgctcgacaacgaggccctctacgacatctgcttccgcaccctcaagctcaccaccccaagcttcggcgacctcaaccacctcatctccgccaccatgagcggcgtcacctgctgcctccgcttccccggccagctcaactccgacctccgcaagctcgccgtcaacctcatccccttccctcgcctccacttcttcatggtcggcttcgccccgctcacctcccgcggctcgcagcagtaccgcgccctcaccgtcccggagctcacccagcagatgtgggacgccaagaacatgatgtgcgccgccgacccccgccacggccgctacctcaccgcctccgccatgttccgcggcaagatgtccaccaaggaggtggacgagcagatgctcaacgtccagaacaagaactcctcctacttcgtcgagtggatccccaacaatgtcaagtccaccgtctgcgacatcccccccaccggcctcaagatggcctccaccttcatcggcaactccacctccatccaggagatgttccgccgcgtcagcgagcagttcaccgccatgttccgcaggaaggccttcttgcactggtacacgggcgagggcatggacgagatggagttcaccgaggctgagagcaacatgaacgacctcgtctccgagtaccagcagtaccaggacgccaccgccgacgacgagggtgaatacgaggatgaggaagaagaggctgatctccaggactaa

SEQ ID NO: 39 - DNA, 1084 bp, Oryza sativa
  N_region (701)..(701): n = any nucleotide
  N_region (705)..(705): n = any nucleotide
  N_region (744)..(744): n = any nucleotide
  N_region (756)..(756): n = any nucleotide
  N_region (769)..(769): n = any nucleotide
  N_region (776)..(776): n = any nucleotide
  N_region (779)..(779): n = any nucleotide
  N_region (782)..(783): n = any nucleotide
  N_region (796)..(796): n = any nucleotide
  N_region (805)..(805): n = any nucleotide
  N_region (912)..(912): n = any nucleotide
  N_region (975)..(975): n = any nucleotide
  N_region (1055)..(1055): n = any nucleotide
  N_region (1061)..(1061): n = any nucleotide
atggctcacgagatgatgggtggcttcttcggccatccgccgccgccgcctgcgacggcggcggtgggtgaggaggaggacgaggtggtggaggagacggaggagggtggccatggcggaggagttcaggggaagctttgcgcgaggggacactggcggccggcggaggacgccaagctcaaggacctcgtcgcgcagtacggcccccagaactggaacctcatcgccgagaagctcgacggcagatcagcagggaagagctgcaggctgaggtggttcaaccagctggacccgaggattaaccggagggcgttcacggaggaggaggaggagcggctcatggcggcgcaccgggcgtacggcaacaagtgggcgctcatcgcccgcctcttccccggccgcaccgacaacgccgtcaagaaccactggcacgtcctcatggcgcgccgccaccgcgagcagtccggcgccttccgccgccgcaagccttcctcctcctccgcctcccccgcccccgcccccgcgccgccgccgccgccgcagcccgtcgtcgcgctccaccaccaccaccaccggtactcgcagcagtacagcgggtacagcggcgccgccgagtccgacgagtcggcctccacctgcaccaccgacctctccctcagctccggcagcgccgcggccgccgccgccgccgccgcggcggnaaanatcccctgctgcttctaccagagcacgccggggcgcttnttcctcttccancgccgcgttccgngcgcctngcntcnnggcggcggctaanacggtggcntttttccccggtggatggtgtggctgtcggtggtggcttgggcgccgccgcgctggtcgacggcgccggggggctcgccgcggcccgccggggcggagaaggcggancgcgcgctcggcgcgaacgtggacgccgccgcgggagccatggcgtgcggggcggcggcaaantcgtagcctgcaccggggaagaacgccaccgtgtcagccgccgccgcgacgcaaggccccgcggcacgcgccgttgaaanaggaanaggcacgcggcttgctctggtaa

SEQ ID NO: 40 - DNA, 1079 bp, Oryza sativa
  N_region (30)..(31): n = any nucleotide
  N_region (36)..(36): n = any nucleotide
  N_region (46)..(46): n = any nucleotide
  N_region (190)..(190): n = any nucleotide
  N_region (203)..(203): n = any nucleotide
  N_region (487)..(487): n = any nucleotide
  N_region (511)..(511): n = any nucleotide
  N_region (514)..(514): n = any nucleotide
  N_region (649)..(649): n = any nucleotide
gaggaggccgggcaggctgatccgatggcnngcgangagcgacgcnaaccggcgaacggcggcgaggtggattggggggttagcaccggaagagagaggaggccaaggggaatcgattcaacggagcggattagccgggggaagaacgacggcggccgacggcggagggggagatcaaggggatccccgngagcgtggtggcnagagggattgacaagaggggagccgacggcggcggattttgacggcgatcgtcggcggcgagcaaagggggaaaacttcaccagggcaacgggggttcgattcgttggagctggagcatctacgcgaggtcgcgagctcattccatcggtcgagagggcacgggcgacgccgagagaggccggcgacggcgagcgacgcccgggacagagcaagggcgcgcggcgagatgtgacgaatggcggcgggcgcggcgcagcgtgcgacaggggaaaagggggcgcgnccggggaagaagagatggagaggngcnaggatgggggcggcgcggagctccttgtcgactcctcgtgctcgctagctccccgacacgcacgacggcagaggagggcgagaacgacgacgaacggcgagacggcagtggtgtgatggaggagaggaaaccggnaggcggcgtggagtggcgggggccatggatgacgtcggcaatgacggtggcggtcggtttggcatggagcgggggcaaggcggcagcgcgtggcgtcagcggcgcaagggctgatggcggcggcgaccgggtggcgagcgcgcgcgcgggaagggcgaccggcgaattcaaacggcggcggcgggaatcggcgccggggagaggagttcgacgagagagagagagagagaggaaggagacaagagaggcgctgcttctctcgctcggcgcgtgcagcgcacgtgcggggaggaggaggagcggccgagaggagaagatgggctggaaaagggaaaaacggcccaacgaccaagagggaggtgaaacggctgagggagggaggtgggctaagggggaaaacggcccacaatacccgagggaggtaaaatag

SEQ ID NO: 41 - DNA, 1065 bp, Oryza sativa
  N_region (226)..(226): n = any nucleotide
  N_region (560)..(560): n = any nucleotide
acagaagagaggccaaggcgcgcaagctccatggacgcaccgcggtcgcggcggccggcaagggatcgatgagccctcatccagccgcggcgggacggcctggatgtgggtgcggaggaggaggaggaggaggagagggtggggcgagaataggtggatggagaggaggagaggagaggaggcatcggctaaatttaagaggacgcgcgcgcgcgtggggcggcgngtcgtgtcgtcggcagggagatgccaagcggcggcggtgttcccgagaggctccggtctccggcgtacggccggcggcggcgctggagtgtggaggaagcgacaaaggacagcaacaggcgggagcaggccgacaacggcaagggagttgggtggcaagcgggggaggagatggggggcgcagctcaccgcgaggagcaggacgatgtggtcgcagcgccggcagagtgatgtggtcgcggcggcggggttcccggcgagccgcgcagacgagggggagcagcgagccacgcagacgagggggagaaggcggtggcgcaacggcgtgagggcgnaggcggagcacacgaccggcctgcacgccatggtggcggtggaggacgttgtcgaggagatcccccacctcaccctatccatggcagccaccgccaaatgccgccgccgtcttcactccccgccacgcccgcgtctcctccgctcgccgccggctccacttgcccaccgtcgtgcgccacagccgcctttccaccgtctcccaaccgccggatgccaccgccgtcactgccgctccagtggtgaagagaaaggctgggggagagaatgaaagaagggagagagagagggaggaggaagaagggcaccccccaccgtgtcgccgccgacctcgccgacgccaaagggcatcaccatgccaatgaggcccgcctagccgggctccttcccttcccattcgcctcactttgctccacaccaacaccagcccaccacccgctgccggcctctcagatgccttgccacccgtccttgtccaccacccaccgcctgtctattgcctcctag

SEQ ID NO: 42 - DNA, 1029 bp, Oryza sativa
atggatttttttggtttggatgatgcagggttcggccgcatcggcaggctggtggccagggtggcgctgcagagcgaggatgtcgagctcgttgccgtcaacgatcccttcatcaccaccgagtacatgacatacatgttcaagtatgacaccgtccacggccagtggaagcatcatgaggtcaaggtcaaggactccaagaccctcatctttggcacgaaagaggttgcggtgttcggctgcagaggaaccctgaggagatcccatgggctgcggctggtgctgaatacgttgttgagtctactggtgttttcaccgacaaggacaaggcagcagctcacttgaaggggtggtgccaagaaggtcgtcatttctgctcccagcaaagacgcccccatgttcgttgttggtgtcaacgagaaggagtacaagtctgacgttaacattgtctccaacgctagttgcaccaccaactgcctggctcctctcgccaaggtcatcaatgacagatttggcatcgttgagggtttgatgaccactgtccatgccatcactgacagctacccagaagactgttgatgggccctcgatgaaggactggagaggtggaagggctgctagcttcaacatcattcctagcagcactggagctgccaaggctgtcggcaaggtgcttcctgccctcaatggaaagctgactggaatggctttccgtgttcccacagtcgatgtttccgttgttgatctgactgttaggcttgagaagcccgccagctatgaccagatcaaggctgcaatcaacagggaggaggctgagggcaagctcaagggcatccttggatacgttgaggaggaccttgtttccactgacttccagggtgacagcagagcacccgtgtgatcgacctgatccgtcacatgcacagcaccaactagacgagccctcctcatggaggcctgcagatacaggggagttgtgttttgccccagagaagagtagatgaagcctcttccgagaataaattttaa

SEQ ID NO: 43 - DNA, 1021 bp, Oryza sativa
  N_region (119)..(119): n = any nucleotide
  N_region (127)..(127): n = any nucleotide
  N_region (556)..(556): n = any nucleotide
atgggctcctcaagcccaacacgcaatcaccaccatcggtcacgcgtgacgcaaaccccacagcccccctcccctctatataagcctctgcgccgcgctcctccgaaccctagccgcanatccccgnctcttcccgccgccgtccgccgcgcgcacgccgccgccgccatggggaggagacctgcaaggtgctatcgccagatcaagaacaagccgtaccccaagtcaaggtactgccgtggtgtccctgaccccaagatcaggatctacgatgtcgggatgaagaagaagggtgtggatgagttctcccactgtgtgcatctcgtctcttgggagaaggagaatgtcaccagtgaggctcttgaggctgcgcgtatcgcgtgcaacaagtacatgaccaagtctgcaggaaaggatgccttccacctcagggttcgggttcacccgttccatgtgctccgtatcaacaagatgctttcgtgtgccggggcagataggctccagactggaatgaggggtgcttttgggaagccacagggaacctgtgctagggtgnatattggccaggtcctcctttctgtgcggtgcaagcccaacaatgctgtccatgccagcgaagccctccgtcgtgccaagttcaagttccctggtcgccaaaagatcattgagagtagaaagtgaggggtttcaccaagttcagccgcgatgaatacgtcaggcttaagagcgagggtagaatcatgcctgatggtgtcaatgctaagagctacttggttgccatggtcgcctctctgctcgtgcccccgggaaggccttcctctcagccgcttagatatatctatccttatcatctgtgggaaacgaaatatcggacctttttgtttgtttgtagactcgatcatatatcactttgttgaaccctgaatcaccaagtgtctggtgctatattgcctggtctgaagctatcttgtgttgaacatctttatctgaaatatatatcagatgactttcgtgtcgctaa

SEQ ID NO: 44 - DNA, 1014 bp, Oryza sativa
  N_region (741)..(741): n = any nucleotide
  N_region (792)..(792): n = any nucleotide
atgcgggtgcagtgcgacgtctgcgccgccgagccggccgcggtgctctgctgcgccgacgaggccgcgctctgctccgcctgcgaccgccgcgtccaccgcgccaaccgcctcgccagcaagcaccgccgcctcccgctcgtccacccgtcctcctcctcctccggcgacggtggcgccgccgccgcgccgctgtgcgacgtgtgcagggagaagaggggcctcgtgttctgcgtcgaggaccgcgccatcctgtgcgccgactgcgacgagcccatccactccgccaacgacctcaccgccaagcacacccgcttcctcctcgtcggcgccaagctctcccccgccgcgctcgccgaacagccgctcccgtcctccgactgcagctccgacgacgacgccgccgccgccgccaccgaggaggagtaccactcctccgccgcatccaccggcgccgcagtgagcgcgcctcttgacgcctccagcaacggcgccggtggcggaggaggagtaggagggagcagcatctccgactacctcaccaccatctgccccggctggcgcgtcgaggacctcctccccgacgacgacgccttcgccgccgccgccgcggtgagtactaccaacccattgctccgccgtgttcttgctacgtctccatcgatgaagccgagactaacctacgattccttggagcagcaggcggggaaagagaaggacgagcgcgtgccgttcctcgangccgacctgttcgacgtggtcgccggccggccggagaagaagggcggcgcntgggcgccgcacgtgccgcacctgccggcgtggtgcctcgacgaggtgccggtcgtcgtcgccgcgtcggcggcgccagcggcgacacctgtaaaggcgaagcagggacacgtgcgggacagccactggagcgacagcgacgcgttcgccgtgccggagttctcgccgccgccgccgccggccaagagggcgcggcccagctcgcagttctggtgcttctga

SEQ ID NO: 45 - DNA, 977 bp, Oryza sativa
aagcgcggcgacggcgtcgtcggcatcgacaactacaactcctactacgacccgtcgctgaagaaggcgcggcgcgccctcctgggctcgcacggcgtgttcgtcgtcgacggcgacatcaacgacggccgcctcctcgccaagctgttcgacgtcgtccccttcacccacgtcctccacctcgccgcgcaggccggcgtccgctacgccatggagaacccctcgtcgtacgtccgctccaacgtcgccggcctcgtctccctcctcgagtcctgcaaggacgccgacccgcagccggccgtcgtctgggcctcctcctcctccgtctacggtctcaacgacgccgtccccttctccgaggcgcaccgcaccgacaagccggcgtcgctctacgccgccaccaagaaagccggcgaggccatcacccacacctacaaccacatctacggcctctccatcaccggcctccgcttcttcacggtgtacggtccctggggccgccccgacatggcctacttcttcttcacccgcaacatcctgcaggggaagccggtcaccgtctaccggggccgtgatcacgtcgacatcgccagagggacttcacctacatcgacgacatcgtgcgggggtgcctggcggcgctggacacggctgggcggagcacgggcgggggcgggaggaagcgcggggcggcgccgtacaggatcttcaacctcgggaacacgtcgccggtgacggtgccggcgctggtggcgatgctggagaggtgcctgatggtgaaggcgaggaggcacgtcgtcgagatgcccggcaatggcgacgtgcccttcacccacgccaacatcagcctggcgagggagcagctcgggtacaagccgacgaccagcctcgagatggggctcaagaagttcgtccggtggtacctctcctactacggctacaacagaggaactcacgcattcaggagccgcttgtga

SEQ ID NO: 46 - DNA, 950 bp, Oryza sativa
atggggggagaggtggtgcgtcactggaacgctgacgtgaacggcatctccctccacgtcgccgagcagggccccgccgacggcccgccggtgctcctcatccatggcttcccggagctctggctgtcgtggcgccaccagatggccgccctcgccgcccgcggcttccgcgccctcgcccccgacctccgcggctacggcgactccaccgtccccgacgaccccgccgcctacaccgtcttccacatcgtcggagacctcgtcgccctcctcgatcacctcgccctccccaaggtgatggtggtggggcacgacttgggagctcaggtggcgtggcatctctgcctcttccgcccggacatgctgctcgccgtcgtcaacctcggcgtccccttcttcccccgggggcctagctcgctctcggaggcattcgcagggcgcgatggcctctacatcatgcagttccagcaggaaccagggagagctgaaagagcatttgcccgttatgatgttgcaactgtcctgaaaaagttcttctccattgaaatcgatgacctcaccgcaccccctggagtggagatcatagactttcttgaggcacgttcgacaccgcttccatggatctccgaggaagaacttggccagtacgcggaaaagtttcagaagtctgggttcacaggacccatcaactactaccgcatgatggacacgcaccctggcaaaacgcgaaaattatggtgcctacaaagttcatttgtggtgacaaggacactggtctcaagtcctttggaactgagcactttgtcaagagcggtgctttcaagtccgtcgttccaaatcttgaggttgtcatcattgaaggtcaccatttcatccagcaagagcaggccgagagagtgaattcggagatattgtcctacttcgataagttcactggtgagaaggcatga

SEQ ID NO: 47 - DNA, 897 bp, Oryza sativa
  N_region (44)..(44): n = any nucleotide
  N_region (57)..(57): n = any nucleotide
aactcgacgatctgggttggcgacctccagtattggatggacgngaactacctccanagctgtttcggacccagcggcgagaaagttatccgcaatagacaaactggacaatccgagggatatggttttgtagagttctactctcacggatcggcagagaaggctcttcagaattttactggtcatgtgatgcctaacactgatcgacctttcaagttaaactgggcttcatatagcatgggtgaaaagcgatctgaagttgcttctgactactcaattttcgttggtgatctagctgctgatgttactgatgaaatgttgatggagctttttgctaataagtaccgctctgtgaaaggagctaaagttattattgatgcaaacacaggccgttctaggggctatgggtttgttagatttggagatgacaatgacaaatcccatgcaatgactgaaatgaatggtgcgtattgctctactaggccaattcgtattggacctgcaactcccagaaggtcttcaggttggtgggctcgatccaaatgtcagcgaagatgagctgaggaaggcatttgccaaatatggtgatgttgcctctgtaaaaattcctctagggaagcaatgtggctttgttcaattcgtcagcaggcggaagaagcactgcaaggattgaatggatcagtcattggaaagcaggcagttcgcctttcatggggccgcagcccatcacataaacagcagtctagggctgattctggcagccgaagaaacaatatgtactatgggacgccattctacggtggatacggttatgcctcccccgtcccgcaccctaacatgtatgctgctgcatatggagcctaccctgtctatggcagtcagcagctagtgagctag

SEQ ID NO: 48 - DNA, 894 bp, Oryza sativa
atgggccgccggcccattctcccctttccttccccctcccccttgctgggccggccgcaggccgaggcccagccaggccgcccgcctccctcctctcccggggtcgccgacaggtggggcccacctgtcgggtctttccccttcctccggccgacgccgcgcccgcaaccgccgcacccgaaaccgccgccgcgtccacgtctccgcctcctccgggccacgtcggccacgcccgcgcgtgcgccgcgtctcccgcgcccactctcctctctctcccgctcgcatccgcgcccgagatggccgggattcgattttcgaatcccgcctctctctcttcccccactcccccacgtcggccggcgattcccgcctctcccggccacgtccggtcctctcaccccctatttaagcatcgccgtcgtcccctctcactttttccccattccgccgtactctctcgagcctcccatcgctctcgcgccgtgcgcccatccgcagccgccgtttccgctactccggccgccgctagccgccgttagggtcgccgccaggccgcgccatcgccgccgtcgggttcgcgtggccgggatccaccccgtccacctctcctccgtcgagagggcaccccgaagctcgtccgtcctcccgtggcttgccgtcaccgttcgccatcgtcttcctccgcgccggccaccctcggtgaggcatcccctcccctcttttccccttcctctcctcttagtgccgcgccgccgcttcaagtcgcgcgctgtcgccttcgaccgccgccgcctcgcgtgccgccggtcgctgccgtcgtcggtcgcatgcgtcgccggcaacgcgttcgcgcgcgcgtcgtcgccgtcgccgcggtcggtcggccggccttga

SEQ ID NO: 49 - DNA, 879 bp, Oryza sativa
  N_region (424)..(424): n = any nucleotide
ctgaccaaaaagaccaaagccatggcgccttccctcgccacctcttccaccctcgctctcttcctcctcgtcgccgtctccatcgccgacgccgcgacattcgccatcaccaacaggtgccagtacacggtgtggccggcggcggtgccatcgggcggcggcacgaagctcgacccggggcagacgtggaccatcaacgtgccggccgggacgacgggcgggcgcgtgtgggcgcgcacgggctgcggtttcgacggcagcggcaacgggcagtgccagacgggcgactgcggcgggaagctgcggtgcacggcgtacggcgcggcgcccaacaccctggccgagttcgcgctgaaccagtggaacaacctcgacttcttcgacatctccctcatcgacggcttcaacgtgcccatggccttcntccccgccggcagcggcgccgggtgccccaaaggcgggccgcggtgcgccacggccatcacgccgcagtgcccccagcgagctgagggcgcccggcgggtgcaacaacgcgtgcacggtgttcaggcaggacaggtactgctgcaccggatcggcggccaacagctgcggcccgaccaactactcggagttcttcaagcggctgtgcccggacgcctacagctaccccaaggacgacgcctccagcacctacacttgcccggccggcaccaactaccaggtcgtcttctgcccatgatcgaacgcgcgcgcgcgcgcgcggctgatcgatcgatctctgatgatcttgggatttgtatgatcgatgcatgtgtggatgtaaccgtgatatacgtacctaagaataagtttgcacgcgcaaacgaggataagtttatgttatcgatctttgaataa

SEQ ID NO: 50 - DNA, 834 bp, Oryza sativa
atggcggagcgcggcggcgagcgtggcggcgagcgcggcgggttcggccgcggcttcgggcgcggcggtcgcggcgaccgcggagggcgccgtggcgggcgccgcggcccgcgccaggaggaggagaagtgggtgcccgtcaccaagctcggccgcctcgtgaaggaaggcaggttctccaagatcgaggagatctacctccactccctccccgtcaaggagcaccagatcgtggagaccctcgtgccggggctcaaggacgaggtgatgaagatcacacccgtgcagaagcagacgcgcgccgggcagcgcacccggttcaaggcgttcgtcgtcgtcggcgacaacaacggccacgtcgggctgggggtcaagtgcgccaaggaggtggccaccgccatccgcggcgccatcatcctggccaagctgtccgtggtgcccgtcaggaggggttactggggtaacaagatcgggcagccgcacaccgtgccgtgcaaggtcaccggaaagtgtggctctgtcaccgtgcgcatggtgcccgccccgaggggttcgggtattgtcgccgcccgcgtgcccaagaaggtgctgcagttcgccggcattgaggatgtcttcacctcgtcccgtggatccaccaagacccttggcaacttcgtcaagtttgtgcaggccacctttgactgcctgatgaagacttatggattccttactcctgacttctggagggacaccaagttcgtcaagtctccattccaggagtacaccgacctcttggccaagccgactaaggctcttatgattgatgcacctgtcgagaacgtagaggcttag

SEQ ID NO: 51 - DNA, 808 bp, Oryza sativa
taggaggcatccaagccaagaagagggagagcaccaaggacacgcgactagcagaagccgagcgaccgcctcctcgatccatatcttccggtcgagttcttggtcgatctcttccctcctccacctcctcctcacaggatactgcttgttcttatgattcatttcctttgtgcagttcttggtgtagcttgccactttcaccagcaaagtttcatgtctgatctcgacattcagatcccaactgccttcggatccctttgctgaggccaatgctggagactctggtgcggctgcaggatcaaaggactacgttcatgtacgcatccagcagcgtaatggccgtaagagcctgaccactgtccagggattgaagaaggaattcagctacaacaagatcctcaaagatctcaagaaagagttttgctgcaatggtactgttgtccaggacccagagcttggccagaggtcattcaacttcagggtgatcagaggaaaaacgtatcaaattttcttgttcagcaggccggcattgtgaagaaggaacacatcaagattcatggtttctgagcaactgccaaaaccattgcaaagactatagtttggggtggagtatacttggttgtgtacatgcctgcgtgttccattgtacacacaaaacctagccacctcttgactcttgagtgtatgcttgttacccgtgtgttgaagtttgtaagaggcaccatcactatagatgatggcttgtgtccctctttcatcaagattgaataatatatgctactttgagagcgctatcctgcttgcctga

SEQ ID NO: 52 - DNA, 766 bp, Oryza sativa
  N_region (357)..(357): n = any nucleotide
cttaggtagtgtttggttgcaaggatgggatgggatgggatgagatgaacccacttttaggagtgtttggttgagaggtgagtgggacgggatggtccctggagaggaatattcctctcagatccgggatgaaacggtccgccgaaatcggccggaccaatccatcccacttcgacggagcccatggcgtcagctcccgtagcctcccgctcggctccgccgcaacgccgcccgtcgtcagctcccacaacctcccgctcagctccgccgcggcaccgccacggccgcccgtccctcccccggcaccactccctctcccggtgctgctccgttctcctccgcctgcttcctccaccntgcctcgcctccacgaccggtcgtcgcctcgtctgcgactgaccgccgtcgctcgtccgcgttcgcctccgcaaccggccgccgttgctcgtccgcgcctcgtcgcctccgcgaccggccgccgctcgtctgcgcctcgcctcgccttgcctccacaaccggtcgctgcctcgtccgcgaccgcttccgcggccaaccaccgtcgctcatccgcgcctcgcctcgcctctcctcgcctccacgaccagtcgccgcctcgtccgcgaccgaccgccgccactcgtccgcgcctcgcctcacctcgcctccgcgaccggccgccgccgctcatccgcgcccgcctccgcctctcctccgctcgcgccgacgagctcctccatccccattctcaccactcgctccaacctag

SEQ ID NO: 53 - DNA, 758 bp, Oryza sativa
atgatgggggccacttctccgtcaggcctggagctcaccatggctgtccccggcctcagctcctctggttcagcagaaggggccggttgcaacaacaacaacgccggtggcggctgcaacatgagggacctggacatcaaccagccggcgagcggcggcgaggaggaggagttcccgatgggcagcgtggaggaggacgaggaggagaggggcgtcggtgggccccaccgccccaagaagctccgcctctccaaggagcagtcccgcctcctcgaggagagcttccgcctcaaccataccctcacgccggaagcaaaaggaggccttggcgatcaaactgaagctgcggccgaggcaggtggaggtctggtttcagaaccgtagggcaagaggacgaagctgaagcagacggagatggagtgcgagtacctgaagcgctgcttcgggtcgctgacggaggagaaccgccggctgcagcgggaggtggaggagctgcgggcgatgcgggtggccccgcccacggtgctctcgccgcacaccaggcagccgctcccggcgtccgcgctcaccatgtgcccccgctgcgagcgcatcaccgccgccaccggcccgcctgccgtgcgcccgccgccgtcgtcagccgccgccgccgccccctcgcccttccaccctcgccgcccctctgcggccttctaggcccaaggtctcgcatcctaaaggccacaaaaagatgggcctcgccgtcccgtgtaaattga

SEQ ID NO: 54 - DNA, 747 bp, Oryza sativa
  N_region (247)..(247): n = any nucleotide
  N_region (254)..(254): n = any nucleotide
  N_region (262)..(262): n = any nucleotide
  N_region (289)..(289): n = any nucleotide
  N_region (295)..(295): n = any nucleotide
  N_region (306)..(306): n = any nucleotide
  N_region (329)..(329): n = any nucleotide
  N_region (333)..(333): n = any nucleotide
  N_region (578)..(578): n = any nucleotide
  N_region (661)..(661): n = any nucleotide
atggaggacgtcgtcaccgacgcgccgccgccgtcccgcttctccccggacgacctcgacaacttcgccgctccaccgccgcagcccacccctatcctcgtcgtctcccccgccaaccctagccccgccccgcgccgcctcctcatcctcctcatctccccgacctcgctcgcgctcctcccccacctcccctcgccgcctccgctgcacgcctccctcctcctccccgagttcccccttggggcgntcccagncacccatncgcgtgtatctccatgccccctcgggnaccctncttgccgccgnaaaagggcccggcccccgttccngccnaaccgcgcgcgcgccgtcgccaggagcctcgtgtccgccctcagcccgaggaggtgctggtgctcgacgcggtccggagccggggcctacaggggcaagctcgccgcggacgagcccgtggaggggaagctggagaccagggcggcgcgggggccgggaagcgtcggcgcggcccgcggcgtggcggcgctggccccgcccgggagcgtggtggacgggctcggcgccgcggtgttggcggagtncgagatgcgcgggaaggcggcgagcatggtggtgacgtggccggagggcgcgaggccggcggagttcggcgtcatgcggcgcntggcggcggagctcggcgtcgacccggccaaggcggcggccgggagggtcgccggccgggccgagctggacgcgctgtacacttga

SEQ ID NO: 55 - DNA, 726 bp, Oryza sativa
gggagctcggcgtcggcgctcctcgggacgaaggcggaacggcggcccggcggcgttccgcgagcgggaaccagcggacggcggctggaaggacctagggaggatgggggagaggttaggagggggaaagaggcctcccagcggcatgaatcgctggtcggaggtgagaacgggcggcagatgctcaccggcgcgaggggaaccgtgtcccggcgggatcctggccgtgaaaagcggcggccgaggtgctcctcggcgctgcgaagcgagcggcggcggcggcgctgcttggggtgagcggcgccaagcggcggctggaggtggtaaagacggtggagagaggtggtgcgcgtggcgacggtgtttcagaggcggggaggggaaatggagcggatgccggggtgcggtgggacgctgcaatgctataggtggcagcggcgcagtgcgggggcgacggaagcggcgacggcgcgcggctggagggtcgtcggcgtgcggcggcacacgggagtggcgtggggagctcgagagagcgcgcaggagggggcacgtctgcacgcgcgcgggagcgtggaggcgcgcggaggaagcggcgtcgtggggtggctcaggcggccatggcggcagttggagctggaagaaagggatgacaggtggggtccacgggtcccacctgtcgaagagagagggagggagaggccggctggggaggcagaacagacttga

SEQ ID NO: 56 - DNA, 689 bp, Oryza sativa
  N_region (404)..(404): n = any nucleotide
atggaggcggcggcggaggaggagaggctgaggtatctggagttcgtgcagcaggcggcggcgcaggtgctggtgctggcggcggcggcgtacgcgtacgccaagcagggcgccggcccgctccgccccggtgttgaccacgtcgagggcaccgtcaaggccgtcgtcggccccgtctacgaaccgcttccatggcgtccccctcgacctcctcaagttcctcgaaccgcaaggttggtgagtccgtccaggagctggaccgccgcgtgccgccggtggtgaaggaggcgccgggcctggcccgctcggcggcggcggaagtgcggcaagcggggctcgtcggcacggcgacggggctggccaagtcggcgatcgcccgcgccgagcccagggcgcgggacctntacacccggtacgagcccgtggcggagcgcaaggcggcggaggcgtgggcggcgctgaaccgcctcccgctcgtgccgtcggtgacccgcgccgtgctccccgccgccgcgagcctctcggcgaggtacaacacggcagtggccgacggcgccaagcgcggcagcgccgtcgccacctacctcccgctcgtccccaccgagcgcctctccagggtgttcggctacccgctcgccgacgccgccacctcgccggcgccggagatgcagcccatcccgtcgcagtaa

SEQ ID NO: 57 - DNA, 651 bp, Oryza sativa
ccgcagctccccccgttctcctcctcctcctccgtggcgtcgtcgtcgtctccgccgctcccctcctccgtctcggtcgccatcgccggcgacgggttcggccccccgcccaacacgctcaccgagcccgtgttggacaccgtcaagcgcgacctcgctcgcatcgtcagcaacctcaagctcgtcgtcttcccaaaccctttccgtgaggaccccgggaaggcgctgcgcgactgggatctctggggccctttcttcttcatcgtcttcctcggcctcaccctctcctggtcagcctccgtcaagaagtctgaagtgtttgctgttgcttttgctgtactagctgctggtgctataattctcacattgaatgtgctgctcctgttgtagggtgggcgcatcaacttctttcagagcctgagtcttcttggatactgcctgttccctttggatgtcggagctttgatttgcatgctgaaggataatgtactactgaagatcattgcagtagtggttacattggcctggagctcctgggcagcatatccattcatgagtgctgctgttaacccaaggagaaaggcgttggcactatatcctgtcttccttatgtacgtctctgttgggttcctcatcatcgcaatagattaa

SEQ ID NO: 58 - DNA, 648 bp, Oryza sativa
  N_region (77)..(77): n = any nucleotide
atgctcggcttctccgtccatcatagtgtgacggggtttcgtggagattggttggttgctcacgccgcgtgtttttngttttttttttggggggttttgcaggcgtcggagaagaagcagtcgaacccgatgcgggaaatcaaggtgcagaagctcgtgctcaacatctccgtcggcgagagcggcgacaggctcacccgcgcctccaagaggtgttggagcagctgagtgggcagagcccagttttctccaagggcgaggtacaccgtgaggtcattcggtatccgtcgtaacgagaagatcgcgtgctacgtcaccgtcaggggcgagaaggccatgcagcttttggagagtggcctcaaggtcaaggagtacgagctgctgaggaggaacttcagcgagaccggatgcttcgggttcggtatccaggagcacattgatcttggcatcaacgacccgtcaactggtatttatggcatggacttctatgttgttcttgagcgtgctggataccgtgttgctcgccggcgcaggtgcaagtcccgtgttggaatccagcacagggtgaccaaggaagatgccatgaagtggttccaggtcaagtatgagggtgtcatcctcaacaaggcccaagcaaacacgtcgtaa

SEQ ID NO: 59 - DNA, 639 bp, Oryza sativa
  N_region (46)..(46): n = any nucleotide
atggatctgctcggcgggtgcggcggcgacagccgcggcggcgtcntcggcggcggcggaggggaggacgaggtggtcgacctcgaggtgaaggttcccgccgggtgggagaggcggcttgatctcatgttgcagtcagggaagacgttcttgactcctcggctccagggcgtccatgtcggccaccaagacctcaacctgcctccgccgccgtcctccgccgccgcggccgcgtcgacgtcggccgcggtctgcacgctcgacatggtccgctccgcgctcgagcgcgccacggccgggaggtcggccgccgccgccgccgcgcgtggctccccggccacgtcgtcgtcgtcgtcggcgtccacctcctcgtcctcctcctccatcggcaagcgccaccgcttgccgccctcaggcggcgccgccgcgacgcccgcgagcccgtccatgcgtgcggccgcctgcccgtcctgcctcacctacgtgctcatcgccgaggcggacccccggtgcccgcgttgcgccggcaacgtcccgccgctcgccgggaagccccgggaagcctccgccggcgccggcgacggcagcgggaagaagcccaagattgacctgaatgcggcggccgacgacaccgagtga

SEQ ID NO: 60 - DNA, 598 bp, Oryza sativa
  N_region (429)..(429): n = any nucleotide
atgaaacccaccgcgccgccctcctccgaaaactcaaaatttcgccgatctcccgctcaaccccaccgcctacttaaaccccccgtcgcccatcgccatcctcacctcactccaatcccccaattcccaaatcctccaagctctcgcgcttccgattccaagcagcagcagccagtccagttcccaaatggcccgcacgaagcagacggcgaggaagtccaccggcggcaaggcgccgaggaagcagctggcgacgaaggcggcgcgcaagtcggccccggcgaccggcggcgtgaagaagccccaccgcttcaggccgggaaccgtcgcgctccgggagatccgcaagtaccagaagagcacggagctgctcatccgcaagctgccgttccagcggctggtgcgggagatcgcgcaggacttcaagancgacctccgcttccagagctccgccgtcgccgcgctgcaggaggccgccgaggcctacctcgtcgggctcttcgaggacaccaacctctgcgccatccacgccaagcgcgtcaccatcatgcccaaggacatccagctcgcccgccgcatccgtggcgagagggcgtag

SEQ ID NO: 61 - DNA, 593 bp, Oryza sativa
ccacgtcgcccttacgagaaggagcgtcttgatgcagagctgaagctagtgggtgagtatggactgaggtgcaagcgtgagctgtggcgtgttcagtatgctttgagccgtatccgtaacaatgcaaggcacctgctcacacttgatgagaagaatccacgccgcatcttcgagggtgaggcactgcttcgccgcatgaaccgttatgggctccttgctgatgggcagaacaagcttgattatgtccttgccctcactgttgagaacttcctcgcaaggcgtcttcagactcttgtcttcaaggctggcatggccaagtccatccaccatgctcgtgtcctgatcaggcaacgccacatcaggtcggcaggcaaattgtcaacatcccgtcgttcatggtgagggttgagtctgagaaacacattgacttctcactgacaagcccattcggtggaggcccccctggtagggtgaagaggaagaaccagaagaaggcaagcggcggtggcggtgatggtgaggaggaagatgaggaatgagaagaagtttgcaactagttgtttccgtaatgatcataaaactttctgtgctga

SEQ ID NO: 62 - DNA, 583 bp, Oryza sativa
  N_region (455)..(455): n = any nucleotide
  N_region (513)..(513): n = any nucleotide
  N_region (550)..(550): n = any nucleotide
  N_region (563)..(563): n = any nucleotide
gggaaaaggcgggggagctcggcgtcggcgctccctgggacgaaggcggaacggcggcccgacggcgttccgcgaacgggaaccggcggacggcggctagaaggacctggggaggatgggggagaggttaggagggggagagagggctcccagcggcatgaatcgctggtcggaggtgagaacaggcggcggatgcgcaccggcgcgaggggaaccgtgttccggtggaatcccggccatgaaaagcggcggccgaggtgctcctcggcgctgcgaagcgagcggcggcgacagcgcgacttggggggagcggcgccaagcggtggctggagtcggcggcggcggtggaaggaggtagtgcgcgtggcgacggtgcttcggaggcgggaaggggaaatggagcggatgccggggtgcggcacgacgcggcgaagccgctggtggcggtcgcgcgnaacggcggtggtgggaacggctgtggcgaccggctggagggtcgtcggcaaacggcgncgggaagttccaacggtgccggggtggttttcgtgcnacgggagggctcngacgaggggaaaagggaaag

SEQ ID NO: 63 - DNA, 581 bp, Oryza sativa
atgggaggtggcaaggacaagcatgacgagagcgacaaggggctcttctctaacatgatgcacggcgttgccggcggccatgggtatcctcctcaccagggataccctcctcagggctacccgccgccgccgggagcgtacccgcctcctccgggggcttatccccctcctcctggggcttaccctccaccacctggggcataccctccacagcatgggtaccctcagcctggtggctaccctcaacatggtggctaccctcctgcgggctaccccggatcatctgggcaccagggtatggcggccatgggagtagcggtggaggacacatgggagcaatgctggctggaggcgccgctgcggctgctgcagcctatggggcacacaagatctcttctcatggccatggtggacacatgggctatggaggccatggaggctttggtggttacggccatggctacggcggtcaccacggcggcaagttcaagcatggcaagcacggccaccatggcaagttcaagcatggcaagcatgggcacggcatgttcggtggtggcaagttcaagaagtggaagtaa

SEQ ID NO: 64 - DNA, 559 bp, Oryza sativa
atgtctgatcacagcagcagcgacgggcagaggcaatgccgccgccgtggcgtcggcgtcgacgtcgagctcgacgccgccatggcgctcgcggacatggccggcgccgcgcccggacaacccgaggcgtcgccgccgccgcacgccactcaggagatggcgagcacgaggctgagcctcgagctggggaaggtcggaatccagtcgtcgccgccatgctccagcagctcaagcgccggccaccccgcgatgcagcccgccgccgcggccacggcggcgccgggctacggccccaggccacgccacatgctcaccgaggagaaggaggcgaagcgtctccggcgagtgctcgccaaccgggaatccgcccggcaaaccatcctccgccgccaggcgatccgagatgaattggcaagaaaagttgcagatttgtcgtcgcagaacgagaccatgaaaaagggagaaggacgtggtgatgcaggagtatctctcactgaaggagacaaacaagcagctgaaagaacaggcacagttgcacctctcgctttcgctaatctga

SEQ ID NO: 65 - DNA, 552 bp, Oryza sativa
atggcttcttcctccgacctcatcctctacaacctcgtccccgcccaacccctaaaccctagcgccatccccaaccctaaccccgacctctccatcgccgccgccgagcccccctcctccgacggcgccacccctcgccgcgtcaggcccaggaagtccccctcctcctccgaccgccactccaaggtcgccggccgcggccgccgcgtccgcatcccggccatggtggccgcccgcgtcttccagctcacccgcgagctcggccaccgcaccgacggggagaccatcgagtggctactccgccaggccgagccctccatcatcgccgccaccgggacgggcgtcaccccggaggaggcgccccccgccgccgtcgccatcggctcttcctcggtcgccgccgccgccgccgccggcgggcatgggggcgcgttcgtccatgtgccttactacaccgcgctcctcatgcagccgcctaacgcggacgagccccccatggcatccgctgcctccgcctcgggcaccaccgccgccgacgagaacaataattaa

SEQ ID NO: 66 - DNA, 538 bp, Oryza sativa
atggcccccaccgtgatggcctcctcggccacctccgtggctccattccaagggctcaagtccaccgccgggctccccgtcagccgccgctccaccaactcgggcttcggcaacgtcagcaatggcggaaggatcaagtgcatgcagtttattcaggtgtggccaattgagggcatcaagaagttcgagaccctatcgtacctgccaccactcaccgtggaggatcttttgaagcagatcgagtacctgcttcgatccaagtgggtgccttgcctcgagttcagcaaggttggattcgtctaccgtgagaaccacaggtctcccgggtactacgatggcaggtattggaccatgtggaagctgcccatgttcggctgcaccgatgccacccaggtgctcaaggagctcgaggaggccaagaaggcctaccccgatgcctttgtccgtatcatcggcttcgacaacgtcaggcaggtgcagttgattagcttcatcgcctacaagcccccaggttgcgaggagtctggtggcaactaag

SEQ ID NO: 67 - DNA, 528 bp, Oryza sativa
  N_region (244)..(244): n = any nucleotide
atggggtactcaccggcgcgcgaggagaagcaagctccggcggcgggattgaccggggaaacggcagacggggtggcgcacaagcttgcgaacccggcggcgtcgtcggcgcggtgcggcgacggctctagcggtggcggatcccccgccgtttgcgggcgcgcgagctagcgggaggtgagcggcgacgtgggcgtgcggcacgggcggagtgggcgcgggagcagcgggatacgcggcggcntgggcggtggtttcgacggcggttggcgcgggcgtgggcggccggaggttagggaaagggctgacaggtgggccccacctgtcagcgcccgagagggagagggaggccgggtgaacttcgggagtgggagggaggagcgggccggcgcgggaggaaatgggccggcggcccaagaaaaggaaaaaggagggaaaagaaaagataaaaggaaaaaggattttcccagggatttaatattgcactttgcttattttaattggttaaaattatttccaatgctctga

SEQ ID NO: 68 - DNA, 515 bp, Oryza sativa
atggaaaacagtgggcagcaccgcagcagcaaaggaagaaagcccccaaacgaaacgggtgaggggcattttcgtcattccatacaggtcacctccaaactcgccaagcgaaccacactgcgtcactgtgataaaagccgctctgcacccactccgtccacttcctctctctctctcctaccgtcgccttccactttcccctctctctctctctccgccgccgccgacgccgacgatggcctccagccgctgggtccgaccggagtctcaggtgtacccgctgttcgcggcgatgggcgtggccgtcggcatctgcggcttccagctcttccgcaacatcaccggcaaccccgaagtcagtcagggttaacaaggtagggagggcagctggagtgctcgagaaccatgaggagggaaggcgctacgcagagcatgggctaagaaactatgtgcgcgacaagacccctgagatcatgccagctatcaacaagttcttcactgagccaacaaaatga

SEQ ID NO: 69 - DNA, 485 bp, Oryza sativa
  N_region (8)..(8): n = any nucleotide
  N_region (21)..(21): n = any nucleotide
  N_region (39)..(39): n = any nucleotide
  N_region (115)..(115): n = any nucleotide
  N_region (219)..(219): n = any nucleotide
  N_region (225)..(225): n = any nucleotide
  N_region (273)..(273): n = any nucleotide
gcggcttntattattccttcnggcggcggttgcggcggntgcgacggccgcggattgatagcgtggcaacggctgagggcagcagtggcgacggccgaggtcggatcggcccctncgctgcagcggcgggaggagcggtggccgcccagaggcgccctcccaccgctagatccggcgggaggaagggctccggagctgcgccgcctcgccatcctcccngccgcnacctaatgcgtcggtcgatccagcggtggcggctccctccgccccctntcgccttcctccggcggcggtggcagcgtcggcggcagccgcgggcggatccggcggcggcgggcggatccaacggcggaggctccctcctccgccgcctctcttctccctccggcggcggtggcggcggctgcgacggccgcggattgatagcgtggcgacggctgagggcagcagtggcgacggccgaggtcggatccggcggattgtga

SEQ ID NO: 70 - DNA, 470 bp, Oryza sativa
gcgccctagccccgtgagacctcgcgccgccgtcgtcgccgccgctccagccgtgcgccgctgtcgctccagtcgtcgccgtcgctcggggaggtcgccatcgtggtcgccgtcgcgtcgccgtcctcgtccgccccttcaccgtcgctgtcaaccaccggagcaccgtcgccgtcgtcaagccgaagagtgccgccgccttttcctcgtcgccgacatcgtccggtcatcgtccgccgtcgttttggtcaccgaggtgtcatccgtttgctccgccgcgccgtaattcgccggcgagcatgcgcgcccgagatgccgccggtggtgacgtcgtcgctgacgtcatcgtcgtcgtccatccgattccgacgtttccggagagtccgttttcgcaggagaagaatttgaagagttccaaggccagcaagtgtcacgccctgaagtacccctcccttactctaaattcataa

SEQ ID NO: 71 - DNA, 468 bp, Oryza sativa
atgcagatcttcgtgaagaccctgacggggaagacgatcacgctggaggtggagtcctcggacaccatcgacaacgtgaaggcgaagatccaggacaaggaggggatcccgcccgaccagcagcggctcatcttcgccggcaagcagctggaggacgggcgcaccctcgccgactacaacatccagaaggagtcgaccctccacctggtgctccgcctccgcggcggcgccaagaagcgcaagaagaagacgtacaccaagcccaagaagcagaagcacaagcacaagaaggtgaagctcgccgtgctccagttctacaaggtggacgacgccaccggcaaggtcacccgcctccgcaaggagtgccccaacgccgagtgcggcgccggcaccttcatggccaaccacttcgaccgccactactgcggtaagtgcggcctcacctacgtctacaaccagcaggcttag

SEQ ID NO: 72 - DNA, 456 bp, Oryza sativa
atgtcggaatcgaaggccgccgcggcggtgaccctccgcacccgcaagttcatgacgaaccgcctcctctcccgcaagcagttcgtgctcgaggtgctccacccgggccgcgccaacgtctccaagaggcggatctgaaggagaagctggcgaagctgtacgaggtgaaggactccaactgcatcttcgtgttcaagttccgcacccacttcggaggcggcaagtccaccggattcggcctcatctacgacaacctcgacgccgccaagaagtacgagcccaagtacaggctcatcagggaatggtcttgccactaaggtagagaagtcacgtaagcagatgaaggaacggaagaacagagcaaagaagatccgtggtgtgaagaaggtcagtaccaagtatcaacccagcattttgagcatttatgttaacaatattgcaatagtatttaggtag

SEQ ID NO: 73 - DNA, 454 bp, Oryza sativa
atgcagatcttcgtgaagaccctaacggggaagaccatcacgctcgaggtcgagagcagcgacaccatcgacaatgtcaaggccaagatccaggacaaggaagaggcatccctccggaccagcagcgcctcatcttcgccggcaagcagctggaggatggccgcaccctggccgactacaacatccagaaggagtccacgctccacctcgtcctccgcctccgcggtggcatcatcgagccctccctccaggccctcgcccgcaagtacaatcaggacaagatgatctgccgcaacaggtgctatgctcggctgcaccccagggctgtcaactgccgcaagaagaagtgcggccacagcaaccagcagctgaggcccaagaagaagatcaagaactagagtttgagatatcatttccgcggatcattgaaatcaacaggaagatcagagtttaa

SEQ ID NO: 74 - DNA, 447 bp, Oryza sativa
  N_region (172)..(172): n = any nucleotide
  N_region (261)..(261): n = any nucleotide
atgtcgtcgccttcgcgccggagctccagcccggagagcaacaccagcggcggcggcggtggcgccgacgagcggaagaggaagaggatgctgtcgaacagggagtcggcgaggcgatccagggcgaggaagcagcagaggctggaggagctgatcgccgaggcggcgcgcntccaggccgagaacgcgcgcgtcgaggcgcagatcggggcctacgcgggggagctgagcaaggtcgacggcgagaacgcggtgctccgngcccgccacggcgagctcgccgggcgcctccaggcgctcggcagcgtcctggagatcctccaggtggccggcgcgcccgtcgacatcccggagatccccgacgacccgctgctccgcccatggcagccgccgttcgcggcccagcccatcgtcgccaccgccatggccgacgccttccagttctga

SEQ ID NO: 75 - DNA, 445 bp, Oryza sativa
cgatggcccgcaccaagcagacggcgaggaagtccaccggcggcaaggcgccgaggaagcagctggcgacgaaggcggcgcgcaagtcggccccggccaccggcggcgtgaagaagccccaccgcttccgccccggcaccgtcgcgctccgggagatccgcaagtaccagaagagcaccgagctgctgatccgcaagctgccgttccagcgcctggtgcgggagatcgcgcaggacttcaagaccgacctccgcttccagagctccgccgtcgccgcgctgcaggaggcggccgaggcctacctcgtcgggctcttcgaggacaccaacctctgcgccatccacgccaagcgcgtcaccatcatgcccaaggacatccagctcgcccgccgcatccgtggcgagagggcctaggcgtgatctgctcgagaggctgtgataccctg

SEQ ID NO: 76 - DNA, 441 bp, Oryza sativa
atgacaacgcgcttcaagaagaaccggaagaagcgcggccacgtgtcggccgggcacgggcgcatcgggaagcaccgcaagcaccccggaggccgcggtaacgccggagggatgcaccaccaccggatcctgttcgacaagtaccacccgggctacttcggcaaggtcggcatgcgctacttccacaagctcagcaacaggttccactgccccgccgtcaacgtcgagcgcctctggtccatggtgcccaccgacaaggccgccgaggccggcgccggcaaggcccccgtcatcgacgtcacccagttcggctacaccaaggtgctcggcaaggggatgcttcccccgcagaggcccatcgtcgtcaaggccaagctcatctccaaggtcgccgagaagaagatcaaggccgccggcggcgccgtcctcctcaccgcctag

SEQ ID NO: 77 - DNA, 429 bp, Oryza sativa
atggggaagacacgtggtatgggagctgggcgcaagctcaagacccaccgcaggaaccagagatgggcagacaaggcctacaagaagagccacttgggtaatgagtggaagaaaccctttgctgggtcatctcatgccaagggcatcgttctggagaagattggtattgaggccaagcagcccaactctgccatccgtaagtgtgctcgtgtgcagcttgtgaagaatgggaagaagattgctgcctttgtgcccaatgacggttgcctgaacttcattgaggaaaatgatgaggtgttgattgctggatttggtcgtaagggccatgctgtgggagatattcctggtgtccgattcaaggtcgtcaaggtctctggtgtgtctctccttgctctcttcaaggagaagaaggagaagcccaggtcttag

SEQ ID NO: 78 - DNA, 422 bp, Oryza sativa
aagacacgtggtatgggagctgggcgcaagctcaagacccacaggagaaaccagaggtgggccgacaaagcatacaagaagagccatcttggcaatgaatggaagaaaccctttgctggttcatctcatgcaaagggcattgtccttgaaaagatggcattgaagctaagcagccaaactctgctatccgtaagtgtgctcgtgttcagttggtgaagaatgggaagaagatagctgcctttgtgccgaacgatggttgcttgaacttcatcgaggaaaatgacgaggtgctcatcgctgggtttggtcgtaagggacatgctgtgggagacattcccggtgtccgtttcaaggtggtgaaggtctccggcgtctctctcctcgccctcttcaaggagaagaaggagaagccaagatcttaa

SEQ ID NO: 79 - DNA, 420 bp, Oryza sativa
  N_region (41)..(41): n = any nucleotide
  N_region (209)..(209): n = any nucleotide
  N_region (228)..(228): n = any nucleotide
atggaggtgggcgccgtgagctgctaccggagagggagttngcggcgatgcgccgctgctctcgccctcgccgtagtcgtcgtcttcgccgcggacactcagcgccttcgccgagaacaccgagcgccttctcgccctgccgccccgctgccgccgagctcatgcccgcccactcgcgccgagctcgcgccgagctcatgcccgcccantcgcgccgagctcgccgangcctccccccaaccgcgcggcagcggtcggcgaccccttcccccgggtgcctgctctaggcccgtcgacctcgccgtcatcgtcagcggccccgccggcctcgccgaggcgggcctctccgtctgccgccccgctgccgccatcaagctcgcgcctgcgccgacctcgtcccatcgcgcgggttcccggtga

SEQ ID NO: 80 - DNA, 411 bp, Oryza sativa
atgaccttcaagcgcaggaacggcggccgcaacaagcatggccgcggccatgtgaagtacatccgctgctccaactgcgccaagtgctgccccaaggacaaggccatcaagaggttccaggtgaggaacatcgtcgagcaggcggccatcagggatgtccaggaggcgtgcgtccatgacggatacgtcctcccgaagctgtacgccaaggtccatcactgcgtctcctgcgccatccacgcccacatcgtccgtgtccgctcccgcgagaaccgcagggaccgcaggccgccggagaggttcaggcgcagggaggataggcctactggacctcgccctggtggtgctggtggacctggtgcccctgctgctgctggacctggtggcccccctaatgttgctcgcacctaa

SEQ ID NO: 81 - DNA, 401 bp, Oryza sativa
  N_region (133)..(133): n = any nucleotide
  N_region (378)..(378): n = any nucleotide
  N_region (381)..(381): n = any nucleotide
  N_region (390)..(390): n = any nucleotide
ggtgtgacaccggccggcgccgtgggtcccacgcgtcagccgcacctaagggcgcgggcggctgacggccgggccccacgcggcagccactcggcgcgcccgagggcggccaagccggcacagccggcgggangcggcgcccgcgcccctatggtcgccggcggtggccataggcacggcagagcggcggctgagagagggaaagggaagggggaaaagaagaggcggtccacggctcaccctaggtcgacggcgacgacgaaaaaggcggccggagcggaggaaggcggcggcgcggctcgggtcgacggggtcgacggcgttccggcgggcggcgagcgaaatggaggggtggacgaggtcggcgaggattcggcnaanccgaaggangcggccccaag

SEQ ID NO: 82 - DNA, 399 bp, Oryza sativa
  N_region (58)..(59): n = any nucleotide
atggtgagcctccctctccctctctcatctcgccgcgacatctctctctctccgccgnnttctcaccgatgcttctctcggtatggctctcttctgactcgcgattccgttgttgttcttggtggttcgcaggtgaagtactcgagggaggcgaacaaccccaccaagtccaaggccatgggccgggacttgcgtgtgcacttcaagaggtgaaaggtctggatgttgatactctttatgtgtcccacattcaagttaaccaggcccagaagcagaggcgccgtacctaccgtgctcatggacgcatcaacctacatgtcctccccgtgccacattgagcttatcctgtcagagaaggaagaaccagtgaagaaagaggtatgtgcatctgtaccttga

SEQ ID NO: 83 - DNA, 387 bp, Oryza sativa
  N_region (35)..(35): n = any nucleotide
gggaacgcggccgccgtggtggcggcgtcggcctncgcgccgccggggccgagcaagaagcgcttccggaccaagttcacggcggagcagaaggagcggatgcgtgaattcgcgcaccgcgtcgggtggcgcatccacaagcccgacgcagccgccgtcgacgcgttctgcgcccaggtcggcgtctcccgccgcgtcctcaaggtgtggatgcacaacaacaaacacctcgccaagacgcccccgtcgccgacatcgcagccgccgccgccgccgctccaccacgatccttctcctcctccccctcctcaccaccaccaccaccaccatcaccaccaccacccaccacaacaccatcagcagcagcagcagcagcatgatgcatga

SEQ ID NO: 84 - DNA, 378 bp, Oryza sativa
  N_region (116)..(116): n = any nucleotide
atggcgggaagaggcagtgccatggcggcggttggtgtgctggtgctcctctgcgtgctcctccacggcgagatggccgagtcggcggtgttcaccgtcggcgaccgcggcgggtnggggatgggggcgggatcgtgggcgaacgggaagcggttcaaggccggcgacgtgctggtgttcaagtacgactcgtcggcgcacaacgtggtggcggtgaacgccgccgggtacaagggctgcaccgccgccccgcgcggcgccaaggtgtacaagtccggcaacgaccgcgtcaccctcgcccgcggcaccaactacttcatctgcaacttccccggccactgccaggccggcatgaagatcgccgtcaccgccgcctag

SEQ ID NO: 85 - DNA, 371 bp, Oryza sativa
gcccggatcaaggtcgacgagctacgggggaagaacaaggcggagctgcaggcccagctcaaggacctcaaggcggagctctccctcctccgcgtcgccaaggtcaccggcggcgcccccaacaagctctccaagataaggtggtgcgcacgtcgatcgcgcgggtgctgacggtgatctcgcagaagcagagggcggcgctgcgtgaggcgtacaagaagaagagcctcctccccctcgacctccgccccaagaagacccgcgccatccgccgccgcctcaccaagcaccagcagctttcgctgaagacggagagggaaaagaagcgcgagaagtatttccccatgaggaagtatgccatcaaggcgtag

SEQ ID NO: 86 - DNA, 362 bp, Oryza sativa
  N_region (252)..(252): n = any nucleotide
tcgtcagcgccatcgccgccaccgccggcactgaacgtgagcaggcagatcaccgggacgctaaccaacctgacgttgcgcgccatcatgggggagtgcggcttccggtggcgtgaggagttcctgaagacgtttgggcgaggcgcagaagaagcgccgcctccttctcctaccgcctccacccgcgttagctctagcccgctaccgccaccgccgcttcagctcccaccggtcaccaccactccagccccngccccgtcgccgcttcaacccgtgctccccgcggacggtggaaggggagagaaagagaaataaagagagaagggagaaagagggggatgagaagaaagagagaggatgac

SEQ ID NO: 87 - DNA, 339 bp, Oryza sativa
atggcgccgccgcagcccaagtcggggctcttcgtcggcatcaacaagggccacgtcgtcaccaagcgcgagctgccacctcgcccgtccgaccgcaaggggtttgtcaggggcttgattagggaggttgtgggatttgctccatatgagaaacgaatcactgagcttctgaaggttggaaaggacaagcgtgcactgaaggtcgctaagagaaagctcggtacccacaagagagcaaagaagaagagagaggagatggcgggtgtcatcaggaagatgaggtgtgtgtctttactactgcattctgcaatttcattgttgatgttctctgttttttag

SEQ ID NO: 88 - DNA, 335 bp, Oryza sativa
atgtatcttctcctaatctttgtgtgtattgttgctttgctttgcagtcgctgttgtggtgtttgcttcatccaccgccaccatgcagaacgaggagggtcagatggtggacctctacgtccccaggaagtggctcggccacgaacaggatcatcaccgccaaggaccacgcctcggtccagatcaacattgggcatgtggatgagaatgggctgtacgatggccgcttcaccacctttgctctctctgggttcatccgtgctcagcagggagatgctgacagtgctctggataggctgtggcagaagaggaaggctgaggtcaagcagcagtag

SEQ ID NO: 89 - DNA, 321 bp, Oryza sativa
atggctggtgctacggctgccggcgctgccgctgccgcggcggggacgggagccgggtcgccgtgcggcgcgtgcaagttcttgcggcggcggtgcgtgccggagtgcgtgttcgcgccctacttcagctcggagcaaggggcggcgaggttcgcggcgatccacaaggtgttcggcgccagcaacgcctccaagctcctctcccacctccccgtcgccgaccgctgcgaggccgtcgtcaccatcacctacgaggcccaggccaggctccgcgaccccgtctatggctgcgtcgcccaaatcttcgccctccagcagcag

SEQ ID NO: 90 - DNA, 2799 bp, Oryza sativa
atggtggggcccacgtgtcccactgtcatctccctctccccactcggctctccctcttcttcctcatcacgccgcagcatgctgacgacgacgacggcagccgaagcatcggcggaattgccggctgcggcaggccgcggcgaagggcccacgaggagcggagggccgggcggagcggcggaggcagcagggcgcgggcggcggaggtggccggaggaggagggagaggaggaggtcgccgccgagtttcgctgcctagaggacggcaacgaggtcggcctcttcgccgtgttcgacggccactccgacaccgacatcgccaccttcatccggccccacaagtcatctccctctccccacatgtcctcttgtgcggccgccgtcctccgcctccgccggccttcgccccaggccatgctgccaactacgacgacgccgcctcctctcgccctcccatggcgtcaccctccccttgtcgaactcgaactccgcgccgccacggccggctgtcccttctatctccatggagatggaggaggcggcgaggttgaggaggtcgccgcggggccaggcgaaccacggcgcggaggaggcggccacgcggccgacgctcgatccagcgaggctgtggccgtggcggcggtatggccgatgaaggcggaggcgccggtgggggatggtggcgctggtggcgagccggccccggaaggatggcgcgacgacgacggccgatgcggcggcggcgccggcgagcgtgaggaggccgcggggtcggcgtccaagaggcggcgcttcacgtggcgtggcggcgtcccagcgccgatgaagacggtgacggcaacaacttcgagggacggcggcggcggcctcggtggcgctcccgctaggcggaagcagaggcgacccggcttggccaagctctgccgggcgccggccgtgagcgaggcagaagcagctgcagccgattcggctgtgcgcggaggcggcgcccgtgcagcggggaggcatttttgcttggtgctgcaggtggcttctaggagaaggaaggggaggacgaaaatcggattcggtggagagagagcacagacgggtcccacttccttttattttgcttcctcttttcttctctctttctcggtctcatctcttcctgctctctctgtcacgcgtgcgttggccagggtgacgggcggtcggcgtgcgacggccgggcgcggcggcgcgacagcgcgtccgtgcgcacgggggagaggcggctcggctcgatgcggcggccaggcagcgcagagaggaggagccgggcgcagaggggagccggggcacggcgacgggcagaggaggtggccggtggcgatggacgtggaggctggcggcggaggaaggggagaggagctcggcggcggtaggagagaggaggctggagatccgacgcggaagaggaggcctacggtgtggaggaggatgccggcatgctgcgatggagaggaggacgacggcggggatggagaggagactggcggcggtgaagaaaggctgccgcggtgcgggcggcgcgcgacggcttggcgcggcggccgggaggcaacacagaggggaggaacagaggtgacggtggatgggaaagcagaggagggactacaaggcggcggccgcggaggtgaccgcacgtcagcgctcggcccgacgccatggcggcttgggtcgggcggagacggcggtggcagtggaagtggaggaagggcagaggcacggggaggaggagccgggcggcgaggttgggggtgtcgatggcgggccgcacacatggcgctgccactcggcggcgtcctggagcgaggccaagacgacagcggggagggcatggcgcaacgcggcggcgcgggcgacggccgaacacatcgcgcgcgcaagaggacggaggcggaggcaatagaggaggagcgatgcgcgggcgccgcgcaaggaggatgcgacgatgcgcacgacggcggcatcgcgcggaggcaaagacaagagcaaaagaagaacagagaggagggaggaaaacacggaaaggaaggaggaaggaggagatgctcacgtcgcggcagccgggtagcggcacaccgtgcgtggtcgatgggcgtcgatgctcggctcgcggttcatcctcggctcgaacacagccacagaggatgctatgggtcggacgtcgacacgaaactgcctcacgactgtgcgcatgcatgcagcctgctgcgtgatgaggcatgtgttgctgactaccctttgtttactgtatgcggtgcttgtctgcctgagctaattgacacgatgaattgggccaaaattcacaagtctgcagagtggagcaatagaggaggccaccagccgaaattgggctggattgggccagccccaggttcagccgaaccaatcctggcgccgtcggatctaggttttggtgtggacgtccaggattgcatcccaatgacggttggagggcacttcggacaattccccttccacaaccgagtccgaaagtcttcggaagagttcggatgctttggtgcgggtataatgtttgcttatgcaattactctatgtcatgacgatgatattagagaagtatctggtagtttagatgtggtgtctagattacgggatattattatttggggttatatattgcggatgagagggtattcctccgtatttagccccggttgtatggtcatgacgggctgtcgtaaggaactcggcagtcaggggtggcttctcgaagtaccaggagggcatcggaaagagggtattagctag

SEQ ID NO: 91 - DNA, 1611 bp, Oryza sativa
atgtggacccccaaaagaagaaaagctctgagcacagatgggtgcaccaagtccacgtacaccgagtgtcacgggttcacgacccccgctgcagaagaccgggcgctccgtggaacgagtccacgcccgcccagctccttccttctgcgctacggctgtcagagctctactacctccgtgaacctggctcaccgtgaaccagcaacccataccacctcctcggcttctcctctccggcttctcgcttccctttcccacagttcgcttcgccggcctcctccgccgcgcagaatgcgtctcccgctccgccgcgcgctctcccccgcggcagttcggcgcgccttctccacggccgccgcctcgcgccctcagtgggcgatgatccgccaggcgccgccggtcagatctccgtcgccgcacgcgtccctcctgctcgccgagcccccgcgcgactcctacctcctcgtgccggaccacctcatcgaccggcgtccgggccccgaccccagcagcgacatccgggggatcctaggcggcacggtccacgccacgagcggcgacggcggcctcctcctcgtcgtctacatggactcccacgccccggcccccatcatctccaagatcgtcaccggcgcctttcctgctcggcctcgggtcagcgatctcgccggcctcgacttgagcgacccagacttcatccgtttcgtctgcaaccccatcaccggcgagctgttccgcctcccggacatcgacggcaccaagaagaccatgttccgcggctgcgacaacgccggcctcctcacccgctccgcagccggagccgggcacggctcgcctgacagctacgccgtcgccgtgctcggcgaggaccgcaacggcgggaccttcaacatgcggcggttcctctcgcgaaccgggaagtgggagaagctagtgggcttaccatccccgctcccgctcacgcggcggatggacatgtacaccgaggcggtggcgttcgccggacggctatggtgggccgacctgacttggggcgtcgtctccgccgacccgttcagcgactggccggagctccacttcgtcgagctcccgaggaacagtgtgtggccagtgcccagcacagatcttgtacaagagcaggctatgcaccggcgtctgggaatcagcgaggggaggctgcgctacgtcgaggtgtcccaggaggatcctttcgtggtcagctcatttgcccttgacgacgacggcagcggctggacgctggagcacgaggtggcgcttggtcgaatctgccaggtgaagggaggaggcccgagggacaccgcgcggattgccgtcattgacccactgaacgcaagcgtcatgtatctgatcgttggcaaacatgttcttggtgttgatatggacatggggaaggtgatgggttgttcactggcagatgaaactgaaggccctccatatgctatcacctctgtccttaaaccatgtgtgctcccaccatggctttcatcaagcaaaatccctgctgcaggaactttttcacgcgacaatggtgacgccaaaagcaagactttatcagacatattggttcgtgcagacagcgacaagaggtga

SEQ ID NO: 92 - DNA, 1296 bp, Oryza sativa
atgagtaaatccaatcatccccggaattccgaatgtccacgagcccacactccgtcggttgaatatatacgtagctggatacgaggtacaaagcgagtacgcctagtacacgagagatcaaaagagctgccttttgactctgtgcatacgctgcatgcagacgagacaattaatgaattaaacacggcagcacacaagctagctgatcagcgctggtgcgtagtagctaacgatggtggcctccatggcgtccgccgcgttcgtcctcgttgccatcgtcctcccgatctcgccgttcgcccatgctcagcggacaacacagccacccattgtggcgccaacaatgccaccaacaccaccgcccacacaaccaccgtctcccggaccgatggcgccgatgccgtcaccacctcccccaactcaaccaccatccccgggaccgatgccgccgatgccaccaccaccggcgccgatgccgtcacctccaccaatgcaaccaccgtccccaggacctatgccgccgatgccaccacccccggcgccgatgccgtcgccaccgccgccaacacaaccgccgtccccaggacccatgccgccgatgccgtcacctccaccaatgcaaccaccgtccccaggacccatgccgccgatgccaccaccaccagcgccgatgccgtcgccaccgccgccaacacagccaccgtccccaggacccatgccgccgatgccaccacctctggggcgccgatgccgtcacctccacccaatgcaaccaccgtccccaggacccatgccgtcgccaccgccgccaacacaaccgccgtccccaggacccatgccgccgatgccaccacctccggcgccgatgccgtcacctccaccatatgcaaccaccgacccatgccaccgatgccgtcgccaccgccgccaacacaaccgccgtccccaggacccatgccgccgatgccgtcacctccaccaatgcaaccaccgacccatgccgtcgccaccgccgccaacacaaccgccgtccccaggacccatgccgccgatgccaccaccaccagcgccgatgccgtcgccaccgccgccaacacagccaccgtccccaggacccatgccgccgatgccaccacctccggcactgatgccgtcaccgcctccgccaacacaaccgccgtccccaggaccgatgccgccaacgccaccacctccggcgccgatgccgtcaccgcctccgcaaaaccaaccaccaccacccggccgttgcccactcatcaaaatagttatccttaa

SEQ ID NO: 93 - DNA, 1128 bp, Oryza sativa
  N_region (723)..(723): n = any nucleotide
atgggccttgttattaacaacaaagttatccaggcttggaataagttcactttgggcccctctatttgtcgcttagtccgattttcgtcccttggtcgcaaaaccgggtacgacaagtcccccaactttcgaaaccgtttaaatgttgtccctcgggcagttattgcatctgacgtcatcctctctatcctctctctccctgttctatcgctctccagccggcggaacgggatgggcggcggccggagcgggcgacggcggggcggagcggcggcggaggcagagcggggcggagccgaagggcgaagcggggcgggcggctgccgaagcggggtgaagcgggggcaagcggatgtcgtcgagccgtcgccatcctcgccgcggcggacaccgacgccgaccgcgcccaacgacgacgagcgcgcggagaaggatgaggcggcggaggctgtggtgttcatcaacggggaggacgatgaggcgacgatctgtccgggttcaggggcctggcctgtgaacgttgtctgctggaagcgcgcaatttgtttggaattcatggcgaaggagcttggcgcttcgacggcgtcggttcttgaccccgtagccgacgacggcgaggagcgcgacggcggtgaggaagacgtagacgtcgtcgggaccgacctcgccgctgccgtcgcgcacgagggctccggctgctacgtcctcaccgtcctccgccgngccctccgtcctcgccggaagcaggaagggtgccgcccgggtcgtcacgcgcgccgcccattctccccgtcggccgctgctcgtcggtcgtcctccccattggtcgccgcccgtcctggtgccccttctccccgccggtcaccgcccatcccggcgccccttctccccgccagtcgccgcccgtcgcgccattctcctcgccgacagtcacccatctcttcgttgcctgtcacgccgtccaccccgccggccgctgctcgtctcggcgccctagctgcatctcctcctcctccggcggccaccgccggacactgccccttctccccgccggccaccgcccgtcggccgtcgcgcccgagagaggagaggagggagagagacgaagagaggggagatggggagtga

SEQ ID NO: 94 - DNA, 1116 bp, Oryza sativa
atgcccttgatcgccatcggcagtaatgcatataataatttgattatcccggtgctcaaaactttttctcgccaacttctagatctcagattttttccaaccccccatatggtatttgtcgctgagaaacttgttacatctgttcccttgcaagaccaagctgttaagtctagtgccacaatatacggctgtcaggcaaagcagttcacaagaaaaccggctaaaacccaccgctacactactaaccatgatggcggagcccaaatgcaggacgtcgtcgccaagctaaacacaaaagccacccaacagctcccacaccgcagaagaggtgttatcgttgccgagctagccgcccaagcgacccagcagcgccgacttcacaaccacagcgacactaaagccatgaaagtcgccaaagcaaaaagcagctccgacatccaacaatggacatcagccaagccaccgaggagccacttcctttacacggccagcaccacaactcctaggaagagactgcaacataaacaaccaaagagcgtgacacccaccacgagaaacaaagcggacccaagaaggcgaaggcctcgccgaacacaatgtatgagagcttttgaaccgaaaaggaccatcaacagtcgtcaatgtgttggaacttctccgaagcgacgccccaaaggaggacacgacgtcgtaactccgccgccgccgctcgtccgaagccggaacaagctccgtcgtcgtcgcaaccaccaggccgccacagcctctatcgccacggctgtgaccccgcgcgcaaggacgccgaaacgcaaacgccgcaaccggcgcaagcaagccgccgttgccggccaaccccgtgtggggaccggatccggtcctaccgacgccggatctggccgccggcgaccgctgcacccgcgagacctctctccggtcatggcatcgccccagccgccgcgcctgcgagaggagtctgttttttttcgggtcatgcttatcctgtccactcgttcttttcgagaaggaagcagtagcccaatgaaaaccatgctgctactagtctttgatcaaatgtctgaaatacttcaaaaagtggatgaatgggagaaattttga

SEQ ID NO: 95 - DNA, 1113 bp, Oryza sativa
atgctaaatcacccggatcaatccctaccgtccatccgtatctgcatcgccatgatctacgatccctaccgtccagtgtccaccacgatttcaccctctccaccgcgcaaacaccgcgagaagactacgcctccgcgctactcactcctcgcgtgtacggctccgctgcctcactccaccgctgcccctgccagagccgagttcttctccagccgtcgtcgccgcactccaccgctgccccgccggagccgaggtcttccccagccgccgccggaacccgagaccacccttgacggcacagaggtcgttccaagccgccaccgcactccaccgcagcctgcccccaccggcacaatggtggttccatcttctgccggaccagtgcccgggattgcccccgacggtgccgaggtcattcccagccgctgccgcactctaccacagcctgcccccaccagccacgagttcagcatgcatagacacaatgcaggtccctattcagctcaaattgacattctggacattggaccacctcacctcgcgccgcgacatcaccaccgttactgctacatacaaactgctgcattcccctttctgttggattgtagctgcacgctcgacaaaccggcaatccccatccggttgcctctacgaagactgcacaaaaacggaggtctgctgttgagccatagattttggattaagcataaccggactcagcaagagatgtccacagagttcgtcattaaatctgaggagcgtgagctcaacccgaacaacaaaccctgcatggagcaagctgctctcgaaccgccacctcgtcgacgggctatcatcatgcaccacgagcagcaagctccgggcgacagcagatccagacgatgcaagccacgagaagtcaccgcacgcaacgctaggaacggggtggcaacctcccggccgcaaacgacgatgcagccgccgccgccgccgcaaggagccagctccttccgtcgattcatccacaggtctttggatctcgcacctccaccgccaccaactgccgtcgccgccgaccacaacggcacccatggagactcgtcggcaaaaacaccaactaaggacaaaccctaa

SEQ ID NO: 96 - DNA, 1080 bp, Oryza sativa
atgcagcgcctctccgtgggatcggcaggcggcaagccccgcctcctcgagggcggcgcggcggcgggggaggaggaggaggaggaggagaaggccgggaaggcggggcgggcggcgccggacaggtccatccacatcatccccgtgctcacgctcctctgcttcctcgtcctcttccttctctcccacgacccggcttcctcctccctcgccatcgccaccgattcgccggtgctggccgccgctcgcaccctcgaggccacagtgctggtctgttactgcagcggaaacgacggcgtccatcgcccgcagcggcggcgtccaccgccggttaaagcaggagccgaggctggcccgcggccgaaggatggggatggcgctgcggcggcggcgctgacggctaaggctaaggctggatgtgacgtcagcgcagcgcagctagccgttggattcgttgttggaatcgaagacccttctcactttttcttttttggcgaggaagctgatttcgaccgttctgctgctacctgggtggctcatggtcatggctggagcgcgtcgatggagtcggcgacgtcgtcggaggccgagatcgcgcccgcgctggccgccgacacggtcgacctcgccggagagctcatcggaatcacgcgatgcttttccccttttctgggtgaaatcgaattggacggagatcgaacagaagcagaaatccccaacccaatcggaggaggaagagaagggcggcggcggcgagcggagatggtgaggaaggcgaaggtcgagttcgacgagagcccgccggatgacttcgacccgaagaacccgtacggggacccggtggcgatgctggagtacagggagcacctggtgagggagaagtggatccagatcgagaccgccaagatcatccgcgaccgcctccgctggtgctaccgcatcgagggcgtcaaccaccaccagaagtgccgccacctcgtcgaccagtacctcgaggccacccgcggcgtcggatggggcaaggacgcccgcccgccggagctgcacgatcccaagaaggtggttgaggccgacgagtag

SEQ ID NO: 97 - DNA, 912 bp, Oryza sativa
atgggtataatctacttcagaaacggagctggagcgcccccaaccactcaaaggcgtgagctgcatgcgccaccaaaaagagtccttcctgttggctgctctatcgccggtgatgaggtcgcaaggcgcgccggagggtctcgtgcaactcgtagcaacggaaaccatttgcctttcctggcgtatgtgtacaccggggacggagttgctgcgggcaggcatgcacgcgatcgagcggtagctttgacagacagcgagaggcaacgcgtggcacagcagaggaaagagaggagcggggcgccggtgctccgattgctgggaggtggcgacaccggtggccaagtaccagccggtacagagagcaagggagaggacgtgactcccgctcgggcgcccgatgggaggaggttaaaatcggacgctgacgtcagcatgacggagaagtgggtgggcccaacaggtgcacatgtggggggagggggagcgaccgattttcctacctcccccggtcgaccgatgctggcattctcccaagggagatggccagaacggcagatggaagggcttggctccggcggtaaagaaggtgatggtggtggtaggatggggggaacgagtgagggagatcgaccgatgggcgatggcagctggtggcgccttctcttctttattttccatctctctccaaatctttccctcgtcgatggtgttcgcccgctgctgcgcttgctccccatgccgccaccgccggcggatgctgccgcggggttccattgctgttgccgctccagctccgcacgtgcggcgcagctgctgcggcggccttatgcagctgcactgctgtgctgctgctccgctactgcggcagctgctgcgccgcaagctgctgcgcgactatgcccaagaaaatga

SEQ ID NO: 98 - DNA, 813 bp, Oryza sativa
  N_region (423)..(423): n = any nucleotide
atgattcccaaaaaaaggaaaacaagtctgactatctctttagacgcccggtcgctctgcctcgggggcgatgcgggcggcgaaacaagccgcgtcgcccccgtccctctcctcccctcccacgcctcgccgccgccggcaaagctgggcggctgcaaggacggcggcggcagggctctctctctccaccgctcgcagtggagttggacggggcgccggcaaggcgccgacgacgaggaagaaccgacgacggcgaccagatccggcgccgggatgcacggatccggtacccccatggccggatctgctgctccgggcggcggcgagccgggtcggcaagtcgcagcatcggcggcgtggaggtggtgccttcggcggccggagggccgcgtcgacggccggagggcggcctcggtggcgtgnaatctggccggacggctggcggcggcgctcgcggccgtggtgcagctgcgcgaagtgatgcacgtgcagcagctgctagccgagggcgtggcagatgactgcatctggccggcgcagcagcgtttggaggaagggtcggagaccggcttggcgcagagaggcgcagccaatggcagcggaggccggctcggcgcgagaagcgcggccggcggtggaggaggcgaccttggtgagtggaggagctgccagtgggtgtggcgcggtcttcggcgcacgaaggctagccggcggagggcgccggtgcaggggtcccacatgtcgacagaggttgattggcagtggagcatcggtgtgtcagccgtggtttcgcaggtggtgagcggcaggtga

SEQ ID NO: 99 - DNA, 792 bp, Oryza sativa
atgcccaccggcgtgcacccctcctccttcctcactggtgcacacccccctcctccgtcttcaccgacggatccagcggcaacgaatcaagcgggtggcagatctggtgacggcgagtcaagcgtgtggtggatccggcggcggcgactttcgcgggtgacagtctggtggagtcaaggaggggaggttggtggcagcaaggcagcatatggagcgtcggggaggaggccaggggcggcggctgccccactctctcccctcacctccctctttttgatttggctggagaggaggaggccggtggcggcgcggcaacaagggggagagcggtgcgcggtggcccctcccctccatgatatgtggcgggcgggcgccagagcggcggcagcggcggaggaagctgaagcggtggcggcggcctcgccaagtggagagaggagaggaagaggagagcagggccggaagggagaggggagaggcggagccgccgagctcgtgttgtcgccgccaccgccgccgccggtgcctcctcccgcactcgcgctcacgacagcgctgccgcgtgctgacccggagtggcggcgacgcgtcccgtgggtggtggctatggccgcagccgacaaggtcggagacgagagcggcggcggcggcggcgggcgtacgaggggcggcggacggctggtctcgatctggtactctgcatggtcggggaggttcgacggcgaagactacgaggaggaggagatagagggggcgggcagcagccggacgatccagcttaactgctactag

SEQ ID NO: 100 - DNA, 780 bp, Oryza sativa
  N_region (60)..(60): n = any nucleotide
  N_region (71)..(71): n = any nucleotide
atggtcgccggcagtgggcggcagcggcgctggatgtggcggcacacacgggtggcaacngggaaaggganagggggctcaccaagaggacggggacggcgaggcgaagtcgggaaggcggccgacgacgaggattggcggtggcgcttctcgggttggggtcggggacggcgctccggcgactcccgaccgcggcggaggtgcggccgaggtcagcaggacctgggaagcaaagaggaggggttagaggagggagaggcatcgcggcacggcgaggaacaccagccgagcaccaacatttgtggcgagactcaccggggagacgattacggtggctcccggcggcgaggaggtggtggccgagggtgctctcgtccttgcgtggccgagggaggcgacggctaccgcgaggaggtcgggaacggcgggaatcagcgatcggaggcagcaaatgaggtggcgacctcggatcgatggcgaaagtggtgctccggcggtggactgggcaaacaaagtggcggccggccttgctcttgcgacggcgaagtcaatggcgcaagcggcaagtcacggtggaggttgaagcggcggtggcgggctactgaggcagcgaacggcggtggtggctcgggtacgcggtgcagaggtggttccgacagggatacagggaggcagagcagatgccgaggtgtggctcggcgtggcggagccgatggtggcagtggcacggcgcggcgatggccaaggcggcgggaggcggcggctggagcacgccggtga

SEQ ID NO: 101 - DNA, 753 bp, Oryza sativa
atgaccgacgtgacaaccccacctgctgttgatggaagatatggtgcaggaaggacgatcggggagtattcacagttcctcttctttttctgcccgctcgtctctccatctcatcacctccgcccgctcctctctctgtctccgaccgtggcgaagaaggcgattgtggtcacgtcgagcgcaaggggtaccgccggcggttcccgccgccgccgctccctccttgccctccccgaccaccgccgcctccctcctcgcatctccggcgacgccgccctcgtcggtgcacggatctggcatgccggcagctggatccagtgggccggcaccatctctatgtcaccaccacctgtctctcttgccacatcctctctctctccggtgcctctctctctccttgccacccgtcatcgctgcctctctctcccgtcgtcgccgatggagaggggcacgcggggcacggtggccggggttggggccgccgtcagcgactcaacctcctcgccgcctcaggctcctcactactgccgtcggcctcctcccagtgacgaggtcgagggtagaaggggaaatcgtaggtgcggtagccgtgtccacgggcgccccaagctcccaacgcgtcgcctggttgcgactccccacgaaaagctagcgaggcgcggagagagccacgtcccccagcagagggacgcattccatcatgaggggacgtcatggacgaaaaagcaaatggccatcgatggagggcactag

SEQ ID NO: 102 - DNA, 741 bp, Oryza sativa
atgtcagcggctgcgggcgcgagtccatggtggatcgggttcacggactggggagaaggggcgcaccacatggcgccgacgtggcacacacgcggaacacacgcggtggtcacgtggcccggaggaggcggaggcgtgggcgcggcggcggttgcgggcgcggcggcgcggcttaaggtgggagacgggtccgacagcagctcgacgaggaggagcgacggcggcggttcggcgaggaggagaggcggcggtggttcggcaaggagaagggcgcgcagcggtgacgccgccaccgttggccacctcaccaccttcgtctcccgtctccacggccggcgagcgaaggggcggtggcgccgggaggaggaggcgccggttggggaagggcgcgagcagcgctggcgtcgattggggaagggtgggggcagcgttggtcgggaaagggcaagagcggtgccgacgtcgggttgggcggtggagtcggcctcaatggcgtcggagtccttgggcgacggcggggaggcagtgcgtgcagcggcggaggggaggcggcgggaacaccggcacctcgcccttcatcacctcctcctcctcctcttcctccacctcctcgtcggtggatctgggccggcgtgggacgagaggaggagcggcggcggcgtctcggcgaggaggagcggcggtgacgacgaagtgaggaggagcggtggcaatggcgaagtgaggaggatcaagagataa

SEQ ID NO: 103 - DNA, 729 bp, Oryza sativa
  N_region (252)..(252): n = any nucleotide
atgcacacgccgccgcagcttcaccggaagcttcgcctcgaccaccaccaccaccaccaccggcctcagctcccccgccgccgccgccttcacatgccgcgcgatggcgacatgcgcgcgcgttgctgggccgagctgtaccacgacgcgtcggctgctcacggcggcgtggtggcgaacggtgcggcggcggcggcgacgagcccggcgtcgccggcgggatcgacaggcgggagcccgacgcgggcgccnggggttgaggggccgcgcttggggaagccggcgaggaggcggtccagggcgtcgcggcgcgcgcccgtgacgctgctcaacacggacaccaccaacttccgcgccatggtgcagcagttcaccggcatcccggcgccgcccgcgggcgcgttcgcggggcccggcggcgttccggtcatcaacttcggctccgactacggcttcaccggcgccgtccttcccttctccgaccacctccaaccgcgccggccgacgttccaggaccaccaacagctcctccgaccgcagcagcagtacaccggcgcaccgttcggttacggcaacctgcagcaagccggcggcgccggcaccggcgccggcgacatgttcagccacgcgctgagctcggccgaggacaggttgctcctgcagagcctccagtcagctcagatgcctacttccgccgctaaccacagcgctaatggttacttcgcctaa

SEQ ID NO: 104 - DNA, 711 bp, Oryza sativa
atggcctccgtctcgctctattccatttccattccgttctacagcgacgttcgcggagcggagttaagagagggagagacgcagcaaccaacagcacgcgcggggctgagggggatgaaggccgagaaggcagcggtcgccgtcggcggcggcggcggcggcgacgagtggcggtgccggaagcacccggtggcgagatccggcggcggggtgtgcccgcactgcctccgcgacaggctcctccgcctctgccccaactgcgcgcacgtgcgaccctgcccctgcacgtgcgcgtccccgtcctcctcctcgtcggcgtccggcgaagcggtcggccgggtccacaccctcatcgagcgggagcaccggattgcgcggtcacggtccctcgccgcgtgctgctccctcgcggcggcctccaccgcagcagccactgccggcgcggtcggggggaggcggaaggcgagggtctgggggtggccgccgttctggaagcccgcggccaaggacggcgttgctgctgcggcggaggaggacgaggaggaggagggggggatggggctcgcgaggtcgagctcggtctccgcgacggtagtggaggcaaaagcggcggccgcggcggcgaaggcgcggtgggggtggcacttcccgagcccgctcaaggcgttccggcaccggagatcgtcggcgagcatgccggagcgaggatga

SEQ ID NO: 105 - DNA, 630 bp, Oryza sativa
  N_region (555)..(555): n = any nucleotide
  N_region (578)..(578): n = any nucleotide
  N_region (600)..(600): n = any nucleotide
atgcccgggcagcggggcggcgaggcgttgtcggcgttggtggcggtgaggaagagtcaccagtgggcatcgacgtcggcggcgtggatggcgagaggcggcggggacggcgacggtgaagcacagagaggggcgagacgccgggggcagggacggcgagcgacggcggggggaggacggcgcgagacggcggcggccgacagcgccaggggcagcggcgccgcgccggtcggccacccggaagctcaggcagccgtgtgctgccgccagcggggaggacggactggaacacagtgctaccgccgtccgccggcgaggtcgagggcgaggactccgcaccgcctcgatcgattccaatccaacctcgccggcgatggttccgagaaacagcagttgctgggcgatgggaccaacagcagacaccgaggcggtgcggagtcctcgccctcgacctcgccggcggacggcggtagcactgcgttccagtccgacctccccgccggcggcagcgcacggctgcctgagcttccgggtggctggccggcgcggcgccgntgccgctatcaacgaatgggccngagagcaagcagagacatcgcncttgtggggtctgaggcggggacggactga

SEQ ID NO: 106 - DNA, 618 bp, Oryza sativa
gccggtcggcgaggcgaggcaggagaggaggagggcggcgctgcaccgcgccgacggacacagtggggaagcatggcggcgcgggtgggcgacggggaggcgcgggcatgcgctagcgtcgcaggcgcccagttggtggtggcggcaaccgtcgttgacacatggagattaggatgccacgaccttaaaaaatcgtggtgtaaagttgagggatggccggacaacagccaaaacgaactgttccaggaaaaccaaaggcaaaaacgagagaaaaatagccaccacgaacccttcctcccccactgtctcccactttttcacgttttccggcgagcgcggcggctagccatggatggcgtcggcggcggcggcggcggcatcctgtcgtacgagaagctggaggggtacgcgatctgggtcggggccagcgtggcgtcggccttcttcgcgtccatggagagctgctcctgcatccacgtccacaccgccgacgacgagggcgacgactacgaccccgaggaggccaaggaccgccccctcatgctctcccgcccccaggccctccccgagtactactacgaccgatccgcctcctccgcctccttcgccaagatgtga

SEQ ID NO: 107 - DNA, 618 bp, Oryza sativa
atgaccggcagcgtggccgtggaggcatccatccatccgttccgggggcgatcgggcaaaaggtgcgtcaatgggagggagtggtgtgtgggaaggggagggggttccagggaggggatctgctatggaggtggagcgacgacgagggatcgacagtgggcggcagaagatgggcacctggggatgtggcggcgtcgcgggacggaggtcgtggcgcttggcgaggcggcgctagtgtggcgtgcgttggtcgtgatggaggtgcaagagggcgaggggattggggatggaggcgaggagggactggccgacgtccgatcccgatcgatggtgaggagacgcgacgatgacggcggcagcgacggcaatgcaagagggaaagggaggagaggagatagggcgacgagagggatgatgggttgcgggggcgcggtgctgcgtgatgcggagcaacgggggctaacggaggagcagcgtcggcgggttcgcgagcgcgagctgccttgtggggagaaaagcgagtcgagggggaggaccgtgaggggatccctcagggaggggatgcatcgcaggcggaggggaggagcgcgtgcgatgggatccctcagcaccgtctga

SEQ ID NO: 108 - DNA, 591 bp, Oryza sativa
atgacgctgcctcgaggtgacgctacatcagcctcccctccagccagcgccaccgccgctgctcatcttcgtgttggggagaggggagaggcgacggcaaagcaaaagcagcgctcatcgatgtcgtcgaggttagggccgaggtcgttgagagaggcaatgcgaacatcccaaggtggagaggtcggctcctccctgttgagcgacggaaacagaggggtggtccggtggagcgaagaggagctggtcggcggtggcccaaaccgacggacggggacagggtcagcttggagcagagatccaagaggcgctcctcctgttgtgtcgagatcgataggggtggatcgcggtggaggtcgcggaagccggcgggggcggcacacgtcctttcttctctcaccgcaagcatcttcccccttccattctatccccgtgtcccgttgcccatgtcggcgaggtgctaggagctcgagcttcgactcgctgacaatggcatgcaacagcactatcgtagctccggcggtgggcctcgagggagggcggtggtggcatgctctcctcttcaccagctcggtgacaacggggacatga

SEQ ID NO: 109 - DNA, 573 bp, Oryza sativa
atgcctcctcgaccgcgacgactcctcgcgccgccgcgcccgctccttctccttgtcgcgctcccgcgccttgcgctcctcgcgatcgcgctccttctccctgtggtggcgatcgcggtcgcggtcacgctcgccgtccttgtcgtcgcggtggtggtggtggtggtggtggcgagaggaggaggggcgctcgcggtcggggtccttgtccttgtcgcggcggtggtgcttggagccactaagtggtgggacctgaggagtatgtgtcgcgtgtgtgagggggataccgcgtccaaaactatcgaagaaaaaagaaaagattcccctcctctgcttctcgtgttctcttcttcctcccgtctctactcctattctatcggatctccggcgagcagcgccgccggcgatcggggtcgtaacatggccttgtcgccggagcccatgttcacggcggcggccggcggcgagcgcgaggaagccctagacgcggcggatgtgttggggtttggattgaatctaattgggagtacccggtactggatcttatcgtgcactaagggaggagtatcctga

SEQ ID NO: 110 - DNA, 546 bp, Oryza sativa
aggcggccggaggcggagaagtggtggcgacgccactgggacaccggcgaggacgcgtctccggtgatttccccgcgaaacggaggcgaagccgggaaagaggaggcagctgcgaggccgagggagaagacggcgcggccgggcggcgctcgggcgaggagaggaaggcggctggaggtggccggcgcgaaggaaagaggagggcgacggcgggaacgtagttccgggggtctcctcgcgaaacggagggcaggccggcgtggaggaggtggcggcgacgctgtaggaggcgatggcgcggccggacgacatctccggcgaggcgggagaggcggctggaggccggccggcaacgggggaagggtgctagggttcacgggagagggagagaggacggccgggcgggaggaaggggacgacgcccgcctggacgcgcgggccccacgcggtcgggcggcggcgtcagcgcgcgcacgcgcgcggcacctgacttcgactgggttgcggcacttgaagatggggcttcagttccagaactttgcatag

SEQ ID NO: 111 - DNA, 488 bp, Oryza sativa
atggcttggattgacacacggcagcggcacaacagcggttgcggtggcacacatacagtagcagcacgacggcgacgtacagcggctaaacagcgacgcggcggcaacaaggcgccggcggcagcagctagcgacacagcaacggctgcgctagcgttagagcaacagcggcgaaacgatgacgacgcggagaagacgacggcgacgcccaagacgacgacggtgagggggaggcacggcaaagggggagagggagggactcggaggggagagggcaggggaggcgcacagctgggagaggggagaggaaaaaggtacgggaggaggggttgcctagaaaggaaaggtgggggaaacagatgcggtgcccgttttgggaaaggaagaggaaacggaacccagaaagagaatacgactcggctcatcatacaaaacgaaagcgcggtggcaaaagggtttgcggatacgacaaatggtggagagggagg

SEQ ID NO: 112 - DNA, 471 bp, Oryza sativa
  N_region (238)..(238): n = any nucleotide
atgtcaagggcgcgtgacgctgggcggtggtggctgaaggcggcggggatggcgatggcggcggggatggagttggccgatggcacggaggcggcggcctggtgctctcgtggcggcgacggcacgttaacttggtggcgacggcggcggtaccccccagatccgcgcctctcggccggagctgcagggtggcggcagttggcgacggcggcggcagtttggccagcggcagtttgtnggcgacgacgacgacgacggccggcggcagttggcgacgacgatgacgacggccggcgggcgacggtgcagcaaaggttttgcggaggcggtggtgacgtcggcggcggggaaaggagtcgggtgcgaggtggggatgatgacggcgaggtggttgggtgttcggcagcagcggctgtggtggtggtgaccgtgttcgcagtcaccggaggcatggcggcctcggttgactag

SEQ ID NO: 113 - DNA, 441 bp, Oryza sativa
atgcatggagaattttggtgtctagagagagaggggtacctagagaggagacgacgagcagaggaggcggcgcacgacgacgacgagtcccggtcagcgcacggcacacggcttctcggcacggcggcgcggcggcggcttcttggcacggcggcgctgaggaggaggtggagaggagatcccggtggcggcgacgacgtcctggcgtggcgactgagaggaggtcccggtggccatcgagagagggcggcggcggtggagagggcggagatggcggcagagagggcggcggagatggacggcggcggtcgagagagtgatggagagggcggcggcgaggagggcggtggagagttcgaggcggcggtggggagggcggcggagatggcggcggtgaagaggtcgaggcggtggtggagaggcgaggtggcggtcgagaga

SEQ ID NO: 114 - DNA, 441 bp, Oryza sativa
atggcatggggcaagacagatcgagaaggctgcaagtggcggcgtcccacgctgattcccgtctaccgcttgcctgccgcgtgccgattcctgtcgtcggccaccccgtcgttgtgcggaaagaaaaacaaccaactgcagtgctgccggctcaagaaggagagtgagaagagccgggcgcggtcgctggagcggcaaagctttgccgctccgtctgccatgcctattgactacctctctctttctccggcgttggccgcctcacctacatcgtcgccttcgacagcctccccctccggcgctggccactccgccatcatcttagcgctgccagtggtgaaccatggtccgtggatagagattatggagtggagaggttgtggagagaaggggaggaagaaggaaagatttggatggaagaaaaaaacatataaagattga

SEQ ID NO: 115 - DNA, 423 bp, Oryza sativa
atgcaaagttctggaactgaagccccatcttcaagtgccgcaacccagtcgaagtcagctaaaggttcaaccagggacaagtcagaagacggagcggaagaagtcagacaagaagagaagaccgcccaacctatcttcttgctagcctcctcgaatctcggggacgagattcttgccgcctcccctcctctcctcttgggccggccaatcggcccaagccgcgccaagcccgagccgcctccctgccgcgcatgtgcgccgcgcgtgtgctgggcgcgcgcctggccgcgcggggcccacgcgtcaggccgccgtcgccttcttcctcctcccagccggcctcctctctctctccccgaaaacctagcttcgttcctccctcaaatccgcgcgaatcaagcatgggattcccaaattaaatag

SEQ ID NO: 116 - DNA, 387 bp, Oryza sativa
atggaggactcacctgggggtcggcaccgggctcggtggaggcggtggcctcgggctcggcgagggaggacgacggcggcgaaggaggagttggcggcggcctcgatggcggcggcgctgggctccgtagagggtgtcaccggggtcggtggcggctgcgccgagctcggtgaaggtggcggcaggctcggtgaaggcggtgtcgggcgtcggagaggaggatgcgacgacaacgaggaaggacgtcgccgggctcggtgggggtcggcggcggcggtccgaatggaggacgaaggaggagaggcgggcagcgacaacgaggaaggccgacgccggttggtgtggaggctcggtggcggcgacggcgggcttggcgagggaggatga

SEQ ID NO: 117 - DNA, 384 bp, Oryza sativa
  N_region (272)..(272): n = any nucleotide
  N_region (315)..(315): n = any nucleotide
atgggtggtggcgacgggtggagacagtgcggcccagcggcggcgatcgcatgcggcgggaggagcggcggccgcccggaggtgaggtccggccggccgcctccctgccgtccgggacgcagccgcctccacgctgccggatctggcggtggcgaggtccggccggccgcctccacgctgtccgggccaccgcccctcctacccctgccggttagcagccgcctccactccaccggatctggcggaggcgaggtccggccggtcgcccccangccatacgggccgccgccttgctgccgcgcgcccgcgcccctngccctcggccacgccacgctagcgccggagagtggagaagcggagtcggagggagacgcagaccggtag

SEQ ID NO: 118 - DNA, 381 bp, Oryza sativa
atggccgggacggcgcgagacgagctgacggcggtggcacgagacggcgacggcgtgaggggacggcggccggcagcgccagatctggcgcgtgggttcatcgccagagacggcgaggaagcggcggccagggcgtcggcgaggaaaccacgaccacggccatcctcacgccgcgccccgacgagccgcaccgttgtccacgtcgccgcagtgaaggatgagatggcgcaacaaaagctccggcatagggccattgtgcatgccattctgcattattggatgaggcctttcatcaccaccctgaaacccatcgtttccaactttttggacagcttgatcaggtgcagggttgctgtcaatgacaatatgaagtggccttga

SEQ ID NO: 119 - DNA, 323 bp, Oryza sativa
atggcggtcgaagaggttcaaaacctttccggatgctatgccaagaaagcaaaagcttcgcaaaatgtcagtcaatctccaagaggccgcaaagctgaagtgcgcaagctgctcaagatcggtgtgatcaaagaaattgaccaccctgaacggctggcgaatcctgtgctggttgcggcgaacccgaagaaggcgacgccgaagcgggagaaggtccggggcgacgacggcggcggaccggagctcggcggcgacggcggagagagaggggcgacagcgcgagctcgattccgacgggagagagagcggcgagtggcggaaac

SEQ ID NO: 120 - DNA, 304 bp, Oryza sativa
gtccttacaaaagatagctttgtctgcaaagagtatgagcccgaggcttcatcaagctgcctccgtctcggcgctgcctccgctgcggccccgacgagcgccaccgtccacagtgcgcctggtgagcggcggtgtggatttcgccgctgcagcggccgtagccgcaacctcgccaccaacgcttgctgcgctggctgccgagccggcgaacacgctctcgctgcccacttgggtagtccatgtctccagcgtcaccgagtggtactacctacctacctcttgctttcgcggctgcgaaagataa

SEQ ID NO: 121 - DNA, 1260 bp, Oryza sativa
atgcccgcggtctcctcctccggtgatgccgacgccggtgactggttgaaggggtcggccacgagcggcgtgacagggttgagagcggcggccgacgaggcagcgatggcagccgcgacgcgtgatcaggccgccgcgtcggggtcgccgccaacgacccccgccccatctccgcgccgccctcgccgttctcgagttgcgccacccagcgcccgcccacgacgccgcgccgtcctcgccatccttgagctccgccataccgcgccgccgccggggagggcaggagggaggcatgaggggaagagggcccagaggaagccggcggcggcgaggggtggaacttggcgccggcggcagctgccggggaggagctgggcagcgaccgtggggggcggagcagtgcgcggccgtcgggggcggagaagtgcgcggccggcgggatggagcttggcgcgggcggcagccgccgggggaggagctgggcggcggcgtcgccgtgcgggcgagctcgagggcgttgatggcgatgtcgtggctgtggttgagcttgacgcagccgccggcgtagctctggcagaagctgtagaggccgtcgaagacggggtagtcctcgccgacgttgaagtgcttgagcgcccggatctggtcctgctgggtcgtcggcgtggaagcggcagaggtcgtggtcgcgcgctagaagtagcacacccgccgcttcaccccgtcggcgccgggagttcccccgccgccggcggaggcgtccatggtggcgatggcggtggtcgcggcgccagaggatgggtccgcgccagccgtggcgaactgggcggagacggcgcggccggcgacgacgacgacgccgtcacggcccacctcacagagcatgcggcgggcggcggagcgagccgcgcggggagtccgggtcgaggcgggcggcacggctcagaggtggccggcgtcgaggtcggcctcggccagggagagaagacgcgagagttcgtcgtcgtcgtccgcaacggcggcacgcgagggaccgccaggcatctgcagcgcgtgctgggtggttgcgggtgtgtggggccgccgacgtcctcctctcccacctcgcccctccattgcctcgccgccgacaaggtctccctcaccgcccttgactcgctcccctccccttcccccgctgttctcatccccatccccgtcgccgccaccgcccacctcgccgtcgccccctggcggccgcgcgcgccctgcagcgagtga

SEQ ID NO: 122 - DNA, 1149 bp, Oryza sativa
  N_region (640)..(640): n = any nucleotide
  N_region (642)..(642): n = any nucleotide
  N_region (688)..(688): n = any nucleotide
  N_region (697)..(697): n = any nucleotide
atgggccgacggtccgaaggagtcggcccacagccgagtggcgcggcctggtccggcctcccgagtgactcggggccgtccggcctcccgagtgactcggggccgactgggccggaccgagccgagtgggccaaggaggggtgggaggccgagtggcccgaggccaactgggccgagcgggaaagaggccgagtggccgagtggagaggagggggccgatgggccgcggcaggccgcgacctacgcgggcggctggtccggtggaccgtgtccaccgcgcgggcgctagggcggggcccgcccggtagcggcacagtctacgcggaccgagcgcacggaggggaaaagagggattttgccggctggcgcttgcgtggcgcctgcgtggcggccacgtgggccggccgggcgaatgaggggagaaggcgccgggcgacggcggcgacggcagaggggctcgggcgacacggtgcgaggccggagaggggaggggagcgcaccgggatggagaggagagatagagggaggggcggaggagagggagtcggccacggcggcgcccgggagagagttctacatgctgccggcaagcttaaaccgaggagaaagagggagacgggttggaggaggcgggcgggcnanacggcgcccggagctccttcgggcgccctcggctgcgacggcggcnacgggggtngcggcggcagcgggaagggggcgctaggtcagttcggccggggggagagagaggtggtgcggcagagaggcggtggagcgcggcgaggggaccgcgctggcgctccggcgctagcggccaagcgcggcagcggtgacgccggccaggaggcgcgcgctcggctcctaggcggcacgcgggcgcgcgagcgtcagggccgggaacggcggcaggacggaacggcgccgacgggaaccgttggggagaagagagagagagaaggacgggcaagggggactgggccgaggcggcccgagaagggagagagagagaaaaaggaggccgaagggggaaaaggtggccgcgcgggcggctgggccgagggggggaacgacttgggccgaaaggggaccggcccgagggggagagggaaaaggccgggaagaagtcgccccgagagcagagggaggtaa

SEQ ID NO: 123 - DNA, 1078 bp, Oryza sativa
  N_region (938)..(938): n = any nucleotide
ggtggttttcgctgacgtggcgtacatatggcagcctagtcatcctctccctctaacatctctctcctcctttcttcttctcggtgctagcgacggcggcgttcggcggcaagggcgcggcggcgagggcccgatgacgagggcgttgcttgcagctgctgggcccgacgacgacagcgttggctcccggacccgcctcctcagtcgtcgtcctcctcgtcgaccaccccgccatcgccgccaacatctcggccccaccgcgcgccgtccgctcggccccgtcgtgcgccgtctgctcgcgtctgcgccggaggatttcgcccccgccgccgatggtgctgggctggtagcacgctccggactgcatgatctgggtgcagtcggcgctgcgccaacacgcgtagtcaattgccttctgcatcgccgccggactctgaggatgcaggtctgggttggggcctcacctgagccagtggacatggccaacaagagcagcagcgcagcagcagcggaatcaccatggtggcagcagcagcaagagctcgagccctctcccaacgccggaccccgtcgcctcctccaccaccggggggacgtgccgcgcagtgctccccctcgccgtccatggccgccgggagagagagggggccgacaagcctcttccaacgtgctgctcacgtcgtcgctgcgcgccaaggtgggcgatttcgggttcgcgagatgggcgtcgggaagagtgacgccatcgtcgtcgtcgacggcgtcaagacgaagcgtcagctacgatacgctcgtggggttgtttcgtccgccggcgagcggaggcgatgaggcggcgtccacggcggccggcggcgggagcctgcggtcctgtactgccgaagcgccgccgccgtccgagaagggagaggagagaggcggcgtagcgaaaggggggnaaggggacacagacgacgacgatgacatggagatggcgcggagctggaggtggtcgcctgcacgccgccgctgccgatccggtggggaagagaaaagggggagagaagagagagaagggagagagagggaggaggaataa

SEQ ID NO: 124 - DNA, 1014 bp, Oryza sativa
  N_region (346)..(346): n = any nucleotide
  N_region (367)..(367): n = any nucleotide
  N_region (369)..(369): n = any nucleotide
  N_region (439)..(439): n = any nucleotide
  N_region (502)..(502): n = any nucleotide
atgccgtcgcttgggatcgcgccgctgctcgacgcctacttccgccgccgcttcgccgcggcgggcctcgtccaggcgtccgttccgctggacggcggcgccacgacggtgcaatgctggcgcttcccgccgggggcgagcgaggagctccccgtgctcgtcctcctccacggcttcgggccaccggcgacgtggcagtggcggcggcaggtgggcccgctctcccgccggttccgcctcgtcgtgcctgacctcctcttcttcggcggctccggcacagcggccgccgacgcgcgctcggaggcgcaccaggccgaggcggtggcgaagctcgtcgccgcggtcntgggggcggcggcggcgcgcntntccgtggcgggcaccagctacggcggcttcgtggcgtaccacgtggcgaggctgcttggccccgcggccntggcgcgggtggtgatcgcgagctccgacctgctcaaggccgacgccgacgaccgggccctgntccgccgtggcggcgccgagcgcgtcgaggacgtgatgctcccgcgcacgccggagcggatgcgccggctgctcggcctcgcctaccaccgtccccgccgcttcagcttcaccccggccttcgtgctccgggacctcgcccagttgacaagcacagaggcactcacactgtgtgaatgtaattgccatctttgccaggctaataatcttccaatcaagtatctctacaccgacaaaatagaagaaaagaaagagctgatcaaggggataacactgggggacaaagaaaaattccagctcactccacttcctcaggaagttcttgtattatggggagagcatgatcagatatttcccatagagaaggcatttgaagtagcaaggcaacttggtgcaaatgctaggttggaaatcataaagaacaccggccatatgccacaggaggaggacccgaaacggttcaatgaggccctcctgaacttcttgttaccagctccaaattcgtcgttgtga

SEQ ID NO: 125 - DNA, 906 bp, Oryza sativa
atgggagggtttgtcaagacccagaagacccatgcctacttcaagcgattccaagtcaagttcaagagacggaggcagggcaagactgactacagggccaggattaggctcaccaaccaagataagaacaagtacaacacaccgaagtaccgcttcgttacaaacaaagatatcacagctcaaattgtctatgctaccattgcgggtgatatcgtgatggctgctgcctactcccatgagctgcctcgttatggtcttgaagttggtctcaccaactatgcggcagcttactgcactggcttgcttctggctcgtcgtgtgctcacgctccgtggtttggaccaggagtacgagggcaatgttgaggccactggggaggactactatgttgaaccagctgatgaaaggaggcctttccgtgctctcttggatgttggcctcattaggacaaccactggaaaccgtgtctttggtgccctcaagggagctttggatggtggtcttgacattcctcacagtgacaagaggtttgctgggttcaagaaggacgagaagcagcttgattctgatattcaccgcaagtacatctacggtgggcacgtggctgactacatgaggtctatggctgaggaggaacctgagaaattccaagcccactttagtgagtacctcaagaagggaattgacgctgatggcatggaatcactgtacaagaaggtccatgctgccatccgcgccgatcctaccatggccaaatcgaccaagaaggaaccggctacccacaagagatacaacctcaagaagctgacctacgagcagaggaaggccagtctcgtcgaaagattgaatgctctcaactcctccgctggtgctgatgatgatgacgaggaagaggatgacgagtga

SEQ ID NO: 126 - DNA, 834 bp, Oryza sativa
  N_region (33)..(33): n = any nucleotide
  N_region (510)..(510): n = any nucleotide
atgcagggaggcggcggcggggatagctccggnggcggcggcggcgaggcgccgcggccgagcaggtacgagtcgcagaagcggcgggactggcacacgttcgggcagtacctgcgcaaccaccggccgccgctggagctgtcgcggtgcagcggcgcgcacgtgctggagttcctccggtacctggaccagttcgggaagacgaaggtgcacgccgcggggtgccccttcttcggccacccctcgccgccggcgccgtgcccgtgcccgctccgccaggcgtggggcagcctcgacgcgctcgtcggccgcctccgcgccgccttcgaggagcacggcggccgccccgaggccaaccccttcggcgcccgcgccgtccgcctctacctccgcgaggtccgcgacagccaggccaaggcccgcggcatcgcctacgagaagaagcgccgcaagcgcccgcccacctcctcgtcttcgtctcaggccgccgccgccgccgcggcggcaacntccccggcgagcccagccgctagcccgacgccgcaaccgccaccgccgacggagagatcagccgacgtgcggccgatgccaccggagggccacttcttcatcccgcacccacacttcatgcacggacacttcctcgtaccgggcggcgacgccgaccaccaccaccaggtctccaacgccggcaatggcggcaacaccaacaccaacaccaacaccaacaccggcggcggcggcggcaacggcgacgagatggcggtggcgatggcggcggtggcggaggcgcacgcggcggggtgcatgctgccgctgtccgtgtttaactag

SEQ ID NO: 127 - DNA, 774 bp, Oryza sativa
atgccgttgctggcccggaagccgcggaacggcgttccgacgacgcccgaccacaacgaagccacggccgagggccgacaagaccttgactttggaaaagcggctccctggaggtggaatttcggtgcgagattggggaaaagaggtgtaggacggggtggagctcggcgcggcgatgccgacggtggcgacggcacggcacggcggtggctgaagcggcgagaagcggcggctggagccggtggcggcggcggagagaggtggtgcgcgtggctgcggcgcttcgaaggtggagaggggaaatggagcggtggacggggcgcgcacggcggctgcggtgtcggggagggtgacggcgcagtgcggggtgaacgggagcggtggcgcagcgtggctggagttcggcggggagcggcggcgcgtgggctccggggaggatgtggtttcgggcacggggaagctcggggaggagggggaaacggaataggagagcacgagggtgctttatattgggctcggggatggagatcgtggccgggagaggcgggaacggccggcaaagttgggaggcatcgttggaagatggggcatgaaacggcgccgaaaattggggaaaagtgggggaagaggtggaggaggtggtggggaaccgattttactcggtttgggcgcgagggcgcgagcgggagggcgccggatttggcaggacgtgggcggcaaccgccggccatggcggcttcggcctgggaagccgaaggtaggaggagggcctga

SEQ ID NO: 128 - DNA, 762 bp, Oryza sativa
  N_region (582)..(582): n = any nucleotide
atgccggagctggaggtgtgtagccctgcgtcgtcgggtggggcgtcgccgccggagtcgccggtggaggggaggaggggaggaggaggaggggagaagagggggagatcaggggatggcgggaggcacccgtcgtaccgcggcgtgcggatgcgggcgtgggggaagtgggtgtcggagatcagggagccccggaagaagtcgcgcatctggctcggcacgttcccgacgccggagatggccgcgcgcgcccacgacgccgccgcactcgtcgtcaagggccccgccgccgtcctcaacttcccggacatggccgcctcgctcccgcgcccggcctccgcctccccgcgcgacgtccaggccgccgccgcccgcgccgccgccatggagcccccccagccgccgccgtcgtcgctcaccgtgcaggccgactccgccgccgccgcattcctgacgcccaagaacggcggtttcagcggcgccggcgcggcggacgacgagctcgaggcgatcgtcgagctgccgcggcttcgacgagctggaagccgccgagctcgtgtttcggcgccgcgtttccagganacggcggcggaaaaacccgttgtgtgcgacccgttctggaatcgacggcggctaagcggcggccgccgcggcggcggcggcggccgcggcgcacgacgacctgttcggcctcgacgccgaccaccatggatgggcccagtcggttggtgccctcttatggaacctgtgattcgatcataa

SEQ ID NO: 129 - DNA, 696 bp, Oryza sativa
atggccgccggaggaggaggagatgcagccatgcggggaggtgtggcggtggcagccggaggaggaggacgtccgccgtgcgctgctccacccggtagtagcggcggtgcgggggccctgggagtcgccgaggatgccgaggtcgacgttgacgtcgtccgcgtccatggccatggcgtccccgtccgcatccggcgtgcgccacagaagcggcggcatggggagcggcgcctcagctgctgcagcggcggcgtcaatgggggaaggggaagcggaagctcctcgctccggtgggctgccgctgacgagctcggtggtggtgaaacgcggcggatcgtgcgccatcctggcggctgggggcccttctccgacctctgctccagaccgccgccttcgtcctcttcacccgtcgccggctatcgtcctccttgctccggtgggcgatcgctgacaagctcggtggtggaggcaggttgcggtggagggcggtcgccgctccctctcccgctggccaccgtcggctgtgcacctctccctccgtccgtcgccatcaagcccccacccacggcgctcggccatcgccggcctccctgcgtcctccctccctgcccgcctcgccggtctttgcgcgttgctccctcctctcctatcgccggccgcacgccgccgcatgccgttgtcttccgtggcgcctag

SEQ ID NO: 130 - DNA, 681 bp, Oryza sativa
  N_region (34)..(34): n = any nucleotide
  N_region (39)..(39): n = any nucleotide
  N_region (44)..(44): n = any nucleotide
  N_region (246)..(246): n = any nucleotide
atgagcccgagaaggcatggagggattggcgatngcgangccgngagggcagcggctagggaggggatggagtcacgggcgaagagagagagagagaggggcgagcggcgaaggtggaggacggagattcgtacgggagaagcccgtgaggaggacagccgcggcggtggggaagaagaaggacggccgcgggctgaggtcgatgttggttccggcggcggagaaggggccaaagtcggctccggncggctgatccgagtgggagaagcacgatctgggaagaaggaggtggggaagagcggggcgcggcggtggggaagaaggaggacggccgcggcggctccggctagggcgcggcgtagcggcagcagcggggagaaggaggagcgagcgaggaggatggctgcggcggcagtggggagtcgctcctgcgaggacgctgggaggagtgagcgaggaagagaagcgcgcggtctccgcggctgcgggtggaggagcgatgtcttcgcgcgtggaatcctcggctgtgaaatagtgcggtggaggaagagaagcgcgcggatggacgcgtttagtccggatgacttggcatggggaacaggagcagagtacggggaaggggcagcaggtggagcagatgccggatcagcttggcctccctggaggcggcaacctcgatga

SEQ ID NO: 131 - DNA, 648 bp, Oryza sativa
aggatggcatccggcgaccggcactcggcggagagggcggccgacgagagaggagcggcggcgcgtgccgcgccgacggagaggaggccgctcggagcgaggcgtcgcgggagaagggcagcacgcggcgagctcgtcgtggacaccatgctggtgctcaagctcaggctcaactccatcaagacgctgacgctcctcgtgccactcagcatattcgccgatgtggttgacctcggcgccgtgggcgtcattctcaggaaggacatgtccgtctggctcaccaagccaccactcgtcttcgcctgcggtggcctgagcgcgatcctgtacagcatcggcgtgtctgtgtacgctttcgagggattcggcatggtccatccgcttgaggcggaggccgccaacaagaagaagttgggcgcaccacgctcgggctatccatggggccatcccgtctccgcccccctgccccatctccgcccccctgcggaggaagagatgcgcagcgggcggcggccagcgaccgtctcggccccactcatcggccgccgcatttttccctctcgacgcgcgctcgccggccggcgaggaaggatggccgggagggagagaggaggcgccggtccatcctctcccgtcgtccgtggatag

SEQ ID NO: 132 - DNA, 645 bp, Oryza sativa
  N_region (52)..(52): n = any nucleotide
  N_region (506)..(506): n = any nucleotide
atggctagaggcggcggcgtgcatgaccaccggcggcgaccggcggcggcgnacggcgcgaaggcggcggcgcacagccggagcagcggcgcggccaaaagcaatggcgcacgcgggaaggggaaggaaaggaagggggagggattcctcaccggaggggacggcggcgaccggcggcagaaaacgagggaggcggcgaagtccggcgatgccgagcgggggcagcacgtgccgtattccgtgcaaacggtgcaagcggtggcgctggcggcgagcggcgcgagctcggtaggaagcacgggagggagcggcgagagcggaaagggaaagaggaggctcggggcagcgatttataggtgcgggatgggtggaaacggccgggaaagcctcctttttgacctgcgacgtggggtggagagagagataatggggggattcaaaatgcgaatcccgccccttgcgagcgcgcgcgcgggccgggagacgcgggggagacggcggcgacntggggaggacgcggggacggcgcggcttgggcccggcaggagcggaggaggtgggtgcggcggtttcggcggcggttgccgacctggggcgggcggccggaggaaggggacgacctcgacaggttgcttcctcctctga

SEQ ID NO: 133 - DNA, 618 bp, Oryza sativa
atggcggcgtgcatcctggcgctggtcctcgtcgtcggcttcatcgcgctcgtcgtctacctcgcgctccgcccctccaagccgtccttctacctgcaggacctccagctccgctccgtcgacctcggcgacccctccctctccgccaccgcgcaggtcaccctcgcctcccgcaaccccaatgaccacgtcggcgtccactaccgccgcctcgacgtcttcgtcacctaccgcgacgaacccgtcacggtgcccgtctccctcccgccgacctaccagggccaccgcgacgtcaccatctggtcgcccgtgctctccggcgagtccgtccccgtggcgggcttcgtcgccgacgcgctcaggcaggacgtcgccgccgggtacgtcgcgctgcaggtgaaggtcgacggccgcgtcaagtggaaggtcggcagctgggtctccggcagctaccacctctttgtcagctgccccgccatgctcgcctccgccggaccaggcggcgtcggccccatgcctctcggcggcgcctccgccgccgtcgtgaacggcaccggcgccggcgccgtcgcgtcgctcaggttcacgcagccgacagggtgcagcgtcgaggtgtga

SEQ ID NO: 134 - DNA, 591 bp, Oryza sativa
atgatcgtccaccgcgacgttaagtccaacaacatcctcctcggcgacaacttcgaggcgcacgtcgccgacttcggcctcgccaagttcctccgctccggcggcggcgccaccgcctcgtcggagtgcatgtccgccgtcgccggctcgtacggctacatcgccccagagtatgcttacactctaagggtggacgagaagagcgatgtctacagctatggagtggtcctcctggagctcatcacagggcggcggcccgtgggggatttcggggaaggggtggacatcgtgcagtggacgaagagggtcaccgatggccggcgggaaagcgtgcaccggatcatcgatcgccggattagcacggtgcctatggacgaggtggcgcacatcttcttcgtctccatgctgtgcgtccaggagaacagcgtggagcggccgacgatgagggaggtggtgcagatgctgtccgagttcccccgccacgggtcggaccagccgtcaccgtcgtcgtcggcaccggagacgggggaggagagcagccctgagaaggagcccaactgctacaagctgttcccggacttgctgacctaa

SEQ ID NO: 135 - DNA, 537 bp, Oryza sativa
  N_region (336)..(336): n = any nucleotide
atggagaagaagtacaagggtgtgcggcggcggaagtgggggaagtgggtgtcggagatccggctgcccaatagccgcgaccgcatctggctgggctcctacgactcgccggagaaagcggcgcgggcgttcgacgccgccttcgtcacgctccgcggccacggcgccgccggcgccgacctcaactttcccggactcgccgccgtccccgcagcagcgacccgcggcaggttcaggccgccgcgctgtttcccaagcaaacgggcccagttaacgccgcagcaagcggccgcggcgctcatgtcgccgccctcgctgtcgccgccgccgggcatngactggcgcccggtcatggcgcacccgccgccgctgtactcgccgcccggctggggcggcggccatgcctacgacttcttgcagccgccgccgccgtcgccgccgttgccgtcgtgcgacgacgacatggtcgacgtcgtagatgagagcagcgcttcgctttggagctttgacacgcgagactcctacttccgatactaa

SEQ ID NO: 136 - DNA, 504 bp, Oryza sativa
  N_region (217)..(217): n = any nucleotide
atggagcatggtcgacaggttgccggcggcggggtgaacaaggctgctcagcacggcgctctcgatgcgatgcctgttggcggcaccgcctgctcatcgatccgctccaccggccgccatcgcgacggcggggaggagctcggcggccttgaagaggaggagggcgagccagtctctggggtcggcgacggcgacgactggagggagagaggggagnaggaggagggcgaccgggcgctgacctcgccgggcaagccgccgccgtcgctgcccgaggccagatccggcaagcccaggccggatctgggccaccccaccgccagtccgacggcgaccctcgatgccaccccgcgcgcccgtcgccgtcggccaccccgcgcgcccgtcgccgtcggccacctcgcgcggcgctcgccgttcgccaccgtgcctcgttcgaccgagagagagagggggagatcggaagaggaggagacggtgggtggaggagacgagaaaatgtga

SEQ ID NO: 137 - DNA, 462 bp, Oryza sativa
  N_region (349)..(349): n = any nucleotide
  N_region (372)..(372): n = any nucleotide
  N_region (382)..(383): n = any nucleotide
aaggcgacggcaagcggcggcgctagcaacaagcggcgcgagctcggtaggaggcacgggaggggacgggaaatgggtgaacgagagaggggactcggggaagggtttttatggggcgagggaggggcggacgtggccggggatggcccctatttggccggcgatgtggggagtggagggagagtgagagagcgcgcgcgcgggccgggagatgcgggggaagaggcggcgacgtggggcgggtggctggaggaaggggacgacctgacaggtgggccccacctgtcagcgtcctgggagaagggggaaggagaacgggccgggccccaacgaaggggaggccgagcgngggccgagcgggtggactgggcngagccgcccnncaagcaggaaaaaaaggaggaaaaagaaaagaaaaagaggagaaggattttcctgggattaaatattgcactttggtga

SEQ ID NO: 138 - DNA, 450 bp, Oryza sativa
atggcgaagcccttcaccgcccggtcaagccgcaccaaatacgccacgcttggtggaggcagggtggcggcggcgggatctcgcagccaggcggcgtccccacgggcggcgcgtggtgaggcggcggatccggtgggtctttggccggatctggcctcccctccaccagatccggcggcccggcgtgcggcggcgggaggggaggcagcagcgacgtgcggcggcggcgggaagggaggtggaggcggcagcggcgtgcgggggcggcgggagaagaggcggaggcggccgcgatctcccctctgccagatccggctgcccgccgtgcggcggtgggaggggaggcagcggccggcgtgcggcgacggcgggaggggaggcggcaacggcggccacgacctctgccagatctggccgcccggcatgcagcgacgggacaggaggctgtag

SEQ ID NO: 139 - DNA, 399 bp, Oryza sativa
atgaagcaaaagatggtgatcaaggtgagcatgccgtgcgggaagtgccggtccaaggccatggcgctggtggcgggggcgaccggcgtgagctcggtggaggtcaccggcgacggcaaggaccggctgcaggtggtcggcgacggcgtcgacccggtctgcgtcgtcaaccgcctccgcaagaagatcggccacgcggagatcgtgcaggtggaggaggtgaaggagaagaagccggatctgcccaagaagccggatccgcccaagccggagccgcccaagccgccggtggtgtgctaccctcctactccctactaccaccaccactacggcgggccgccgccgccggtggtcttctgcgaccagccgagcccgaatggcacatgttccatcatgtaa

SEQ ID NO: 140 - DNA, 375 bp, Oryza sativa
atgggaggtgcggcgggggtggacggcgtggaggcggcaggtgggcctccgccagatccgatggcgtggaggcagctgtggcccggcgggggtgggaggggcggccggccgggcgcggcgccctcccgtctgccagatctggcggcgggaagggaggcggcgcgccccgacggcgggacgagaggcagcgacgccctccctccatctggagggggggcatgcggcggcggtccagcggcaggaggtggtggtggcccgacggcggcgctggtgactggtagtggtggcgccctccctccgtcggatctggaggtggtgcatgcggcagtggtccggcagcaggaggtggtggtgacccggcggcggcagtggtga

SEQ ID NO: 141 - DNA, 354 bp, Oryza sativa
  N_region (211)..(211): n = any nucleotide
  N_region (238)..(238): n = any nucleotide
  N_region (254)..(254): n = any nucleotide
  N_region (256)..(256): n = any nucleotide
  N_region (260)..(261): n = any nucleotide
  N_region (287)..(287): n = any nucleotide
  N_region (300)..(300): n = any nucleotide
  N_region (302)..(302): n = any nucleotide
  N_region (308)..(308): n = any nucleotide
atggccggcgacgagagggacgacggcggcggctcggtcggtcggcgacggcgaactacggcggtcggcggcgaaagaggaggtgcggccgggcttcctcacctccgtgcgcacctaacggcggcgacggcaagcggcggcgacggcggagacggtggcgcggcgcagccgaagacggccggcggcggcggcggactaaacggcggcggcncggcaactaggaggcacgggaaaaccngggaaaaggggccaancnaaannggccaacaaggggatgctatttatanccttggattgaanantcggantccaacgagaggaatcgactcgggaaaatccaaactcggtttttag

SEQ ID NO: 142 - DNA, 342 bp, Oryza sativa
atggtacgcctcgtttgtctctcccaccatttttgctcgatcgccggctgcgtgctgaccctctcgcttgcttgctgtctcaggccccgaagaaggacaaggccccgcccgccgtcgtccaagcccgccaagtccggcggtggcaagcagaagaagaagaagtggagcaagggaaagcaaaaggagaaggtgaacaactcggtgctgttcgaccaggccacctacgacaagctgctctccgaggtgcccaagtacaagcagatcaccccctccgtcctctccgagcgcctcaggattaatgggtccctggctaggagggctatgaaaggatctgatggataa

SEQ ID NO: 143 - DNA, 3309 bp, Oryza sativa
atgggggaggcggcggcggtggtggcggtgaacggggagaggtacgaggcggtgggggtggacccgtcgatgacgctgctcgagttcctccgcacgcggacgccattcagaggccccaagctcggctgcggcgaagggaggatgcggggcgtgcgcggtggtggtgtccaagtacgacgccgccgccgacgaggtgacgtcgttctcggcgagctcgtgcctgacgctgctgggcagcctccaccactgcgcggtgaccaccagcgagggcatcggcaactccagggatggcttccaccccgtgcagcgccgcctcgccggcttccacgcctcccagtgcggcttctgcaccccgggcatccgccggggttctccaggctcaccgccgccgacgccgagcgggccgtctccggcaacctctgccgctgcaccggctaccggcccatcctcgacgcctgcaagagcttcgccgccgacgtcgacctcgaggatctgggtctcaactccttctggaagaaaggcgagcgcgctgacatcaccaagcttccggcctactcctgtactgccgatgttgccaccttcccggagttcctcaagtccgagattagaacaccggctccggggtgtacaaggatcaggacctccatgacaagtacatcaacatctcgcagattcctgagctctcggccatcaacagaagcagcaatggcatcgagatcggagcagccgtgtctatctccaaagccatcgagatactacgaagattgcttatcacctgggcaaggtggcctcaccgttcgtccggaacacggccaccataggaggcaacatcatcatggcgcagaggatgtcgttcccgtcagacatcgcaactgttcttctcgctgcaggatcaactgtcaccatccagcagctcactctggaggaattcttgaagcagcctccatgtgattccaggacattgctaatcagcatctccatcccatttgagacatttcgtgcggctcctcgtccatttggcaatgctgtctcatatcgcttggcattcggcgcttttgggtctgaacatgccatcagagctaggcaccacacatcctgaatacagagtcagtctagccgtcagttacctgttcagtctgatgaatacaaaccagtcggaaaaccaatcaagaaagtcggggcagagctccaagcttctgggggaggcagtgtatgttgatgacatccctgctccaaaggattgcctctatggagcatttatctacagcacacaccctcacgctcacataaaaggtgtaaactttagatcatctttggcttcacagaaggttatcacagttatcactgcaaaggacattccgaccggtggagaaaatgttggatcctgcttcccaatgttaggagatgaagcactttttgctgatccagttgctgaattcgctggtcaaaatatcggcgttgtggcagcaaggcaagctgtgattgaatataatactgaaaatcttcagccaccaattctaacagtagaagacgctgtccagcataacagctacttccaagttcccccatttttacaacctaagccaattggtgacttcaaccaagccatgtctgaagccgatcacaagatcatagatggggagcaaactgctttagctttccctgatgaagataactgtataaccgtctactgctcagcgcaaatgcctgaggttactcaagatattgttgcaaggtgcctcggcgttccatttcataatgtccgtattatcacgagaagagttggaggaggtttcggtggaaaggcaatgaaagcaacacatgttgcaactgcttgcgctgtggcagcattcaagctgcggcgcccagttcgaatgtacctcgatcgcaagacggacatgataatggcgggagggcggcatccgatgaaggccaagtactccgtcgggttcaagtccgacggcaagatcacggccctgcacctcgatctcaagatcaacgccgggatatcaccggaattcagcccggcgatcccgtacgccattgtcggggccctgaagaagtacagctggggcgctctcgcgttcgacatcaaggtctgcaagacgaacgtctcgtccaagtcggccatgcgtgctccgggcgacgcgcagggctcgttcatcgccgaggccatcgtcgagcacgttgcgtccacgctctccgtggccacgaacaccatcaggaggaagaacctccatgacttggagagcctcaaggtgttcttcggggacagcgccgccggcgaggcctcgacgtcgtcgtacagcctcgtcatcatcttcgacaggctggcctcgacgccggagtaccagcggagggccgccatggtggagcaattcaacggcagcagcaggtggaagaagcgtggcatttcttgcgtgccgatcacctactcggtgacgctccggccgtctccggggaaggtctccatcttgaacgacggctccatcgccgtcgaggtcggcggcgtcgagatcgggcagggcctgtggaccaaggtgaagcagatgaccgccttcgcgctgggccagctgtgcgatgacggcggcgagggcctcctcgacaatgtccgtgttatccaggctgaaaccctgagcatgatccagggaagatgaaccgccggaagcacgacctccgagaccagctgcgaggctgttcggaagtcgtgcgccgcgctcgtcgagcggctcaagcccatcaaggagaaggctggcaccctaccatggaaatcctttattgcgcaggtggaagtcgatgtgctgacaggggcaaccaccatcctgaggagcgacctcgtgtatgactgtgggcagagcctgaatcctgctgtcgacttaggccagcaggtggaaggcgcgttcgtgcaaggtgtgggcttcttcacgaacgaggagtacgcgaccaacgccgatgggctggtcatccacgacggcacatggacgtacaagatccccaccgtagacaccatccccaagcagttcaacgtcgagctcatcaacaccgctcgccatcacagccgcgtcctctcctcaaaaggcgtccggtgagccgccgctgctgctggcgtcgtccgtgcactgcgcgatgagggaggcgatcagggcggcgcggagagagttcgccgctgtcggcggcggcaccggcggctcagatcaggtgacgtcgttccagatggacgtgccggcgacgatgccggccgtcaaggagctctgcggcctcgacgtcgtggagaggtatctcgagagcttttctgcaaccaccgcctag

SEQ ID NO: 144 - DNA, 2916 bp, Oryza sativa
atgcccaacaacgcagccatcggaagcatcgtcgccgccgtcggcgtcgtcgccgtggtctgcgcgatcgccgcggtcacgagctccaagaaggatcgcaatggcgagctcaccgccaacgtcaggctctccaccgtgtgctccgtgacgcggtaccctggcaggtgcgagcagagcctcggccccgtcgtgaacgacaccatcgaccccgagagcgtcctccgcgccgcgctgcaggtggcgctcgaagaggtcaccagcgcgttcaaccgctccatggacgtcggcaaggacgacgacgccaagatcaccaagagcgccatcgagatgtgcaagaagctcctcgacgacgccatcgaagatctcaggggcatggcgagcctcaaacccgaggaggtcacgaagcacgtcaacgacctccggtgttggctgtccagcgtcatgacgtacatctacacctgcgccgacggcttcgacaagccggagctgaaggaggccatggacaagctcctgcagaactccaccgagctgagcagcaacgcgctcgccatcatcaccagcctcggcgaactcatgccggctgccaagtcgaacggatccaccggcgcgcaccgccggcttctcgggttgcagggcagtgaggcggcagagggggtaagcttgcgcgagcttcttgccgtccacgacaaggtacaggagctcacagatgtgaaagacgtcagccgccatctcttgtccgagacgctggacgcgatcaccgagatgtcccacgacgcaggccgccgccttcttggcgtcacgctcagcgaagccacagacgacagcgacgacagtggcctccccggccgccggctgctgagtatgtctttccacgacgccgaccacggggtgcacggcggcgatcatcggcggctgagtatgtctttccacgatgctgaccacgaggtgcacggcggcgagcatcggcgtttgagtatgtctttgaacgacgccgaccccgaggagcaaggcggcgagcatcggcgtctgagtatgtctttaaacgacgccgaccccgaggtgcaaggcggcgagcatcggcggctgagtatatctttgaacgacgccgaccccgaggtgcacggcgacgagcatcggcggctgagtatgtctttgaacgacgccgacaccgaggtgcacggcggcgagcatcggcagctgagcatgtctttgaacgacgccgacaccgaggtgcacggcggcgagcatcggcggctgagtatgtctttgaacgaggccggcaccgaacagcccagcggcgagcatcggcagctgagtgtgtcttccagtgacgctggctcctccacggactccacctccgactccgatacgcccggcggcgaccccaaggagcccgcggccgttgatgactccaaaaacgccgtccccggggagcccgccgccgccgccgccgccgagcatcggcagctgggcacgcttttcaacgctatccacaacatgacgagcaaggccgacaccgtcaagcgccggctgctgagcatgccacaagacggctccgacgccaccgagcacgagggcggcgggcgcgcgcttctgtccatccagctccagagcatcgccgacatgtccgccgagatgaaccgccacctcctcgcggcggagctccccgacgagctcgccggcaagcggcagctcctgtccacgacgctcagggagctcaacgaagcaaccacggcggcgaagggccagctcgacaagatcgagaacggcacggtgcactccgacgccatcccggagcgaattctcggagatgagtacagggccaccccccaccaccggctgctcaccacggacgtcgtcggcacgatcgaagacatcgaacacgagcgccacaaccagcccaagcccggcgagttcccgtcgtgggtgtccgcccaccagcggcgtctcctgcaggccggcacgcagaagcccgacaaggtggtcgccaaggacgggagcggcgacttcaagacgatcaccgaggccgtcaacgccgtgcccaagaactccccgacccgcttcgtcatctacgtgaaggccggcgagtacaacgagtacgtcaccatccccagctcgttgcccaacatcttcatgtacggcgacggcccgaccaagacgcgcgtcctcggcaacaagagcaacaaggacggcgtcgccaccatggccacccgcaccttctcggcggaggggaatggattcgtgtgcaagtcgatggggttcgtgaacacggcggggccggaggggcaccaggcggtggcgctgcacgtgcagggggacatgtcggtgttcttcaactgcaagttcgaggggtaccaggacacgctgtacgtgcacgccaacaggcagttcttccggaactgcgaggtgacggggaccatcgactacatcttcggcaactcggcggcggtgttccagagctgcctcatgacggtgcggaagccgatggacaaccaggcgaacatggtgacggcgcacgggcgcaccgaccccaacatgcccaccggcatcgtgctccaggattgccgcatcgtgccggagcaggcgctcttccccgtccgcctccagatcgccagctacctcggccggccatggaaggagtacgcgaggacggtggtgatggagagcgtcatcggcgacttcatcaagccggaggggtggtcggagtggatgggcgacgtggggctcaagacgctctactacgccgagtacgccaacaccgggccaggcgccggcacaagcaagagggtgacgtggccgggataccgcgtcatcggccaggccgaggccacgcagttcaccgccggcgtcttcatcgacggcttgacgtggctcaagaacaccgccacgcccaacgtcatgggcttcgtcaaatga

SEQ ID NO: 145 - DNA, 2153 bp, Oryza sativa
  N_region (760)..(760): n = any nucleotide
atgggcgaagtggccaccaccaccctgctgctgacgagccatgaagcaaaaccggccaaggcaccgtctatccacgacgccatcgaggtgtacatcggcgccaccggcgcccgccaacttctcaaggccatgctgctggccttcgcttgggctttcgacgcgcagcaggtgttcatgtccgtgttcacggacgcggagccgccatggcactgcaccggcgtcgtcgatgcggttgaggcggcggcgggcgactccggctcgtcctgctcttcgccggccacttcggcttcgccgtgcgcgctcccgctcggcacgtgggagtgggaccgcctggccaagacgtcggtggtgtcggactgggcgctcaactgcagcggcggcggcccagcgctcgtctccctcccggcgtcgtcgttcttcacaggaaacctcgatggccgaagcggccaccaccaccccgctgctgacgagccatgaagcagagccgtccatcgacgacgtcatcgaggcgtacatcggcgccaccggcgcccgccagcttctcaaggccatgctgctggccttcgcttgggctttcgacgcgcagcaggtgttcatgtccgtgttcacggacgcggagccgccatggcactgcaccggcgtcgtcgacgcggctgcggcggcggcggccgactccggctcgtcctgctcgccgccggccgcttccgcttcgccgtgcgcgctcccgcctggcacgtgggattgggaccgcccggccganacgtcggtggtgtcggactgggcactcaactgcggcccggcgctcgtctccctcccggcgtcgtcgttcttcgccggcaacctcgccggcggcttcctactcgcaacgctcgccgacactcacctgggccgcaggaagatgctcctcctgtcactggtgaccatgtccgtcgccgccgcgctcacggcgttctcgccgaacgtgtgggtgtactccgccctgcggttcgtgtccgggttcggcaggtccatggtgggcacgtcagcgatggtcctgtccacggagctcgacgggaagcggtggcgcaacacggtgagcgccgcgggattcgtcttcttctccgtcgggttcgtgtcgctcccggcgctcgcgtacacgttccgcgaggcgtcgtggcggaacatgtacgtgtggacgtcgctcccgtccctctgctacgccgtcctgctctacctgctcgtccaggagtcgccgcggtggctgctggtgcgcggccggaagcaggaggccatcgaggcggtgcgccagatcgcgtcgctcaacggcggcggcggaggcatcacgacgtcgagcttctccatgctggacgcgtgcgccgtggagctcggggacggcggcgagggcatgttcgccacgctgcactcgatatgggagcggcggcgggcgctccggaggctggcggcgatcactgcggcgagcttcggcgtgggcatggtctactacgggatgccgctcaacgtgggcagcctgagcccctccaaacctctacctgagcgttggcgtacaacgcggtggccgagctcccgtcgtccatcctcgcgtggctcctcatgggcaggtggttcaaccggcgcggctcggtggtcgcgctcaccacggcgtccgggctgtgcagcctcgccgcgtgcgtccccgccgtcgtcctcccggacggcgcgcggatggccgccgaggtggcctcgttcttcgcgtcgtgcacggcgtacgacatgatgctcatgtacaccatcgagctgttcccgacgtcggtgcgcaactcggcggtggggctggtgcggcaggcggtggcgctgggcggcgtggtggctcccgtgctcgtcgcgctcggccgcgagacgacgagctactggtcgtcgtcgttcggcgtgttcgggctcgccgtcggctgcctcgggctgttagtcacctgcctgccggagacgagggggaggaggttgtcggacaccatggaggaggaggaggccgccgtcttgtccagctctggcgcgagcgacatggataacaacggcgagctcgtgtaaacgacgttcaggtttgttctgtacatctttggtgctggatattttcgtgcaggtcggagacgaaactactgtcattcgtcagtcatgtatag

SEQ ID NO: 146 - DNA, 1609 bp, Oryza sativa
  N_region (295)..(295): n = any nucleotide
atgaagacggcatcaatggcggcgtcgctgctcatcccgctctgcctctgcatcctcctcctgcgcggcgcctccgccgtgagcgaccagcaagaagccggccgtcgcgatagctgcgaccgcatcgaccgccgcatccgcgcgctggagccgacgcgccgcgtcgactccgaggccggccacaccgagctctacgacgaccgcgacggccagctcccctgcgccggcgtcgccgccgcgcgcatcaccatccagcgcaacggcctcctcctcccttcctattccaactcccccngcctcgcctacatcgtccacggccgtggcatcgtcggcgtcgtcatccccggctgccccgagacgtaccaggagacctcgtcgtcgtcgtcgcaggagcaggaggacgacgagcgccgccgccgtggccgccgtggtgatgaggagagacggcgatcgagcgagggagaggaggaggaggaagaggagaccagccgccgcagcttcgagcagtccatccgcgacgagcaccagaggatcaccaccgtccgccagggcgacgtcgtggccatccccgccggcgcgccgttctgggtccacaacgacggcgactccccgctcgtcgccatctccgttcacgacgtcagcaacaacgccaaccagctcgaccaaacctccagggtacttccggctagccggcgggcaggcgaggagcgaggggaggcagaggtacggtgagggcgagtcgtcggagtcggagacggaacgcggcggcgaggagtcgtacaacatcctgagcggcttcgacaccgagctgctcgccgagtcgatgcgcgtcagcccggacatcgcgcgcaagctgcagggccgcagcgacaagcgcggcaacatcgtgcgcgtccgccgcggcggcctccgcatgctccgcccggcgacggagcgggtgaccgacgaggagatgatgaggggcgccaacgccgccgccgccgccgggaacgggatcgacgaggccgtctgcttgatgaagctccgcgagaacgtcgccgacccgatgaaggccgacctctacacccccaatggcggccgcatcaccgtcctcaacagccagaagctccccgtcctcaagctcatcaagatgagcgtcaaccgcggcgtcatgcgccgggaacgcgatcctggcgccgcactggaacatcaacgcgcacgcggcggtgtacgcgacgagcgggagcgcgaggctgcaggtggtgagcagcgaggggcggcgggtgttcgacggcgagctccggcgcgggcagatggtggtggtgccgcagagcttcgcggtggcggggcgcgccggcgacgaggggttcgcgtgggtgtcgttccagacgagcgacggcgccatgaacgcgccggtggttggcaagtcgtcggcgctgcgcgggatgccggcggacgtgctggacaacgcgttcggcgtgtcgagggaggaggcgcgcatggtcaagttcgggagggggcaggagctcgccatcttctcccccaagtccggcgccgccgcccgccgccgccgctttcccggccacagggacgacggcgtgctcgccgccccggcctgaggcgtacgtag

SEQ ID NO: 147 - DNA, 1582 bp, Oryza sativa
atggcggtcaccgccgacgtgaagctcgagggcctccgcgccgccaccgacaagctcgaccagatcaggtgcgagttcatcccactccacttccactggatctacccgcgcgatcgtttcgtccccattttttttgtgctgattttttctgtgtgtgtgttttttttgctgttgtttttgttgcagcgagaacgagaagtccgggttcatcagcctcgtttcgcgctacctcaggagtggagtaagatccagaccccgaccgacgaggtggtggttccctacgacacgctctcggctgctcccgaaggagacgaagaagctgctcgacaaactcgtcgtgctcaagctcaatggaggcctcgggacgaccatgggctgcactggtcccaatctgtcattgaagtccgcaatggctttacgtttctagaccttattgtgattcaaattgagctgaacaagaagtatggatgcaatgtccctttgcttctaatgaactcattcaacactcatgatgacacacagaagaagattgttgagaagtactccaactccaacattgaaattcacactttcaaccagttcatgcagagccaatatcctcgcattgttactgaagacttcttgccacttccaagcaaggggaagactggcaaggatggctgggtatcccccaggccatggtgatgtgttcccctccttgaataacagtggaaaacttgataccttgttggcacagtctcagggcaaggagtatgtctttgtcgcgaactcggacaacttgggtgctattgttgacatcagtatcctaatcttaaaccacctgatccataaccagaacgagtactgtatggaggttactcctaaaacattggctgatgttaaaggtggtaccctcatctcttacgaagggagagttcaggtgcagctgttggagattgctcaagtccctgatgagcatgtgaatgaattcaagtcaattgagaagttcaagatcttcaataccaacaacctgtaaaacaggtgggtgaacttgaaggccatcaagaggctggtagaagctgaagcacttaagatggaaatcattcctaaccctaaggaagttgatggtgtgaaagttctgcaactcgaaactgcagctggagcagccattcggttctttgaaaaagcaattggcattaatgttccccgctcgagatttctgccagtcaaggctacatctgatttgttgcttgtacagcagtctgatttgtacaccttggtcgatggctttgtcatccgcaacccagccagaacaaacccatcaaacccttcgattgagcttggacctgagttcaagaagctggcccggtttaagtcaatccccagcattgtcgagcttgacaccttgaaggtctctggtgatgtctggttcggctctggagttacactcaagctacagggtaaggtgaccatcaccgccaagtcagggaagttggagatcccagatggagccgtgcttgagaacaaggacatcaacggtccggaggatctttgaggctgctcacggaaaccttccagatatatttagctgagcgttttgtaa

SEQ ID NO: 148 - DNA, 1457 bp, Oryza sativa
atgggcctcagtactgtcattgtgctcgccgccgtcgtcttcctcctcgccaccattctccgccatggccgacgcgcgtataggctcccaccagggcctaacccgtggccgatcatcggcaacctcaacctcattggcgcgctgccacaccgctccatccacgagctctccaagcgctacggcccgctgatgcagctccggttcgggtcattccccgtcgtcgtcggctcgtcggcggagatggccaggttcttcctcaagtcccacgacattgtgttcaccgaccggccgaggaccgccgccggcaagcacaccacgtacaactacaccgacatcctctggtccccctacggcgcctactggcgccaggcgcgcaagatgtgcgtcaccgagctcttcagcgcgaggcggctcgagtcgttcgagcacatccgcggcgaggaggtgcgcgcgctgctgcgcgacctgcacggcgcggcggcgcccgtgctgctcagggactacctgtccacggcgacgctcggcgtgatatcgcgccatgtgctgggcaagaaccggaggagttcaagatgatgatggacgagctgctgctgagcggcgtgctcaacatcggcgacttcatcccgtggctagactggctcgacctgcaggggtacatcaggaggatgaagagagtaggcaagaaactggatcggttcatggagcacgtcctggacgagcacgacaaggcgagggacttggtcgacgtgctcttgcagctcgccgatgaccctaacctcgaggtccaactccggcgtgataatgtcaaggcacttactcagcaggacctgatcgccggcggcacggacacctccgccatcaccgtggagtgggccatttcggagctcctgaggaagccggagatcctcgccaaggcgaccgaggagctggaccgcgtcgtcggccgcggccgcttggtcaccgagacggacatgaccagcctcccctacgtggaggccatcgtgaaggagacgatgcgcgtgcacccggtggcgcccctgctggcgccgcacgtagcccgcgaggacgcctccgtcggcggctacgacatccccgccggaacgcgggtgctcgtcaacgtgtggaccatcgcccgcgacccggcgctgtgggactcgccggaggagttcatgccggagaggttcatcggcagcaagatcgacgtgaagggacaggacttccagctgctgccgttcgggtccggccgccggttgtgccccggccacagcctcgggctgaaggtgatacagctgagcctcgccagcctgctgcacggcttcgagtggaggctccccgacggcgtgtcggccggcgagctgagcatggaggaggtcttcggcctgtccacgccgaggaaggttccgctcgaggtcgtcgttaagcccaagctgccggcccacctctataccgggccctga

SEQ ID NO: 149 - DNA, 1399 bp, Oryza sativa
  N_region (229)..(229): n = any nucleotide
atgccgacgccgccctccgccgcggtgttcgacgtcgaggccgcgtccggcgctcgccgccttggcatcaagcccgccgccgacgccggcgccgccttcgtgctcgagtccaaaggggaattggtggcacgccgggttccacctgacgacggcgatcgtggggccgacggtgctgacgctcccgtacgcgctgcgggggatggggtgggcgctcggcctggtggcgctnaccgccgtcgccgccgtcaccttctacgcctactacctcatgtccagggtcctcgaccactgcgaggcccacggccgccgccacatccgcttccgcgagctcgccgccgacgtcctcggttctggatgggtgttctacttggtggtcaccgtgcaaactgccatcaacgccggtattaccatcgggagcatccttcttgcggctgactgcttacaaataatgtactcggaccttgcaccaaatggacccctgaaactgtaccatttcatcatcgtcgtcgctgtggttctgtccttgctctcccagctgccgtcgttccactccctgcgttacatcaacctcggctcgctcctcctcagcttcggctacaccatccttgtctcagctgcctgcatccgagcagttgagcgatgtcccggagaaggattactccctgagctcatccaattcggagaagaccttcaatgcgttcctctccatttccatcctcgcctccgtcttcggcaatggcattctgcctgaaatccagcaggcgacgctggcgccgccggcggccgggaagatgatgaaggcgctggtgctgtgctacacggtggtgttgttcaccttctacttgccggcgatcaccggctactgggcgttcggcagccaggtgcagtccaacgtcctgcagagcctcatgccggacaagggcccttccctggcgccgacgtggctgctcggcctcgccgtcgtgctcgtcctcctccagctgctcgccatcgcgctcgtctactcccaggtggcgtacgagatcatggagaagagctcggccgacgcggcgcgcggccggttctcgcggcggaacgtggcgccccgggtggcgctccggacggcgtacgtcgcggcgtgcgcgttcgtggccgcgatgctgcccttcttcggcgacatcgtcggcgtcgtcggcgccgtcggcttcatcccgctcgacttcgtgctccccgtcgtcatgtacaacatggcgctcgcaccgccgaggcggtcgccggtgtacctcgccaacgtcgccatcatggtcgtcttcaccggcgtcggcctcatcggcgccgtcgcctccgtacggaagctcgtgctcgacgccggccagttcaagctcttcagcggcaacgtcgtggactgaaatggacctaa

SEQ ID NO: 150 - DNA, 1350 bp, Oryza sativa
atggaacaaaacaagaagccatcggcaccaagaccaggtagccgcagcgagaggagagcgcgagcagagcaagcaaccaagcagcagcagcgatggccgccgcagccacgacatcctcccacctgctcctgctctcccgccagcaggcggcggcctcgctccaatgcggcctctccttccggaggcagcccggcaggctcgccgtcggccccgagcgtgcggtgcatggcggccgtcgacacggcctcggcgcccgccgcgacggaggctagcaagaagagcagctacgagatcaccacgctgacgacgtggctgctgaagcaggagcaggccgggaccatcgacggcgagatgaccatcgtgctggccagcatctccacggcgtgcaagcagatcgcctcgctggtgcagcgcgcgcccatctccaacctcaccggcgtccagggcgccgtcaacgtgcagggcgaggaccagaaaaaactcgacgtcgtctccaacgagaggtgttctccaactgcctcaaatcgagcgggcgcaccggcgtgatcgcgtcggaggaggaggacgtgccggtggccgtggaggagagctactcgggcaactacatcgtggtgttcgacccgctcgacggctcctccaacatcgacgccgccgtctccaccggctccatcttcggcatctacagccccaacgacgagtgcctagccgacatcgccgacgaccaaaatcttgaccaggtggagcagaggtgcatcgtgagcgtgtgccagccggggagcaacctgctcgccgccggctactgcatgtactcgagctcggtcatcttcgtgctcaccatcgggacaggggtgtacgtgttcacgctggacccgatgtacggcgagttcgtgctgacgcaggagaaggtgcagatccccaaggcaggcaagatctatgccttcaacgagggcaactacgcgctctgggacgacaagctcaagagctacatggacagcctcaaggagcccgggccgtccgggaagccatactccgcgcgctacatcggcagcctcgtcggcgacttccaccgcacgctgctctacggcggcatctacggctaccccagggaccagaagagcaagaacggcaagctgcggctgctgtacgagtgcgcgccgatgagcttcatcgtcgagcaggccggcggcaagggctccgatggccaccagaggatacttgacatcatgcctacggagtccatcagagagtgccgctgtacatcgggagcgtggaggaagtggagaaggtcgagaagttcttggcttgactgcaagtttcatatacgggggtgtttctaaaaaaaaaagtatt

SEQ ID NO: 151 - DNA, 1317 bp, Oryza sativa
  N_region (574)..(574): n = any nucleotide
atgccgccgttcgactacacgccgccgccgtacgacgggccgcgggcggaggagatctcccggaagcgggccgagttcctcagcccctccctcttccacttctacgaccgccctttgaacatagtcgatgggaaaatgcagtacctgttcgacgaggatggccgccgttacctggatgcttttggtggcattgcaaccgtttgttgcgggcactgccatccggatgttgttgaggcgatggtcaaccaagcaaagaggatacaacactccacagttctttacctgaatcatgctattgcagattttgccgaggcattggcagccaaaatgcctggtgatctgaaggttgttttcttcacaaattctggcacggaggcgaacgagcttgcactgatgattgcccggctttacactggttgccatgacattatttcactcaggaatggataccacgggaatgcggctggaacaatgggtgctaccgctcaatgcaactggaaatttaatgttgttcagaatccagacccatttagaggtgctttcggttctgatggcgaaaagtatccccgaaatnttcaggaaatcattgattttggaactacaggaagggtcggtggtttcatttcggaagccatacagcagggagtgggtggaatagtggaactggcaccaggatacttgcctgctgtgtacaatatggtaaggaaagctggcggcctctgcatcgccgacgaagttcaggcgggagtcgcacgaactggaagccacttctggggatttgaatcgcacggcgtcatcccagacatagttacaatggcaaagggtataggcaatggcataccgatcggagcagtcgtcacaacccctgagatcgctcaggtgttaacccgcaggagctacttcaacaccttcggtggcaaccctgtcagcacagccggtggccatgctgttctcaaggttctggagaaggagaagctccaggagaacgcatttgtggttggctcctacctgaaggaacggctcaacaagctgaaagagaagcatgacagtgagtatcaattggtgatgttagagggaaaggcttccttcttggggttgagctggtgaccgatcgccagaagaagacaccggccaaagttgagatcggtcatgtcatgaaccacatgaaagggtgtgctggttgggaaaggtggtttctacgggaacgtgttcagagtaacacctccactatgcttcaccaaagaggactccggtaagacctgctactctgctgctgataaattgtcaatacatgtttcagtaatttctgatccatga

SEQ ID NO: 152 - DNA, 1290 bp, Oryza sativa
atgacgatgtgcccgtggccaagcggcggcggcggctgtccaacccgccggcgccggcgccgcggcggctggcatcccggaagacattgtggaggaaatcctcctccgcctccctgtcaagtccgtcctgcggttcaggtccgtgtgcaagtcgtggcgcgccatggtcgccgacccgtgcttcgcgcgcctccagctgcgccattccacggcggcggagcggcgccgccatccgccgtccatgctcgtcctgccgtggtggggctggaggccgcagcggcaacagatgcaggggaccatcggcttctttcgctacccggggcatggcgccgccgcggagctcgcgcacgtgagggcatggtggtccccgacctcgcacgccgccgccgccgactgggacgacggcgccgactgggagctgcccctgcaatgcaacgggctcgtgctggtgttctccatggagaagagcctctcctcctctctgatgttcgtctgcaacccggcgaccaagaagctcgccgtggtgccgcccggtacgccggacgcgcacgggaaccaaagcgtgggcttcggcgccgacaaatctacgggcaagatcgacatgaaggtggttcgctgcttcgcccgctcagacgagagcgtcgggtgcgaggtcttctccctcggatcgccggcgtggaggccggtcgccgactcgccatgccccgtcagggccggcgccgcgtcgccgtgcatcctcggcgccatctactggatcaccaccgcagcgccaaccccagggatgctacgcttcgacgtgcgccgcgaggtgttcgacgatttcccgagcccgccgtgcgtgcatcacgacggcacttcgccggcgaccgcgaccctgacggagctgtccggcaacaagctgtgctacgcgcacgtcgtcgccggccataccgttgagctctggacgatggcggctgcttccgccgccgacgacgggccgcggtggtcgcggcatttgcgccgtcgagctatggcgccccactcagctcgtcgtcccgtttgccgacgatcgccatggcggcatcttcttcaacttggatctcgccgtgattgacaggcatgacacccaacgccaagttgttgaacgtgtggtcgacatgaacaaggagatgacctacttccattcaagggacaagcagtactacataaatcgtggatttaggtggatgcaccatgtcattcagtacagggagagcctagtatccgtaaaagcgaattaattaagggattgtatcagccaaaggaaattaa

SEQ ID NO: 153 - DNA, 1267 bp, Oryza sativa
  N_region (78)..(78): n = any nucleotide
  N_region (230)..(230): n = any nucleotide
  N_region (752)..(752): n = any nucleotide
atggcggcggtggagcaggatcaggaggaggaggtgatcatcgtcggggcggggccgtcggggctcgcggcggcggcncctgcctgtcggtgcgcggcgtgacgggctgcctcgtcctggagcgcgacgactgcgtggcgtcgctgtggcgccaccgcacctacgaccgcgtccgcctccacctcgccaagcgctactgcgcgctcccgcacgcgccgcacggcgaggcntcgccgacctacctcccccgcgacgacttcctccgctactcgaacgcctacgcctcccgcttcggcgtccgcgcccgcctccgccgcgaggtccgctcggcgcgctacgacgccgcccgcgcccggtggctcgtcgacgccgtcgacctcgccacggggacgcgcggagcggtacgcggcgaggcacctggtcgccgccgcgggcgagaacgacgagagggtggtgcccgaggtgcccgggatggagacgttccccgggaaggtggtgcacgccgccgactaccggagcgcggaggggttcaaggggaagtccgtgctcgtcgtcggcggcggcaactccggcatggagatcgcctacgacctcgccgtcggcggcgccgcaacctccatcgtcatccgcagcgagagctgcacctggtgagcaaggagatatggaacttggcgatgacgctgtacaggtacctgccggtgtgggtgatcgacaaggtggtgctgctcatgtgcgccgccgtgttcggcganaccgcccgctacggcctccggcggccggccgtcgggcccttcaccatgaaggccaccaccacgatgtacccggtcgtggacgtcggcaccttcgccaagatcaggtccggcgagatccgcgtcctcccggccgccatcaagggcgtccgcggccgcgacgtcgagttcgccgacggccagcgccacgccttcgacgccgtcgtcttcgccaccggctaccggagcaccaccaagcactggctcaagagagtgatgacgggctgatcggcgacgacgggatggcggggcggagctacccggatcactggaagggggagaacgggctgtactgcgccgggatggtgaggaggggaatctacggcagctacgaggacgcggagcacatcgccgacgacatcagcaagcaactccggagcagcagcaagcctacccacaacaatggctcggcctagaaagaaattaaatcaagctgatgaggctctcccccttggaccttgtcttggttattatattag

SEQ ID NO: 154 - DNA, 1261 bp, Oryza sativa
  N_region (939)..(939): n = any nucleotide
atggggtcggtggcggcggaggaggtggtggtgttccggtcgaagctgccggacatcgagatcgacaacagcatgacgctgcaggagtactgcttcgcgaggatggcggaggtcggggcgcggccgtgcctgatcgacgggcagaccggggagtcgtacacgtacgcggaggtggagtccgcgtcgcggcgcgccgcggcggggctccggcggatgggggtgggcaagggcgacgtggtgatgagcctcctccgcaactgccccgagttcgccttctccttcctcggcgcggccaggctgggcgccgccaccacgacggcgaacccgttctacacgccgcacgaggtccaccgccaggcggaggccgcgggcgccagggtgatcgtcaccgaggcgtgcgccgtcgagaagcccaaccgcagcctcatcaccagcgtcgcccagcaggtggatggagagaaccctaacctgtacttcagcaaggatgatgttatactatgcctgctgccactgttccacatctactcgctcaactccgtgctgctggctggcctgcgtgccgggtcgaccatcgtgatcatgcggaagtttgatcttggcgcgctcgtcgaccttgtgcgcaagcacaacatcaccatcgcccccttcgtgccccccatcgtggtggagatcgccaagagcccccgcgtcaccgcggaggacctcgcctccatccgcatggtcatgtccggtgccgcgcccatggggaaggaccttcaggatgcattcatggccaagatccccaatgccgtcctcggacagggttacggtatgactgaggctgggccagtgctggcaatgtgcctggcgtttgccaaggagcccttcaaggttaagtccgggtcgtgcggtacagtggtgcgcaacgcggagctgaagatcgtcgaccccgacaccggnacctccctcggccggaaccagtccggcgagatctgcatccgcggagaacagatcatgaaagatgaaggatgatcttgccggtgaagtgccagtcgccttcattgtccggacagaaggctcagaaatcaccgaggatgagatcaagaaattcgttgcaaaagaggtggtgttctacaagaggatcaacaaggtgttcttcaccgattccatccccaagaacccttccggcaagatcctcaggaaggacttgagagccaggctcgccgccggcatccccgacgccgtcgccgccgccgccgccgatgcgcccaaaagcagctaa

SEQ ID NO: 155 - DNA, 1249 bp, Oryza sativa
  N_region (686)..(686): n = any nucleotide
  N_region (693)..(693): n = any nucleotide
atgaattttagaagttttgagccatttaaatggatttctataattattaatgatttattgcgcaattatcaattattttctcaaaggaaaaggcattcgctgacgtcagcaaggggccggcgccgacaggtgggccccactcgtcagcggcacaaggggcaagcacacggtggactcgatccaccgcggccgaggcggcaccgtggacccggaccacggtccacgggaccgacggcctggatcggcccaaagccgatccaacggccacgggttggcgcggctggggcaaggcacggctctaagccggctgggcaagggggaggcggcagacgggcatcgctcgggatggggcggacgggctcggcctcgatcggcgaccgaggaaggaggagctccggcggatttctggcaaagaggggcggcggccaaggtcctcctcgtccttgcggagctgagggaggcaacggcgcgggtcggcgtcgaccgaagtggcggcgcgacgcggctggagtcggcggcgacggcggagagaggtggttcgcgtggctacggcgctacggaggtggagaggggaaatggagcggtggccgagcttgcccgagcggcggcaacgctggcggtggcggcggcgcagcgcggagacggcggcggcggctgaggcacgcggctggagaacgccggcgagnggcggcnatggggaccggcgtggggagagcggggaaaagcgcagggagctcggggtggagtgggaaacgaaagaggggagcacgagggtgctttatatagggctcggggatggagatcgtgcccgggagaggtgggatcggccggcgacgtggggaggcgaagtggagctcgggatggcaacggttttcacggggcatgggggaaacggcgcggacgtgggcggcgaccgcgcccacgcacgcacgggagagggaaccgcgagaggaaggcggcgacgtggggagcacggggcggctatggcggcggttggggcgacgggaggttggggaagaagatgacaggtggggcctcgggtcccacctgtcggggagagagagaggggaaaacgggcgagggaggtaaagcagacttgagggagagagagccaagcgggccgagggaggtggccggcccgagagggagagaaagggggcgcgcgggccgcgggaaagaaaggagggattgggccgaaaggggcccaaagaaaggaaggaggattttatttgttttcttttttatttaa

SEQ ID NO: 156 - DNA, 1247 bp, Oryza sativa
  N_region (45)..(45): n = any nucleotide
  N_region (77)..(77): n = any nucleotide
  N_region (98)..(98): n = any nucleotide
  N_region (173)..(173): n = any nucleotide
atggcggcgccgcgccaccaccacctcgccctcgccgtcgccctngccctcctcgtcgtcatcgccgcggcggcggncgaggggggaccgcgggggangcgggtgctggtgctcgtggacgacctggcggtgcggtcgtcgcactcggccttcttcgcgtcgctccaggggcnagggttcgatctcgacttccgcctcgccgacgaccccaagctctcactccaccgctacggccagtacctctacgacggcctcgtcctcttcgccccctccaccccgctttggaggatcagtggaccaaaattcaattctggaattcatcgatgctggtcatgatatgatcctggcagcagactcttcggcctctgatcttatccgaggcattgcaacagagtgtggggttgattttgatgaggcaatggttattgatcacattaattatgctgccactgatgctgaaggtgatcatactttgattgctggtgatgacctcatccagtcagatgtgatactggggtcaaagaaaattgaggcccctgtattatttcggggaattggacatgcggttaatccatctaacagcttggtcctgaaagtcttatccgcctctccgtcagcatactcagcaaacccaaagtctaagttggcttcccctccatctctcacagggtcggctatatcactggtttctgttatgcaggcaagaaacaatgctcgggtcttgatatctggatcactcgatctgtttagcaacagtctggtgttcagaaggccggtagcaagataaggagaaagctggaaatgaacaatttgtgacagaaacaagcaaatgggtcttccatgagaggggccatctaaaggttggggagacaaatgagcctggcatgtaccgcatcaatgatgacttgctgaaggaatactctgttgagatctacgaatggtctgggaccagctggaagccgtatgttgctgatgatgttcaagttcagttttacatgatgagcccttatgttctgaagacactgtcgactgacaagaagggtgtattttcaacatccttcaaagttccagatgtttatggagttttccagttcaaagttgagtaccagaggcttggatatactggtctctctctttctaagcagcagattccagtgcgcccttacaggcataatgagtatgaaagattcataacttcggcatatccgtactatgctgcgtcgttttcaacagtaagatatacttga

SEQ ID NO: 157 - DNA, 1207 bp, Oryza sativa
  N_region (408)..(408): n = any nucleotide
  N_region (412)..(412): n = any nucleotide
  N_region (421)..(421): n = any nucleotide
  N_region (461)..(461): n = any nucleotide
  N_region (503)..(503): n = any nucleotide
  N_region (516)..(516): n = any nucleotide
  N_region (528)..(528): n = any nucleotide
  N_region (553)..(553): n = any nucleotide
  N_region (564)..(564): n = any nucleotide
atgggtcaagatgaggtggaggtaggtgcggagaagaaggatcaagaactaccggaggtggaggtggtcgaggaggaggaggaggagggatccaagaaggcggcggcgggctgcgactactgcggcgacgcggcggcggtggtgtattgcagggccgacgcggcgaggctctgcctgccatgcgaccgccacgtgcacggcgccaacggggtgtgctcccgccacgcgcgcgcgccgctctgcgccgcgtgcgccgccgcgggggccgtcttccgccggggcccgggcggcttcctctgctccaactgcgacttctccaggcaccgccacggcgggaaccgcgacccggcggcgcggttccaggacggctccacggtgcacccgtacaccgggtgcccttcggcgctngacntcgccgggntcctcgggatctcctactccgacaaggcggcggcggcgancgcggcggccgggggcgacgacggtgggttgttgggccatcngggaggagccccnaggtgctcagcntcgaggatctcatcgtcccgaccanctcctgccatnggattcgagcctctcctcacgccatcttcccccaagaagattcagaactcgccggatgggaaggtgaatgaggaggtcatacgacagctaaccgagctcgccaattcagacggcggcggcgcgcagatttgggctcatcgcgaggcggcgcaggccggcgatcatcagttaccttcatggggaacaacaacacaacacaacactggacatggcaatttcggtactgcaaacagcaatgaggttgcaaccatgccgacgcctggttatgagagaatggtggatgggataacagcgattaccctgcgctaaatgatccgtgcaaggtcgagttcacatatgagcaacctccagccagctcagctgaagcatgtatttcatcatttgttcagatgtctgaactttgccccagcatgagcaatggtagcagcatggaggaaacccaccagacaaaccctggaaatggcacgccaatgcaagttctacccaaaatgccagaatttgttccttgccccgacaggaacttggtcatttctcgctataaagagaagaggaagacaagaagagattcgacaggcaggtccggtatgagtcccgcaaagctcgtgctgatagcaggctgaggattaagggccgttttgctaaa

SEQ ID NO: 158 - DNA, 1178 bp, Oryza sativa
agccggaggaggcggccgagccaaagggcgccgcggcggcgtccccggcccccgtggtggccggggcgaaggtcgcggcggccgcggtgaaggaggcggagctggcgaggacggacagcttcgacgagcaatgcaggtaggccgtgggtgggggtcttgtgctcgtctgctgcgaaatgttggggccttggtaggatctcgcgcgatgcttctggttatttttagcggagcttcacgaatcgaggagacgatgggggaaaagagggtatgtcaacagaagacagaagaacctttggtagaccttgggtgcagatgtcgagaagctgtttgctacacaggcaggttgctgtcaatattccccctccagagacgcaagctagtacaagttattgggtttggagggttgattcagcttatggaaggggccgaggaggacatgaaagggtatttttgggatggtttagccctctgtgggttgcatttgcaattcttattggcggactcttgttggatgttctgatatctgtttctcttggcgtctccgcacttcctgtacgtatgatattttgaggtgttcttatagttctcggcctcggcaccgccctgcggctagctctagagtgctgccaggaatggggctccaggagaagcatgccgaggctgccgatggacggcagcatggcgcccagtggataccaccctggtgtataatagtgagaactaggcgtgatttcggcccagcccatcacgcgcgcgtaggctacacacctcaccagccaccgcgcatcgctcagggccgcggaaaccgtggaagaagaagcggaggacacctacccccacaaatctcgtcgtctcgctcgccggcggccgccgccaccgccaccaccgccgccgcgatgatcagcatcctcgcgcagatctgcgcgcaggagcgcctcctcgggttcgccctgggctccgtctccatgggagggttcgtcctccaccagcggcgcgccatctaccgctccctcgccgacgccgacgctgccgctgccccgtcgcccttctcctcctaccagcagcctagtgaaaccagaagtagaacaagctcaactgaattggctcacgtatggaacaagggagtggatgagactctcggacgacttgttgcatacctcagctctcgtggatggtaa

SEQ ID NO: 159 - DNA, 1149 bp, Oryza sativa
atggtccacgggtcgacggaagcggatcccgtgtgtcaaccgaggcaagtggtcgacaaacggactccactagacaccacacgggctgcacacgtggaaaccacgaggctaccgagcgggcacactaacacggtcaccacacgcacaagcgaacgactaccgacaccagtacacgggtactggggtcgacaaccgcacaacgggcacgggcgataccaaaaggacgaggacgagggcgacgagggagagatccttaccaccacgcgacgaggcgtgggaacgacaacgacgaacgagcgcggcggagacggctcggggacgacggaggcgaacggcgagggaacgacttcggcggcgatccttgcacgaaggcgagacgcggccggcgcaacgcttggtgacgcggaggcgaggacgaagacgatgacggggctgcggcactacgcggaggcgaggacgacgaacgagaacggcttgacggagggacgaacgccacgacgagcgaaaccgggaacgacgagaggacgacgacgacgacgaccggggccgatgaggagacgacgatggcagccggcagcagctgcacagaggcgaggacggcgtggaacacgctgctgtgaatccgacgacggaggcggcgccgtgagacgacgagccgggcgaacgatgggacgtcgatcggcgaggacgaacggtggagacggcgacgtcggccggtggactggcacggcggaaggggctgccggagtgggtgtcgacgagaccgagggagaggcggtgcgggcgacagcgttccggcgaaacagaggagcagccggaggagaggacgacgctgcgacatcgacggaggagacggcgacgtcggtcggcgcacaggagacgcggcagaggcggccggaggcagaacagtggcgacaacgccactgttgccggcgggggcgcacctccgggggtctccgcgcgaaacggagggcaggccgggggagaggaggctgctgcgatgccgagggaggcgacggcacagccgactggcgcgcgggcgaggcggtagaggcggctggaggcggtcggcgcgggggaaagagaagggtgacggcggggaggggtgatacgaccacggggaggctcgggatgaggctaaaacgatag

SEQ ID NO: 160 - DNA, 1145 bp, Oryza sativa
ttggcggaggttaagggcgcccgcggcggttgggccgcggtggtggcggcgaaggtgatggacaggaaggagctggccgggaggaacaaggaagggcgggcgagaaccgagagggagatcctcgaggccgtcgaccaccccttcctcccgcgcctctacggcgtggccgagggggatcgctggtcctgcctcctcaccgagttctgccccggcggcgacctccacgtcctccgccagcggcagccgcaccgccgcttcaccgagtccgccgtcagaggttctacgcggcggaggtggtggcggcgctggagtacatccacatgatggacatcgtgtaccgtgacctgaagccggagaacgtgctcgtccgcgccgatggccacatcatgctcaccgacttcgacctctcgctcaagtgcgacccgacggcgccgacgccggcgcacgtcatctcggaccccatcgccctcgccggcagccactactcggcgtcgtcgtcgtgcatcatcccgtcctgcattgtccccgccgtgtcgtgcttccagctcttccccggacgcgggcgacgccggcgccatcgccgcaagaagaagacagcgagtggtggcggcggcggcatcagcggcagcagcttcccggccggtgggctggagctggagttcgtggcggagccggtggagctccggtccatgtcgttcgtcggcacgcacgagtacctcgcgccggagatcgtctccggcgaggggcacggcagctccgtcgactggtggacgctgggggtgttcgtgttcgagctcctctacggcgtgacgccgttcaaggggtacgacaacgagatgaccctggcgaacatcgtggcgcgcgcgctcgagttccccagggacccgcccgtctcctccgccgccaaggacctcgtcacgtcgctcctcgccaaggacccgacgcggcgcctcggcgccacggtcggcgccgcggccatcaagcggcacccgttcttcagcggcgtgaactgggcgctgctccggtgcgccacgccgccgtacgttcccccgccgttcagcgtcgcggccgccaccgccgccgccgccgccgccgacatgtcggacgatgacagctgccccggcacgcccgtggagtactactag

SEQ ID NO: 161 - DNA, 1120 bp, Oryza sativa
atggcggcgaagctctccttgctacttcccgtcacctgcttcatcctcttcgttctgcatggctgttcatgtggaggcgcgtcccgatcctgccgctttcggcgactccgacaacgggttctacacgctgttcgtgttcggcgattcgttcgccgacaccggcaatctccccaagcgccgactgagcgagcagtcgcgcgaatggtactacccctacggccgtgaccgtggcaacaaccgcccaaccggccgcttctccaacgccatggtccagtccgatctcatcggcacggatgctggggcgtcatgaggcgcctccgacgtacaggagggtggacaactacgtgcacccgcacggcatgaacttcgccgccggcggctccggcgtgttcaagctgccgagcggcgcgccgacgctcgacaagcaggtcgaccacttcagggacctggtgcaggacggcaccatcacccgccggaacctccgtaactccatcgccctcgtcgccgtctccggcaacgactacgcccgcctcgccaacgtcaacgacactagcaagagatgatcaagtttgtcgatgaggtgacgagcgagtatcgcgaagcaggtgcacaggctgaagaacaacggggcgaggaagatcctggtgaacaacctgcaccccgtcggctgcacgccgtgggtaaccaggccgggcaactactccggctgcagctccaccggcaacatgggcgcctacctccacggcagcaacctccaacagaagctctcgcacctcgactacgtccaccatgtcgacctcaacactgccttctccaacatcgtcaatcccgaccaagaggttcgaagcacaaggtgtcgagccagttcgagcacaagatgcagccgtgctgcgagagcttggacccgaacggcttctgcgggcagaagggacacgatggcaaggacctgttcagcgtgtgcaacgatccggagaagtacttctactgggacgatgtgcaccccacggaggctggatggaaggccgtcatgcagcagctggaaggtccaatcaagaaattccttcgaatcaactagaaattgagatgggcgttaattaggtttagagtgttttggtttagg

SEQ ID NO: 162 - DNA, 1119 bp, Oryza sativa
atggatgatccaatgctgaatgcggtgaaggaggaggagagccacggggacggaggagggttggaggtggtggcgggagaggatggggcggcggcggtggcggcgggggtggcgccgaggccgatggaggggctgcacgacgccgggccgccgccgttcctgaccaagacgtacgacatggtggacgacgccggcaccgacgccgccgtgtcgtggagcgcgacgagcaacagcttcgtggtgtgggatccccacgccttcgccaccgtcttgctccccaggttcttcaagcacaacaacttctccagcttcgtcaggcagctcaacacctatggtttcagaaaggtggatcctgatcggtgggaatttgcaaatgagaattttctgcggggacagagacatcttctcaagaacatcaagcgtagaaaaccaccttcccatactgcttcaaaccagcaatcccttgggccataccttgaggtgggccactttggatatgatgctgagatagaccggctgaagagagacaagcaattattgatggctgaggtggtgaagctaaggcaggagcagcagaatacaaaggcaaatctgaaagccatggaggataggctgcaaggaaccgagcagaggcaacagcagatgatggcattcttggcgcgtgtcatgaaaaatcctgagttcttaaaacaacttatgtcccagaatgagatgagaaaggagctccaagatgccatttcaaagaaaagaaggcgtcgcatagatcagggacctgaagttgacgacgtcggcactagcagtagcatagagcaagagtcaccggccttgtttgatccccaggagtcggtggaattcctcatcgatgggattccctccgatcttgaaaactcagctatggatgctggaggtctggtggagccacaggatttcgatgtcggcgcctccgaacagcagcagatcgggccccagggggagttgaacgacaatttctgggaggagctgctgaacgaagggcttgttggtgaggagaacgacaacccggtcgtcgaggacgacatgaatgtgttgtcggagaagatgggttacctcaactcaaatggcccaacggctggggaatag

SEQ ID NO: 163 - DNA, 1105 bp, Oryza sativa
  N_region (136)..(137): n = any nucleotide
  N_region (141)..(141): n = any nucleotide
  N_region (167)..(167): n = any nucleotide
  N_region (174)..(174): n = any nucleotide
  N_region (190)..(190): n = any nucleotide
  N_region (299)..(299): n = any nucleotide
  N_region (427)..(427): n = any nucleotide
  N_region (444)..(444): n = any nucleotide
  N_region (548)..(548): n = any nucleotide
  N_region (644)..(644): n = any nucleotide
  N_region (651)..(651): n = any nucleotide
  N_region (663)..(663): n = any nucleotide
  N_region (692)..(692): n = any nucleotide
  N_region (695)..(695): n = any nucleotide
  N_region (965)..(965): n = any nucleotide
  N_region (971)..(971): n = any nucleotide
  N_region (1036)..(1036): n = any nucleotide
ccagccgttgcgccgcggcctcggcctcctcgagagctcgctcccgctcggtgagcgcgtcctcgcggaggcggagtgcggactcctcttcggcgcagacggcctcgtgcgccgccagcgttgcctcccggatggnnacgncggcctcgcggtccgccaggtccctntccacgncgcaggcacgctcttncagcgccatggcacgggcctcaagggcttcttcgcgccgccgggatgccacttcggtctccgccgcccgccgttctcgggcagcggcagcgtcaaggaccccccgggcngcgtcgagcttcttccctagctccgcctcccagctcccgtattgaaggcggagggtgtcctgcgcctcgttcatcacggtggtggcgatgagggcagccccccgctcctcctccacctccttggcganctcccccagcaccttcngacgggcttcgagctctgaggcgtgccggcggtgtgccttgcggcccacctccaccatggcctccaccgagcgtcgcccctcttcgacacgcgcccatgcggcntcgagctccgcccgctctgcttgcagggcctccatctgggcacttaacccgtccaacaccgtggtgtttgcgacggccaaggcctgcagaaggggntctgcgntcagtggggcancggaaggcgtgggggagagccgcctcggngangatgccgcgcggctcggcccgccaatggacgcgccggactcggggatgtcccccggacctggttggtcccgagcgtcgcccgagggagtgggccccagcgatgcgcccgcgacctcgtcgcgagctgcctcggaagtcgtcgccgcctcgtcctggtgaaatctgacctcctcccgagcggcttcttcagcttggcgagctcggacggccacctgggcagcttcctcggcttcccgaaggcgatccgcggcctcttgccggtcagtttcncgggtngcctcggaggatgtcgtcgcctcggcctggcggagtccggcctcctcccgagcggcttcctcggnctggcgagcccgggcggcctcccgagcggcctcctcggcttcccgtaggcgatccgcggcttctcgccg

SEQ ID NO: 164 - DNA, 1089 bp, Oryza sativa
  N_region (260)..(260): n = any nucleotide
atggccgccgggcgccttttccgccgccgttccccgctccttcccgttggccggctccctccccacgcctataaaatggaatccccatccttcgttctatcgttttagccccttcccgagcctccccgtggtcgtatcacctctccccgccttctccttctctctctccgacgccggccggcctccagccgcctctccctcctcgcccgagcgccgtccggtcgcgccatcgccgccctcggcctcgcagccgcctcctntcccccggtcagccctccgtttcgcggggaaatcaccggagacgtgtcctcgccggcaaaacagtggcgttgccgccactgtactgcctccagccgcccctgccgcgccgctcaggtgcgggccggctgcgccgtctcctccctcggcgtcgccgcgtcgacctccaccccggcctgccctcggtttcaccggaacgccgtcgtccgcgtcggtctcgccctccgcctcgccggagttcctccggcagccccgtccgccgtgcctgtgcgccggccgacgtcgccatctccacccccggcattgcagcagcaaggtcgccctcgccctcgccctcgccctcgcctcccctccacccgaacgccgccggtgtccgtcgtcgtcttcaccgttcatcctcgccggctcgtcgtctcgcggcgccgcctccgtcgtcggcatcgcagcggcgtgttcctcgccatcctcgcctccgtgcagccgctgccggctgccctcgtcgtctcctcgccggccccggtcgtcgtcgtcgtcgtcctcccgtcgttcccggtcgtcgtggcgttcgtccctccgtcaagccgttctcgtccgtcgtccgcgttcgtcaagtgtgccgctgcagccccgtcgtcgtcttcgtcctcggctccgcgtcgtcaagcctcgtgccggccgcgtctcgcctttgtccaaggatcgccgccgaagtcatcccctcgccgttcgtccccgtagttcccggccgcctccgccgcgcccgttcgtcgttgtcgttcccacgcctcgtcgcgtggtggtaaggatccctctccctctgtcacgtcctga

SEQ ID NO: 165 - DNA, 1078 bp, Oryza sativa
atgtcggcctactgcggcaagtacaagggacgagctcatcaagaacgctgcctacattggcactcctggcaagggtatccttgctgcggatgagtccactggcaccattggcaagcgcttcgccagcatcaacgtcgagaacgttgaggagaaccgccgctccctccgcgagctcctcttctgcacccctggcgccctccagtacctcagcggcgtgatcctcttcgaggagaccctgtaccagaagaccaaggatggcaagcccttcgtcgatgtcctcaaggagggtggtgtcctcccgggcatcaaggtggacaagggcacaatcgaggttgccggcaccgagaaggagaccaccacccagggccatgatgaccttggcaagagatgcgccaagtactacgaggctggtgcccgcttcgccaagtggcgcgccgtcctcaagatcggccccaacgagccgtcgcagctcgccattgatctgaatgcgcagggcctcgctcgctacgccatcatctgccaggagaacgggctggtgccgatcgtcgagcccgagatccttgttgatggccctcacgacatcgaccgctgcgcctacgtctcggaggtggtcctcgctgcgtgctacaaggccctcaacgagcaccatgtcctcctcgagggtaccctcctcaagcccaacatggtcaccccaggctctgacgccaagaaggtgtctcccgaggtcatcgctgagtacaccgtccgcaccctccagaggaccgtccccgctgccgtgcccgccatcgtcttcctgtccggtgggcagagcgaggaggaggcgaccctgaacctcaacgccatgaacaagctcagcaccaagaagccgtggtcgctgtccttctccttcggccgtgccctccagcagagcacgctcaaggcctggtccggcaaggcggagaacattgagaaggccagggcggccttccttaccaggtgcaaggccaactccgaggctaccctcggtacatacaagggtgacgctgtcctcggcgagggcgcctccgagagccttcacgtcaaggactacaagtactga

SEQ ID NO: 166 - DNA, 1009 bp, Oryza sativa
  N_region (79)..(79): n = any nucleotide
  N_region (554)..(554): n = any nucleotide
atggggatggggccactagagaacgccgtggtggacgcggcggcggaggccgtggcggcgaaggccgcggtcggcggcntgggcgtggggggttcgtacgcggtgctgcagtgcggggaggactcggagtacgtgaggaaggcgtacgggggctacttcgaggtgttcagggcgctgctggcggaggacggcgagcggtggcgggtgtaccgcgccgtgcgcggggagctccccggggaggaggaggccgcggggatcgacgggttcgtcatctccgggagctgcagcgacgcccacgccgacgacccgtggatcgtcgccctcgtcgacctcatccgccgccagaacgccgccggcaagcgcatcctcggcgtctgcttcggccaccagcaggtcctgtgccgagcgctgggcggcaagacgggccgatcgaagaagggctgggacatcggcgtgaactgcatccaccccaccgcggccatggcgaggctcttttcgccgatcaagctccccgtccacatgcccatcatcgagttccaccaagatgagaggtntgggagctgcctcctcaggccgaggtgctggcgcggtcggacatgaccggcgtcgagatgttccgtctcggcgaccgcgccatgggcgtccagggccacccggagtacagcaaggacatcctcatgagcatcgccgaccgtctcctccggaacgatctcatcctgggatcaccaggtggataaggcgaaggcgagcttcgacttgcggcaaccagacaaggatctgtggaagaaggtgtgcaggggttttctgaaggggaggcttcagtcatcgcagcagccgcagcagcagcaacatcagaagcagcagaaggcggcgcagctggtgctatagtaaacaagattagtgagtgagatcagatgggggcattggggagcctagattaatccttattttctgcttcagatttgtacaggaaaaaaactatttattcggagcaataataagagagtaa

SEQ ID NO: 167 - DNA, 1007 bp, Oryza sativa
  N_region (351)..(351): n = any nucleotide
  N_region (623)..(623): n = any nucleotide
  N_region (646)..(646): n = any nucleotide
  N_region (792)..(792): n = any nucleotide
atggcgaggtgggccattgcgatccacggcggcgccggggtggacccgaacctgccggagcacaggcaggaggaggcgaagcgcgtgctggcgcggtgcctgcaggtgggcgtggacgcgctgcgctccggcgcggcggcgctggacgtcgtggaggccgtggtgcgggagctggagagcgaccccttcttcaactccgggaggggctccgcgctcacccgcctcggcaccgtcgagatggaggccagcatcatggacggccgcggccgccgctgcggcgccgtctccggcgtctccaccgtcaagaaccccgtctccctcgcccgcctcgtcatggacaagtccccccantcctacctcgccttcgacggcgccgagcagttcgcgcgcgaccaggcagggtctagaggtcgtcgacaacagctacttcatcaccgaggacaacgtcggcatgctgaagctcgccaaggaggccaacagcatcttgtttgactaccgtatcccgctgtccgggtcggagacgtgcggcgcacaggccgtgtcgtcggacaacagccacggcaacggcatggtgatgaacggcctccccatcagcatctacgcgccagagacggtggggtgcncggtggtggactccagcggccanaccgcggcggccacgtccacgggcgggctgatgaataagatgacggggcgcatcggcgactcgccgctgatcgggtcggggacctacgcgtgcggcgcgtgcgcggtgtcgtgcacgggggaaggcgaggccatcatccgctccangctcgcgcgcgacgtcgccgccgtgatggagtacaggggcgccgggctgcaggaggccgtcgactactgcgtcaagaagcggctcgacgaagggttcgcggggctcatcgccgtgtccagcacgggcgaggtggcgtacgggttcaactgcaccggcatgttcagagggtgcgccaccgaggacggattcatggaggtcggcatctgggagtgag

SEQ ID NO: 168 - DNA, 999 bp, Oryza sativa
  N_region (625)..(625): n = any nucleotide
atggcgtcgcatcgccgcctccgcctccttttgctcgcggcgacgctcgccgccgccgccgctgccgtagccggtgtggaagaagaagaggcgttctgcggagtggagtccatgccggacgcggccacgctgaggccggaccggctcacggtgctcctgagcggctactcggagcggcggctcccgctgctccgcgccatcgccggagcgtacgccgcccacccgctcgtcctcgccgtcgtcgtgctctggtccaacccctccacaccggacagcctcctgtcaagcttcccgccggccgtcaccctccaccgcaccgcctccgcctccctcaactcccgcttcctcccgcacccgtccatccgcaccgccgccgtggccgtcgccgacgacgacgtgctcccggacgccgccgcgctctccttcgcgttcgccgcctggcagcagcgcgcccgcccgggcaccctcgtcgggttcttcccgaggtcccaccacctcgacctggcccgcgggaagtgggcgtacggcgcggcggcgcggcagcaggcgcgctactccatggtgctcaccaagctcctcgtcctcggcgcgggcctcctccgcgagtactcctgctcgccggagntcgccgcggcgcgcgccgtggtggaccgggagcgcaactgcgaggacatcctgatgaacttcgtcgccgccgaggagtccggcgaggggccggtgctggtggaggccggcagcatcagagactggggcgacccgaggaacgacgatgccgacgccggcgccggcgccggtggcgaggagatgaaggccgtcggcctgagctcgacggggggcgcggcgcactgggagaagagaggggattgcatcacggagttccaccggctgctgggaaggatgccgctccggtacagctacgggaaggtggtggcggcggccggcggcgagcaggcgctgtgcagcaaacgcggccgcctcgtccggtgtgaccaggagtag

SEQ ID NO: 169 - DNA, 993 bp, Oryza sativa
  N_region (438)..(438): n = any nucleotide
  N_region (468)..(468): n = any nucleotide
  N_region (470)..(470): n = any nucleotide
  N_region (474)..(474): n = any nucleotide
  N_region (708)..(708): n = any nucleotide
  N_region (717)..(717): n = any nucleotide
atggcggcggcggcggcggtgctggtggtgtgcgcggcggcgttggcgtccgccgcgactccgccgaagccgagcagcatggtggtgatcactccgacgaagcagggaggagtggggaagcgaaacagcgcgttcacgtgcgaggacacccggcggcggcggcccaagtgcatggcgacgtgccccgaccggtgccggaccaagtgcctggtcctctgccccacctgcaagaccttctgcctctgcgacttctacccgggcgtctcctgcggcgacccccgcttcaccggcggcgacggcaacaacttctacttccacggcaagaaggaccgcgacttctgcctcctctccgacgccgccctccacgtcaacgcccacttcatcggcaagcgcaacgccgccatgtcccgcgacttcacctggatccaggcgctcggngtcctcttcggcgcccgccaccaccgcctngncctngccgccgcccgcgccgcgcgctgggaccccgccgccgaccacctcgagctcaccttcgacgacgaccgcgtcgacctgcctcgccacgacggcgcgcgctggtcgccgccgggagccccggcgctgtccgtgacgcgcaccgcgccggccaatggcgtggtggtggagctccggggcgtgttccgcatcgtggccagcgcggtgcccatcacgcgggaggagtcgcgcgcccanaactacggngtcgccgacgacgactgcctcgtccacctcgacctcggcttcaagttcgaggcgctcaccgacgacgtccatggcgtgctcggccagacctaccgctccgactacgtcaacaccctcaacgtcacctccaacatgcccgtcatgggcggcgccgccaacttcctcaccaccgggctcttcgccaccgactgcgccgtcgctcgctttgccaaacctgccacggccgccgccgccggcgccggcatctccttggtcaccgacgccaagtacgtgtag

SEQ ID NO: 170 - DNA, 940 bp, Oryza sativa
atggccggcacgtgcgcgcacgccgagttcttccgcgcgcagccggcgtgggcgctggcgcttgcgggcgtcggcctcctcgccgccgcccgcgccgcgctccgcctcgcgctctggctctacgccgcgttcctccgcccggggaagcccctgcgccgccgctacggcgcctgggcggtcgtcacgggcgccaccgacggcatcggccgcgccatggcgttccgcctcgccgcctcggggctcggcctcgtcctcgtcggccggagccccgacaagctggcctcggtctccgaggagatcagggggaggtaccccagggtggaggtgcggacgttcgtgctcgacttcgccgccgacggcctcgccgccggggtggaggggctcagggaggccatccgtgggctcgaggtgggcgtgctcgtcaacaacgccggtgtctcgtacccgtacgcccgctacctccacgaggtggacgaggagctcatgcgcaccctgatccgggtcaacgtcgagggcctcacgcgggtcacgcacgccgtgctcccggccatggtggagaggaagcgcggcgccatcgtcaacatcggctccggctcctcctccgtcatgccgtccgatccgctctactccgtctacgccgccaccaaagcgtcaggtgcccttgtatgtggcaacaaagatggcctctatcaggaaatcctcgttctttgtcccatccgcggacacctacgcccgtgctgccattcgtcacataggctatgagccgaggtgcacaccgtactggccacactctgtaatgtggttcctgatctccattctccccgagtcactcattgacagcattcgcctgggaatgtgcatcaagatccgcaagaaggggcaagccaaagatgctaagaagaaagcgcagtgatgcttcagattagtcattcttgtttga

SEQ ID NO: 171 - DNA, 931 bp, Oryza sativa
  N_region (21)..(21): n = any nucleotide
  N_region (38)..(38): n = any nucleotide
  N_region (44)..(44): n = any nucleotide
  N_region (146)..(146): n = any nucleotide
  N_region (218)..(218): n = any nucleotide
  N_region (714)..(714): n = any nucleotide
  N_region (725)..(725): n = any nucleotide
  N_region (754)..(755): n = any nucleotide
  N_region (760)..(760): n = any nucleotide
  N_region (789)..(789): n = any nucleotide
  N_region (802)..(802): n = any nucleotide
  N_region (806)..(806): n = any nucleotide
  N_region (905)..(905): n = any nucleotide
atgggccggccggcccaaaangcggcccagagcgcgcntgggangggaggagagagggagccggtggaccgggctcacctcgcgtggtcccgggtgggacccgcttgtcagcggctcggctcaccatgcggagggagtatgcggcntgcgctagggtttggggaagagacgcggtgcacgcgcgcggttcgcggaggacgcggatgcggcgggcccangcgcagcctcacggctcgcggtggatcgcgcccgcgagcggggccggagggagtggctgaccggggtcggctcgacccggtcttggccgagctggcgccgacgtggcgcctacgtggctgccacgcgggccggcgggagacaggcgaaagcgagcacaccgggtggttgcacgagacgaggggagacgagccaacggctcggattcgccggaggaagcttgacggcggtgaattgcggcggcggcaaccggtggcggaagaagggggaaacggcgacgaggtcacgaggggccgattcccggcagcgagagcatctacgcggctacgggaatccgtccctagcgtcggattaggaggaaacgcatcgagggaggccagcgacgagaggcgctttcgagctcgggcggcgacggcggcgagcacgtggcgagcggcggcaacggtcggggcggcgccggctagctacggggaggctactcgtgctactacccgacantaccgtgcggncgggcgcagtgacgaggccgacggcgcgnnacgtnatcgtcggcctcgggccgaggaagaggangaagagggcgcgnccgnagtccccttccgcgtccttgctcgtgccggctcctccgacacgcgcaacgacgaacggcgacggcgaacagagcacgggaggcggcggcaatggcgtgnagagggcggcaatgtcggtttgaaac

SEQ ID NO: 172 - DNA, 900 bp, Oryza sativa
  N_region (367)..(367): n = any nucleotide
  N_region (400)..(400): n = any nucleotide
  N_region (541)..(541): n = any nucleotide
  N_region (550)..(550): n = any nucleotide
  N_region (633)..(633): n = any nucleotide
  N_region (658)..(658): n = any nucleotide
atggccggcgtggcgtgcgtgttggtggtgggcgtgctgtggctgagcgccgggcagtcggcggcgtgcgacgggcacccatgcccgacgccggcggggaagtgcccgataaacacggtgaagctgggggtgtgcgccgacgtgctggacgggctcatccacgcgtccacgccgcccaaggagccctgctgcccgctcatcgccggccttgccgacctggacgccgccgtctgcgtctgcctcgccatcaacgccaaccttctcggcctcaacctcgacgtccccgtcgacctctccctcctcctcaactactgcggctgcaagctccctgctggcttcacgcgtggcggttgctggaggggaggcngcgggcaacgggctgcggcggcgccctcccctncgccggatccggcgggaggggaggcgcggcaggcggtggcgcaagaggggaggcggcgggcgaagggttgcggcagcggctggcgcatctctctcccacagctggtggctgcctggcggaggcagcggcggcgacggccgngccttcccntccgccagatccggtgggaggggaggcggcgagctcccgcggccggcgcgctgcctaaggcagcggcggcggcggctgtgccntcccatccgccagatctggcgggangggaaacgccgagctcccgcggcgggcagctgcctgggacagcggcggcggcggctgcgccctcccctccactagatcctgcggaaggggaggcggtggggaggcggcgagctcccgcggccggcggctgcctggaggaggcagctgcggcgcaccacagcggcggcggccgtgccatagcggcagatctcaaggggaagaaggccggaggcaacccaagggagaaggacgaaggttcttga

SEQ ID NO: 173 - DNA, 884 bp, Oryza sativa
  N_region (183)..(183): n = any nucleotide
  N_region (192)..(192): n = any nucleotide
atggactgggcggcgcgccgctcgctgctcctcctcgccgtcttcgtgccgccctacctcgcctacaggctcgcctcctcggcgctaaccgccgcgtcgccggaagacttcgccggcaaggtcgtcctcgtcacgggcgcctcgtcggggatcggcgagcaggtcgcgtaccggtacgcgcgnaggggcgcncggctggcgctggtggcgaggagggaggcgagcctgggggaggtggcggcgagggcgagggcgctcggctcgcccgacgtgctcgccgtccccggcgacgtcgcgaggcccgacgactgccggcgcttcgtccaggccaccgtcgaacacttcggccgccgtggatcatcttgtgaacaatgctggcttggccaacgtgtgctggtttgaggaggtgccagatctgcaggatgtgaacttctggggtacggttcacccgacgcacgccgctctcccccatctcaaggcgagccgcgggaagatcttcgtcaactcctcggcatcggctgtgctcgccatgccaaggatgagtttctacgctagcaaggccgcggtgcacaacttcgccgagacgctgcggatggagctccacggcgaggtcggcgtgacggtggcgacgccggggtgggtggactcggagatgaccaaggggaagcacctgtccagccatggcgcaataaggtcgtcctcatcaccggcgcctcctccggcatcggcgaggcttacgagtacgcgaggaggggggcgtacctggcgctggtggcgaggagggaggagagcctccgggaggtcggcgacgcggcgctggcggccggctcgccgggcgtcctcgtcgtcgccggcgacgtctccagccccgacgactgccgcaa

SEQ ID NO: 174 - DNA, 864 bp, Oryza sativa
atgggagcctgcttttcctacgtggacccacaggggcatcagcgcagcctcgcgtacggacaaaccggccttttaactacatcctgctccacccaaaccctcacaggcaggtgggccatcactcacgtgggacccaatatccagtggcaccgacgtggaagagcaaagccgtccacgcaagctatagcttttgtcgctggcggttgggccccgccggtcagtgacccaggggtggccgcggccgtgtggttaaatcgtttcccttttccgcaccggccgcctctccctctcctcctcacctggcgcgccgaagcttctctcctctctctcaactccggcgagaggaggaggcggcggtggggcgttcgtcgggagagagaccagggccggggggctagggttcggccgttcagagaggcggcggctgaggaggaggaggaggaggaggagggggtgaggagagatgtcgacgccggcgaggaagcggctgatgcgggacttcaagcggctgcagcaggacccgcccgccggaatcagcggcgcgccgcacgacaacaacatcatgctctggaacgccgtcatattcgggtcccaacaaaccaccagttgttcggtttgtctcaaggatgtttcacccaaatagtttatgcagatggaagtatctgcttggatatcctacaaaatcaatggagccctatatatgatgttgctgcgatattgacctctatccagcagtccctgctctgtgatccaaacccaaactcccctgcaaactccgaagcagccagactgttcagcgagaacaagcgcgagtacaaccgcaaagtccgcgagattgtggagcagagctggacggccgactaa

SEQ ID NO: 175 - DNA, 841 bp, Oryza sativa
atgggcctcctgagcttgctgctcgtcgtcgtgtcctgcctcgccgcgccggcgacggccgactggtacggcccgctcgccgtctactggggtcgccacaaggactacgagggctccctgagagaggcctgcgacaccgggccgctacaacaccgtcatcatcaccttctacagcgtcttcggctacgtcaagggcaggtacggcctcgacatctccggccacccggtcgccgccgtcggcgccgacatcaagcactgccagtccaagggcgtccaggtcctcctctccatcggcggccagggcggcgggtactcgctcccgtcatcccagtcggccgccgacgtcgccgacaacctctggaacgcctacctcggcggccgccgcgccggcgtgccacggcccttcggcgacgcggcggtggacggcatcgacttcttcatcgaccagggcggcgccgaccactacgacgagctcgcccggcagctgcacggccgcggcgtggcgctgacggcgacggtgaggtgctcgtacccggacagccggctgcagaaggcgctggcgacggggctgttggggcggatccatgtccggatcttcggcgacaaccagtgcaccatgttgccgttggacgcgtgggagaagtgggcggcggcgtacccgcggagcaaggtgtggctggcgctggtggcgtcgtgggagcaggacgaggtcgggtacatgttccaaaaggacctctactacggcgtgctgcagttcatcctcaacaagcccaactatggagggatcgccatctgggacaggtactacgacaagaaggccaattacagtggtgagggctaa

SEQ ID NO: 176 - DNA, 771 bp, Oryza sativa
  N_region (295)..(296): n = any nucleotide
atggctgccgccgccgccgcagcagcagtacccggcgacgccaagctagactccttcctccaatggctccagaacggcgccgacctccgcggctgcacgatcgaggtggtgatggtggtgccgctcgatctcgccatcactccgatgcgggtgctgcaggacccgctcgtcgggccgcggtgccgcgcgctcttcgaggaaggtggcgtcgacgaccgcctcctcgtcatgctcttcctcatggtcgagcgactccgccctagctccctctggaagccgtatgtatttggatatnnttccaagcaccttcggaagctccatttggttcaccgaagatgagcaaactcaatattctggactcgagcattgaatataccattgcctcgtttttatgtttttccggaatcactagacgaaaagcgggccaacattggtgatgattgtgatttgggttgagggccttgtccctggaatcgacttttgtaatcatagcaacatgggaagttgattccatgggacatgttactggatgtccttcttcaatgtaccttgtactaggaactactatacctctatggatttgtaattgacaacaatcctgacgattatctcatggtaacactcacagattcattatccagtagaagctcttcgacaggttcaatctgctgatattaagatgaagctactggagatacagcggagtgctatatgggaggtcagtggtgataatggagcactgagtttgcttgtggatcttcttagagtcaa

SEQ ID NO: 177 - DNA, 767 bp, Oryza sativa
  N_region (215)..(215): n = any nucleotide
  N_region (223)..(224): n = any nucleotide
  N_region (232)..(232): n = any nucleotide
  N_region (240)..(240): n = any nucleotide
  N_region (245)..(245): n = any nucleotide
  N_region (262)..(262): n = any nucleotide
atgggcagcagccacgccggcggcgagatgtgcatggaaggcggcggcggcggcagggcgaggcgcgcgggggggaagaaggcggcggcggcggcggcggcggagcagcagcacaaggtcgccaagcaggccgcagcgcggggttcggcgttgcgcagctggagaagatccgccttcaaaaaccagatggttggccgccctacggttcgccgccngcggcgannagccgtantatccgcngaagnagcagccacagccgttngcctcgccgcccttccacttgccgccgttgcagcaggattgctacgaggcggcggatcaccggaggattgccgccggcggcggcgtgcagccgtactacgagggcatgctgccgtacggctccggccggctggcggcggcgtcgccggcgttcgtggcgtatgaagtgaagggtgatcatcaccacggccagtatggctcgtcggagcagcagaggcagccgcagtactactcctggatgagctccagctacgacggctactccggcggccggagcagcgccgggagctcgtcggaggagctggatttggagctgagattgtagtagctgatggattaacctatagtttattacagcaattttttactactgcatccaccccacaccatctcctccaatgcggcgaaggtggacggcgggcacgcgaggcgacgacgggcaggcggagaacagcgagcggcggcggcggcgccgagccttgccacgcgagccggcggccgcggcg

SEQ ID NO: 178 - DNA, 756 bp, Oryza sativa
atgtccgagacggattcatcggcggcggcggcggagggtcggaagccgaggcggctgcgggggcacaagaagggcgccgtcacctgctgcgtcgcctcctcctcccgcccgggcgtcgtcgcctcctccggcgaggatggatgtctttgctggtttgatttgcgtacgaaggatgtgcttttcaccatggaggcgacaaatcaaccaatttcttctgtgtgtttcaaagcagtatgcctctgctggaaatgaaattttatctttcgatgttcgaatgaagccattggacacttataactacaatagagatgaaatcaatcagcaaaaaagcctgtacaaaagattgagtataagatttgcagcagtgtacaattcattccttggagaccttggacagattactggaggccttgattcaaagcttgctgtgtgggatttctccaaaagggcgaacactgttttctatagattatggggcaatgtttcaatcctccttttgttcactcaatagcagtttctgaagagggcatcttgggagggtcgtacaaagagaaggggaagtttcttgtttctggtggcaatgattcatcaattaaattatgggattggtccaaagggttctcctctgaaacaaacaacagtgctgaattggtgttggatataaaggtgaactggttgtgtactactccgactgattcagataacctgattgtgtgtgacacatccaaggtggtcaaagtttacaatctaccttag

SEQ ID NO: 179 - DNA, 708 bp, Oryza sativa
  N_region (364)..(364): n = any nucleotide
atggacgactcccacgacctggcctccccgacctcccctgacacggcgtcctcgtcgtcttcgtctacgtcgacatcatcgtcctccgccaccgtcgccccgaagaagcggccgcgcaacgacggccggcacccgacgtaccgcggcgtgcgcatgcggagctgggggaagtgggtgtccgagatcagggagccccgcaagaagtcgcgcatctggctgggcacgttcgccaccgcggagatggccgcgcgcgcgcacgacgtggccgcgctcgccatcaagggccgcaccgcgcacctcaacttcccggacctcgcgcacctgctcccgcgcccggccaccgcggcgcccaaggacgtgcagnctcgcgctgctcgctgttcgacctcccggacctgctcctggacctgagatacgagacgtcctcgagcctctcgtgcggggcgtcgtgggccgtcgatgacgacgtggccggcggcgtcgtgttccgcctcgaggagcccatgctgtgggattactgatcaatgtggctgctcatgggagccagtcatgcttccgtgtattagatcgatcagtggcttgtacatggcggtgcttctttctcttcttctttactctgcttctgctctgtgttctctttcttcttttctccctttgtattttgttttttttccttccattttttcttcttttctttgccaaatctag

SEQ ID NO: 180 - DNA, 699 bp, Oryza sativa
aaatcgaaacccctctctttgatctcgtcgccgaggaattaggaggagagagagcaatggccgccgaggagggagtcgtgatcgcctgccacaacaaggacgagttcgacgcccagatgaccaaggccaaggaggccggcaaagtgggtcataattgacttcactgcttcctggtgtggcccttgccgcttcatcgccccagtgttcgctgaatacgccaaaaagttccctggtgctgtcttcctgaaggttgatgttgatgagctgaagaggaagttgctgaaaagtacaatgtcgaggcaatgccgaccttcctattcatcaaggatggtgctgaggctgacaaggtcgttggcgccaggaaggatgacctccagaacaccatcgtgaagcacgtcggtgccactgctgcatctgcttctgcctaagaattctcgcaggcgcaagttatcaaataagggccagcacctggtgttgtagtaggtattagcgttagtcatcgttatcgtcagtttggcttgggtgtcctcgaatatcatgcgaaatcgattccgagttctctttttaaaattcctgatgatgatatatagtttgtggaaatttggatctggctattctgtacgagtttgctgactattaaagcaattattataatatgatgatgctggcaagcttgtagatagcttgaatttgtcctga

SEQ ID NO: 181 - DNA, 690 bp, Oryza sativa
  N_region (93)..(93): n = any nucleotide
  N_region (229)..(230): n = any nucleotide
  N_region (363)..(363): n = any nucleotide
gtctactacaccacggtgttcgtcgccgtggcccggtggctggggctcgccacggcggccggggccgcgaacgccgcggcgatcaccgccctngccgccgcctgcgtcgccacctacgccgtcgccgtgtgccgggacccgggccgcgtcccgccctccttcgcgcccgacgtcgaggacgccgagagccccctccacgagatcaagcgcaaggggaacttgagatatnnccagaaatgtggccactataaaccccctcgtgcacaccattgccatgcttgcaaaagatgtgttctaaaaatggaccatcactgtatatggattaataactgtgttggacatgagaactacaaaatatttttnatctttgtattgtatgctgtaactgcatgcttctatgctatggtatacccgctgactttggctttgacagtgctctttggttggcatatctacctcatattacagaataaaactacaattgagtatcatgaaggtgtgagagcaatgtggttagcagaaaagggtggaaatctttatcatcatccgtatcatcttggtgtctacgagaatcttatttcactgggacctaacatattctgctggctttgtccagtatcgactaatacgggaaatggcctccgtttccgtacatcacatgatattccattatctacaccatcgatgtga

SEQ ID NO: 182 - DNA, 679 bp, Oryza sativa
  N_region (353)..(353): n = any nucleotide
  N_region (368)..(368): n = any nucleotide
  N_region (371)..(371): n = any nucleotide
  N_region (384)..(384): n = any nucleotide
  N_region (392)..(392): n = any nucleotide
gcaggtgcaacggtgcgccgaggacaagaccgtgctgatcaccacctacgagggcaaccacaaccaccagctgccgccggcggccaccaccatggccaacaccacctccgccgccgcggccatgctcctctccggcccggctgccagccgcgacggcgccgccgccgccctgctcggccaccaccaccaccaccacccggcggcgatgttccaccagtccttcccctacgcctccaccatggccaggctttccgcctcgcgccgttccccaccatcaccctggacctcacgcagacgcctgccggaagggcgcggcgccgccagcgtgctgcacgcgctccaccaggcagccntcggtgatggagacngtnaacgccggggttnccgccganccaaaatttacgacggcgtttgcggccgccatttcgtccgtcgttgccggaaggggtcatcatcagggtctgtccaacaaaacccgtggcaacgccgccggcgccggagacggcaacggaaacgggagctccgccgcggccgttgccaccggggccgcctcgccggcggcgacggccgaggcacctgcggcgtccggatcacctcctcggctcgcgacgcagtcctgcaccacgtcgaattgatcgatcacagagacatacgtgacatatatcatatactagtatga

SEQ ID NO: 183 - DNA, 676 bp, Oryza sativa
ttcgtgagcgatggcgtgttctacgcggagctgaacgagatgctgacgcgggagctggccgaggacggctactccggcgtggaggtgcgcgtgacgccgatgcgcacggagatcatcatccgggccacgaggacgcagaacgtgctcggcgagaaggggcgcaggatcagggagctcacctccgtcgtgcagaagcgcttcaacttccccgagaacggcgtcgagctctacgccgagaaggtcgtcaaccgcggcctctgcgccatcgcccaggccgagtccctccgctacaagcttcttggaggcctcgccgtccgcagagggcttgctatggtgttcttcgctttgttatggagagtggtgccaagggttgcgagaggtcattgtaagtggaaagctcagggcccaaagagccaagtccatgaagttcaaggatggttacatgatctcatctggtcagccagtcaatgagtacattgactcggctgtgagacacgtgctcctgagacagcattatcttttgcagggtgttcttggcatcaaggtgaagatcatgctcgactgggaccccaagggcaaggttggcccgaccacccctctgccggatcttgtaaccatccatgctcccaaggaggaggaggagctgcgccctccggtgttgatcgctgaggcttaa

SEQ ID NO: 184 - DNA, 672 bp, Oryza sativa
atggccaagctgatcctcgccaccttcgccgtcgtgttcatggcgctcgccgccacctccctcgccggcgacccggacatgctccaggacgtctgcgtcgccgactacaagtccctcaaaggcccgctgcggctgaacgggttcccgtgcaagaggatagagaacgtgacggcgaacgacttcttcttcgatgggctgatgaaggccgggaacacggggaacgcggtggggtcggtggtgacggcggcgagcgtggagagcctgccggggctgaacacgatgggggtgtccatggcgcgtatcgactacgcgccatgggggctgaacccaccgcacacgcatccccgtgccaccgagatcatcttcgtcgtcgagggctccctcgacgtcggcttcgtcaccaccgccaacaagctcttcacccgcaccgtctgcaagggggaggtgttcgtcttcccgcgggggctcgtccacttccagaagaacaacggcaacacgccggcgttcgccatcgccgccttgaacagccagctccccgggacgcagtccatcgccgccgcgctcttcggcgccgcgccgccgctgccgtcggacacgctggccagggcgttccaggtcgacggcggcatggtcgagttcatcaagtccaagttcgtcccgcccaaatactag

SEQ ID NO: 185 - DNA, 658 bp, Oryza sativa
cgggtcctcgtctcctcgcgccgccgccgccgccgcggacgccgccatgtcgaagcgagagggaggggtgggtcggcggggaacaagttccggatgtcgctgggtctgccggtggcggcgacggtgaactgcgccgacaacaccggcgccaagaacctctacatcatctccgtgaagggcatcaaggggaggctcaaccggctgccgtcggcctgcgtcggcgacatggtcatggccaccgtcaagaaggggaagcccgacctccggaagaaggtcatgcccgccgtcatcgtccgccagcgcaagccgtggcgccgcaaggacggcgtctacatgtacttcgaagcagacaatgctggggtgattgtgaatcccaagggtgagatgaaagaggttctgctatcactggacccattggtaaggagtgcgccgacctctggccaaggattgctagcgcagcaaatgccattgtctagagcttgtttggagtagtagttttcagttctgtgccggatgtgataatgtgctccagttcttttttgtttccaaccaagtttaacctgaacttgaagcaaaccttcagttaaattttcagtgcggattgtgtccttgatgaatggaaaatggcatgtttgcttgtttaccttgctccttttaa

SEQ ID NO: 186 - DNA, 646 bp, Oryza sativa
atgtcagcgacgacgtcacctctggcggcggcggctcagcggctcgggctcgcatgctcgccggcgaacgacggcacggcgacgcgaacggagagcaccaggacgaagaggatgacgcggcgaactcaccggggaagaagcggcggcggagatcgggtcgacgacggcgacggtgctccggcggtcttcggcggcggcgaagcggtggacggggacggcggcgaccttgcgaacccgatggtggcgacggcgaccgacgacggcggctgcaacggcggcgcgacgcggctgaaccgacagcaacgacggcggcgactagggctacgcggaggcggcgctagacacgacggcaggctaaggcaaaggaggcgacggggggttcgggcggcggcggcggcgcgaggaggaagacaggcctgacagacgggccccacctgtcagcggctcagagagagaggagagcggcggctcggcggattgggccggactgggccgagggaaagagagagagagggttttgggccggctttcggcccaaagccaaaagagaacttttaaaacctttttcaatttaaattatttcttaaatgcaattccatttattaaaaatacttccttagctcaaataaatcccagaaaaatctag

SEQ ID NO: 187 - DNA, 621 bp, Oryza sativa
atgacgacgtcggagagggagccgtgcccggaccgcatcctggacgacgtgggcggcgcgttcgcgatgggggcggttgggggcaccgccttccacttcctcaggggcgcgtacaactcccccaacggccaccgcctctccggcggctcccaggccgtccgcatgagcgtcccgcgcaccggcggcaacttcgccgcctggggcggcctcttctccgccttcgactgcgccatggtccacgcccgccagaaggaggacccctggaactccatcctcgccggcgccgccaccggcgccgtcctctccctgcgccagggcccgcgcgccaccgcgacgtccgccctcgtcggcgcctccctcctcgcgctcgtcgagggcgccggcatcttgctcacccgcaccatggccacccttccccaggaggaccacgcctacccgttcccggtggtgccgccgcctgaggaggtctcggcccatgaatcgagccctatcgcatgggttaggggaattttcgggaggaaggaggagaagcctgctgctgctggtggtgaccgcaagtcggacgtgttggagtccttcgagacgcccagccctccaattccatccttcgactacaggtga

SEQ ID NO: 188 - DNA, 608 bp, Oryza sativa
atgccgctgctccctgctgcgaagcggagcgaggtcgtcgcggcagaagaggagcgcgcgggcctgcgcggcggcggcggcagcgacgaggaggacggtggctgcggcatcgacggctcacgcaagaagctccggctttccaaggaccagtccgccgtgctcgaggacagcttccgggagcaccagaaggcaactttggcgcagcagctcgggcttcggcctcggcaggtcgaggtgtggtttcagaacagacgcgcaagaggacgaagctgaagcagacggaggtggactgcgagttcctgaagcgctgctgcgagacgctcacggaggagaaccggaggctgcagaaggaggtgcaggagctgcgagcgctcaagctcgtctcgccgcacctctacatgaacatgtccccgcccaccacgctcaccatgtgcccctcctgcgagcgcgtctccaacaccaataacaactccagcgccgccgccgccgccgaccgccgcggcatcaggactactactgccgcaggcggcggcagcgtcgtcgacaccgccgccgacgggggcatcctctgccaccgcccgatcgccgtccggccgcagcagtcatga

SEQ ID NO: 189 - DNA, 607 bp, Oryza sativa
  N_region (19)..(19): n = any nucleotide
  N_region (25)..(25): n = any nucleotide
  N_region (79)..(79): n = any nucleotide
  N_region (94)..(94): n = any nucleotide
  N_region (448)..(448): n = any nucleotide
  N_region (453)..(453): n = any nucleotide
  N_region (456)..(456): n = any nucleotide
  N_region (460)..(460): n = any nucleotide
ggccgccttggacgtgctntgcaanaaagccggggtgctgggccgccagaagcgcggcgccaagagcatcgcgtccctngaagccgccgagttngcccgcgtgctgcgcgtcaaagcgctgggcgccgccctcggaatgaagcacgcggcgcgtgccatggtgccccgccgctccgggagcatcgtgtcggtggcgagcgtggcgggcgtgctgggcggcctcggcccgcacgcgtacacggcctccaagcacgccctagtggggctcaccaagaacgccgcctgcgagctcggggagcacggcatccgcgtcaactgcatctcccccttcggcgtggcgacgccgatgctggtgaacgcgtggcggcaggggcagggaggagatcacgcggatgaggatcaggcggcggcgagcgaggaggaggaggtggagaagatggaggagatngtgcngangctngcgacgctcaaggggccgacgctgcgggcaggcgacatcgcggaggcggcggtgttcctggccagcgacgagtccaggtacgtgtccggccacaacctcgtcgtcgacggcggcgtcaccacctccagaaacgtcatcggcctctga

SEQ ID NO: 190 - DNA, 602 bp, Oryza sativa
cgccggtacggcgcgtgggccgtcatcaccgggccgacgtccggcatcggctgcgccatggcgctggagctcgcgcgccgcggcctcaacctcgtgctcgtcggccgtgggctggacgtcggggtggtggtgaacaacgccagcgaggggaggcccggcgcggtgtacctccacgaggcggacgtggaggagtgggtgaggatggcgcgggtgaacgtgtcggcggtgacagaggtgacggcggcggtgctgcccgggatggtggagcggggcaggggcggcgccgtcgtcaacctcggctcagcggcgtcggaggccatcccgtccttccccctctacaccatgtacgcctccaccaaacgtacgtggctcagttctcccggagccttcacgtcgagtatgcgaacaaagggatccatgtgcaatgccagagcacggacacctacgcgcgcgcggcggtggcgtggatcggacgcggcgggccgctctgcacgccgggtggactgctgcaccagctgatgtggtgcatcaccgccgccgtgccggagtccgtcctcgactggatcgtcctgcgcttcaccacctggaacagaggacggtag

SEQ ID NO: 191 - DNA, 594 bp, Oryza sativa
atgtcctcctcatcctcttcgctgctctcctcgctcgccacgctcggcctcgggtactcgatcgccatcgcgctgggattcctcgtcctgctcgcgtcgctcctcctcgcgtcatacttctgcttccgccgcgggggcggcggcgggcacttctccggcgtgctcaccccgagctccagctccagccacctctccatcaccgtcccgcgcgtgctcttcgtcgcggaggggtccgagtcccccgacgcctactcctcgggcgtcgcggccgcgtcgtcccccgtggggctcgaccccgcggccatcgcgtcgtacccgaaggtccccttctacagcggcgccggcgcggacgccgacgccatgtgctcgatctgcctcagcgagtacgcggacggggagatgctgcgcgtgatgcccgactgcaggcacaggttccacgtctgctgcctcgacgcctggctgcgccggaacgcgtcgtgccccgtgtgcaggtcctcgcccatccccacgccggtggccacgccgctggcgacgccgctgtcggagctcgtcccgctctcgcagtacgccgccgatcggaggcgcagcaggtga

SEQ ID NO: 192 - DNA, 582 bp, Oryza sativa
atgacgtcagcgatgacgtcagcaccgacggcggctcggcaacgcatgctcgccggcgaacgacggcgcgaggacgcgaacggagggcaccaacgggtagagggcgacgcggcgaactcaccgagcaacggacggcggcggcgacgaggaagaagcggcggcagtcttcgggtcgacgacgacggcggtgctccggcggtcttcggcggcagcgaagcggtggacggggacggcgacgaccacgcgaacccgatggtggcgacggcgaccgacgacggctgctgcaacggcggcgcggcgcggctgaaccgacggcaacaacggcgacggctagggctacgcggaggcggcgctagacgcgacggcgggctaaggcaaaggtggcggcggatagaggagagctcgggggtgcttataaaggggctagcgagcggcgacgaaggcccacggcgaccggcggcgagaaggaaaggggcgagcgaattggaaagcggcggcggcgcggctcggctagggttcggccggcggcggcgcaaggaggaagacaagactgacaggtggggtccacctgtcagcgactga

SEQ ID NO: 193 - DNA, 561 bp, Oryza sativa
atggcgaagcctagcggcggcggcctcctcgacctggagcaccacttcgccttctacggcgcgtaccacagcaacgccgtcaacgtcttcatccacacgctcttcgtctggcccatcttcctcaccgcgctcctcctcctccacctcgccgccccctccgcgcacgccgcggccgccggcgccgccgtctacggggccttctacctcctcctcgaccgccgcgccggcgccctcgccgcgctcctctgcttcctctgctgggccgccagcgccgccctcgccgcccgcctcggcttctccgccggatggaaggtggtattggtagctcagctgttctgttggactatgcagttcattggccatggtgtttttgagaagcgagcgcctgccctccttgacagtcttgtccaagctttcttgatggctccattcttcgtgctactagagcttcacaagtttgttgggtacgaaccgtatcctggctttcacgccaaagtgcagaagctgattgacgaggcccgcaaggaatgggaggacaagaaagcgaagaagatgacgtga

SEQ ID NO: 194 - DNA, 546 bp, Oryza sativa
  N_region (187)..(187): n = any nucleotide
  N_region (205)..(205): n = any nucleotide
  N_region (211)..(211): n = any nucleotide
  N_region (308)..(308): n = any nucleotide
atggaggtgtcccacatggccaattgcagcaacgtctcctcaccggagcagcagccgatgccgccgtcttcggcagcggcgtcgtcgccgtcgccgccgcagcttgactacgacgtggtggtgatcctggcggcgatgctgtgcgcgctggtgtgcgcgctggggctcaactcgatgctccagtgcntggtgcggtgcacccggngcgccntggcggaccccgtcggctgggtggagcaccgccgcgccggcgcggggctcaagcgcgaggacgtcgtggcgctgcccgtcgccacgtacgtcgcctngccggcgccctccgtcgccggctgcgccatctgcctgtcggacttcgccgacggggagagggtccggctgctcccggcgtgcggccaccggttccacgtcgtgtgcatcgacaggtggctcctggcgcactgctcctgcccgacgtgccgccgccgcccctcgccagaggccgacggccacggcgccgtcgtcggagaagaccaccaccatcgcctgcaagttttgactgctgcttaa

SEQ ID NO: 195 - DNA, 538 bp, Oryza sativa
atggccgccgcgccgtccgccacctccgtccacgacttcaccgtcaagaggatgcaagcggaaaagacgtgaacctgagcacctacaaggggaaggttctcctcatcgttaacgtcgcatcccaatggtggcttaactaactccaactacactgagctgagccagctgtatgagaagtacaaggtccaagaggctttgagatattggctttcccgtgcaatcagtttggagggcaggaacccggctccaatgaggagattgtccagtttgcttgcactcgcttcaaggctgagtatcccatttttgacaagaggttgatgtcaacggtaacaatgctgcacccctgtacaagtatctgaagtctaacaaaggtgggcttttcggtgatagcatcaagtggaacttctccaaattcttggttgacaaggagggtcgcgtggtggatcgctatgcgcccaccacctcccctcttagtattgatggtaatgtcctgcactaccacttgcaatctccttttctaacagggctgaattgttag

SEQ ID NO: 196 - DNA, 522 bp, Oryza sativa
  N_region (402)..(402): n = any nucleotide
atggcgggcggcggtcctcgtgctcgtcgtcgccgtcctcggagcggtcatggcgggcggcggcggcacatcctcgccccgctctcctcaccgcctgccccaacgccaagcggcggcggcatcctcgggacctggcggcgcggatctggagcgtcctcgccgtcctcctcaacgacggcggcggtggtggcgcgtcctcgcccgccctcaccggtgacagtggcgcggattggagctggagccggagtcgtcggagtggaaggagttcctgctcgggaatcaaggtcggccttctgcacggcgcgcgttctcgtcctcgcatctctgatcgcggctaaaaacgcagttagcgagcggagcgtaaaggtgggtgtgcctcgcttccgtgcagcgagcgccgtncgccgccgaggcgtcggctgcgcggttgcgtggcgccgtcgcgcctcgcgttctggaagacgtgagctgtggcatgctggcaatcgcccgctatccgtggtaaccccatttcattggtaa

SEQ ID NO: 197 - DNA, 518 bp, Oryza sativa
  N_region (334)..(334): n = any nucleotide
  N_region (358)..(358): n = any nucleotide
atgcggacgccgcctacgagttcgagggggcgaggctgccccagtggcgagttgggggcggcagcatcctccgcttgcgccctggggccccgcaagccgccgacgcccccatcctccgtgcggcgggggccagcgcaggtcaggggaaccacgcggcgccggcgatgtcctcctcatcgtcctcccccttggcatcgcccttccccgttgcgccgtcgccgccgccaggctggtttcggcagatcgcggaacggccgcctccactttcccgccctgctgatcgaggtgccggcgaggatcagccgccgcccgacccacttcgcccctcggatcngcccggcgttgcccgcttcgaatngcggttcaacctgccgttgttcgcttcggccggcgcccatgccgctccgccagtttggagagcgagagaagagggagggagaggatagagagggatagagaaatgggaggatggcgtgtgggtcctcatgggcccaccattttttattgtttgtgtgtga

SEQ ID NO: 198 - DNA, 516 bp, Oryza sativa
  N_region (363)..(363): n = any nucleotide
  N_region (366)..(366): n = any nucleotide
atgggagggagcaaggatgagcagcaagacagggggctcttctccaacctgatgcacggcgtcgccggcggcggcggcggccatggctatccgtaccctcctcagcaggggtactacccgccgccgcccaccgcgtatcctcctcctcctccggcgggacaaagaacggtggaattctgttcgtacaattttaatcgttttgaggactccctgaatggttttgcaggtaaccatggcggaggaaacatggggatgctagctgcaggtgcagccgctgccgcggcggcgtacggcgcgcacaagctttcccacggtcatggccatggaggctacggctacggtggccaccacggcggcctcttnggnggtcaccatggccaccacggcggcttgtttggaggccatcacggacaccacggcggcggcctcttcggcggccaccacggccaccatggcggcttgtttggcggtcaccacggcttcggtggccaccacggacaccatggccaccattga

SEQ ID NO: 199 - DNA, 506 bp, Oryza sativa
  N_region (369)..(369): n = any nucleotide
atgtcttccacgttcaacggcgacgagttcgccccgttcttgggcttcatcggcgccgccctcgccctcgtcttctcattttgcaggcatgggggcggcgtacgggacggctcggagcggcgtcggggtggcgcacatgggggtgatgcggccggagctggtgatgaagtcgatcgtgccggtggtgatggccggagtgctggggatctacggcctcatcatcgctgtcatcatcaccaccggcatcaacccgacggcgatgccgtactaccacttcgacggctccgtccacctcgccgcggggctcgccacggggctctgcgccctcgccgccggcctcgccatcggcgtcgtcggcgacgcccggcntcagggccaacgcgcagcagcccaagctgttcgtcggcatgatcctcatcctcatcttcgccgaggcgcttggcctctacggcctcatcgtcggcatcatcctctcctcccgcgccggccagtcgcgcgcccactaa

SEQ ID NO: 200 - DNA, 504 bp, Oryza sativa
atggactggagcgcggtgacggcggaggacctggtggacgcgctgcgggaggtggactggtcgacgccgccgcgccccgtgccggagttcttctcccgcttcaccgtcccccgctcctactccaagtggaccagccgcctcaagtgcaacctctactagtacccggttgctatacttgcagcctttatgactggaatcagcattgcatttcttaatgacagagctttgcagtcactttcaatgagaaagtcacgaggactgtcagacaattttcaccacatttagctgcaaaaatgaggccaccaataaccctgttcttcgtggtagaccaagttcaaagaggtcgattcatatttgtgggcgacctcgctggctatttgtgctgttattttctgcaggcaactctgcttcatgctagcttcagaacacctaatctgaaagcacgtctgaatacattcagagaagaattccgagctgtttggaggaattatagtgagctttaag

SEQ ID NO: 201 - DNA, 501 bp, Oryza sativa
  N_region (1)..(1): n = any nucleotide
  N_region (67)..(67): n = any nucleotide
  N_region (445)..(445): n = any nucleotide
ngtgtacccggcgctcggcatcgtgaagcgcgagggcgggggcgaggccgccgggaggatcgggctnaacctcggccgccggacctacttctcccccggcgacatgctcgccgtcgaccgcctcctcatgcgctcccgcctcggcggcgtgttcggcctcggcttcggcggcgcccaccaccagccacctcgctgccaggccgagggctgcaaggccgacctctccggcgccaagcactaccaccgccgccacaaggtctgcgagtaccacgccaaggcctccgtcgtcgccgcctccggcaagcagcagcgcttctgccagcaatgcagcagaggtttcacgtgctcacggagtttgatgaggccaagaggagctgccggaagcggctggcggagcacaaccgtcgccggcggaagccgaaggacgcggcggcggcgccggtanccgccgggaagaagcctagcggcggcgccgccaggtcttacaccggtgacaacaga

SEQ ID NO: 202 - DNA, 491 bp, Oryza sativa
atgtcggactctgaggagcaccatttcgagtcgaaggccgacgctggggcgtccaagacctatccccagcaggccggaaccatccgcaagaatgggtatattgttatcaagaaccgcccctgcaagaggtggtggcaggtttctacctcgaagactggtaagcacggtcatgccaagtgtcactttgttgccatagatatattcaatggtaaaaagcttgaggatattgttccttcgtcccacaactgtgatggttccacatgtgaaccgcacagagtaccagctgattgacatatcagaggatggattcgtgagccttcttactgagagtggtaacactaaggatgatcttagactcccaactgatgacagtctcctgggtcagtcagatcaagactggatttggtgaaggcaaggatcttgttgtgactgtcatgtccgccatgggggaggagcagatctgtgcgctgaaggacattggccccaagtaa

SEQ ID NO: 203 - DNA, 486 bp, Oryza sativa
atgtcgctgatccgccgcagcaacgtgttcgaccccttctccctcgacctctgggaccccttcgacggcttccccttcggctccggcggcagcagcagcggcagcatcttcccgtccttcccgcgcggcgcctcctccgagaccgcggccttcgccggcgcgcggatcgactggaaggagacgcccgaggcgcacgtgttcaaggcggacgtgccggggctgaagaaggaggaggtcaaggtggaggtggacgacggcaacatcctgcagatcagcggcgagcgcaacaaggagcaggaggagaagacggaccagtggcaccgcgtggagcgcagcagcggcaagttcctccgcaggttccgcctccccgacaacgccaagccggagcagatcaaggcgtccatggagaacggcgtgctcaccgtcacggttcccaaggaggaggccaagaagcccgacgtcaagtccatccagatctccggctag

SEQ ID NO: 204 - DNA, 469 bp, Oryza sativa
cccccaatcgccgggaacgcccgcccatggccgccggccgcctttatcgccgccgttccgacctcccccgtggctggctccctctcctctcctataaaatgcaaccctctcgctccgttctatcgctttagccccctcccgcggtctcccgtggtccctagccacctccccaccgtcgccctctctctcccgtgccgctggacgcctccagccgcccctaccgccttgcccgtgcgccggccggccgcgccgttgcctcctccagcgtcgccgccacctcctccaccccggcctgccctccatttcccgcggagacccccggagctgcctttccgccgtcgcccttctctttcctccgtgccggccacctccagccgcacctcccgcctcgcccgtgcaccctccggctgcgccgccacctctcccggcgtcgcagctgccccctctttcccggcttcgcctccgtttc

SEQ ID NO: 205 - DNA, 467 bp, Oryza sativa
agggcgccggcgggttgggaggaggccggcggggagctcctcctgcgtggccgcgagctccgcgtcaaagggtggtgggtgctgccggtcaaggcgcaccacgccgcggggcggctgacgggcgccgcgtccgccatgcttgccatcgcagcctgcgggaagcctctgcagcatggcgccgttgcgcggggccaagcgccggagaagaaggctacaatggcggcggccgctgcggcgggagcagattgcgaggcggatcgacgccgacggcgcgccgggggagagcacagcgctgcgggcgcgctcctacggctgcatccgggtgttcctcgtcctatccctgctgctgctcgccgtcgaggtcgccgcctacctctaggggccttgctcccccggccgccgcctacctcggccaggaggacgggggagctccgttttcgtacccagccaccgcgaccccatcttga

SEQ ID NO: 206 - DNA, 462 bp, Oryza sativa
atggcgcccaaggcggagaagaagccggcggcgaagaagcccgcggaggaggagcccgcggcggagaaggccgagaaggccctggcggggaagaagcccaaggcggagaagcgtctccccgccggcaaggccgagaagagcagcggcgaggggaagaaggcggggcggaagaaggcgaagaagagcgtcgagacctacaagatctacatcttcaaggtgctcaagcaggtccaccccgacatcggcatctcctccaaggccatgtccatcatgaactccttcatcaacgacatcttcgagaagctcgccggggagtccgccaagctcgcgcgctacaacaagaagcccaccatcacctcacgggagatccagacctccgtccgcctcgtcctccccggcgagctcgccaagcacgccgtctccgagggcaccaaggctgtgaccaagttcacctccgcttag

SEQ ID NO: 207 - DNA, 441 bp, Oryza sativa
gggaggggagggtcggcggggaacaagttccggatgtcgctgggtctgcctgtggcggcgacggtgaactgcgcggacaacaccggggccaagaacctctacatcatctccgtgaagggcatcaagggccgcctcaaccgcctcccgtccgcctgcgtcggcgacatggtcatggccaccgtcaagaagggcaagcccgatctccgtaagaaggtcatgcccgccgtcatcgtccgccagcgcaagccgtggcgccgcaaggacggtgtctacatgtacttcgaagtttgcagataatgctggagtgattgtgaatcctaagggtgagatgaaagaggttctgctatcactggacccatcgggaaggagtgtgctgacctttggcctaggatagctagtgcagcaaatgctattgtctgagcttgtttgaatgaattgtaa

SEQ ID NO: 208 - DNA, 423 bp, Oryza sativa
atggcggcgatgctggtgggcatggcgtcggcggcgacctacaacgtgggcgagccgggcggcgcatgggatctcgtgttcaagtactctgctcagcggcacgacgtggtggaggtgaacaaggcgggttacgactcgtgctccacctccacctccatcgccacccacaccaccggcaacgacgtcatccccctcacctccaccggcacccgctacttcatctgtggcttccccggtcactgcaccaccaccggcaccggcaacatgaagatccagatcgacgtcgtgcaggcagattcctcctccgccccggcgcctgtggccaccactactcccccttcgccgccctcctccgccgccacctccctcaaggccaccgccgcagctgccgtcctactcgccgccctcctcatcatggcttaa

SEQ ID NO: 209 - DNA, 415 bp, Oryza sativa
  N_region (247)..(247): n = any nucleotide
atgaggcggggcgctgtgacgagaggccgacggcacgggagtgatctctccggcctcgggccggggaagaggaagaagcttgccactttgggaaaaggaggagggggccgggtcgatgacgacggcgatgacggcggggcggtttggagcggagcggcgacacggacggcaggcgtgggcaggtgcggcagaggctgacggcggcggcgaccaggcggtcggccaccacggcacgcgcgcgcgggcnacagcaacgggcggcgcggcgatttgggcggcatcggcgggggaacggcaggagggctcggcgcggctcacgggcagagcggggagagagagagagagagagccggggagggagggggagatgggccgagagggattcggcccatcgaacccgagggaggcaaaatag

SEQ ID NO: 210 - DNA, 402 bp, Oryza sativa
atggcgtccaaggcgttcgctctgttcctggccgtgaacctcgtcgtgctcggggtggcaagcgcctgcggcggcagcccgtcgtgcccgacgccgacgccgtcgaccccgaaaccgtcaacgccgaagccgacgccgtcggctttcgggaggtgcccccgcgacgcgctgaagctgggcgtgtgcgccaacgtgctgggcctgatcaaggccaaggtgggcgtgcctccggcggagccgtgctgcccgctgctggaggggctcgtcgacctcgaggcggcggtgtgcctctgcacggccatcaggggcaacatcctcggaatcaacctcaacctccccatcgacctcagcctcatcctcaactactgcggcaagaccgtccccaccggcttcaagtgctaa

SEQ ID NO: 211 - DNA, 390 bp, Oryza sativa
atgggtcgcgtgcggaccaagacggtgaagaagacctcgaggcagttccaaaccaacaagaaggtgctcgaagaagtgtccatcctgccgtcgaagcggctgcgcaacaaggtggccgggttcaccacccacctgatgcgccgcatccagcgcgggcccgtgcggggcatctcgctgaagctgcaggaggaggagcgcgagcgccgcatggacttcgtcccggagaagtcggcgctcgaggtggaggagatccgcgtcgacaaggagaccatggagatgctcgccgcgctcggcatggccgacctccccggcgtcgagcgccagcaagaggtctccgcgccgacctactcccgcccgccgtacggtggcccccgccgcgaccgcgtctag

SEQ ID NO: 212 - DNA, 359 bp, Oryza sativa
atgaagggcgggaagctcggcatggaggaggcgcgggagctgcagctcaaccgcatccgcatcaccctctcctccaagaacgtcaagaacctcgagaagggtttgcgctgatctggtgaagggcgccaaggacaagcagctgcgcgtcaagggccccgtcaggatccccaccaaggtgctccacatcaccacccgcaagtcgccgtgcggtgaagggaacaaacacatgggatcgtttcgagttccgcatccacaagcgggtgatcgatctcatcagctccccagatgttgtgaagcagatcacctccatcaccatcgagcctggtgtcgaggtcgaggtgacgatcgctgatgtgtaa

SEQ ID NO: 213 - DNA, 357 bp, Oryza sativa
  N_region (63)..(63): n = any nucleotide
  N_region (122)..(122): n = any nucleotide
  N_region (167)..(167): n = any nucleotide
  N_region (170)..(170): n = any nucleotide
  N_region (175)..(175): n = any nucleotide
  N_region (182)..(182): n = any nucleotide
  N_region (195)..(195): n = any nucleotide
  N_region (201)..(202): n = any nucleotide
  N_region (295)..(295): n = any nucleotide
  N_region (321)..(321): n = any nucleotide
cggccaccgccaccgccaccgccaccgccgacggatccatcgtcgccggatctagggcggganggaggtgacaggggaggagggagccgccgccgccaccgccgacggacccacgcgccgangccgccgacaccaccattgccgccggatctggggcaggagggagncanagggnagaaggnagccgcgcgccgncgccgnntccgcccgcagccgccgccaccatcgccggatccacccgcggctaccgccgcaaccgccaccaccggcggatctgccgcgggagggaggctanagggggttgagggagccgccgccganaccgcccccaccctcggatccactgcggccgcaaca

SEQ ID NO: 214 - DNA, 336 bp, Oryza sativa
gtgaacgttcccaagaccaagaagacctactgcaagaacaaggagtgcaggaagcacacccttcacaaggtcactcagtacaagaagggtaaggacagcctgtctgcccagggaaagcgccgttatgaccgtaagcagtcaggatatggtggtcagaccaagcctgttttccacaagaaggcaaaaaccaccaagaagattgtgctgaagctgcaatgccaaagctgcaagcattactcccagcaccccatcaagagaggtgcaagcatttcgagattggtggagacaagaagggcaagggaacatctcttttctaaactacctactggatactga

SEQ ID NO: 215 - DNA, 316 bp, Oryza sativa
atgtcggccgccggggaggaggacaagaagccggcggggggagagggcggcggcgcccacatcaacctcaaggtcaagggacagaggatgggaacgaggtattcttccgcatcaagagatctacgcagctgaagaagctgatgaacgcctattgtgaccgtcagtctgtggatatgaatgctattgcattcctatttgatggtcgtaggctccgtggcgagcagacccctgacgagcagctcgagatggaagacggggacgagatcgacgccatgctccaccagactggaggctgcctgcctgcctagaagcttag

SEQ ID NO: 216 - DNA, 311 bp, Oryza sativa
atgtcctcccacgacgcccacctcacccgcgacgaggtcgtcgaccgcctcctcgacgtcctcaagtgccaccccaaggttgacccctccaaggatctggggctggacagcctggacacggtggaggtggtgatggcgatcgaggaggagttcaagctcgagatccccgaccaggaggccgacaagatcgactccctcccgctcgccatcgagtacgtcgccaaaccaccccatggccgcctgacctcaccgatccgtcgtgccgtggtgaggcttttcttgatttactatttttgttctgcgggggatga

SEQ ID NO: 217 - DNA, 311 bp, Oryza sativa
atgaggccgactggtcgtcgttcttctccgccggtggctgctgctcttgccctgcttctcctcctcgtcctcttcttcttctcccactgcgcctcagctgctcgcccactgccagcatcagcagcagcagagctagtgcttcaggatggcgccaccggcaatggcgacgaggtttccgagagttgatgggagcagctgaggaggaagcagcaggattatgcgaggaggggaacgaggagtgcgtggagaggaggatgcttcgcgacgcccacctcgactacatctacacgcagaagaggaacaggccttga

SEQ ID NO: 218 - DNA, 308 bp, Oryza sativa
  N_region (8)..(9): n = any nucleotide
  N_region (67)..(67): n = any nucleotide
  N_region (84)..(84): n = any nucleotide
  N_region (105)..(105): n = any nucleotide
  N_region (107)..(107): n = any nucleotide
  N_region (110)..(110): n = any nucleotide
  N_region (117)..(117): n = any nucleotide
  N_region (125)..(125): n = any nucleotide
  N_region (128)..(128): n = any nucleotide
  N_region (164)..(164): n = any nucleotide
  N_region (176)..(176): n = any nucleotide
  N_region (256)..(256): n = any nucleotide
ggggaaannccccccaggaggaaggagaagcccgcgcgggcgacggtgttccggcgaagttcgggcnaggaggaggtgatgccngggatgagagcggcgtcttgnanccnaggaagntggtggcnacntcggccggcgctccggggacgtggcagaggcggccngaggcggagaantggtggcgacgccactggacgccggcgaggacgcgtctccggtgctttccccgcgaaacggagggctgaccgagggaganggggcagctgcgacgccgggagaggtggcggcgcagcccggagggtgcacgg

SEQ ID NO: 219 - DNA, 1992 bp, Oryza sativa
  N_region (56)..(56): n = any nucleotide
atgggtactacaaggctgcgctcggccggctcccggtggaggagacgccggcgctnatcccggcccttccttgacgccggcgtctgcttcggcctcatggatcccatctccaacatcatcgtcaacaccgtctccgaacccctcctgcccgactgcacggcgtcggaggaggaagaggaggatgggaagtcgaggaagaggaagagggggagagacgaggcaattttgtccgagatcgccgcggatgccagctgcatccgctgctttcctccgaggatggggcggtgcgagacctcgccggagcggaggaggaacgtccccgtcgcgcagcgctcgctcgagggcctcgtcaccttcctcatctgctacttccgccacctccccgtctcggaggccttgcactacctcctgctcaccaaggccgacctgctcgccgccgtccacctcatcgagtacactcggggaattggaggcaggctgttcccgatctcctccccaaccacagaggaacctctcaaggagccacccgacttcccgaaacctgtccggcaggcggctcttcgcttgaatcactacatcaaaggaatcagcagcttgaacaagttcccccatgaattcacagatactctgagaactcttctcctggagaaaatccatgtgttgtacctcaaagcgatcgcgcggcttcccagggatgatttgcgcagacgctatcaccatagcctcctcaaggcaggccattgctttggtcctgctaatgaccgtgtctccaacatcatcctcaacaccatctggtacgacaccacattccctccacatgaggagcttaagctggacatgatctgcaccaacagtctcgtgcgcattgagtgccgctccctcaacggccttcttgctttcctccacaacctcttccctgcattatctgaacacgatgccatgatgtaccttttccactccaatgctaaccttgaacaagtcacttttagagcaatgtgcgatcatgatatatcctgctctcatgaggatgcttacaaggcagcagcagacgcggcatggcatcctcatcctgatgctcaagctgaattcgctgtgtcaacccatccaatgctgttgcccattgacaagccatcgctagcggttagccgcacactcacttccaatgaggtggagctcatttcaagatatttttcacagaaatcataccctgccaaatctgtgccatcagttcctgaattggttcccagagctgacgagttggtcaaacgcagccagcaaaatttcatggctaatcaatatttcatctgcagaaaggtgaaagctgcattgaagagatatgcaaaagaaaagggaaccgagtatgaacttcatgtcatctgcggtacaaattttgatgtacctgagaatggcagatatggttactttcggaatcgcaaaggatttccatatgctcatgtgaattttctggcaagaccaaagggttcacagcgtgataacactgctcctagtcttttcttcctggagtgcagcaatggtgaagaagatattggtacactattttcatgctgcgctgaactagagtcgcctacagattctggtaggtgctttcattgtgagtgcaaaggaactaagattgtgcatccagctattggaacataccgagggcgtgaaacagacttcgaggaaatgtcttgtgggaaacaggaaattgacagtaaaggacttattatctctgagaagatggctattgagtttgtgggtttatgtgaggatgacagtatctattttgatccttctaaggactatgacttcgctcttggcttgaacaacttagttagggaggatgatgaagctcttgaagagcttcacagagacattgccgagtgcgagagaatgaaagtctgtgacatgtcctgtgagccagatctgttggcggaaatcacagaggatgttttgcaagattgtcaagggcatcttgttccccagtgctaa

SEQ ID NO: 220 - DNA, 1605 bp, Oryza sativa
  N_region (204)..(204): n = any nucleotide
  N_region (376)..(376): n = any nucleotide
  N_region (415)..(415): n = any nucleotide
atgaccacaagaaaccaacgtccctactcgatcgatgcgcgtctcctcgtcggcggcggcggtcaagtggaggaggaatcgtcggaggtgacggtggaggaggagccggcggtcatggggggaggcctggaagtcgacgtagaacatgtactcgaagtgcttggcggtgccgacgttggcgtcgtcgacgaggcggattgggcngtggcggtgcgggcggctctcgatcttggtgagggtgatgtcgcggaaggcgaaggcggagaggaccttgaagaggacggaggtgccctccttgtcgtgggcgaacacgatgctggtcttgaaggggcggtcggtgcggggcacgatgggctcgcgggcgagcatgacgaancgggtgacgttgccgcagtcgtcctggatgccgtcggcnagcacctccatgccgtacagctcggcggcgcgggaggaggcgatggcggccgtgtcgcggaggccgttggcggcgacgtactcggcggcgcccgcggtgtcgtcgaaggcctcgcggacgacgttgagccccatggcggtgagcgtgtgctcgcactgcgccagcgcctgcgggtggctcatcacgcgggtgaggcactccttgcggacccccgggagcgccatgaggcagtggtgcacggggagctgcacctcgccgacgatgtggagccggtgcctgagcaggaggtcgtagttgcggtggatgctgccgcccagcgagttctccacggggagcacggcgcggtcggcgatccacagctccacggccgagaacgccacctcgaactggtcgcaggggatggcatcgcagcccgggtacgccttcccggccgccttctcgctgtacgcaccggggacgccctggtacgccacgcgcagctgcgacccgtgcatcggcgccggcgacagatccgagatccgcagcggctgcggcaggttcttggcgacgcccccgccattaacgctgctcacgggcaccaaatccagcaccgccccgccgtcctccgccgccgcctgctgctccgggaccagcggcgcgacatgcccattaacgaagcttggcgccgcggcgtgcggggacgccgccccgagcgcggccaccttgctggacagcacggcgcagctgctctgccactccgcccggccgcccaccacggcgccctgcagcgagcacctgaccacccctcctcgtttgaagcttcagcgcgagaagctgaggaagggaggggggcgggggttggtggtgagacgaagcgtgggctgggggttggttgggtcagcgtcaaaacctcaaaaaaattgtatccggagccacctccacccacggccatcctcctccgcggctctcaccaacccaacccagctcgggctcgcgcgccgtggaatggggtggaacgtgcgacgcagcagtggtgcatcccccctcgcgctcgctcgcgtcgcggcctcgcgccggcgtttgctgccgccttgcttcgccttttcggcgtcgtttcttggattattgaccgggggatcacgcatctagtacgtgtggatgggatccatgccgattgtggcgggaaattgtcccgtgaatctgcttgttag

SEQ ID NO: 221 - DNA, 1287 bp, Oryza sativa
atgcgaattcgaaccccatggaatcagtacaacacaccccatcttgccataaaaccgacccgtcaccctgccgctggcggtgaccataaaagccccgaccagtcgaccccctttcgcggccgccggagcagcggccggccaccgccggtgttaacagcggcagccttttcatgcggccacaacggtcaaaagcgcagagcatccgaggctggcccaccaccacgcgcccgacgtgacgaaactgccccccatctctctctctctctttcccctcccacgcaacgacaaatccggctcgaaccactgaccatcccgtccacactgcaccgcgctagctcactccctcacttgcgtccccccttcccgtggctgatctcgccgtcgtgcggccgcgggctccggcgaccggtcatggcgtactccggcggtggcgggaagctgtccgccgtcgatgcgatcctcgccgaggcggccgacctcgtcgcgctggagcagatcgccaagctcaacacagcccacctcgccgccgacggcgactccgcgctcccttccagcctcgagtcccgcttccgcaagctcaagtccctccccgccgcgccgttgcctccgccgccgcccgccaagtccctgggccgcagcgccaccgcgccgccccaccacaccgacccgccgccatcggagacgccggaccctgctccgcctgcgccccctgcaccggcggcacaagaacgccgaccagaagacgccgccaaggaagcccaggagaaggagaactcctcgccgccgccgtcgcaggctcatcctccaccggccgtgaccgttccgacggcggcggcggcggacgacaacgaggaggacctggagaagctgttcaggccagggcgcggccggccgacgctgagggagaggaacagggggagggacgacggctcaccgtcgccgccgcgccaggcgtgctgcttcggcttctcccccaagaagacgctgcagaggactccgaccgggagcggcaggaagagccgccgcgccggcgtcgccgccgccgccgacgacgacgtccttggcatcggcgacgccggcgagtggggcgacgagaacaggaggatcgtcaccgagctcaagcagcagcagcgcaagctcaagaaggcgctcgaggagcaggtcaaggtcagcagggagacggccaagatggcgcagtgggtgaagcaggcgtccgcgcggatgacgcacaccgctgccattgacgacttgctcagcgactgcgacgatgaagacgagctcaagtga

SEQ ID NO: 222 - DNA, 1197 bp, Oryza sativa
atgcagacccgcaagggaacattggttcagaagtataaagtaaaggtagttgctgatgatcttgggaccagttcttccaaaggtgaagacgggaaacaagctccagatggctcggctcaactgagtgacaaaggtgctaccgacggttctctaggaagtcaaggtgacaactctcaagggatccatggagttcaaggcgatggagtgcatagagttcaaggtgatgctgctcaggggttgcaaaggggaaatcttaatcagaatagtgatgttgcacaagattttttcaataatttccaagaccgggtcgactatgctgtgcaccatgctttgatcaatcagtctggggttttcccccgtcgcaccatcatgtcagccgacagcgccggcatcgacccccttacctactccgtcagcattggcaccaggccagctggtgaaccctcagttgttgtacaacagattcaggtggccattgagggaggcaggattaagtttgatgattccaaaaagccgatgagggtcgatgataaccaatttcccgttaacatggtacacaaagctggccgaacagctgatccggggcgcatgaggggttatcaagtaagttcggctagaattataaacaaatgtcaaaggaaatatgacaagcaacaggaaaggcatcatgaagaagataatggtggctttgatcctcattggggctgtgagttcttcaggttctattggaatgaagctgatgaggcaaagaggttggcaaaaggaaagagtgttgtgacggcaccagttaacatggcagtgttcgagaaacctgaggggacagagaatcggcatcttaaaccattgtatataaatggctatgtcaatgggaagccgatgtctaaaatgatggttgatggtggggccgcggtgaatttaatgccttttgctacgttcagaaagttgggtagaaatgccgaggatctcatcaagacaaatatggtgctcaaggactttggtggcaatccatcggaaaccaaaggtgttctaaatgtgaagctgacagttggcagtaagactattcctaccacgttttttgtcatcgatgggaagggttcttacagcttgttgcttggaagggattggattcacgccaattggtgtattccttcaactatgcatcaatgcttgattaagtggcaaggcgacaaaatatag

SEQ ID NO: 223 - DNA, 1104 bp, Oryza sativa
atggttaggacaatatttttttttcttttactgctgttgcaacggttcattcgtgcaaaggttcagaaaatgtcaacgcagcgcattatctcattcccaggaatcctaggtttgtacattgtatatactgatgatgttgtagttgtagtggcagataagaagaaattaattataccatggccgtgggaaccatgcaagaaccagaggagagagagagaggaagaaaaaaaagtggcagagaaggaagagaagatcacaagaactccaagaattcaccgaggaagtggatggatcgaaccatggagccccataatttacgcccaattgtgctgctccggcggcggcggcgatgtgtgggtgggtagagatcatcatcagccggcgcggatccgcttcttgggcggcagcgaccggaacacggcggcgaggtcgcgctgcacggggaagaacaccagcgtcgacggcgacggcgacgacgacggaggcggcggcgacttcctcttcgccgtccgcgccggcttcctcggcgccggcgggcacacggtcggcgcacgcagcctgctctcctccgacgtcggcgtcgtcggctcctcctcctcctccttcttcagaggcgccctcgcttcgtcggacggcgccggcgaggccgttgacgacgacgtccgcgcaggcggcggcggcggcgccgtcgtcttgatcggcggcagcggcgggaggacgaggtcgccgggcggcgcggcggccggggagctcatctgggcgcgcgaattcttggctcgcgtgtgggagatcaaggcgtggttgagtgcaagggaggcgaggcgagaggaaggagaagacaagcgagggcgagaggcgaaaacgacgaggatatgtgtctggaggagaaaactttaccctccaattgtgaaaaaattacattgggatgccactggcttggatgagaagggaagtgaggaccagatctctcaattccttccatccggcccacaccaatgcagggttggttggacacaacaaaggctacaaataggtttgcgaaaagagtcgaaaccaccaaaggaatttgaaatctgtcccttcctacataatcatcgggcttga

SEQ ID NO: 224 - DNA, 984 bp, Oryza sativa
  N_region (347)..(347): n = any nucleotide
  N_region (412)..(412): n = any nucleotide
  N_region (535)..(535): n = any nucleotide
atgtctacctgcagcgctcgtaattccggcgacggcggtgagggcgtcgaccgcatcagccacctcccggaggagctcatccagaacatcctcgtccgcctcccgtccgtcgacgcggcggcgcgcaccagcgtcctctcccggcgatggcgccgagtctggacccgcctcccgtccctctccttccagtgtgattccgagaagccgggcgccatcgacgccgcgctcgccgcctactccgcgccggcgctgaaccgcctcgccctctccgcggcccacgccctcgaggccgccaccgtcgcgccgtggctggagttcgcgtcgcgtcgcgtcgccggcaacctcangctcaacttctcggtggccggcggcctcgagctgcccgcctgcgaacgggcgacgagcatcaacntccacgtcgggcacctccgcttcccgccggccggctcattcgcggcgctggcctccctggccatcgtcggcgcccgcatgcagggcggcgacttcgaggccgtgtgctcgccgcggtgccctngcctccggcggctcgccgtgcgcagcgtcacgctcgtcggaggcgccgccgacgtctctgtgcgctccggctcgctggagtggctggtcttcatggcgcagggcgtcggccggctggaggtcgccgccccgaggctccggtacttccgggcagaagccaaggccgccgccggcgacgtctcggatgtcagcgtcgcctccccggtgctcgaggacgtcgcttggtacggggagttcgacccgcgccgccaccggttcgcagaggccggccaccgcctgcggaagctgatggtcatggacatgccgacggcggcgctgatgcggcgcttctacatcgtcgacgagctcgtgcttagcttcggaatttcaccggtgactgaaattggagaaaatttcaatctcctagagccttggccattattgtatcaagatgcaactggcagggaatag

SEQ ID NO: 225 - DNA, 965 bp, Oryza sativa
atgaaccacacgggctatccaatttttgcgtgcgggtgggccaccacccgcacacaccagtcgtctgggaaaatcgtgattttcgcatccggtcgccggtcgccgacgtatgccgccgctccgcctgtcctccccctcccttccgccggatctgcaagggaggggaggaaagccgcgcgtcgccggccggatccgccgccccctcccccagatctgcaaggggaaggaggagagggggcgggcgccaccggatccgtcaccgtccccttcgcctaccgccgcgcctctcgcccgccgccgcccccttcgctcgctgccacgcgcggccggatccaccgccccctcccccggatctgcaagaggaagaaggggagggggagggggcgggcgccgccggatccgccgcccccaagcctcccctccaccgtatttgcacggggagggaggagagggggcgcgcgccgcgcgccgccactgtgcaccgctgccgcctgctctcctcccgccaccaccgccggatccgccgccgcccccttcgctcgccgccgtgcgcggccggacccgctgccccctcccccggatctgcaaggggaaggaggggagggggcgggtgtcgccggatccgccgccctcttcacccgccgccgcgcactaagggagagagggaggggcgcgttgtgcactgaggaagagagagaggagaggagaggagagtggggagggaggagtggagtgggagagatcgagggtgagcaggcggagggaggtgggcggctagggttacggataaggaaatccaccacggagtccacagacgtaaggagtcctgagtcctactcggacagaactgggtcgtcactgtatcgtgtaggggaccccccgggaggacctaaggcatcaaatctcatagccaagacaaccaccatagcctacgaagccggagcctacaagagccaagtcgtcgg

SEQ ID NO: 226 - DNA, 900 bp, Oryza sativa
atggttaaaaaaaagatcctttttacggttcttgtagagctacacatctggtttaaatttgtggtatctgctatcatccaggaggtcattcagattcaaggtgatcaaccgccgaccacctccagccgcctctgctgtcgagcccgtgcgccggccggccgcgccatctcctccctcagcgtcgcacctgcttcccctccaccggcgtcgcctccgtttcgcgcggagaccaccggaggcgtgttcccgctggcgtccaatggcatcgccaccactgcaccacctccccggcaaggtcgccctcagcctcgcctccccttcgaccgaaccccaccggtgttcgtcgtcgtcgtctccgtccgacatcgccatcccctcctccggttggccgttcctcctcgccggctcatcgtctcgcggcaccacctccgtcgtcggattcgcagcggcgtgttccgcgccgtcctcgcctccgtgcagctgctgccggctgcctcgtcgcctcctcgccggccccggtcgtcgttgcgtcgtcctctcgtcgttcccggtcgtagtggtgttcgtccctccgtcaagccgttcgcgttcgtcgtccgcgttacgtcaagtgagccgctgcagccccgtcgtcgtcttcgtcatcgcctccgcgttgccaagcgttgcgccggccgcgtcccgccttcgtgcaaggatcgccgccgaagtcgttccctcgccgttcgcctccgtcgtccccgagccgtctccgccgcgctcattcgtcattgtcgttcccacgcctcgtcgcgtggtggtaaggatccgtcctctcgctgcctcgtcctagtcctttcggtgtcgcccgtgcccgttgtgcggttgttgaccccggtacccgtgtactggtgtcggtag

SEQ ID NO: 227 - DNA, 882 bp, Oryza sativa
atgtatgtatatatctccgacgccgagcgacacgccgccctcgccgtccagtggcagctccccgacaacgccgggtggaggtggaggctacacgccgacaccgagcgacacgccgccctcgccgtccagtggcagctctcccactacaccgggtggatgctccactcccaagccgtgcggcatgccgcccgcgccgtcgagtggcacctctccgaccacaccgggtggaagctactacccgcccacgccgtccattggcgacgtgccaccctcgccgtccagcgacacctctccgaccacaccgggcggaggctcccgtccacgccatgcgacacgccgcccttgccgtccagtggcacgtccccgaccacgccaggtggaggctactacccgcccacgccatccgtcggcgacgtgcctccctcgccggccagtggcacctccccatccacgccaggtagtggaggctactctccgtccacgccatgcagtgcgccgccgttgccttcaagtggaacctccccaaccacgccgggtggaggctattctccttccacgccgtgcaatgcgccgccctccccttcaagtgacacctccccgacgacacctggtggcggcaactacccgcccgcgcccaccattggcaacgtcccgccatcgccatccagcggcacctccccgagcacaccgggtggtggctgctcatcctcacccacgccatgcgacgcgccgccctcgccatccagtgacacttccccgacaacaccgggtggagggtactacccgcccaagccgtccatcggcacctcgccatccacaccgggcaccggcggaggctactaccctcccttaattatgtacccaaacgataattatgtttga

SEQ ID NO: 228 - DNA, 828 bp, Oryza sativa
atgtcaccgccgccgctgccgtcctcccccggcctccctccggccggatctgggaggggaggggagccgcccatgtcaccgccgccgctgccgccctcccccggcctccctccagccggatctaggaggggaggccgggcagccgccgccgccgcaccgggagagggccaccgccggaggggagccgcccatgtcgccgccgccaccctcccccggcctccctccggccggatctgggaggggaggccggggaaccacgtcgtcgccgccgccctcccttggcctccctccggccagatctgggaagggaggccggggagccgcctccaccgcaccgggagagggccgccgccaaaggggagctgcccacgtcgccgctgccaccctcccccggcctccctccggctggatctgggaggggaggccggggaaccacgtcgtcgccgctgccgccaccctcccctggcctccctccggccggatctgggaggggaggccagggagccgccgccaccgcactgggagagggctgccgccggaggggagccgcccacgtcgccgccgccaccgccgccctccctgggcctccctccggctgggaggggaggccggggagccgccgcccccgcaccgggtcaccgctgcgtccgcgcgctccaccgccaccgccgccgcgatagtggggacggcggcggcggccggcggtcgggagtagcggcggcggcgtccggcggttgggagacggcggcgagcggcggagacgtgggcgtggcggggagcgaagacggcggcattcggcggtggctgccatggataggtggcgactag

SEQ ID NO: 229 - DNA, 789 bp, Oryza sativa
  N_region (141)..(141): n = any nucleotide
  N_region (155)..(155): n = any nucleotide
  N_region (219)..(219): n = any nucleotide
atggccaccggcggcggcggtgcaacgcgggcggccggcgaaggggagatagagggaaagggagggatgctcaccgagctcgcgcaacggatagagacaacggaacccgccgcaacggctccacgggagcacggcaacggntggactccggcganttcgtccgcaaaggagaacggccggggcacaacacagccctggagagagagggtggtttcggtngtggcgaggagaaaagaagcggtggccgggcttgggattgctgcggcgaagccagtggtggcggtgacacagtgcggcggaggttccagccacggggaacgacggccggagctcgcaaaggcgatggcggctcgggttgacacgtggggagagcagtacggggcgcgagaagctcaggaaaaatggagaaatggaagaggactcgcggagcatttttatagcgcggggagctcgagatcgaggccgggaggggcggaatcgccggccggagtgggggagaggcgtggggtcgtgggggccgatccggcgccagttttgcgtgggaaggagtggggtaggagagtgaggacatgggcggcgaggtcccacggccaggctggagcacgcggggtggaggaggtgggcgggggaagcggcgacgtggggcggctcgggtggccatggtggttgggagtggggagccggaggccccaaggaactgattacatcattgaatataaaaatatcattcatgttgtcccccggtttatttctattgtcaatagacccgtaggagttgaaatctcctag

SEQ ID NO: 230 - DNA, 759 bp, Oryza sativa
atggtgctgggcagcgtgcggcctccggaggcagcagccgctgtgccgaacggcggcaagcagccgaaaacggcggcgctcacgggcagtggcgatgcacgcgaaagggaaggggagcggaggaggggctcaccgagcgtgcgggccgacgaggcagagcgggaggtcgcgcggcggagagaggcggcggcgctcctcgaggaggcagcggcgacggcggttcggcggcgttccgtgagcaggaaccggcggccgatggtcggagggaccgggaggcacggggagatgagtccggcgaagaccggcgaacacggagggattgctgagccacggacgatggctgcgggcgacggcacaacacggggcggactgaagaggcggcgcggcgcggccggaggcggaaatggcgacggtggctctgtggggagggcggctcagtggtggattagaggaacgaggcggtggccggtgctcggcttggagcggcgaagccgactgtggcggtggcgcggcttggcggtggctagcgtgacgaggagaggcggccggagttcggcggcaagcgcagagagagttacacggtgggaggtggttccgatggcggttgaaggaaaccgagtggaggccggcgtgcggcgcgggatggcgaagctgatggcacacgtggtgaggcgcggcgacggcgggagcagcggcggcacgcggctggagatcgccggcgagcgacggcgatggggattggcgtggagagctcggtag

SEQ ID NO: 231 - DNA, 724 bp, Oryza sativa
  N_region (10)..(10): n = any nucleotide
  N_region (23)..(23): n = any nucleotide
  N_region (26)..(26): n = any nucleotide
  N_region (30)..(30): n = any nucleotide
  N_region (33)..(35): n = any nucleotide
  N_region (37)..(37): n = any nucleotide
  N_region (39)..(40): n = any nucleotide
  N_region (43)..(43): n = any nucleotide
  N_region (109)..(109): n = any nucleotide
  N_region (179)..(179): n = any nucleotide
  N_region (287)..(287): n = any nucleotide
  N_region (296)..(296): n = any nucleotide
  N_region (712)..(712): n = any nucleotide
  N_region (724)..(724): n = any nucleotide
aattttcttnctaaattcttccnaanttcnagnnntnannttntcttttctccgacttccaagtttggcaacttccgaccgccagtcgcctcaatttcccaagccttgncggcccccggccatcggacaccggatccggccgacagcgcttcccccatcgactgccggactcctccccngcttcccccaccggatccagcctccacgaggtcgggggacgtggatacgcatcccggccgcctcccagccgccagcgcctcccacaccgactgccggactcgtccccnacttccccnaccggatccggcctccacgagatcaggggacgtggatccgcgtcccggccaccggacgcggccgcctctcgaccgtcggacgccggatctggcctccgggaagccggatccggccgccagcgcctcccacaccgactgccggacgcctcccctgcctcccccaccagatcccgcctccacaaggttaggggatgtggatccgcgttccagccatcggacgaggccgcctcccgactatcgaacgccggctctgcttccccttcgctccggcggccggatgtgcctcccaccagagggcgctgccgcctccacctcccgaccgtccctcgccatggccgccatcctcttgaatgtgtgctatatgagattattcggtttgaatttcttgtgtgagcaaggcaactgtgacaacgagncaccatggcagn

SEQ ID NO: 232 - DNA, 723 bp, Oryza sativa
atgtcccgcttcgccactggctgggcgcggccaccggcgacacgatgcagcacggcggcgggcacgggaggtggccggtgcaagggaaaaagggagaggagatgggggctcaccgggcggtacggcggaaggaggcggctggtggcgggctcctcggggtggcacggcaacggtggtccagcggtgttccacgagcgggaaccagcggacggcggtcggaaggacctagggaacaaggaggaaagaggggtggccgagctacccacgagggctgcagtgccggggaaagcgacggcgcagggcggcggcggttggcggctgaagatcgccggcgggcagcggagtgggagcgcggtggcgcggaggatttcgggcacgggaaggctcgggagagaggggaaaatggagagggagggtcggggcgacggtatcgttgctgatttggggcggcaaccgacggcgacgtgggaaagagagagagtgagaggtgccggattccgcgggggagtgggggaggagagtggggcgacgcgagcggcgaggtggaggagaggggcggcgcggttcgggcccacacgggagagggtgcgggctgccagaggaggcggcgacatgggtggctcgggcggccatggcggttgccggcccgggctggaggaaggggatgacaggtgggacccacgggcccacctgtcggcgagagggagagagcaagccggttag

SEQ ID NO: 233 - DNA, 678 bp, Oryza sativa
  N_region (184)..(184): n = any nucleotide
  N_region (261)..(261): n = any nucleotide
  N_region (269)..(269): n = any nucleotide
  N_region (324)..(324): n = any nucleotide
  N_region (326)..(326): n = any nucleotide
  N_region (335)..(335): n = any nucleotide
  N_region (403)..(403): n = any nucleotide
  N_region (408)..(408): n = any nucleotide
  N_region (411)..(411): n = any nucleotide
  N_region (414)..(414): n = any nucleotide
  N_region (421)..(421): n = any nucleotide
  N_region (443)..(443): n = any nucleotide
  N_region (448)..(448): n = any nucleotide
atgcggacctatcccatgtttaagatttctgtgtgcgggagcgcgcacggcgcgaacctcgcgagccccggcctcccccgcctccggcccctggggaagcacgagaggcacccttccctctcctcgccgaggctcccaatcgccgccgaggccgcgccgacagcttccgtccgcctcctcaacntgcagggcaacacacaacaatccacgctgaaaatcagagtctcgcgggcggccaattccgctggaaccctagacgantggggccnggggcgggacagaggtaaccaaactcctcttcgggctcacctgggcgaaaaggcncngcggtggantcaaccgaaggggtttgcccgggccgccaaggccattgaggacccgcgcgccaaggaggagggcctgngcacngcngcngcggccngggggaggccccgggcgaagcngggcngcgctttggccgccgccgcggcgagcggaggggaggggaaggaggccatcgcggtgcggggggcccacgccacggcggcggcggctttcgtggagacgagggcgcaacgcagacgcgaatcgcaaatatcgtgtgatctcgcgcgtaccggattgtggcctggcggtttgagccggacctggaagatatttccgttcgatgtgaccagcttcacttcatcacatgattga

SEQ ID NO: 234 - DNA, 669 bp, Oryza sativa
  N_region (62)..(62): n = any nucleotide
atgacgaggagggcggggacctcgacctcgggatggggggcatggacgccgccgccgcccgngcctacctcagccgcctcgtccaccaccaacttctacgacgacgagcccatcgacgtcgcggccgccgcggtgtccctgctgcagcggagcggcctccaccagggctgcggcggcggcgagagcgccccggccgccgccgcgtccatcgccgcgctgcccacggtcgaggtgtccgagcccgccacggcctgcgccatctgcaaggacgacctccccctcgctgcccccgcccggaggctcccctgcggccacctctaccactccgaatgcatcgtgcagtggctggagatgcgcaactcctgccccgtctgccgctcccgcctcccgtccgacgagccccaggacgcggcggcgccgtctgacccgggccccgcgcccatgcggatcacgatcaggctcagcaccaaccgacgacgcgtccgcaccagcagcgatgcggctccgcccgtcgcggcgtcgcccacccagctcgcgcaggccgtgaccggggaaggaggtggtggacctgcgaatagcacggagactgtgtcgtctgagtggccaccgccctctgagtccgatgccgtcatgtcagacgcccgtgagggccagagattcttcgattga

SEQ ID NO: 235 - DNA, 666 bp, Oryza sativa
atgactgcccgactgaccgtctgtcttcaactcgttcttctcgttggcagagagagaagctgggagagagggggacagaggaggaggtacagccgcatcacctcgctgatggtcgcgtgcagccgtgcagtcgccgtcttctccggcgtcggcgcggcgagcgtccgcgtgccgcgacacctcctcgtgcacgcgacgctcgcagcgcgggttcgcggcgaggagccacaagagccacgtcagcgcgggtgctcgtgctcgtcctccccgcgacggaggcgctcctccgacgccacgtcggcgggaaaggagggagcggcgcgcggaaatgtcggcgttcctccgggctccggccccctcatcttgagcctcgtcctcctgctcttcccttcgccggacgccgtcgacctcgcttcctggtgccgatacacgcctccgcccgcgcgagccaacccgacgctgctactcctcgatgggacatggaagcatgccaaggagatgcaggccgccagcctcccgtttttgtcctccttcgtctcgtccccgtgtcattgctcgtctactgcgatgtcggcgccggcggggtcgaggtggtggaggatgacgacggtggtggaggcgggttgcggcggagggcgtgcgctgcgccctctctgttgcgcctga

SEQ ID NO: 236 - DNA, 597 bp, Oryza sativa
  N_region (278)..(278): n = any nucleotide
  N_region (321)..(321): n = any nucleotide
  N_region (344)..(344): n = any nucleotide
atgggcggagcagaggggcggcgggcgacgggtgagctcctcaccctccccacctcctactcctgccctcttctctatatcgtctctctctacactacaaaaagaagtgtggagcggcgttgggcagcgtacaggggcaacaggcgaagcggagtggagcgatggcatgaggagcgaacagcggcggacgagctcctggaagatgtttgccgcttgggccaccaagcgggggagctcaagacaaagacgcttcgtatcctccgtggcccttctcggcnaaccccaacaccgtcgatgacgtcgaagtgcagcaccgccctnacgacagccatggtctccccacntcgccgagcgccgaccacacgcctcacggagctcgaggagcaccatgtcacccgcctcttcatccatgttgggggtgcgctcggggccaaggcggtggaggcggttcccaacagcggcatgctgctggaagaagggaagaatttcggactcggcgacaatttgagggacctaaaggcaacgtactggctccagctctgggctcaactacaaaggtctaatgaagatggtgagttcataaaagttgcatgctag

SEQ ID NO: 237 - DNA, 597 bp, Oryza sativa
atggttgttggcgctgctcgtcggccagagcacccaggtggacatctggacgatgaacctcctccacaggacggccttgcgccgaatggcgtgcaccaaggtcatcgacttgacgggagtaccccggagtccctgcacgccgccggtcggcgtggtgctccggctcgggtggacggtctgcttgctttgctggaccggcgtcggcgcgccattgtggtctgcgcgctcggcgaggcgttcagcgagtttcgctctgggcgccgccatgtgttgccgccatatgaggtcgagcggtgcgccgcgcgggggcgggtggtgagcagcggtggcgggtcgacgagctcggccggctctagtggcagcagcgggggtggtgagggcggcgggacttggagcgaggcaacggcggcgggacgtggaacaacgcgtgttcgctacaatttcatcgctccatccatccatccatgccgcgtgtgtgctggatctgctggttgttggatctgctgctcctgcgacccgtggccgcgtgtgtgctgtcctctcgctggttctgacgaccttttcttcctcgatgccgctgtagatggccggcggtga

SEQ ID NO: 238 - DNA, 591 bp, Oryza sativa
  N_region (478)..(478): n = any nucleotide
atggagaggagggctgtgtcaaaggagtcttcctcggcgatatgctcctcccacactcgtgctggttggccagcggatgtcacattgcatctctgttcgtctcccgctacactctattgtaaatgggctatcctcgctacgacgtggaacaaaagaagtagcagcaccatgcaatacgaaacatacgaaggagtgacgcgcgacttccctatgacgttgagagcaatatgtggtggggacacgtggcagcacgaaggcgcgtgggagagacgtgggcagcacagcaggcggcgtggtgggccccggcgacagcagatgcctggcgctaagcattccctctatgtcttggatggcagcggatacatcacggttcacggggattcccttccccctcgagcgacggcgcgagagagattcaggaacgccgcgtgcaggcctccggtgcaatggcccaatgggccaaacgggtacggaggtntggcttggcacttggcaggtgctttgaccggaagcctacgtggcaactttacggcgcaacggccccacatgtcagtgggtgagaaacccgcgctagtagatcctgttgactag

SEQ ID NO: 239 - DNA, 549 bp, Oryza sativa
  N_region (441)..(441): n = any nucleotide
atggccatgggggatgactactccaaggcgaggcaagccctggcggtgagcgcccacgagtgctcgctggtggacgcggtctcctccgcggccacgccgccgaccgcggacgacggggaggggcacgcggcgggcttcttcgagggcttcgtgctgggcgggatccgcgtggacagcgtccgcccgggcctcgtcgactgctccttcaccgtcccctccaggctcaccgatcggagcgggtgcctggccgcgggcgcggtggtgtcgctggtggacgaggtggggtcggcggcctccatcgccgacgggcgccccgtcaaggtctccaccgacatgtccgtctccttcgtctccctcgcgcaggcccgccccggcgaccgcctgcggatcacggccagggcgctcggccacaagggggcgtactccgccacccacgtcctnatctccaacgccgccaccggcgaggtcgtcgccgagggcaggcactccctcttcggcaggatgaaggtcgtctccacctccaccgccaccgccaccagcaagctgtga

SEQ ID NO: 240 - DNA, 513 bp, Oryza sativa
  N_region (296)..(296): n = any nucleotide
atggtttcaatcaacagcaatccatctgcgtgggagggagcaatccataaagtagcactcggcgacggtgagctctcgcatctccttcccctctctctctcgtggtgcctgcccggcgaaaacggcagcggcggcggttggccgcgccctcggccagatccggcaggaggggaggcggcgccggcgggcaccccacgggcggaggcggcgggctcccgcggccatgcccttccctccacggatccggcgagaggggaggtggcaggttccacagccgctggcgggtaccccacggntggcggcggcgggcttccctccaccagatccggcgagatgggagcatgtggggaaggcagttgggagtcggcgggctctcgcgccggcggctgcctggtggaggcagttgcggcgcacctcggcagtggtggcggccgcgccatccccatgtggcgacggcggcaggggtggagaaggacactagtggtgcaggcgaggtggcggctggcggcttga

SEQ ID NO: 241 - DNA, 504 bp, Oryza sativa
atgggagacgcgctgtgtgatcagctcctcttggtggacagcgacggcggcgagttcatcccccaccacgccgacgccgacgccgacgacctcttcaccatcctcgagacgtgggagggctgcgccaacgtcgtcgccggcggcgcccccgcgaccacgacgacgttaggtagtcctattgccgccgctgcctgcatctccggcgttgttggtgggcagaatcatcagcagctgccggaacctgccgccgcgaagaccgtgccagccaccaataacaagcggcgggaggaggaggtggcggaccgtgacggcgacggagacgacgacgacggttcgccgcagaagaggcgcaagtgctgctcgccggagtcttcgacgacggacgtggcggcggcgacgacgcccaagacggcgcacatcgccgtggagcgcaaccggaggaagcagatgaacgagaacctcgccgtgcttcgctccctcatgccatgcttctacgtcaagcgg

SEQ ID NO: 242 - DNA, 474 bp, Oryza sativa
atgtgtacaacttctcctatttctcaacccgttcatgagaaaagagatatgcacgaaacaattggtgttgttactggttgcgcctccaataggctcgcggatgtgggcgactttatggtgcaaggtggattgtatccaatccgtgtcgggggcaacttcgttagcatggctggcaccttcttgcgaagaatggtagcaaaagaccggggcatgctttttacaaaatggatgcatcgaggcatcgatgaactagcgatgctcagtcatatgtatcttgcttggtacctcaatatcaatcagattcgcgcgggtaggaccccgtcctcctcctccggagcgcccacgaaaaagaagaagaagccgccgttccgccccgtcgccgacgacaccaagcccgtcctccgcgacccgatatctcggtcggacccggtggagaccgagcaggccgtgctgcggctgccgccattcccctag

SEQ ID NO: 243 - DNA, 456 bp, Oryza sativa
  N_region (14)..(14): n = any nucleotide
  N_region (18)..(18): n = any nucleotide
  N_region (27)..(28): n = any nucleotide
  N_region (33)..(33): n = any nucleotide
  N_region (52)..(52): n = any nucleotide
  N_region (54)..(54): n = any nucleotide
  N_region (71)..(71): n = any nucleotide
  N_region (81)..(81): n = any nucleotide
  N_region (85)..(85): n = any nucleotide
ccggagttccccgnaaancgcagagcnngggcnaacgaggggaaaccggaananagcccggggattccggnaaaatttggntggngaaagggagaggatggcccggggagtgattttataggctcgggagggagtggctcaggccgggatgggcggcaaccggcgtcgaagtgggaggcgacgtggagctcgtggggaggtcaaaccggcgccgtttttttgggggaaagtgggggagatggtggaggacgtggaggggatcgtgcccacgtcgttggatgcgagcccgggtgcgggagggcgccgtattttgcggcgacgtggacggcaatggcggttggggttggccggcgagaggtaggaggaggagctgacgggtgggaccgccggtcccacctgtcggcgaagggagagaaggagggatgcaaaacagacttttgcgagcgggccaagtga

SEQ ID NO: 244 - DNA, 447 bp, Oryza sativa
  N_region (118)..(118): n = any nucleotide
  N_region (182)..(182): n = any nucleotide
atgcgtgcgtcggcgaccgagagcggcgggcaccaaggcgtgtgcgcgcggcgttgggcaactgggagcggcggcggacgaccatcccccacccggatccagcggaggcagtttcccntcacccgattctggcagcggcggccgtccccaacccggatccggcggcctcggctgcatgcgcntggcatcgcccgggggttgcaagcgggaacagctggcgggagcggcgagctcggcggctcgtgcgtgcggcggcggccgttaccggcccggacagtgtggaggctccggatccgctaccgtggcggcgacggcgacggcgaccgcgaccgcgaccgcgaggaggcggcgacgacagctttagggcttctgataggcctctcacacattggagataccaccaaatctccaaggatcatgcgtacgagttttttaagttcattctga

SEQ ID NO: 245 - DNA, 432 bp, Oryza sativa
atgaagcgtaataccctactcctgtgtatgggatttagactgagagttacaagggttcctaagctcgggagaacactcttacttccctcctccacaagctcagattttctgagagtcgtcccctttctcggtgggcaaggtccaccttttatacctcaaggggataccacatgcaccacctctacctactcttctttcggcgccgtccctcgcctgacacgggggacagccctatgcgacgtgggaacacggttgtccgtccagtcatacgtgaccggcgtcaggccggtcacagaccggggcaaagcagtgcaagggcccgaggggcataacgtggcaccccgaggccccgaccccccggccgctcctgcggttcacggaatgcggggacaggaccaggctgtagggacacgtggcaggatgggaaggtag

SEQ ID NO: 246 - DNA, 432 bp, Oryza sativa
  N_region (246)..(246): n = any nucleotide
atggcggcgaagctccggctcaggctcctcgccgcggcggcggccgccgccgtcatggcgtcgtccatggtcgggatagcctccgccgccgaagcgccggcgccggcgccgacgtccggagcaaccgccgccccggccttcgccgtcgcgtcgctcgccgtggctgccgttggatacctgtatccaaaggcaagggcggtcaaggacgcggcggcggcggcggcggcggcgaaggccggcgcagcnaccggcgcgtcggacgtcggggaaggagccggcgcgtcggcggcggacgccgtgccgaccagcgacgtcgccaggacggccgcggccgctgccacggcgaggagcctgagcttcagtgttgccgccatttgcttcctcgcttcttggttgactgatcgatctgcacttggagagcaagaacactag

SEQ ID NO: 247 - DNA, 426 bp, Oryza sativa
atgggcacaggcgacaccgaaaggacgaggacggggcagcgagaggagagagatccttaccaccacgcgatgaggcgtgggaacgaccacgacgaacgggaacgacaagaggacgacgacaacgacgaccgtggccggcgaggaggcgacaagggacagccagcagcagctgcacggagacgaggacggtgtggaacacgccgctgcgatgacgatgacggaggcggcgccgtgaaacgacgagccggtgaggatgaacgggcggccgaagggacgtcggcgacgatgaggatggagaggccagcacgggcgacggcgttccggcgaaacagaggagcagctggaggagaggacaacgctgcgacgtcgatcggcgtaccggtgtcacatcctgatttttgtttcaggatttataaaattatttaa

SEQ ID NO: 248 - DNA, 423 bp, Oryza sativa
atggcgaagggacagcgtggcgagccgatgcccatggcgaggatgttgttgaggtcggagcacgatagagtacagaggatggcgagcaggttggagggcgttgggaagggcgggcactgtgtggcgagcagtgtccgtgagagggagttgagatcggtgaaggagaggaaggaggtggagaagacgaagtggcggaggaggtggcggagatcgtgctgggagaggtgcggcggttggaagggggaggggaggacgaacagcgtggtgtggcgagcaacagtggtgcgaagacggatgagacaggggagaggaagaggagcaggttgggaagcgggagctcacccgccactgcccatggcgaggatgccatcaaggttggaggatggcggagacagtggcgggcgccacggtggtgaggcatga

SEQ ID NO: 249 - DNA, 402 bp, Oryza sativa
tttaccgcgccatggggggctctcgccgtctccggccttgctggtcgccgtcgtggcgagcccggtataccttgtagtacagctcggcgcggcgaacgtcatgagcgagcgcgcgccgccgccgccgccgcagcagcagcagcacgtagcggcgagagaagaagggaagccgcgtcggcgccgtcgatgatgtcagcgtcgagcacgcaggagccgcggcctttgttcaggcccatacagaaatgggccgcgcataagccgaaccgccgtttaggccaaatttttatatgggcccggcccgctcgtcgcccagcgaggcgattccggccgtcgcgccgccgtcgccggtctgaggagtacgcgggacgcggctacgcttcttacgccttccacattcgaacg

SEQ ID NO: 250 - DNA, 402 bp, Oryza sativa
atggcggtgcacggtggagcggcggcgacggctacggccgcacggagggaggggtcagcaacgacaggcccggtggatccggcgggggaggtcaacggcggctcgacgacgaggagtggcggcaactggtctaggcagtggagctcgagctgcggtcggcggattcggcgacagtgctcggcagcggcgggcaaatccggtggcggcaccgacgcgtggagggagggaggtggcgccagcacctacgcgagccacggggaggtaaggtgtggcatcggcgcggagggcgagggaggcgatgccggtgcaaggagggagaagattgcggcgctagcaaggaggcaacgccagcgccagtgcgtggagggagggggcgctgtcggccaaacttgtgtcgaataa

SEQ ID NO: 251 - DNA, 394 bp, Oryza sativa
  N_region (1)..(1): n = any nucleotide
  N_region (20)..(20): n = any nucleotide
  N_region (32)..(32): n = any nucleotide
  N_region (35)..(35): n = any nucleotide
  N_region (79)..(79): n = any nucleotide
  N_region (100)..(100): n = any nucleotide
  N_region (118)..(118): n = any nucleotide
  N_region (183)..(183): n = any nucleotide
  N_region (262)..(262): n = any nucleotide
ncgggggccgccgaaaggtnccttcggtttanatncgggggccgccaggttttttcttttccaagttcgcgttgccggntcccttcaagacgaagtccgnaagccgccggatcccttngccgctggccacgacgagcgacgacgacggctccagatccgggggccgccgggttccctccttgncgcctccgccggccacttcctctcctcccctccgtccgctgccgtcggcgcccgtgtcgagatggtagcggcggtcctntcctccgcctgcgaaaatggttttggaccgcctggaaaaatcttttttctagtagtgctaatctactgctgcatggacggtggagcccgggcaactgcccgtggtggccaggtcctggctccgccaacataa

SEQ ID NO: 252 - DNA, 390 bp, Oryza sativa
atggacgcgatcggggtcgccaggttcggcctggtcggggtcagctatgggggattcgtgggctacaggatggcggccatgtacccggacgcggtggagagggtggtgctggtgtgcgcgggggtttgcctggaggagaaggacctggccggtgggctgttcccggtggccggcgtcggggaggcggcggacctgctcgtgccgcggcggccggaggaggtgcggcgcctcgtcaggctcacattcgtgcggccaccctgcattatgccctcctgcttcctctgggattacattaagacactgactaaggctgcgttcgttgtgatgagttctggggattgggtgagaaaaggacatcgtattccgcgcgcacgcttcctaaactactaa

SEQ ID NO: 253 - DNA, 381 bp, Oryza sativa
atgccgtcgcctgctctagcgctatcctcgccccgatgcccgccgccgcgctatccccacgtgcgccctcgcgcgatgacaccccgcgagtccctacggcagccgctgcgctttcctacgccccctcgcatgcccccgccgcgacggcgtgtggatcctcccccgtgcagtgaaggtgccctactaggtcgctgtcgtccagtccgccgaccatatcccaacccatcgataagaaaggacataaagaagaatgagaagaaaacggaaaagaaaatgaaaaagaagaagaagaagaagaagaagaagaagaagaagaaaagaaagaaaataaagaaaaggacacatcacgtccatgtagcaagacacatcatcgccacatga

SEQ ID NO: 254 - DNA, 362 bp, Oryza sativa
  N_region (24)..(24): n = any nucleotide
  N_region (26)..(28): n = any nucleotide
  N_region (38)..(38): n = any nucleotide
  N_region (40)..(40): n = any nucleotide
  N_region (42)..(42): n = any nucleotide
  N_region (47)..(47): n = any nucleotide
  N_region (50)..(51): n = any nucleotide
  N_region (53)..(53): n = any nucleotide
  N_region (65)..(65): n = any nucleotide
gcggcgacgtgggcgcagcgcgcngnnncgggtggagngngngcggnaanncngacggcgacgtnggagcggcggttgccggccgagcgcggtcggctggaggaaggggacgacctgacaggtgggccccacctgtcagcgtcccggagagaggggaaggggaacgggctggcccaaagaaaggaggccgagcgcgggagggaggcgtgacagccggtgcggtaaacggaggtgggagcgacgaactctgggggagagctggagttttctggcgttgtcgtcacgagacgaggaggcggcggcacgagacgaggagggtgtgcgtggcggatgggtgctcaccgggactgcggtggaagtag

SEQ ID NO: 255 - DNA, 327 bp, Oryza sativa
  N_region (12)..(12): n = any nucleotide
  N_region (14)..(14): n = any nucleotide
  N_region (19)..(19): n = any nucleotide
  N_region (138)..(138): n = any nucleotide
  N_region (140)..(140): n = any nucleotide
  N_region (194)..(194): n = any nucleotide
ccgctgccggcngncctcntcgcctcctcgccggccccggtcgtcgtcgtcgtcgtcgtcctctcgtcgttcccggtcgtcgtggcgttcgtccctccgtcaggccgttctcgtccgtctcgtccgcgtccgtcaagngngccgctgcagcccgtcctcgtcttcgtcctcggctccgcgtcgtcaagcctcgngccggccgcgtctcgccttcgtccaaggatcgccgccgaagccgtcccctcgccgttcgtctccgttgtgcccgtctgtctccgccgcgcccgttcgtcgttgtcgttcccgcgcctcgtcgcgtggtggtaa

SEQ ID NO: 256 - DNA, 315 bp, Oryza sativa
atgtctctccgcgcggtgcctcctctccttactcctctctcctctcctctcctcccgatggtggcgcgcgttggcctcctccacgtggcggtggtggaggcgcgggatccagcgggcggcggctggccgccctcccccgcggctccccggtggtggaggctccccttccttccctccccagatccgacggaggggaggggtgttggcggcggtgcagccagaggggagagcggatccggcggcgggccaccgccgacgtcgaagacgagagcagcgtcctcggccaacgatgacgataagggcgggagcgattaa

SEQ ID NO: 257 - DNA, 300 bp, Oryza sativa
gcgcgggcggcggcctttgcggagtcgaacgtgccgagccagatcggggtcttcttcgccgggtcccggatctcggccgcgtacctccccgacggccgcctcctcaccccacggagaggtggaagggtggaggaggtggtcgtcgcgctgcgtaccactagcgaggcatattcgctgcgccctgccggcctcgctcggccgtgcacctgctgcctgctgctgctggctgccgtgcaggttgtggagatgatcagatcagctgggatcttcgagttcagactttcaggcctgggggcttag

SEQ ID NO: 258 - DNA, 2567 bp, Oryza sativa
  N_region (743)..(743): n = any nucleotide
  N_region (802)..(802): n = any nucleotide
  N_region (805)..(805): n = any nucleotide
gtgaacaaaggaatagtgtcatcgccgaagaagacgaggagggacaatcccttctccttgaccccgatgatgttggccgccttaaccatgtgcacaacgacgacagagaagaggttgaggtatatgatgacgacgaagacgatggggaggtggtcgacatcgacgacaaaaacgagtgcagagaggaagaggaggacgacgaggtggtgcatgtcgatgatggtggcggcggcgaggacgacgatgtcgtggacgatggctttggggtgttggttgtggtgcggattgatgattcaattaacatcacagtctatgggatcttaatgcttatggctacccatggcaacttcaaaacatgtactggaggagtatgtatttggcttgccatatatgccatgagccagctcagggcctcaggtgatgatgttaaggtggagaaatcgatggcaggagcagaggctgtgagcgctgcatggaaagaatgggctctccaagcactggtgcttctcagcctcatggtccaagtcacactcctcatcttggcagaattccgccggtacattgactctggcgtgctaagggcctttatatggtccgcatacatgctggccgacgggacagcgatctacggtgcttggccacctctctgttaccagcagggtcaccagagcatgagctgttggcactctgggcaccgttcctgctgctgcaccttggtgggcaggacaaaatcactgcctacnccatcgaggacaaccggctgttggctgcgccacctgcagacgcttgttgtgcaggtggncgnagctgcctatgtcatctatgggtcctccatagtcattgttggcgacagccggaccttgcttctcctgtcagccaccatcctcatgttaatggtaggtgttgccaagtatggggagcgtgtctgggcgctcagatgtgccggtagtagcccaactggaaaagataggtttaaggggccattacctcgtctgtttttgtgtggccccatgaatgaaggatcacgattgcaaggggaggacgagttgtacaaggtggctgagatgcaactctccctcctccacgacgtcttctacaccaagtctgagattacacacacttggtatggcctttgcatccgagtgctttcgtctctggccaccaccgttgcattctttctgtttaatatactactagtctggggaaatcatcatcagcataagctgaatggttacagcagagcagatgtcattgttacatatgtcctctttgttggagccgtcatcctggagactatgtcacttttgagggccatgttctcgagctggacatgtgcactcctggtaaagaagggatcggaaggaagtaatgtgtgtaattttcttgctcacatacccgcctgtctccgccggctggtccgtgcggcatattggaggaggaggcgcagctggtcacgctccatggggcagctcaacctgattcagttgtgcgtgcacagcagggccagccgatgcagcaagattgcgaggtggatgggagtcgaggactggtggaacaggttggcttactcgggcctgcccatccccatctcggcgtgtaccaagcagctgctgctggagaccatgaaggcgaagcaatggggtcaggaggaatttgaaagcagaggattgtacagggacccagcctgggttgctgagtccaagatggagcagaggatcctcatctggcacatcgccactgagatctacctgtgctggtacaaggatcaggagaagaagcaagcagaggccaccagtggttcaggttcagctgctgaagaggagcaagcagcggccaccggtggttcaggttcagctgctgaagaagggcaagcagaggctgccagtggttcaagttcaactgctgaagaggatcaagcaaaggccgtcggtggttcagtttcagctgctgaaggggagcaaggagaggttgccaatggctcaagttcagctgctggagaggagcaaccagaggtagtcgatggttcaggttcagctgctgaccttatggaaacggctcaggcgctgtccaatcacatgcttttcctgcttgcatcacgtccccacatgctgcctcccgatgccagccgcaatgattatcttgtgctgtgctatgctatcactcgtcacctgaggtacagcacagctgaggatgtgctccacttgctacaacttaacgcagatgcattgaggacgaatagctctaaaccgaagtttaaattaacttgtacaaatactaatagacttggggacaagatgttgaggggaggatgctcgcttggtgcattcctcatcgaccggcaagactcgcctgctgatggcactggcacgctagagatgatctgccaggtgtgggcacagatgctgtgctgctgtggggaacaatgcagcacagattctcatgtcaagcagctcagcagtggcggtgagcttgttaccgtcactgcccttgtcgcaaaatacatgaggtcaaggatgttgtcttggcactttcagatagattcacatgagcgtttgagcgaatggtga

SEQ ID NO: 259 - DNA, 2304 bp, Oryza sativa
atgctgctccccgtctgctccgccgcgcccacctgctccccgctctgcccggtgacgtcgtcggtggcccatgtcgtcggcgcgccggcgctacgagggagggtggtggaggccgccttcgcgaggctcatcgactccctcgggaagaagatcttccaggcggaggacgcgctcaccgaggggtacgacaagctgcggctgtcggcgtaccagtcgctcagcgcctggaggaagtccgtcgacggcgcggttggtggcctcacggcgtcggtggacgccaccaagaagcaggccgccggtggggtgacggacgcctccggcgcgttgcaggacaaggtggccggagctggcaccgtcgccgtcgatgtccttaggaaggctattgttgctgccgaggattcactgggcagcgcagcaacatccattggatattactatggatcaaccaagtcgtcgttgccaccgaatgtgaaagatttgctgaactcctccgaggagaaagctagtctagttctgaaaccgattggaggtgcccttcaacaggtatatgtagtcgtcgaaggtattgaaaagaatgttggtttggacccaagtgatcctattgttcaattggcagttctgcttggaggttcaaccacaatcgggttaacttactggctcttcgcatacggtggctattccggagacttgtcacccgaatccacactagagctgttgagaaatgatgacaaagccgacttgagagtgaaagatggaattccggatctacgccgtgcagctagatctaaatatgcaactgctgcttcacctgagattaaaggttcagtaaagaggctacttaaaagtggaagagatgttgatgatgcgttgctcgcagttatcatccgcaacttgaagttggtcaaacgaccttaccttgttaaaggtggtttccaatcttgggcaaagaaccttcgagtgaaagaattgaaacctgagaccgcattaacagtaataaatgaggacgcagaggaaatccttgaagacataaagcccactccaacacttgtccttggatctctcctgggcctctcagcagcagcgtacgctttgctagaatgggaaacgactctgcaatacataggtgttctaagccttggtctgactatctatctgcgattctctacgtacgagggttcagaggatctggagcaagatctaaaactgctgctttccccgttaagagtaggcgcggaggcgttctcgtgggcggccaagaagctggagccaagcaagattggcttggcgacttccccctccacgacggcggtccaagaccgggttctccaggccgccgcgaagcacgagtcgcagccgtctgacgccgaggcagacagtttggtctctgaagcatatttgaacaacctttttctatggatatctttcgatttctggtctgccagagataaaaaacacagaaaactgcaagaacggggattcgatcctaggaccaactggtcgcacgcatcacgactcaaccaacaacggctctccctctctgccatcccggtcccacctgccagtgaccgccgtgtggcccacccgctcaccgagactagccgttgcctcgcggccatcgcctttcttcccccaacggccaaatcccccgcgccacgcagcataagtagcagccccctcctcctccctctccacctccacccacgatctcctctcgctctcgccatctcgccgccggcctcctccaccaccaccgacgactccgactccgactccggctcgatctctcgcggcggcggcggcgatggcggcggggaaggggagccacacgcacagggcgttcctgctctgcaactacgcgctcctgggggcggcgtccagctgcatcttcctcacgctctccctccgcctcctcccgtccccgtgcggcctcctcctcctcttcctccacgccctcaccgccgtcttctccgccgcgggctgctcgggctccttcaccgcgcccgccaaccccgcgcagtggcacaacgcccaaaaccgcgggcgccgcccttaccgccatcttccagggcgccgtcgcgctgctcgcctttacccggaacctccgacttcctcgccgagctccagtcctacgtccgcgacgacgacgccgccgtcatcctcaagatggtcggcggcctcggcaccgccatcttcgtcctcgagtgggccgcgctcgccctcgccttctccctccgcctcgacgacgacgacggcgccggcgactacgacaacaagaactgggccgccgcctcctaccatgtctga

SEQ ID NO: 260 - DNA, 1959 bp, Oryza sativa
  N_region (208)..(208): n = any nucleotide
atggagcgagcggctggtactggtagcggcggcgacgatgacgagctcgtgctgccgccggcgtcgtttcaggacgggcttccgtcgtcccgctcctacccctcctgcatcggcggcggtagcgcagcggcggcgtcggcgtcgctggagcgggagctgctgtaccgcgcggagctgcaccagcaacagctgggcggcggcggcggcntagagcggcggaagaggcgcgcgatgaagaaccgcgagtcggcggagcgttcgcgcgcgcggaagcaggcgtacctgcaggagctcgagcaggaggtccgcctcctccgcgccgagaacgccgccctgcgccaccagtgccaccagatcgacgtgttgatgagatgtgcagctgaaggccgccgcggcggaggcggaggcggaggcggcggcagcggcggcggcggcgaagaagccgacgtcgtcggcgacgttctgatcggtgtcagcatgcaacccgtgtccctgctcacgccgtcggggtttgccatcgaagccatctcccagcagagggccgcgacccctctgcaagggacgtggctctacgagctcctcggctgggggaccaagcaagaagccgcactgggtcggccgtggctaggggaggagcctgtggacaccgctctctccccctgttttcccccttaccctcgccggctgccagagagagagagagagaggcgacgacgagagaaagagagagaggccattgctgcccgagtacctacgtctccgcagccggcgtcgcgcccgtcactgccaccatctcctcctcaatgcggcgcgaccggcgccgctcaaaccggatctggccgtgtgggggccagatccgcccaggacgatgctgaatctgtcgcctccggccggtggcggtgcaaggcggaggagccgccgccgccgcccgacattccgtctttgcccctgtcctccaacaccgtgggagatcgagcatggagctgggatgcgcttccctacggctgcatccacaactccctcatgccgtcccctccggctactgcttgctatcgaagaggtgatgatgtcgctgctcgccgacgatggcctcgtcctctgcctcggtgcctcgtcgccgccgccggcggcggcatggcggacgtcgaggccggtgcccgacgacgaacaccatatggtgcttgtgtagaatacgatatgcacgagagagcacccagcagcatcaagttcagatcagaacgcagcaacagcagcacgagcaccatttcggatcagcaacaacagcaatgctatgggttcctgctcttgtgtggcggcgacggcgtggggagacgacatgaaagacaaaatcgagacgacgagctggaggcctcgtgcggcatcaaggcggcgaggcagacggccgcctcgtcgccgagccggcggagcagcaacagtcgttaccgtgcgcttctacagtacggcatcgcatctacacccgatcgagcgagagtagctagagtgcaagatcgttccatcgatcgatcgatcagctcgcggctggatcgaggcgaagacgcatcagatattgatcagatggaggtggaggagatgaagccggccggcgccggtgggacgacggtgggcgacggcttcttcacggaggccgatctggcggcggcggaccagctcgtgcagctcagcgtcagcggcggcgggtgcgaggacgatggctacgactcctcctcgtccaccacgctgcagtcggtgaacaacgccgaggcgtcggcggcgatggacgacgacgacgacatggggctggataggagggtcaggaagaggtaccgccacctgtcggagctctacgccgccacgctgccggtgaaggagaaccacggcggcggcaagcggaagaagagagaggaggacatggggaagaagaagcagccgcagccgcagccgcagccgcagccgcgctag

SEQ ID NO: 261 - DNA, 1806 bp, Oryza sativa
  N_region (359)..(359): n = any nucleotide
  N_region (380)..(380): n = any nucleotide
  N_region (414)..(414): n = any nucleotide
  N_region (448)..(448): n = any nucleotide
  N_region (504)..(504): n = any nucleotide
  N_region (513)..(513): n = any nucleotide
  N_region (565)..(565): n = any nucleotide
  N_region (577)..(577): n = any nucleotide
  N_region (621)..(621): n = any nucleotide
  N_region (631)..(631): n = any nucleotide
  N_region (644)..(644): n = any nucleotide
  N_region (667)..(667): n = any nucleotide
  N_region (669)..(669): n = any nucleotide
  N_region (679)..(679): n = any nucleotide
  N_region (710)..(710): n = any nucleotide
  N_region (719)..(719): n = any nucleotide
atggcaaagccttctgccacgtcggcggcggcggcgccgccggcggcgagggtgctgatcggtgccagcgtcaacgtggccttcttgctcctgctcgccttcttcttcttcatctcgccacgcggcggctcgccgccggaggtggtttcgtcgtcgaaggaggtcgggatccgggggcgtcgcgatggcggcggcagcggcggcggcggcgtgttccgggttgagagctacggggagaggtgcgagcacgtcggcgaggaggatggccttgatcgccggcgattcccgcgtggctacgtcgactacctgtacctgttcgactgcgtgttcggcgaggagcggcgggttcttggctacgncgtgatggcggcgtggctcgncgtgctgttctacctgctcggcgacacggcggcngtgtacttctgctccagcctcgagggcctctcgnggctgctccgcctctccccggcgatcgccggcgtgacgctcctgtcgctcgggaanggcgcgccngacgcgctctccaccatcgcgtcgttcgcctccggcgggggagagggggagnccaccgccgtgnggctcaacggcgtgctggggagcgcgatgctcgtgtcctccgcngtgctcggcntcatcggcgtccncctcggcgcgcgcggggtcgccntngacagggtgnacttctaccgcgacgcgtctttcctcctcgncgccctcgncgccgtggccgtcgtcctcgccgccggcgaggtgacaatctggggcgccctcgccttcacctccctctacgtcgtctacgtcgtcgccgtcgccttcacccacggccgcgccccgagcaaaggccacggcgcggaggcggaccacacggcggacgccttctccgagctctgcaacgtcgcagagacgaagttctacggcgaccaagaaccactcctccccgacactgcaccgctactcagctactaccccggcgacggcgacggcgacggaggcggcgcgcggcggcggctccaagaagaagatcaggagcgcgttctgctcccactatggcttccacggcggctgaccatcccggacgcgagcaaggagcggtggagcaagccggcggcggtgaccgcggtcaccatggcgcccgtcctcctctcccacctctgcagccgcgccaccggcatcacctcgcccctcgctgtcctcctcggcgtcctcgccggcgcgtccctcggcgccgtcgccttcttcaccacctccccggacgcgcccccagccgaccacctcgccgcctggctcgccgccgggttcgtcatgagcgtggcctgggcgtacgccgtggcgaccgagctcctcgcgctgctggtctccgcggcgcacgtcatgggcgtcgactcggcggcgctggggctcaccgtgctcgcgtgggggaactccctgggcgacctcgtcgccaacctcgccgtggcgtcgcgcggcggcggcggcgggggcgcgcaggtggccgtggccgggtgctacggcgggccggtgttcgacgtgctcgtgggcctcggcgtgtcgatgttgctgtcgtcgtgggcctcgcatccgcggcccgtggcaatgccggcggaggccggcccattccagacgctgggcttcgccgccgcggggatttgctgggccgtggtggtgatgtccaggagagggatgagggtggacaggacgctggggtttgggctcctggccatttacttgtgctttctttgcatcaacatttctcaggcacttggaccgggacgagaagttcccaacttctccaaaacaaaggcttag

SEQ ID NO: 262 - DNA, 1803 bp, Oryza sativa
  N_region (1210)..(1210): n = any nucleotide
atggaggcgccggggctgaggcccgccacgcagcagcagcagcagcagggaatcgggctctgcagtgtctgcgctgaaggggaggcggcggcggtgcgggggatggagccgccggggctgcgccccgccacgcagcagcagcagccgacggtcttcacgccgcctccgccaccgccgcagcagcaggggttcgtgttcggcggtagcggcgctgcagaggcatcggtggtgcgctcgccgcgggggatgatggcggcggggatcgggccgcgcctcgccacgcagcagcagcagcagccgacggtcttcgggtcgcctccgccaccgccgcagcagcaggggttcgtgttcggcggtggcagcgctggagagtcatcggtgcagcagccaactctcgcgccgccgccggcgcagcaaccgcagcagaatcagggcgttggcttcggcgggaccggggctggagcggcgacgacggtgtcccctgcgccgcgggggacgacgatggcgagggaacgcgcggcggagcagctcgcgtacgacgacgccatcagcaggctgatcaacaagttcgcggggcacgacaaggacgcgatccaggggaagaacacgtcgaacgtgcaggtgttcgatgacatccacgaaggcgacgcgatccgcatggccgagctcgaggagttcgagaagcaggtgctggcattgaacgccgccgcctggaacgacgccgcctcctcctgcggcgaggagccggccgttgcggataacttcctgaacggcgaggagcagcgggaggaggaggaggaggaggaggcggcggagcggaggagctggacgcttgagcggtgggagctggagctgaaggcgagccgccggcgtgtggtggaggcgaacgagcgcgcgcggggggtccagcgcgagcgcgagagggtgcggcggcaggtggcggcgctgctgcagcaacggatgctgaagcgtcagcagatgtccgcgctgtcgcgggaacgcgcgctggcgcacaagcgattcgtgctccagcagcgtcaatggccgcaacagatggtggagcagcagcagcagcagcaacgcgcgccgatgcagcagcagcgcatgccggtgcaccaacggggaagcacgccggaggagcggcgcgcgtcggtgcgggagcgagtcaggctagagctgcagaaggtggttgcatttctgcagcgacgcnagctggagcagaggtatgagcgggcggcggcactgctgaggcaacgcgcgcagctggagcaggcagcgttacaggagcagctcaagctggagatgcagcagatgcggcggcggcaagagcagcgcaagcgcgcgcgtgactggcgatcatgccgcagccgcaggggcatcgcggccgcggcggcggcacggcgcggaacccgaacgccgcaatcgcccaggggggatccggagtcggacacaaccacccccggcgtggaggagcagctgcccgcgcagcagcagcagcatcggcggcagcgcgtgcgatcagtgcgaccgacgttcgtggcgccgcgcggcttgggcacgtcgagcgggcaggcgtaccgggcaccgcccgcgaggcagatcgttgttcagccgcagccgccgccgcagcagccggagctggcagggcaggcgttccgggcgccggcgccgcagacaccgcagcgaccggagtcggcggggcaggacgtgccggagccgcagccggaggaggaggaaggggaggcggtgggtggcgaggccgtcgtgatggcgccacagccttcgtcgacgagggagcagtag

SEQ ID NO: 263 - DNA, 1785 bp, Oryza sativa
  N_region (244)..(244): n = any nucleotide
  N_region (266)..(266): n = any nucleotide
  N_region (673)..(673): n = any nucleotide
  N_region (1421)..(1421): n = any nucleotide
atgtccacttcctcagctacttccgctgccaccgactccgctacggtgtcgtcttccacctctaccgtcgccccggttttcgtcaacccgtatgcgaccatcaccgtcaagtcccatgttccaatctccctcgagcttcgtaaccccaactacaacaagtggaaggccttcttccgctcgatgtgtgggaaattcggtctcctcgatcttcttgacgctgctcctctcaccaaccccgacgccncctgggaacaggccgattgctncctccgcaactggctcttcggctccgttgccgacgacgtcctcgacctcgccatggagcctgatcaatcggcccgggacttgtggatcgccatcgacaacctctttcaagccaacaaggagcctcgcacgatctatctgcatcacgagttccactccatgacccaaggcgatctctccgtcgccgactattgtcagcgcatgaagacggcggctgatgccctccgcgacgttagccaccccgtcaccgagtcccagctcgtcctcaacctcctccgcggcgtcaactcgcgcttcaccagcacggccgacaacatcgcgagcgcccctgtcttgccgtccttcgcctctgcgaggaacacgctggttctcaaggagcttcgcaacgccaactcggtacaagtccagnccgagactgccctcgtcgcagccaacagcgcccactccaactgcaccgggggcacttgccactcctctggcagcggtgggcagcagcagaaccgcgccggcggcggcaacggcggcaagaacaagggcaagaacggcggccgcaacaacaaccgcaactccggcggcaacggcggcggtggattcggcggccgccctggacagcagcaaccctggcgttctcccagcgccgggatacttgggccgtatcctcaggctcacactgccttcgccgggccatactcctcgccaccgcctgcagggtctgtccagctggcttgggaccaagccggccttgtcgccgctctcaatggaatgacgcttcacaaccccaactcatgggttctcaacacgggtgccacttcgcacatgtcctccaccgacggtatactcgttactcgcctccccaactcacaaacttatattaccgttggtaatggtcactccattccggttgtttgccgtggcacttcctttctccctattggcaccactagattcgaccttcgtcatgttcttgttgctccctctttggttcgcaatttactctctattcgccaatttacccgtgacaataaatgttccattgagtttgatgagtttggtttttctattaaggaccctcagacccgacgcgtgattcttcgttgcaatagccatggcgagctctacaccctcccggccgctgcaccttccatcgccgcccactncaaccttgccacctcctccacattatggcatcgccgcctcggtcatccgggtccaaccgccgtcaccactctccaacatttatccgccatacctcgctccaagacaaataattccctttgccatgcttgtcagttagggaaacacactcgtcttccttttaataagtccacctccagtacctcttctccttttgaacttgtgcactgtgatgtatggacttctcctgttatgagcatttcgggcttcaaattttatttagtgctggttgatgattttactcatttttgctggacgtttcctctttgccagaaatccgatgttcatcgccatattgttgagttcgttgagtatgcccacacatag

SEQ ID NO: 264 - DNA, 1578 bp, Oryza sativa
atgactgctgccacaccagccgccactattttaagcaagaggacagcggtgacgacagcggcagcggctcccgagcactcccaccgcggatggcatcgaggacggtggcagcggcggctcccgagcactcccaccgcggatggcatcgaggacggcggcggcggcagctcccgagacctcccgtcgatgatcgaggacagcggcggcggtggcgactcccgagctccaaattgcgtcgaggatggaggcaacggccatagaggggatcgaggacagcgacggcggcggcggctcccaagccctcctgccatgcccgcgctctcacgccgcctctgctgcctcctcccctggctctggaccccaccttcctccttctccgcagagctgccgccttctcgtcggcgccctcccaaggctgcccgctccacgctgcgctggcctgccgctgtgcccccgcggctgccacccttgccctctactcccgcatctatgtcgtactccagaggatcaagaagtgtggactcaagtgatgttgaaaaccctgggaacaacctgtatgttactggcttatctgctcgtgtgacagatcgagatctggagaaacacttttctgctgagggagaggtaacctttatagagtatctgcaaagggataccaaaatagtgtacaactttttaagctcaccgtattacaggttattgattgctagcatagtacttgatccatggacaagggaatcccggggatttggatttgttaccatggctactgttaaggaggctgatctttgcatcaaatatctagaccgctcagtgttggaaggtcgtgtgataactgtagagaaggccaagagaagacgtggtcgaacaccaacgcccggaaggtatctaggcacaaaatcatcatgtgtgacaccagcacggaggtattccccaagctactcgcctgttgaaagagaccgctacagttcacgctactcacctgagcgagaacggtcttattctccttatgaaggcgatcatattctccatacaacaggcgaagatcatactccccctatgagaggcgtagatcctactctccacatgaaaggagacagtcctactctccgtatggcagatccccttctccttatggtagacggcgatcatactctccctatgacacacgtggttcacggcgtcggtcatactcatcttaccgtggttcccgctaccgttcaagatctccataccgttacagaagagagaggtcatgttcctatgaccattctgtttcaccatactatagaaggtgctattctccaagtgctagaggacggagctattctcgcagtgtatcacctcagaggagctactcccatagctgttccccggattctcagaggtcagggagctattctccaaggaaaagatacagtgaaaggaaaccgtcgcgcagcaggtcgtcgggtaagaggcattctagggagagctactctcacagccgcagttcctactcaaggtctgtctccagggagcgctcagaatgaattgaagcttgatgttctagagatcaataaagctctctatgcctaa

SEQ ID NO: 265 - DNA, 1389 bp, Oryza sativa
  N_region (373)..(373): n = any nucleotide
  N_region (375)..(375): n = any nucleotide
  N_region (499)..(499): n = any nucleotide
atggcagtcgtcgccgtcgccgtcgtcatcgcgctcctcgccgccttcctgacgccgctggccgtgtacctggcgaggagggcgtcgccgccgccgccgccgcggcgcaacctgccgccgggctccctcggcctgccgctcatcgggcagagcctttccctgctgcgcgccatgcggcgcaacaaccgccgaccggtggctgcaggacaggatcgacagccccggagcctggcggcgatcatcgggaggaggaacatactggagctcgtcggcgacgaccaccggcgcgtccgcggcgccatcctgcagttcctcaggccggacatggtgcggcggtacgtcggcaagatcgacagcgaggtgaggcgccacntngccgccaggtgggccggccgccgcaccgtcgccgtgttcccgctgatgaagacgctggcgttcgacgtcatcgccaccctgctgttcggcctcgaccgcggcgccatccgggagcagctcgccnacgcgttcgacggcatgcacgagggcttgtggacggtgccggtggacctgccgttcaccccgttccgcagaggcctcatggcgagcgcgagggctcgccggctggtcgaggcgaccgtgagagagaaggcggcgaagctggagcacggcgagtcttccccatccgacgatctcatcagctgcctcctcagcctccgagacggcggccggcagctgctcaccgaggaggagatcgtcgacaactccgtgctcgccctcgttgccggccacgacacctccgccgtcctcctcaccttcatgctccgccacctcgccaacgacccggccaccctcgccgccatggcccaaggcaaaaacccaactctcccctcccctgacgaacactcagagcatgaggagatcgccaggggcaagcgagacggcgaggcgctgacatgcgaggacgttgccaagatgaagctgtcgtggcgcgtcgcgcaggagacgctgcgcatggtgcctccggtgttgggcagcttcaggagagcgcccgtcgacgtcgagttcgagggctacacgatcccgagagggtggcagatcttctggtcgccgagcgtgacgcacatggatccggccatcttccacgagccgaccaagttcgagccgtcgcggttcgacggcgcggcggcggcggcggcgtactcgttcgtgccgttcggcggcgggccgcggatctgccccgggatggagctcgcgagggtggagacgctggtgacggcgcactacctggtgaggcatttcaggtggaagctctgcctcggggaggagaagaacacgtttctcagggacccgatgccgacgccgcacgacggcctccccgtcgagctcgaccacatcgctcctctctgctaa

SEQ ID NO: 266 - DNA, 1218 bp, Oryza sativa
atggcgacgctcctccggcgatccgtcggccccgcgcgccagctcctcctccgcccgcgcccgctcccgctcccccacgccgcctcctccacccgctccttctcccgctactactcccgcgacgacgtctcgaggtcagcgccccaactcctcctcctcgttttggttttggttttggttttggaagggtggttgatgtgtggtggtggtggttgcaggtacgaggcgctgagcacgccggtgaactggggggtgagcatcgtgccggagaagaaggcgttcgtggtggagcggttcggcaagtacgtcaagacgctcggctccgggatccacgtgctcgtccccctcgtcgaccgcatcgcctacgtccactcgctcaaggaggaggccatccccatccccgaccagtccgccatcaccaaggacaacgtctccatccagatcgacggcgtcctctacgtcaagattgttgatccctaccttgcttcctatggtgtggagaatccaatttttgcagtcatacagcttgcccaaacaactatgagaagtgagcttggaaagattacgctagacaagacttttgaggagagggatacactaaatgagcaaattgtgaggtccattaatgaggctgcaactgattggggactgaaatgcctccgttatgagatcagggatatatctccgccacgtggtgttaaggtggctatggagatgcaagcagaagcagaaaggaaaaagcgtgcccaaatccttgaatcagaaggtgctatgttggatcaggcaaatcgcgcaaagggtgaggctgaagcaattcttgcaaagtctgaagcaactgctcgaggaatcagattggtctctgaggccatgaggaccaagggcagcactgaggctgcgaacctgagagttgctgaacaatacatgaaggcatttgctaatctggccaaaaagagcaacacgattctccttccaagtgacgctggcaacccatcatccctcatcgcccagtctctccagatatacaagcacatctgccagaccaacagcttgaagagtgggaagtacctcacagatgctctagaggagacggaaccggaggaagaagagttggactctactgacctaccttctctgagcagcgggatgccgtcccccgacatgccagatgaccatgacaagactttctccctgcagcgccgcaacaaggacaagcactga

SEQ ID NO: 267 - DNA, 1212 bp, Oryza sativa
  N_region (1140)..(1140): n = any nucleotide
atggcagatcagaaggtgattctcgccgagccgctgcttccggggaaggaagctgacttcgccgacgacgacgacgtggaggcgcagctcacttcgtaccacaccggcgcctccttctccaggacgtgcctcaacctcaccaatgccgtctccggcatcggggtgctgtccatgccgtacgcggtgtcgcagggcgggtggctcagcctgctgctcttcgtcctcgtcggcgccgtgtgctactacaccggcacgctcatcgagcgctgcatgcgcgccgacggctccatcgccagctacccggacatcggccagtacgccttcggcgccaccggcaggagagccgtcgcattcttcatgtacgtcgagctctacctcgtcgccataagcttcctcgtcctcgagggcgacaatctcgacaagctcttccccggcgcaaccatggagattcttggctaccagctccacggcaagcagctattcattgtactcgccgccgccgtcatactgcccactacctggctcaagaatcttggcatgctcgcttacgtgtcagcggccgggctcatcgcctcggtggccttgacggcgtcactgatctgggccggtgtcgccgagaccgggttccaccggaacagcaacacgctcaacctcgccggaatccccacctccctcggtctctacttcgtctgcttcaccggccacgccgtcttcccgacgatatactcctccatgaagaacagcaaacacttctccaaagttctcttgatctcgtcggtgctgtgcagcctcaactacgggctcacggcggtgctgggctacatgatctacggtgacgatgtgcagtcgcaggtgacgctgaacctgccctccggcaagctctacaccaagatcgccatcgtgatgacgctggtgaacccgttggccaagtacgcgctgctcgtggcgccgatcacggcggccgtcgaggagaggctgtctctgacgcggggcagcgcgccggcgagggtggccatcagcaccgccatcctcgccagcacggtggtggtggcgtcgacggtgcccttcttcggctacctcatgtcattcatcggctcgttctcagcgtcatggcgaccgtgctgttctgcctctgctggnacctcaagatctacaaggccgatggcatccaccgcacggagatggtggccatcgccggaattctgctgctag

SEQ ID NO: 268 - DNA, 1188 bp, Oryza sativa
atggagccaaactacagcgactaccaccccaacagtgtccccttcgatgcctactacgagcacggccatggccatctcgacgatcatggccatggccaccaccacctgatccctgcccatcctgagccctcctactcctacggcaactggtccttcctccatgccgatgccaccgcaacgtcctcctccgagtcgtcgtcggcgtccgccagctccggcgcggcgcacattgttggcgcctccggtccttctgcatccttcgtgcggcagcttcatttcggcggcgagtactacgacgacgacgcggcggacatcagcgccctcatggaagccgcctccatctcctgctggacgacgaacggtggtgccggtgcgtcaacgtcgcaaaccacaggcttggagggggtggaggtgatgaggagagcggcggccccggcgccggacaacggatcaagtgacaaggaggaggcggcgcggccgctgatcggggtgcggaagcggccgtggggcaagtacgcggcggagatccgggactccacgcgcaacggcgcgcgggtgtggctgggcaccttcaacacccccgagcaagcggcgctggcgtacgaccaggccgccctctcggtgcgcggccccggcgcggtgctcaactacccgctccaccgcgtgcgggagtcgctgcgcacgctcgagctcggcgccgccgccgccgcctcggagtcccccgtgctcacgctcaaacggcgccaccgcatccggaagcgctccacgaccaagaaggcgctggcgggcaaggaggccgacgaggcacccgccacgacgtcgtcggaggggaagaagaagcggcaggtcaacaccaccagccatagtcatgacggcgcatggcgccgacacctcctctcctccgggcggctctcgatggaggggtcgacggcggctggcgggcacggcgggctcgcgggaggacgtggggaggcagccgggagcaacgtgcgtgcggccgacgacgacgaggacggcgaggcggcggccgggagcagtgtgcacgtggctaacgacgatgacgacggcagcgaggcggcggccgtgagcagcatgcacgcggccgataatgacgacgaggcggtagccggaagtggcgtgcgcatgacgacgacgacggcggcaaggaggcggtcgggagcgggctga

SEQ ID NO: 269 - DNA, 1176 bp, Oryza sativa
atggccttcggccgtgtggcgagagagaagcaggaggcgcgcgcggccttggcggcactccagggtggtccgagtaggcacagggagagcggcggcgcgagagatcgtcggggaatcggccgacggcggcgcgcgactgcgcatggcggcggcacgagcaaagcaatgtcgagagggtgggaaggaaggccggcggcgcatggcgatgcgccggcgagcaaagaggggtttcttgccggggcgacgaggagtcgattcgccggagctagggctactccaagggttcaagaactcgttccaccggtcgagggaggaggagcggtgctagggagcgacggcgacgacgagtggcctccgggacagagcgaggcggccggcgagtctaggcgagtggcgggggcgagcggtaggaggaaagggttcggcgggagctcaccgacgagaggaaacggcgtcggcggcgcggaaggagtcgtggcgaggtgtcgcaacggcgggacggcgcggcaccgagtgggcgcggccggggaagaagagagggagacacaaggatgggggcggcgcagagctcctcgtagactcctcgtgctcgccggcctcctgggcacgttcggcggaagaacgagcgacgacggcagcgagcagccaggcggcagggggcggcaagggtgctgtgggtggaaacgggagggaacgagagggaggttgagacgcggaagcgaggtcggttcgaggcgggagcgagcggcaaaggcggttcgtgggcgacgtggagacggcgacggcgtggatgcaagggacgatggaggcggtggatcggacggcgaaaaatcgggtcacgagcacgggtggggcaatatggctcggtcaaggtgggggcactggcgcggcgggacgtcgtcggtgtcctctgcctccgcgcgcaagaagacaaggacgggagagagagaggccgggcttagaagggaaaaagggagggacaacggtgaaaagggaagcctctcccttccgttttgggcggcgggcaggcaaggcgcgtgggagcggcgtccttgccgttcggctatgcgcgagcgcgcgggaaacggcgacaattttggggcggcgtcagcgggaagcgacgccgagagagagagaaaggagacggcgctgtctctcgctcccgaacagtattga

SEQ ID NO: 270 - DNA, 1176 bp, Oryza sativa
atggggcgcgatgcacggccggtcgaagaggacgaggccgacaacgccgttcgtcgtcggggacgcctcacgcatgcacggatccaccattgtcgactgccgccgaggagggcctcccgcgccatgcactcgccgctgcctcaaatgcgcgagggcacgccatcgccgtcgccgctcgggtgctgccgccgccgccaccgtcatcactcggcttcttccccgccgccgatttccgccgctacctccacctccgtcagatccgctcgcccgcccgctgacggcacgagggaatcgacgaggaacggtggcgtcgtcgagctgccgccgtcgtcgtcgtcgaggtcgtcgtggcaagccgccgccgtcgccatccccgccccgagctccgccgccgccgtcgccatcccggcgagcgcctcccgcctcccgcgccgccgcgccgccttccgcctccccgcgtccaccgcgcgccatgcgtcggccaccgttgtcatcagcgtggttgacgggaaggaaggaaatgggaaaagaaggaaaggaaaggaagaaggtggggaggagagagagaaagaagaggggcagaggcttacatcagccatggacgatgaggaggagaacggtgcgtgcgcggcactaccgtctccctcgatgtcatctcccttgctcgccgatcccctctccctcccggtggccatgaacagcaaggaggagcacaacgcggcgtggcgctaccgtctccctcaatgctatcccccttgctcgcaggcgtgggacatcgtcaacgctaccagggatagagacggagccagaggtggggaagggcaacagaaagggcacgaaggagagagtgcggatattgacgaaaaggagatcagaaaggagaagccggaggagcttgtggtcgcgctggctcatgcaaaagcagatgctataatggagaagctgagggataatgggatgatgaaggaaattcttgattctcaagagactacactgttgataactgcagaccagattgaggagggcgatgtcttctatgttgccggtggcctgctggtagagcacccgctgacttcacctcttgtggaagctattgttggcaccatcgacagtgtaatgggactcccgaaatccctcacggagaagctgatcaaggagtcccttgaggagccatag

SEQ ID NO: 271 - DNA, 1083 bp, Oryza sativa
atggccacctttgcgcgccaccgcgtcctcctctgccgcctcgccgcggcgctcctcctcgctccggtggcggcggcccagccgtggcagttctgcgggcaaggcggcaactactcggcgaacggcacctaccagtccaacctcgccgggctctccgccaacctccccaagaacgcctccgcgtcccggacgctcttcgccaaggacagcctcggcgccgtcccggacatcgtctacgcgctcgcgctctgccgcggcgacgtcgccaaagccaccgcctgcgagtcctgcgtcgccacggcgttccaggacgcgcagcagctgtgcccctacgacaaggacgcgttcatcgtctacgacctctgctacctcgccttctccaacaggaacatcctcgccgccgccgccgacgacgacgggagccccaggttcctgatgaacacgcagaacgcgagcgcgccggcggaggtgttcgacgccgccgtcgccaccctcctcaacgccaccagcagctacgcggcggagaactcgtccaggcggttcgccacgggggaggaggccttcgatgccgccgccgctactccgaccatctacgggctgtcccagtgcacgccggacatgtcgccggacgactgccggagctgcctcgggcgcataatcgcgctgatccctcggtacctcagccggaggaagggcgggagggctatcgggatgcgctgcaatttcaggtacgaggtgggtcctttcttcgccggaggctcgatgctgcggctcccggcgccggcgaactcgacgccgacggcgccaaccggaggaagaaagaaaaataaaagtggcacagctctagccattgcattgcccctagttgttatattgttggctacggttgtcatttgtctttctgttcagaggtggagaaaaagatcaaggtcaaaacagcaatcttcatattcaattcaaatggcggaggacattgaaagcacggattcactttttatcgatctatcaacactgcgtgctgcaacgggtaacttttctgagagcaataggattggtgaaaggaggatttggttcagtttataa

SEQ ID NO: 272 - DNA, 1035 bp, Oryza sativa
  N_region (513)..(513): n = any nucleotide
  N_region (588)..(588): n = any nucleotide
  N_region (591)..(591): n = any nucleotide
  N_region (594)..(594): n = any nucleotide
  N_region (596)..(596): n = any nucleotide
  N_region (608)..(608): n = any nucleotide
  N_region (616)..(616): n = any nucleotide
  N_region (699)..(699): n = any nucleotide
atggccggcgttgaccgcagccgccggtcgtcgtcgtcgccgccgccgcttccgtggacggtgcgcgtgcagcttgctgcgctctcggccgcgcaccggtccgacggcagcgtgcggcgcctcctcttctacctcggcgacctccacgccgcggccagcccccgtcccgacgcggccggcgtccgctccgtcgacgtcaccatcgacgcctcccgcggcctctgggcgcgcgtgttctgcccgcccacgaacacggcggcggtgaagctcccggtcgtcgtctacttccacggcggcggcttcgtgctcttctccgcggcgtcgcgcccctacgacgcgctctgccgccgcatctcccgcggggtccgagccgtggtggtgtccgtgaactaccgcctcgcccccgagcaccgcttccccgccgcctacgacgacggcctcgccgcgctccgctacctcgacgccaacggcctcgcggaggccgccgccgagctcggcgccgccgtcgacctntcccgctgcttcctcgccggcgacagcgcgggcgggaacatcgtgcaccacgtggcccagcgctgggcggcgtcnacnacntngccgtcgtcgtngctccggntcgccggcgccgtgctgatatcgcccttcttcggcggcgaggagcggacggaggaggaggtggggctcgacaaggcgagcctntcgctgtcgctggcgaggacggactacttctggcgggagttcctgccggagggcgccacccgggaccacgcggcggcgcgcgtgtgcggcggcgagcgcgtcgagctggcggaggcgttcccgccggcgatggtggtgatcggcgggttcgacctgctcaagggatggcaggcgaggtacgtgcggcgctgcgcgagaaggaaggcggtgcgggtggtggagtacccggacgccatccatggcttccacgcgttcccggagctcgccgactccggcaagctcgtggaggagatgaagcagttcgtccaggagcatagctccaaccgtatggcttaa

SEQ ID NO: 273 - DNA, 975 bp, Oryza sativa
atggcccacacgtcagccacctacctgcctagaggtggccaaacgggccgggccaaaacgggcggcccgaggcacggcggaacctgtagccggcacggcccggcacggcctgctacagtaacgggccgtgccggcacagcacgagtagccgtgccgtgcttgggccgccggccgagcccgcgggccggcacggcacggcacggctactgtactgatggcccagcccgccagccacctccgcaagtccgcatcgcatccctccgcgccatttcggttcctgggccaaccgtgccccgtccacggcccatttttcattcacgggcccgtactgacacggcgggccacacgcatgccgtgcccggcacgggcacggcccggccatccacgggccgtgcttgggccggcggctcggcaccctcatcccgccaccgtatcagcgttgtcgccgcctctgcctccttgagcccatcaccatggacctcacactaccgccacccagctccttccctagcggttgccggccgtgcccatctccgccctcaccggccgtcccccgctccttccccaccggccgccgctcgacgcccagccgagcgcgacctggccgcgccgcctacggtcctatccacgctgcgtcgggaggaagcaaggaggccgttgatggttgagcacgaccttgccgccgggatccaaggccgccgccagtgcttcctccgacaacttcgactccctcttaccggtcaacctcaccgtcggcgtcctctcggcctcatcccgccaccacatcagcgttgtcgcaacctttgcctccttgagcccatcgtcgtggacctcccaccaccgccgcccagctcctccctcggcggctgccggccacgcccatctccgccctcgccggccgtcccccgctcctcccccactggccgccagcctcgcccagctgctctccgtcaccgtcgccatggaaagggatga

SEQ ID NO: 274 - DNA, 849 bp, Oryza sativa
  N_region (107)..(107): n = any nucleotide
  N_region (204)..(204): n = any nucleotide
  N_region (210)..(210): n = any nucleotide
  N_region (238)..(238): n = any nucleotide
  N_region (247)..(247): n = any nucleotide
  N_region (272)..(272): n = any nucleotide
  N_region (286)..(286): n = any nucleotide
  N_region (296)..(296): n = any nucleotide
  N_region (325)..(325): n = any nucleotide
  N_region (327)..(327): n = any nucleotide
  N_region (333)..(333): n = any nucleotide
  N_region (385)..(385): n = any nucleotide
  N_region (387)..(387): n = any nucleotide
  N_region (404)..(404): n = any nucleotide
  N_region (432)..(432): n = any nucleotide
  N_region (435)..(436): n = any nucleotide
  N_region (438)..(438): n = any nucleotide
  N_region (441)..(441): n = any nucleotide
  N_region (461)..(461): n = any nucleotide
  N_region (469)..(469): n = any nucleotide
  N_region (479)..(480): n = any nucleotide
  N_region (483)..(484): n = any nucleotide
  N_region (488)..(489): n = any nucleotide
  N_region (492)..(492): n = any nucleotide
  N_region (494)..(494): n = any nucleotide
  N_region (498)..(498): n = any nucleotide
  N_region (500)..(500): n = any nucleotide
  N_region (502)..(503): n = any nucleotide
  N_region (505)..(505): n = any nucleotide
  N_region (507)..(507): n = any nucleotide
  N_region (510)..(510): n = any nucleotide
  N_region (514)..(514): n = any nucleotide
  N_region (517)..(517): n = any nucleotide
  N_region (592)..(592): n = any nucleotide
  N_region (691)..(691): n = any nucleotide
atgtaccccacctccttctcccccggcgcgtacggctccgaccgcgcgcacgcgtcgcgcgcgtcccattccccctcgaagtgcgccggcgagaacgtcgtcaccanggcgagcttctgctgctgcgacggggaccgggcggcccgggtgatgacctcgcggagggcgttcttgacggcaaggcggaacacgccgaagaacccngtctcngtccggttcggctccgggccattggtgncagccgatnaccttggcggcgctcgtagtacatngccgggtggaggancagtggccgncggaaagaccaccacgtcgatgccgtcgngntccccngccaacgcttgtcgggctggtccaggtagagccggttgtggtcgagcccccngncccgccgccgccgccgncgacgacgacgacttctccgtgccgttnacnngnaangggacagaaccggaaccganctttttcncggggtgcgnnggnnacanncancnccgnancnncngngcntcgnccncgtccccaccgtccccgccgttgccgccgcgcaccagctcggcggggaaccccgaggccaagaggcagacgagcnactcgcactggttccgcgccagcgagtctcccacgaacgcgacgtgccgcccgcgcaccagctccaggaactcccccggcgcgaacggcggcagcgcgnacccgccgccgccgcgcgggcgccaccgccagtggaggtaccccgtgtcgggccgcccgtgcgccatgcagttctgcccgcccttgatcgtcgagccgcagctcgtcccgttgtaccgcggcgccgacgcgctccgcacccactccccctccgagtag

SEQ ID NO: 275 - DNA, 843 bp, Oryza sativa
atgcagatagggatcaaagaaagcgaaggtccaacatcactggatcctaaattagctccggtgttatggtttcataacaactatgatcaatatgtggaagaaagtgatgacgaggatggtgaggtaagtggtgatgatgaggaggtgagcgacgaagacgagtttagtgcgacaagtgatgaggatgagtccatagaggaaaccgatgacgatggaataagcgacgacgacgacagtaacgatgatgaggaggagtctaatgaggtaaatgataccttgctcctctacagcatatctagccaacaattgctagccaacagcggactagatgatttgaaagacctcttttactggataacaccgcaagtggggggcaagttctgcacggcgttttttagcactgtcgtgacattagatttctccccgaatccaacatttgatattgttgctgttacactggtacaaaattcagtgtacaactttagggaaatctacttgttagaatcaagaggggagttgttctgcttgtacttctaccctccaggagcatgttctaataaaacagtggagatttctgtttacaagctggacataccaacgacagcttgggtgaaggtggacacacttggtgatagggcgtttattatcaataccaggaagggctacggagcatcggtcaatgcaaaagaagcttgcctacaggaaaactgcatttatttttcgaggcacagagacaaaggactatatgtttacagtatggagcgtggaactactgctgcaatcaatcccagtacagatcttgtagatgatgtggcagctcaaatattgatgcccgcatcttga

SEQ ID NO: 276 - DNA, 807 bp, Oryza sativa
  N_region (78)..(78): n = any nucleotide
  N_region (88)..(88): n = any nucleotide
  N_region (468)..(468): n = any nucleotide
  N_region (636)..(636): n = any nucleotide
  N_region (726)..(726): n = any nucleotide
atggtcaccgcgctagcccacgtcatccgcgccgcccccgacctgcacctcccccaccacccatcctcctccgcctcngccgccgccnacccgcagcaggcttcttccttctacccgaccgccgccgccgccgcctcctcgccgtccgaccagctcgccgccgccgccgctgccgaagagcaagggaggaggcggcactacagaggtgttcgacagcggccatgggggaagtgggcggcggagataagggacccgaagaaggcggcgagggtgtggctggggacgttcgacacggcggaggacgccgccatcgcctacgacgaggcggcgctccggttcaaggggaccaaggccaagctcaacttccccgagcgcgtccagggccgcaccgacctcggcttcctcgtcacccgtggcatcccccccgccgccacccacggtggcggctactacccctcgtcgtcgccngctgctggggcatgccccccgccgcggcagcagcagacggtcgtgccgtacccggacctcatgcggtacgcgcagctgctgcagggcggcttcggcggcagttacatgccgttcggcggcgccgcaacgatgtcgtcgtcgacggtgtcgtcctcgtcggcgccgcanatactcgacttctcgacgcagcagctcatccgggccggcccgcggtcaccaatgccatcgtcgggctccggctcggcgaccgcggcggcntcgtccacgacgtcggcgtcgtcgcccggtgcatggccgtacggcggctcggagcgcaagaagaaggattcgtcgtcgtga

SEQ ID NO: 277 - DNA, 774 bp, Oryza sativa
atgctaccgaagagggtcgtgaaggagaaggttgccaggcgaaaggaaagcgacgccggaccggacatggccgccgaggaaggagcagagccttcggcgcccgtggccgaagatggaggaggacaagcgccatcacaaccgccttcggcccctgcaacctttgtgcaagagccgaacgcggccgacgtggcgaaggcggctgcggcggcaagggcactccagaccagggcggagatcctttcgacaggccaactggtggtgccccaagccgctccatcgcagccggcagcggccccaactgcgctcgccgttgtgcaggcccagccacacaggcgccggtgtacttcgccgggcagcaatcggccgcagcagtgcatccggcccctcacgtgcaacagcaagctcaaccagtcgctgcccaagtacaccatcaaccacctggccaagcgccacaaacagtggcggaaggggcttcggctctgcaggcgcaacttcaagctttccttcagcaactcaaccaaccccactgcatttcaagtacaatcccatcggcccacccggaggggaatacaagtcaagcaaggtgcggtaaacagggcgggaggcgaaaaggggctaccgctgagtgggggaatcaagactcgtccaatcccaccccagttcaagttcccacccgtcctgcgctattcaggcgaagttgacccgaaggagttcctctccatctacgagtcagcgatcaaagcggctcatggtgacgaaaataccaaggcaaag

SEQ ID NO: 278 - DNA, 711 bp, Oryza sativa
  N_region (324)..(324): n = any nucleotide
atggaactcccgtggctggatctgcccttcacgctgctgacgctgctgctggcgacgcggctcgcctacgactactacggcgtcgtcgcggccaccttcacggggagcttctcgctccagatcttcctcttctactgcttcgcgcgctgggccggggcgttgaagccggggcccgggcgcggcgtcgtcgctggcgaaccggtgcttcgccgtggtgttcatggtgttcgtgccgctggtcatcgtggtgttcgagcggagccaggccgacgtcgtggcgtacgcgctctgctcgccaacatcctcgtcatggtcgtctggctntcgcccgacgccgccgcggaccccgcgtcggcggccaagtcgttcctccgcctcagcgacgacgaggacgaaggcagctgcagcggcagcggccacggcgccgccgaggacaagtgctgcgtctgcctcgccgggatgcgggaggcgcaggcgctccgcgacctcccccggtgcggtcaccgcttccacgccaagtgcatcggcaagtggctcacggcgcacccgacgtgccccgtctgccgcaccacggccgtgccgccgccggcgccgtgcccgccagcggcgaccatgccgacgacgccatcacccctgtctagctctgcacatagtctgacagacaaactcagattcaagattgtgataagagttgccttgcttgttccgtga

SEQ ID NO: 279 - DNA, 690 bp, Oryza sativa
atggcgtgcgcgtcctcccgggcaaacgtctccgacgtgttcggggcgtggcgggccttgtccttggccggcgccggtctgcgccgaccaccccggccccgcgtccgcactgcggcggcttcttgctccctcctcccgccacctgctgctgcttcgccggcggtcgttcttcgcgtggccggcgggcacgacgaggagaagaacgcgctgcagtccacggtcgcgtacgacgccgaggccgacgcatgggtgccgctcccggacatggcgacggagcgggacgaggccagggggctctgcgtcagtggcatgttcgtcgtcgtcgttgtcggcggagacggagctcgctcgggcagccacgacggcgccgcctctgccatgcacgccttgctcctcgccgccgcctccaccatgatgaagacgacaacgatgacgagtagtccggcgaggggcgcgtcgtcgaggcctgggcaaggggcccggatgagtccgtctccgctgccgaccgtccgggtgagctccgcctccgccgtgcaggccttgcgtggttgcgccagcgagagagaagggagtaattcggttgaccgcgatagttcgggaggtaccggtacttcatggtaccaaatcgttttcgatctttggatccagctaggtaggatagacattgttagatccaacgatcgtaaatga

SEQ ID NO: 280 - DNA, 627 bp, Oryza sativa
atgtgtaacgtcctcgtcctgtattttagaagaacgctcgctaaaaagagacaaaaaaaggcggaggcaggagctggctggagacgatggcggcgtcgagccagaggcggaggtggaggtggctcgctgtcgctggaggcggcgtggaggcggatgcggctcgttgtcgctagaggcagcgccgtcgcgccaaggcggaggtgggccactggaggcggcaccgaggtggaggcgggctggctggacggcggaggcggtacggtggcgcgatggaggcggcgccgcgccgatccagtccactcccagtctcccaccgtccagtcccagacagagtcccacaggcgcacgattcctcacctcctcatcggccggcgccgccgcggggccaagccgtcgtcgcctcctcgctgcggggccaagccgccaccgccgccgggaccaatcgcctcctcgcccagtcgccacatcgccgccgtcggagcaacccacgccggctctgccgcgccccatcgcctcctcgcgccgtcacgcgccacatcgccgccgccgggccaagccaacgccgccgccgcggcgccccatcgcctcctcgcctgcctcaccgtcaagccccaagatttggtatga

SEQ ID NO: 281 - DNA, 621 bp, Oryza sativa
  N_region (129)..(129): n = any nucleotide
  N_region (133)..(133): n = any nucleotide
atggccgcgtcctactacaacaacccgccgccgccgcactcctcgtacgcggccccgcctccgccgccgccgccgccgccgggcacctccctgtacgcctcctaccgccaccacgcctaccctcctcanccgncgccgccgcccgcgtacgtcggcgcgtactacgaccacgcggcggagccactgccgccgcgcgacgagctccgcacgctcttcatcgcgggcctccccggcgacgccaaggcccgcgaggtctacaacctcttccgcgacttccccggctatgtctcctcccacctccgcacctccggcaaatcctcgcaggcatatgcgttcgctgtctttgcagatcaaccttctgccttagctgcaatgagtgcccacaaacgtaagagctcgcttcagcattatcagggaaggatatttgaccttgagaataattgcacactgcatgtagatcttgcgaaatctaattcaagatcaaagcgctccagaacagttacacgaactttgagcctgctgctttcagcaagtcccaccattgccaccattgcagctcatctgcttgacgatgaggagcagcagcagacgcatgagatggttatggagaggggagcatga

SEQ ID NO: 282 - DNA, 600 bp, Oryza sativa
atgaccaccaccaccacaacctcctcctcctcctcctcatcctcctctccttcctcctcccctcccccgcctcgccgtcgccatcgccaccaccgccgcgccgcccgcaggacccacccggtggaggcggaggccgaggaggtgtggcgcggggcacagtgggaagccgcgtggccgcggcggacgaagccggtggtggtcgccgaggacgagccgccgagcggcggcgtcatcgtcggcgcgtgcacggcggggggcggcgaagagggcggcggcgtggggcgcgcgcggagcctgaccgacgacgacctggaggagctcaaggggtgcgtggatctcgggttcgggttcagctacgacgagatccccgagctctgcggcacgcttccggctctcgagctctgctactccatgagccagcgcttcctcgacgaccacccccagtcgcaccactcgccgccgcctccgccgccgccgatgccctcgccgtcgattcccaactggaagatctccagccccggagacagcccggacgaggtgaaggctcggctcaagtactgggcgcaggccgtcgcgtgcaccgtcaggctctgcagctga

SEQ ID NO: 283 - DNA, 549 bp, Oryza sativa
atggccacgtcagcctactctctctctctcttcccctcttctctcccttcctcatctctctctgtctctccccttctctgcgaggctgccagtgcgagccgggagaggagggcgtcggcggccggcgatgggcgatgcggcggcggtgggggaggagctgcgggcggggagccgcacctagtgaagctgcagccgtcgacgaggagttccttgccgtcgcggtggagcgccgacgccgggcagcgtcctgggtgggcgtcgggctcgccaccgaccagtgctgccttctccctttacaacctcaagccggcacccaccagtgctgcctccccgctggccgtcgtgctcgttgacgagtcggcgagaccggcgtcgccgtctgcaaagtcgcggctgttcccggccaaggtcaaggggagggtgggacccgtttctgcggcggtggcgagcgcggctcgtccgcctcgccgccgtcttcgtcgctgcggccctcatcctgacagtggatctgatactgctgagttcgtcgatttgatacatatctgctaa

SEQ ID NO: 284 - DNA, 543 bp, Oryza sativa
  N_region (59)..(59): n = any nucleotide
atggcgtccgcaccgagcaccaccgcgtccggcctcgcgccgccgccgttctcctcggngcgcggcgcgcgcctcctccccggcgcgctgctgcgcctcccgccgcctccggcctcggtgggtagcttccgcgtggtggggcccgccgccgccccacccggcggccgccgcatcgccagcgcgcgcgtgcggtgtggcgcggcggtgaggttcatcgggcagagcgagttcgaggcggaggtgttgcagtcggacctgcccgtgctcgtcgacttcgtcgccgactggtgcgggccgtgccgcctcatcgcgcccgtcgtcgactgggccgccgaggaatatgaagggagattaaagattgtcaagattgatcatgatgccaatcctcaactgattgaagagtataaggtttatggtctcccatctcttattctattcaaggatgggaaagaggtaccagggagcagaagagaaggcgcaattacaaaagccaagttcaaggaatacctcgaacctctcttgtcaacctcaacagttgcttaa

SEQ ID NO: 285 - DNA, 513 bp, Oryza sativa
  N_region (390)..(390): n = any nucleotide
atgcggcggctggttgacgtcgtggaggcgccggcgctggtgctgacgccggcatgggcggccacggcctccatgcagcaggccggcgggagctccggcgccttggacgccaacatggtcatcgtcctcgccgcgctgctctgcgtcgtcatctgctccctcggcctcagctccctcatccgctgcgcgctccactgcgcccgcggcctctcaccctcacccgccatggcgacgccggcagctgccaccaccacgggcgggctgaagaagaaggagctgaggaggattacggtggaggtgtacggcgccaagcaggccggcgtccccgacgccgagtgcgccatctgcctgggcgacttcgccgacggcgacaaggtgcgcgtgctcccnaggtgccaccacggcttccacgtcggctgcatcgacacgtggctcgccgcgcacacgtcctgccctacttgccgggactccattctctccgtccatggagtcgtcgccggcggccaaacatag

SEQ ID NO: 286 - DNA, 503 bp, Oryza sativa
  N_region (1)..(1): n = any nucleotide
  N_region (4)..(4): n = any nucleotide
  N_region (6)..(6): n = any nucleotide
  N_region (10)..(10): n = any nucleotide
  N_region (14)..(14): n = any nucleotide
  N_region (20)..(20): n = any nucleotide
  N_region (186)..(186): n = any nucleotide
ncantnctanggtnccagantttggaaccgaaggaattataactggtgcacgggggcacacggtccgcgcatacctccttgttggcgatctcggacttgtaggggaggacgaagttgacggtgagcttggaggggatggccgccggcgtgggggggccgggctgcatgagcgacatgggcctggcnggggcctcgatgttgggggccaccttcttccaagcctccgcgaaggcggagtccgtggccgcctcggccggcacctccgccgtcgagagcaccctgctgctgcggccggcggcggcggcggcggcggcgcgggtggtggccaggcggcgggcggcgtggcgcagcatttttctttttcttctttttctctctctctcgtttctcctctcctcgctgcggctgcgggtgggtggaatggggttccagaggtgtgggcgatttggagggcgagggtttacgaccgatatgcccttccgttccgtttcgagcaccggtga

SEQ ID NO: 287 - DNA, 450 bp, Oryza sativa
  N_region (284)..(284): n = any nucleotide
atggaggcccagccgcccgcgcatgcgcagctgggtgggtctgcgacgctggcgaaggccggcggtcgggaggcggcggcggaggaggaggtcgtgttgtggagggaggacgcgaggaggttcgagacgcccgacggcgaggcctacctccagtaccgcctcctcgccgccgcccagccgcgctcctcctcctccggcgacggcggcggcggcggcggcgcgacgacgccggcagcggtgatggagatggcgcacacgtacgtgccggggagcaagcgcgggcntgggctcgcggcgcggctctgcgacgccgccttcgcccacgcgcgggagcgcggcatgcgcgtcctccccacctgctcctacatctccgagacttacctccctcgcaacccggagtggaacgagctcgtgatcacggagaaagaacccaaacccagcagcatgtag

SEQ ID NO: 288 - DNA, 444 bp, Oryza sativa
atggcggggatggcggacgagtacaaccagtacggcggcggcgggggagggccgcgcgggggggcggcgccgcacgggctgctgctggcggtggtggtggggctggtggtggcgggcccgctcttcctcggcgacggcggggaggccgtgacggaggccgtcgcggagctgctcagccccgtggggctcctcctcctccccgtgtgcctcctcctcctcatccgcctcctctcctccgaccgcggcgccgccgcgttcgccgaacgcgttcgccttcgggggctcccccgacgccgtccaccgcgtcggcggctcgcccgtcggcgtcgcgctcatgctgctcctcatcctcgccctcctctactaccgcaccggccctctttcgggcggcgaacggcggcgacgacgagtagagctccgccgtggtggtcgatctcgtactag

SEQ ID NO: 289 - DNA, 435 bp, Oryza sativa
  N_region (151)..(151): n = any nucleotide
  N_region (318)..(318): n = any nucleotide
  N_region (374)..(374): n = any nucleotide
atggcgctcgccgtgaagctcgccgtcctcctactacttgccgcggcagcagctggaggaagcagcacgacgaccgtgccgccgctggaggagaggctgggcgcggcgttcgacgggatggcggcggcggcggagggaggaggaggggganggtggatgatggagtgctggagcgcggtgacgaagctggggtcgtgcacgaacgagatcgtgctcttcttcgtcaacggcgagtcctacctcggcccggactgctgcgtcgccatccgcaccgtcacccgccgctgctggccggccatgctcgcctccatcggcttnaccgcccaggaggccgacatcctccgcggcttctgcgacgccgagctcgccgcccngcccccgccctccaccaacgcctcctccgccgcccccgcgccggcgccggcgtccgcttag

SEQ ID NO: 290 - DNA, 333 bp, Oryza sativa
  N_region (244)..(244): n = any nucleotide
atgttccgggcggtcggcgggcgaatcggaggggcggacggggtcgacgaggacgcggcgaagccaaaggaggcgacgccgagaggggaggaagtccggagcgacggcggcggcgaaccggagctcgtcggcgacggcggagagagaggaagacggcacgggcttgattccgacggggagagaagagagggaaaagagggggaaagagggagggaatcacggggagtgatttccccctcttttnactggcgcgcggggacggcgggatgcggcggattcggcggcggcggcggcgctagggcacgggcgggcggcgggcgcggcgcgaggtag

SEQ ID NO: 291 - DNA, 318 bp, Oryza sativa
  N_region (7)..(7): n = any nucleotide
atggccntgagaaaaatccgaggtcgccgctactcttcacccaaggccgccgtcggattcgggcgggacgaggtccgccgccgccggatccgggcgggacgagaaccgtcgccgccggatctggcccgtcggctcctcgtcgtcgtcggcggcgacggtgaggaggagatggcggtggtgccgccgcccgaggttgccgcccactcttcgaccgaggtcgccgcccccgccaccgccagctccaggccggagcccaaggcggccgagcagtgccgccgccgccgccgccagctcccgccaccgccaccgccgccctag

SEQ ID NO: 292 - DNA, 315 bp, Oryza sativa
  N_region (144)..(144): n = any nucleotide
  N_region (147)..(147): n = any nucleotide
  N_region (149)..(149): n = any nucleotide
  N_region (153)..(153): n = any nucleotide
atggagcccgcgacgagccgggcgccgcgcagccgcttcgtggtgtggctgcacggcctcggcgacaccggccgcgccaacgagttcctcgccgacagcttccccaccacggccgccttcgccgacgcccgctgggccttcccnacngngccnaccgctccggtcacttgcaaccgcggcatgctcatgccctcgtggttcgacatccacgacgcgcccatcacttccgttagatatctctgccacaacgaaaattcccctgtttatgccatgcttgcagaagccagaaaaggaacaattgtgatgttcacttga

SEQ ID NO: 293 - DNA, 300 bp, Oryza sativa
  N_region (17)..(17): n = any nucleotide
  N_region (33)..(33): n = any nucleotide
  N_region (71)..(71): n = any nucleotide
  N_region (100)..(100): n = any nucleotide
  N_region (105)..(105): n = any nucleotide
  N_region (116)..(116): n = any nucleotide
  N_region (140)..(140): n = any nucleotide
  N_region (144)..(144): n = any nucleotide
  N_region (161)..(161): n = any nucleotide
  N_region (166)..(166): n = any nucleotide
  N_region (204)..(204): n = any nucleotide
atgtcgggctctttccnaatcattgtgaaggcngaatttcaccaagtgttggattgttcacccaaccaatnggggaacgtgagctggggtttaaaccgtngtganaacagggcctntaagtcagaatccaagctagcaancggngcctgggcccgcggccngcccngacccacgttaggggcgcaagcccccaagggcccgtgncaacggccaagccggcccggccgaagcgccgcggccggccgcctcgaagctcccttcccaacgggcggcgggctgaatcctttgcagacgacttaa

SEQ ID NO: 294 - DNA, 2908 bp, Oryza sativa
  N_region (32)..(32): n = any nucleotide
  N_region (60)..(60): n = any nucleotide
  N_region (106)..(106): n = any nucleotide
  N_region (115)..(116): n = any nucleotide
  N_region (124)..(124): n = any nucleotide
  N_region (400)..(400): n = any nucleotide
  N_region (429)..(429): n = any nucleotide
  N_region (1462)..(1462): n = any nucleotide
  N_region (2350)..(2350): n = any nucleotide
  N_region (2362)..(2362): n = any nucleotide
atggcacggggttccgctctgctcgatggtancgtgctgccgcctttccgggatcgtgancgagaggcaggctgggctgtcgcgccgcttcatgccggaatctgcnaccggccgnnagatagtnacgctgggcgagggacgcccggcgccagactacccggggcggtccgtcttctttctcccctttgcaatggcagggctggttccgccattttcttctttcttcatggatgttctggagttctacgatctccagatggcgcacctcacccccaacgcggtgatgacattggccatcttcgcgcatctgtgcgagatgttcattggggtgcgcccatctcttcggctgttccggtggttcttcaccgtgcagtcggtgtcgccgccatcggtagtcggnggctgctacttccagccacgggggccggngctgaaccgctacatcccctgcgccctccgcaagaagtgggacgactggaagagcgactggttctacactcccctcgccgacgaagcgcgcctccgacttccgagccagcccccggcgcaggcctccagctggcgggcgccggtagatctgggggatggctatgacgccgtcctcgaccgcctggcgggcctgcgatcccaggggctcacaggggccatggtgtacggcgactacctccgtcgtcggattgcgccgctccagcgacgcgctcggggcgcctgggagtacaccgggtccgaagacttcacgaggacccaccagggagtgagatgggactgggctcctgaggacttcaagatattggtccaacgggtgctgaatctcaactccgtagaggcggccctcattccccaaggaatcctccccctctgcagcgatccagaccgcgcctccatcctgaccattatgatggcggtcggggcctcagaggagcgagctccaaagggccacgacggcgcaggcgggagccgcaggggggaacaatctaccccgagagggggtcgtgcttctgggtcccgcgacaggggcccggggagcagccgccctgccgacgcccgggggaagaggaagcagggaggaacacctcccccatctcctccccgaggggccggggcggcgcgtgccagcagcaggcgcccggagggggccgcgccaacatcgcagcccgagggggagcgcaagaagaagcggccccgcaagatgggggagacagaaccatctcggggaaacctcatttcccctccaaagtggtcgtttaaccgaccccctcgcagcagcgagatcccgtcgcgtccctcccgccattccaagtccggccagtctgaggccgaggatccggcggccgcagaggccctcaggcgggaatctgaccggcgagaggccgcggatcgcctacgggaagccgaggaggccgcccaggaggccgcccgggctcgccaggccgaggaaaccgctcgggaggaggccgcccgngcccgccaggccggggaagccgctcgggaggaagccggatttcgccaggacgaggcgatggcgacttccgaggcagctcgcgacgaggccgcgggcgcgtcgcttgggcccactccctcgggcgacgctcaggcgacaacttccggggcagctggcgacgaggctgcgggcgcgtcgcttgggcccactccctcgggcgacgctcaggaccaaccgggtccgggggacatccccgagtccggcacttccatcggcggcccgagccgcgtggcatcctctccaaggcggctcttccccacgccttctatcgccccactgaacgcagagccccttctgcaggccttggccgccgcaaacaccacggtgttggatgggttaagtgcccaggtggaggtcctgcaggcagagcgggcggagctcgacgccgcgtgggcgcgtgtcgaagaggggcgacgctcggtggaggccatggtggaggtgggccgtaaggctcaccgccggcacgtctcggagcttgaaacccgtaagaaggtgctggcggagatcgccaaggaagtggaggaggagcggggggctgccctcattgccaccaccgtgatgaacgaggcgcaggacaccctccgccttcaatacgggagctgggaggcggagctaaggaagaagctcgacgccgcccagggggtgcttgacgctgccgctgcccgagaacagcgggcggcggagaccgaagcggcgtcccggcagcgtgaagaggcccttgaggcgcgcgccatggcgctggaagagcgcgcctgcgtcgtggagagggatctggcggaccgcgaggccgccgtcaccatccgggaagcaacgctggcggcgcacgaggctgcttgcgccgaagaagangaggagcaggcncgccgcaatctggaaggtgcccgcgccgagagggccgtactgaaccaacgggccgctgagctcgaggcgcgggcgaaggagctggacgcgagggcgcgcagcggcggggcggccacgggcgaaagcgacttagccgcccgcctcgcagctgccgaacgcaccatcgccgatctgcagggcgcgctggactcgtccgccggggaggtcgaagccctccgcttggcaggcgaggtagggcccggcatgctttgggacgccgtctcccgcctagattgcgccggtcggcaagtgggcctctggagagggcggaccgtaaagtacgccgccaaccagggaggcctcgcccagcgcctctcgaagatggccggggctctccaacggctccccgaggagctcgagaagacaattaagtcatcctcgagggacctcgcccaaggagcggtggagctcgtcctggcgagttaccaggccagggaccccaatttctctccatggatggcgctggatgagttccctcctgggaccgaggaccgcgcgcgcgcgcag

SEQ ID NO: 295 - DNA, 2322 bp, Oryza sativa
atggcgatgctgctgttgttgcgttctttggagttcttggcgatcatggcggttgcatcgagcttggcaatgccggtggcggcggcggcggcggtgccacagccggagccggaggtgaagccgagcgacaccgacgcgctcaccatcttccggaacggcgccgacgcgcacggcatcctggcggcgaactggagcacctcgaacgcctgcgccggcgggtggatcggcgtcggctgctccggcgacggccgccgcgtgacgtcgctgtcgctgccgtcgctcgacctgcgtgggccgctcgacccggctctcccacctcggcgagctccgggcgctcgacctccgcgggaaccgcctcaacggcacgctcgacacgctcctcctcggcgtccccaacctcaagctgctctacctctcccacaacgacatctccggcgccatcccgggacgccatcgcgcggctcctccgcctcctccgcctcgacctcgccgacaacagcctgcgcggggccatcccggtggccgcgctcgccaacctcaccggcctcctcacgctcaagctccaggacaacctcctcaccggcttgctcccggacgtcaccgccgccctcccgcgcctcgccgagttcaacgcctccaacaaccagctctccggcagggtgcccgacgccatgcgcgccaagttcggcctcgcctcgttcgccggcaatgccggcctctgcgggctggcgccgccgctgccggcgtgctctttcatgccgcgcgagccagccccgacgtcaccctccgtcccgtcgtcgccgcagtccgtggtgccatcgaacccggcggcgtcgtcgtcgtcgggttgcttcgtcctcgccggcgttggccacaccggagtcgcgcgacggacccggcaagggggggttgagcaccggcgccattgccggcatcgtcgtcggcaatgctctcttcctgttcgccatgctgtcgctgctcgtggcgtcctgctgctgcagcaccggcggcgagagcggcggcgagccacccaagaagaggaaacgaggcggccgcgtcggcctggaggatgacgacgacggcgggatgttcggccaaggcaagggcgtgcagccaggccggccaggcagcgccggcatgcgcagcgacgacggcggagacagcgacggcgcgcgcagcaagctggtgttcttcggggtggacggcggcgaggacgacgacgacgacgacggaggcggcagcgacagcagcgccggcaggagggcaaccggcggcggctggacggcggcgccgcaccagcctcacgggaggaggagcaggttcgcgctggaggagcttctccgcgcgtcggcggagatggtcggccgcggcagcctgggcaccgtgtaccgcgccgtcctcagcgacggccgcatggtcgccgtcaagcggctgcgcgacgccaacccatgcgcccgcgacgagttccaccgctacatggacctcatcggccgcctccgccacccaaacctcgtccccctccgagccttctactacgccaagcaggagaagctcctcatctacgactacctccccaatggcaacctccatgaccgcctccacgggcaccggatgtcgggggagtcgccgttggactggacgacgagggtgaggcttctcctcggcgcggcgcgcgggctggcatgcgtccaccgggagtaccgcacgtcggcgatcccccacggcaacgtcaagtccaccaacgtcctgctcgacaagaacggcgtcgcctgcgtcgccgacttcggcctggcgctcctcctcagcccggcgcacgccattgcccgcctcggaggctacatcgcgccggagcaggaggacaacaagcggctgtcgcaggaggccgacgtgtacagcttcggcgtgctcgtcctcgaggcgctcaccgggaaggtgccggcgcagtacccgcagccgtcgccggtcgtcgccgccgacgccgccgcagacgcgcagaggaaagacaagaggtgctcgacggcggtgagcctgccggagtgggtgcgatcggtggtgcgggaggagtggacggcggaggtgttcgacgtggagctgctccggtacaaggacatcgaggaggagatggtggcgatgctgcacgtcgcgctggcgtgcgtcacgccgcagccggagcagaggccatccatggccgacgtggtgcggatgatcgagagcatcccggtggatcagtcgccgttcccggaggaggacagggacatctccaccatgtcgccgtcgatcggcattaccactgacgacggagatggtcgtctcagctgctag

SEQ ID NO: 296 - DNA, 2004 bp, Oryza sativa
atggcacggggctccgctctgctcgatggtagcatgctgccgccttcccgcatcgtaagcgagaggcaggccgggctgccgcgccgcttcatgccggaatctgccaccggccgggagatagtcatgctgggcgagggacgcccagcgccatgctacccggggcggtccgtcttcttcctcccttttgcaatggcagggctggttccgccattttcttctttcttcatggatgttctggagttttacgatctccagatggcgcacctcacccccaatgcggtaatgacattggccatctttgcgcacctgtgcgagatgttcagcggggtgcgcccatcccttcggctgttccggtggttcttcaccgtacagtcggtgtcgccgccgtcggtggctcgggaggaggccagactccaccaggccacggcgacgacgacttccgaggcagctcgcgacgaggctgcgggcgaatcgcttgggcccaatccctcaggcgacgctcaggacaagccgggtccgggggacgtccctgagtccggcacgtccatcggcgagccgaaccgcgcggcatcttctccgaggcggctcttccccacgccttccgtcgctccactgagcgcagaaccccttctacaggccttggccgtcgcaaacaccacggtgttggacgggttaagtgcccaggtagaggccctgcaagcagagcgggcggagctcgacgccgcatgggcgcgtgtcgaagaggggcgacgctcggtggaggccatggtggaggtgggccgcaaggcacaccgccggcacgtctctgagctcgaagcccgccgaaaggtgctgggggagatcgccaaggaggtggaggaggagcggggggctgccctcatcgccaccactgtgatgaacgaggcgcaggacaccctccgccttcaatacgggagctgggaggcggagctagggaagaagctcgacgccgcccaggaggtccttgacgctgccgctgcccgagaacgacgggcggcggagaccgaggtggcatcccgtcggcgcgaagaagcccttgaggcccgtgccatggcgctggaagagcgtgccggcgtggtggagaggggcctggtggatcgcgaggccgctgtttccatccgggaggcaacgctggcggcgcacgaggccgcctgcgccgaagaggagtccgcactccgcctccgcgaggacgcgctcaccgagcgggagcgagctctcgaggaggccgaggccgcagcgcaacggctagcggacagcctgtccctccgcgaggcagcgcgggaggagcaggcgcgccacaatctggaaggtgtccgcgccgagagggccgcactgaaccagcgggccgctgaactcgaggcgcaggcaaaggagctggacgcgagggcgcgcagcggcggggcggccacgggcgaaagcgacttagccgtccgcctcgcagctgccgaacacaccatcgccgatctgcagggcgcgctagactcgtccaccggggaggtcgaggccctccgcttggcaggcgaagtagggcccggcatgcttcgggacgccgtctcccgtctagatcacgccggccggcaggctggcctctggggcgggcggactgtgaagtacgccgccaaccaggggggcctcgcccagcgcctctcggaaatggccgggactctccagcggctccccgaggagctcgagaggacgattaagtcatcctcgagggacctcgcccgaggagcagtggagctcgtactggcgagttaccaggccagggaccccgacttctccccatggacggcgctggacgagttccctcccgggaccgaggacggcgcgcgcgcgcaggtccgggatgccgccgaccatatcgtccacagcttcgagggttcggcccctcggctcgcgttcgccctcaactccgacgaggagggcgatgacggcggtgtgggcgacagtggcgacgaggctggcgacccgggtgcatcggagtga

SEQ ID NO: 297 - DNA, 1980 bp, Oryza sativa
gaaattccgggcgtgacagtagttgagtgtgaggaaggcgaacaagagggccctccggctcgcgatggcccctcatcccccgaaggtctagcgcccaaagcttccagcccccgggagggccccgaggcccccaagggaggagcgaaggctttggcaagtggccctgagcttgatgatcccgaggcagtccgggatccccccgggaccaccgaacaggtgcgccccgagtcaccagcccctgacagcacgaatcggccccgccgaaaggtgcagcggcccgtctacttcgtcagcgaggcactccgagatgcgaaaacccggtatccgcaggcccagaaaatgctttatgccgtcttgatggcctcgaggaagttgcgtcattacttccaagcgcatcgggtttccgtagtgacgtcataccctcttggccaaattttgtacaaccgagagggtactggacgggtggtaaaatgggccatcgagctggctgagttcgatctgcacttcgaaccgcggcatgcgatcaagagtcaaatcctggctgacttcatcgcggaatggaccccgacttccaggccacgaacaacatggcagaatatgaagggctcctcgcgggattgagggcggcagccagaatgggcatccgccatctcctggtcttaggtgactctcagttggtcgtaaatcaagtacccaaagaatatcagtgcacctgaccagcaaatggaagcatacgtccgcgaggtacggcgcatggaacgcaacttcgacggacttgagctccggcacgtgccccaacgcgacaacacggttgctgacgagttgtcgcgtgttgcgtcggcacgagccccactccccccggggactttcgaagaaaggcttgcgcaaccatcggcgcgaccgagccctttgagggaccccaacgacgcgcccttcggcccaacccctggcgacccgcgcccctcggggcccgaggaggtcaaccccgacccctctcgtcaggttgtgtggatgaccgacatccgggcgtatctcgacgggaatactcttcctgaggaacgcgcggaagctgaaaagctcgcacgcatctccaagcggtacatcctcgtagagggggccctctaccggcgtgccgcgaacgggatactcttgaagtgcatttctcgggagcagggcatcgagctcatagccgacgcccatcagggtgagtacagagcccattcggcctcacgaactttggtcggaaaagccttccggcaaggtttttattggccgactgcattacaagatgcccaagaatgggtccagcggtgcagggcatgccagttccacgccaagcagacccaccagccggcccaagcattacaagtcattccactatcttggcttttcgcagtctgggggctagacatccttggaccgttcaaggcggctcgaggcgggtatcagcacttgtacgtcgccatcgacaaattcaccaagtggcccgaggcctacccagtcgtcaaaatcgacaagcattctgctcttaagttcatcaggggcatcacgtctcgattcagagtgcccaatcgtgtcattacagacaatggcacccagttcaccagtgagctgtttggcgattactgtgacgacatgggtatcaaattgtgctttgcctcacccgcccaccccaagagcaacggccaagtcgagcgagccaacgccgaaatcctcaaaggactcaagaccaagacgtacaatgtcctgaagaagcacggggattcatggcttgaggagttgcccgccgtgttgtgggcaaatcggaccactccaagccgcgccacgggggaaacaccatttttcttggtgtactgcgccgaagcggtcctaccctccgagctttccctgggttcgcctcgtgtcgcactgtacaacgaggccaaccaagatgaccttcgccgcgacgatctcaattatcttgcagaacggagaaggtga

SEQ ID NO: 298 - DNA, 1948 bp, Oryza sativa
atggcgaagggagagggcccggcgatcggcatcgacctcggcaccacctactcgtgcgtcggcgtgtggcagcacgaccgggtggagatcatcgccaacgaccaggggaaccgcaccacgccgtcgtatgtcgcgttcaccgactccgagcggctcatcggcgacgccgccaagaaccaggtcgccatgaaccccatcaacaccgtcttcggatgccaagcgactgataggtaggcggttctccgacccgtccgtgcagagtgacatgaagctgtggccgttcaaggtcatccctggccccggcgataagcctatgattgtggtgcagtacaagggcgaggagaagcagttctccgccgaggagatctcctccatggtgctcatcaagatgagggagatcgctgaagcctacctcggctccaacatcaagaacgccgtggtgactgtgccggcctacttcaacgactcgcagaggcaggccaccaaggacgccggtgtcattgccggcctcaacgtgatgcgcatcatcaacgagcccaccgccgcggccatcgcctacggtcttgacaagaaggccaccagctccggcgagaagaacgtgctcatcttcgatcttggcggtggcacgttcgatgtgtcgctgctcaccattgaggagggcattttcgaggtgaaggccactgctggtgacactcaccttggtggtgaggacttcgacaaccgcatggtgaaccatttcgtcctggagttcaagcgcaagaacaagaaggacatcagcggcaacccgcgtgctctgcgccggctgcgcacggcctgcgagcgcgccaagcgcacgctgtcgtcgaccgcacagaccaccattgagatcgactccctgtacgagggcatcgacttctactcgaccatcaccagggctcgcttcgaggagctcaacatggacctgttccgcaagtgcatggagccggtggagaagtgcctgcgcgacgccaagatggacaagagcagcgtgcacgacgtcgtgctcgtcggcggctccacccgcatccccaaggtgcagcagctgcttcaggacttcttcaacggcaaggagctgtgcaagagcatcaaccccgacgaggccgtggcatacggcgccgctgtccaggccgccatcctcagcggcgagggcaacgagaaggtgcaggacctgcttctgctcgacgtcacgccgctgtcgctggggctcgagacagcaggaggtgtcatgaccgtgctcatcccgaggaacaccaccatccccaccaagaaggagcaggtgttctcgacctactccgacaatcagcctggcgtcctgatccaggtgtacgagggtgagcgtgcccggaccaaggacaacaacctgctgggcaagttcgagctctccggcatccctccagctccccgcggcgtgccccagatcaccgtctgctttgacatcgacgccaatggcatcctcaacgtctctgccgaggacaagaccaccgggcagaagaacaagatcaccatcaccaacgacaagggcaggctgagcaaggaggagatcgagaagatggtgcaggaggcggagaagtacaaggcggaggacgaggagcacaagaagaaggtggacgccaagaacgcgctcgagaactacgcctacaacatgaggaacaccatcaaggacgacaagatcgcctccaagctctcggcggacgacaagaagaagatcgaggacgccatcgacggcgccatcaactggctcgacagcaaccagctcgcggaggcggacgagttcgaggacaagatgaaggagctggagagcatctgcaaccccatcatcgcgaagatgtaccagggcgccggcgcggacatgggcggcgccgctggcatggacgaggacgcgccggcgggtggcagcggtgcaggccccaagatcgaggaggtcgattaa

SEQ ID NO: 299 - DNA, 1830 bp, Oryza sativa
atgctgcgacgctctttggtcgcccatgccgttctcctcttcgcggcggtcgcgctcccgctcgccgccgcccagccatggcctgtctgcggcaccagcggcggcaactacacggcggggagcacctacgagtccaacctcctgcgcctcgcgagcaccctccgcgcgaacgcctccgcctcccccaccctcttcgcctccggcgtccgcggcgtcggcccggacgccgtctacggcctcctgctctgccgcggcgacatgaacccctccgactgcttcgactgcggcaccaacgtctggagggacgcggggccaacctgcaaccgcaccaaggacgccatcctcgtctacaaccaatgctacgcccagttctccgacaggggcgacttcctcgccgccaccaacaactccggcgaggtgagcctcctcataagcggcaccaacatcaccagcaccgacgtcgccggctacgaccgcgcggtcaccgagctcctcaacgccaccgtgcggtacgcggtggagaactccacgaagctgttcgccacgggccagcgggtggggaacgacacggggttcagcaacatctactccatggcgcagtgctcgccggacctgtcgccggcgcagtgccggagctgcctcgacggcctcgtgggccagtggtggaagacgttcccgctcaacgggaagggggcgagggtcgccggcccgcgctgctacctgaggtccgagctgggccccttctacaccggtaatccgatggtgcggttgccggtcaaggccgacgagctcacgcagtttagtcaaaattatgcaaacttgccagctgatacaaatgaggactttgaaagtgtcaagtcaaccctgttatctctggcatcactgcaagtggcaacggataacttccacgaaagcaataagattggtgaggggggattcggtgccgtttataagggaattcttcatggacaagaagtggctgtgaagaggatggccaagggctccaaccaggggctggaagagctgaaaaacgagctagttcttgtcgccaaacttcatcacagaaatcttgttcgtcttgttggtttttgccttgacgagggggagagattactcatctatgagtacatgtccaataaaagcctagacacctttctttttgatgcagagcaaaagagaaaactagactgggcggtaagatttaagataatagaaggcattgcccgggggctacaatatcttcatcaggactcccaaaagaagatcgtccaccgtgatatgaaggcgagcaacattttactagacgcagacatgaaccccaagattggggactttggccttgctaggctctttgggcaggatcagactcgagaagtcacaagccgtatcgccgggacattcggttacatgcctcctgagtacgtgctgcgcggacagtactctacgaaatcagacgtgttcagctttggcattcttgtcatagagatcgtgacaggccggagaaggaatagcgggccatatttgtctgagcagaacgatgaagatatattgagcatagtacggaggcactgggaagagggagcaattgcagagatgattgatcattccttaggaagaaactacagtgagaccgaggtgctgaaatgtgtcaatattggactcttgtgcgtccagcaaaaccctgtagatcgacctacaatggcggatgtcatgattttactcaatagtgacactacttgcactatgccagctcttgcacctaggccagcatatttgatcgatgggacctctggttactcccagaccgtaacacaatggtccggcaggtag

SEQ ID NO: 300 - DNA, 1790 bp, Oryza sativa
  N_region (130)..(130): n = any nucleotide
atgacggcacgcggggcgctccgccgcctcatccctagccacctccaacccgtcagccgccgcgccccgccgccgccgccatcggcggccgacgaggggcccttcccggacccctacgctctccttgtcnacgaccccatcgatctcctttcctctctgtggcgccgcgccttcgctcacccgctcccggcgcccttccccaacttctccgggtacgcctcccgcctcgatctctggctcctctcttaccagcgagcctgcgcccacgccacgggctccttcccgccacgccacgccgtccagctccccaccctccactccctcctccgcctccccccgttccaggaccgcgtcgtccaggagctcctcctcctgctcctcgagcccgtcttcgagccccgtttctctccgaagtcccacgccttccgccccggccgcgggccccacaccgccatccgctccgtccgctcccacttcgccgcctacctctggttcatctccgcggacctcaccggggtggtcgacgcactctcgccttataccatactctcctgcgtccagaaggccgtctctgaccgcaaggtcttatctttgctgaagtcggcgctcaatgcccctgtccggcctggggcctagctaagaagaggctgaagaggaaggttctcaggaaaagcaggaagaagaaggtgctcaatgagaacgagcccaagcctgatccgtattggttgaggttattcttcgggtttgccccagaacaggcgtgccatgcaccgaattatgggcattgtgggatacttagccctttgcttgccaatgtgtgccttaacgaactggattggtggctcgaggagagaattcatgagtacttccgcccgtcaagccatgattcgatttggaaggaggcgggtgatgaaggatgccataatcctgcctggcctgagtttgtcccatcaagtgggaaggagaagacaaggaagatggattaccttagatttggctcccatgttcttattgggatcaggggaccaagggaggacgcagttgagataaggagacaactgatggagttctgcgagagcacgtttggtttgaggcctgagaattcgatggtagagattgagcacatcacaagagggattgagttcttggatcatgtgatcacccgccgggtcatctacccaaccttaagatataccgctagtggagggaacattgtgagtgagaaaggtattgggacattattatcagtaacagcaagccttcagaggtgcataaggcatttcaggaagcttgaacttgtaaagggggatcgggatcctgagccattgccatgttcaccaatgctgtactctgggcaggcgcacactaactctcagatgaacaaatttcttgagaccatggctgattggtacagatatgcagacaaccggaagaagattgtagggttctgtgcatatgtcattaggagttccttggcaaagctttatgcggcaaggtatagactcaagtctcgagctaaagtttacaagattgcctcacgtgaccttagccgcccattgagagagagcacaaggaatgatgcaccagaatactctgatctcttgagaatgggactagttgatattattgagggtgtacaatttgcacgcatgtcatcaattccatcgtgtgactacacacctttccctagaaactgggtgcctcaccacgagcttgtattgcgtgagtatattaaactgcaagatccaaaattcttctgtgaacttcataagacaatcaaaaggaaggag

SEQ ID NO: 301 - DNA, 1776 bp, Oryza sativa
  N_region (293)..(293): n = any nucleotide
atgagagatgcgtcctccgggctcctcaactacgcccgcttcagcggcctcctcgccagctgcggtcgcgagggagacctccgcctcggcgccgccctccacgccgccgtcgtcaagaaccccgcccacttccgcctctgcgcgagccggccctggctccgccacgtcctcgtcgcctggaactcgctcgtctccatgtacgccaggtgcggccgccgcgaggacgccgccagggtgttcgacgaaatgcgcgtccgcgacgccgtctcctggaactcgctcatcgccgcctnccgcggcgccggcgacgcgctcgcgctgttcaggcggatgctgcggtcggacgcgcgcgcctgcgaccgcgccactttcacgacggtcctgtcggagtgcgcgcgcgcgggcgcggcgtcgctcccagcgtgcgccatggtgcacgggctggtggtttcgtgcggcttcgaggcggaggtgcctgtcgggaacgcgctggtgacggcctacttcgagtgcgggtctccagcctcggcagagagggtgttccatggaatggcagagaagaacgtcatcacgtggacagcgatgatctctgggatggccagggcagagctgtacaaggagagcttcagtctttttgggcagatgatccgcacggtggatgccaacaacgcgacgtactcgtgcgccctgctagcttgcgccagatctttagcagcaagggaaggtcagcaggttcatgggcttgttgtgaaggctggattcgaggatgatctccatgtcgaaagcggcctcatggatgtctattccaaatgcggtttgatggaggatgctctgaccgtctttcgctcttgtcgagaacccgatgaagtttttctgacagtgatcctggttggatttgctcagaatggactggaagagaaagcattcgaattgttcgccgagatggtgggtgcaggaaatgagattgatgaaaacactgtttctgcagttctgggggcattcggtgcttctgcgccatttgctcttgggaagcaaatccatgcattggtcatcaagaggtgttttggagtgaatacctatgtctgcaatggtttggtcaatatgtattcaaaatgcggtgaattgagagagtctgtccgggtgtttgatgaaatgcccagtaagaactcagtttcatggaactccatcattgcagccttcgccagacatggacatggttcagaggtctatcagctgttcgaatccatgaaagctgacggtgccaagcccaccgatgtcacattcttgtcgctgcttcatgcttgtagtcatgttgggtcagctaagaagggactggagatcttgaattctatgtcatcacagtatggagttcttccaaggatggagcattacgcatgtgtggttgatatgcttggccgagccggcttgttagacgacgcaaaatcgtttatagaagatggacctttcacggacaatgctcttctttggcaggctttaatgggagcttgtagcttccatggcaactccgaagttgggaagtatgcagcagagaagttgctcctcctggaccctagttgtacggctgcttatgtgttgctgtcaaacatctactcatccgagggaagatgggatgatcgagccaaggtgatgaagaggatgagcgaaatgggcttgaggaaggacactggcaagagctggatcgaactcgagaaggaggttcactctttcgttgtcagatcaacatctcatcctaattcagctgctgctgttcgttga

SEQ ID NO: 302 - DNA, 1704 bp, Oryza sativa
  N_region (514)..(514): n = any nucleotide
atggatctcctccagtcgtcctacacgccggacgacgaggacgacgacgagcagcagcccctctcctcgccggacgcctcgccgctccgcctccccgccaagtcggccgcccccgccgtcgacgacacggcgctcgcgctctccgccgccgccgcgtccacctcccgcccgctcgacccctccctccacctcgtcccctttaaccccaccgccgaccagctctgggcgcccgtcctcgggccccagcacccccacgcccccatctcctccgcctccggcaaccgcaaccacaagctcggccacgtcgaggacgccgccgtcctccccttcctcttcgacgagcagtacaacaccttccaccgcttcggctacgccgccgacccctccggcctccacatcgtcggcgacgcccagccctcggccgagcccgacaccgtctacaacctcgccccctccgagcacaagcgccgccgcctgcagtccaaggacgaggagggcgccaaccaggagcccntaccgccggaggccaagaacccgccctgggccggcaagaaggaggcaccacccgcggagctcactgaagagcagcgtcagtatgcggaggcgcacgctgccaagaaggccgagaaggaggcgcgcggcgaagggaagggcgagaagtctgatatggttgccaagagtactttccatgggaaggaggagagggattaccaaggacggtcatggatcacaccgcccaaggatgccaaggcgagcaacgagcgctgctatattcccaagaggtgtgtgcacgagtgggttgggcacaccaagggggtctcggcgattaggtttttccccaagtatggacaccttttgctgtctgcgagtatggattgtaagattaagatctgggatgtgctcgagtcgaggacatgtatgcggacgtacatggggcactctaaggcggtcagagatatatcgttttctaatgatgggactaagttcttgagtgctgggtatgacaggaatatacagtattgggatactgagaccgggcaggtgatctcgaccttctctactggcaaggtcccttatgtagtgaagctcaacccggatgaggataagcagcatgttctcctcgctgggatgagtgacaagaagattgtgcagtgggatatgaagtcagggcagataacccaagagtacgaccagcacttgggagcagtcaataccatcacttttgtagataataataggaggtttgtgacatcaagcgatgacaagtcgcttcgtgtgtgggagttcggcatcccagtggtgattaagtatatcagtgaaccacacatgcattcaatgccatcaatatcactgcacccgaattccaactggctggcagcacagagcttggacaatcagatattgatatacagtaccaaggagaggtttcaacttaacaagaagaagcggtttgcgggtcacattgtggcaggttacgcttgtcaagtgaacttctcaccagatgggaggttcgtgatgtcaggagatggtgaaggtagttgctggttctgggactggaaaagctgcaggagatttaagacgttgaagtgccacaatggagtttgcattggatgtgagtggcatcccttggagactagcaaggttgcaacatgtggatgggatggcgtaattaagtaactggtaagttggctggacaaattataa

SEQ ID NO: 303 - DNA, 1682 bp, Oryza sativa
atcagggagacaacagtgaagaggctgtgcaagagccacaacataatgacggtgaacggtcagttcccggggccgacgctggagataaacgaaggggactcgctgatcatcaacctgataaaccgtgggaggtacaacatgacgctgcactggcacggggtgcggcagatgaggacggggtggtcggacgggccggagtacgtgacgcagtgcccggtgaggcccgggcagagctaccggtatcgcttcacggtggcggcgcaggagggcaccctctggtggcacgcctcctcctggctccgcgccaccgtctatggcgccctcctcatccgcccccgcgatggcaccagctaccccttcgacgtccagcccaccagagagctcgcccccatcctgctcggtacggggagtggtgggacatgaaccccgtcgacgtggtgcgcgccgccacgcgcaccggcgctgctcccaacatctccgacgccctcaccgtcaacgcccagcccggcgacctctacagctgctcctcccacgacacggccgtcttccccgtcacctccggcgagaccaacctcctccgcttcatcaacgccgcgctcaacacggagctcttcgtctccctcgccggtcacaacatgaccgtcgtcgccgccgacgcctcctacaccaaaccgtacaccacctccctcctcctcctcgcccccggccagaccaccgacgtcctcgtcaccttcgaccaacctcccggccgctactacctcgccgcccgcgcctacgccagcgcccagggcgtccccttcgacaacaccaccaccaccgccatcttcgactacggcgccgccaacaacgcctccagcgccgccatcgccatgcctaccctcccggcgtacaacgacaccaccgccgccaccgccttcacgacgaacctgcgcggcctccgcaaggcggagctcccgtcgcgcgtggacgagagcctcttcttcaccgtcggcgtcggcctcttcaactgcaccaacgccacggcgcagcagtgcggcgggcccaacgggacgcggttcgcggcgagcatcaacaacgtctccttcgtgctcccctcctccacctccatcctccaggcgcaccaccacggcgcgcccggcggcgtgttcaccgccgacttcccggccaacccgccggtgcagttcgactacacggcgcagaacgtgagccgcgcgctgtggcagccggtggcgggcaccaaggtgtacaagctcaagtacggctccgccgtgcaggtggtgctccagggcaccaacatcttcgccggcgagaaccaccccatccacctccacggctacgacttctacatcctcgccgaggggttgggcaacttcgacgccggcgccgacacgggcaagttcaacgtggaggacccgccgatgaggaacacggtgggcgtgccggtgaacgggtgggcggtgatacggttcgtggcggacaacccgggggtgtggctgatgcactgccatctcgacgtgcacatcacctggggcctcgccatggccttcctcgtcgacgacggcgtcggcgagctgcagtcgctggaggcgcctccacccgacctgccgctctgctagtgcctcgaccaacacatcaaattaatcacctcttaatctcttatgttattgttagcagctgattaa

SEQ ID NO: 304 - DNA, 1628 bp, Oryza sativa
  N_region (1056)..(1056): n = any nucleotide
atgactcacttggttgacacctcggggctccagttcttcggctggctcatcaccgccggctccttcggcctcgccgcgctcatctacgccctcctcaggctgcagagggcggcgtcgctgtactggatcaaggcggctgccagggagaagaaggcggcgtggaagtcgttgcggtgccccagctccggccacacctggaccgaggactacttccgcggcggccagccttcgacgtgctgcgtgtgcctgtcgtccctgaccacagctcagggtgtgggctctcggggtgccgatgccgttgtggtccaccgctgctcggtgtgtggggtggcggcccattctggctgctctcgtggcgccgagaaggactgcaagtgtgtttcacagcatggtgcttccaccttgcttcatcactggtcggagaggtgggtggagctggatgacaacccagagatgtcctctttctgttactactgcgatgagccatgtggtgtgccatttctcggcgtctctccaatatggcgctgcctgtggtgccagcggcagatccatgttgattgtcatgcaaagctgttaaaggagacggggaatacttgtgatctaggccttctcaggaggctcattcagatatttgagcttagtgcttctcagggacctgaagttggattgcaatttttccacaatgtaaaacacttcagaatccttgtttgtggtggggatgggactgttgcatgggttcttgatgctattgaaaagcagaactatgaatctcctcctcctgtttccattcttccattaggaacaggaaatgacctatctcgtgttatgcgctggggtggaggtctgtcttctgttgaaggacaagggggaatatgtgcacttctaaatgatgttgaccacgcagcagttaccgtgcttgatcgctggaatgttgccatcaaagagaagaatggagcagaagatcaatgtaccaagcaagttaaatttatgactaattatatagggtgttggatgtgatgccaaggttgcatatgacttccacactacgagagaggnaaaaccagataaattttgcagccagcagtttgtcaacaagctgatatatgctagagaaggcgctaaggatatcatggataggtcatgttctgatttaccatggcatgttagtcttgaagttgatggaaagaacgtcgaaattccagaggacgcagaaggtgtgattgttctgaacattcctagctacatgggcggtgttgatctttggcaaaacgacaatgaacatgatgatgattttggtttgcaatccatgcatgacaaaatgcttgaaggttgtctgtatatctgggacgtggcatctaggaaaactgcagggactctctagagcacacaggctagcccaagggaaagttataaggttgcatctccacagttcattccctgttcaggttgatggtgagccatggatccagccacccgggtgccttgagatatctcatcgtgggcagcccaccgggcatgccgctgctatcatgagcgaggtcctcatgaatgcagagtgcaatggtgtgattgatgctgctcagaagagattgctccttcatgagatcgcactacgtttgtcctcctga

SEQ ID NO: 305 - DNA, 1452 bp, Oryza sativa
  N_region (112)..(112): n = any nucleotide
  N_region (115)..(115): n = any nucleotide
  N_region (121)..(121): n = any nucleotide
  N_region (123)..(123): n = any nucleotide
  N_region (129)..(130): n = any nucleotide
  N_region (134)..(134): n = any nucleotide
atgacgacgacctcgaggagcgcgcctacgaggcgaccgagaaggtcatcgtctcgatctcggacttccccgacgccgacgacgacgaggaggagtccgggctcgccactcnccnccgccncntcgggnntccngcccttctcgtggaggaagctgtggctgttcacggggccggggttcctcatgagcatcgcgttcctcgacccggggaacctcgagggggacctgcaggccggggcggtggccggggacacgctgctgtggctgctcctgtgggcgtacctccatgggcctcctcgtccagctgctcgccgccagggtgggcgtcgccacggggaggcaccttgccgagctctgccgcgacgagtacccctcctgggcgcgccgcgcgctgtggctcatggccgaggtcgccatggtcggggccgacatccaggaggtgatcggcagcgccatcgccatcaagatcctcagccgcggcttcctccctctctgggccggcgtcgtcatcaccgccttggattgttcattttttggtctcttgaaaactacggggtgaggaaattagaagctgtatttgcgattctaattgcgactatggctgtctcctttgcatggatgtttactgataccaagccaaacatgaagaacctgttcatagtggtcccaaaattgagctccaggacaataagacaagcagttggggttgttggatgtgttatcatgccacacaatgtgtttctccattcagcgcttgttcagtcgagaaaaatagacccaaacaaggaacaccaagtccgtgaagcgttgagatactattcaatagagtcaaccatcgccttggctgtgtccttcatgataaatctctttgtaacaactgtttttgcgaaaggattttatggcacaaaagaagctggtaatattggccttgaaaatgctggacagtatctacaggagaagtttggtggagggtttttccctatcctctacatttggggaattggactattagctgcggggcagagtagtaccataacgggaacatatgctggacagtttataatgggtggatttttgaacttgaagttgaaaaaatggatcaggtcactcatcacccgaagctttgcgattgtgccaacgataattgtcgcactcttcttcgataaatcggattcgctggatgttctaaacgagtggctaaatgtgcttcaatcaattcagatcccttttgccctgattccgctgataactttggtttccaaggagaaagttatggggatcaatggctatctcttgctggatttcttctcttcagaaataagaggcctattatctggctcaattctctgcgtggcagtacttgcttatgcttcttttgtattgtatctcatcctgcggggtaccgagctgccaaatcagatcatcacaactatacgcaagagtttttcatga

SEQ ID NO: 306 - DNA, 1427 bp, Oryza sativa
  N_region (11)..(11): n = any nucleotide
  N_region (24)..(24): n = any nucleotide
  N_region (27)..(27): n = any nucleotide
ctcgtggagangctcctcgtcggnctnctcgcagccgccgtggtcgcgatcgccgtgtccaagctccgcggccggaagctccgcctgccacccggccccaacccggtgcccgtcttcggcaactggctgcaggtcggcgacgacctcaaccaccgcaacctggcggcgctggcgcggaggttcggcgacatcttcctcctccggatggggcagcgcaacctggtggtggtctcctcgccgccgctggcgcgggaggtgctccacacgcagggggtggagttcgggtcgcgcacccgcaacgtggtgttcgacatcttcaccggcaaggggcaggacatggtgttcaccgtgtacggcgaccactggcgaaagatgcggcggatcatgacggtgccgttcttcaccggcaaggtggtgcagcggcaccgcgccgggtgggaggccgaggccgcggccgtggtggaccgccgccgcctgcagctcatgatgtacagcaacgtgtaccgcatcatgttcgaccgccggttcgagagcgcggacgacccgctgttcctccgcctcaaggcgctcaacggcgagcgcagccgcctcgcgcagagcttcgagtacaactacggcgacttcatccccatcctcgccccttcctccgcggctacctcaggatctgcgaggaggtcaaggagacccgcctcaagctcttcaaggacttcttcctcgaggagaggaactcaaatgcgccattgatcacatcctggaggcgcagcagaagggggagatcaacgaggacaacgtgctctacattgtcgagaacatcaatgttgccggcagcgatcgagacgacgctgtggtcgatggagtgggcgatcgcggagctagtgaaccacggggagatccaggagaagctgcgccgggagctggacacggtgctcggcccggggcgtcagatcacggagccggacacgcacaggctcccctacctgcaggccgtggtcaaggagacgctccggctgcgcatggccatcccgctgctggtgccgcacatgaacctccgcgacgccgagctcgccgggtacggcatccccgccgagagcaaggtgctcgtcaacgcgtggtacctcgccaacgaccccgggcggtggcggcggccggaggagttccggccggagaggttcctcgaggaggagaggaacgtcgaggccaacggcaacgacttcaggtacctgccgtccggcgccgggcggcggagctgccccggcatcgtcctcgcgctgcccatcctcggcgtcaccatcggccgcctcgtccagaacttcgagctgctgccgccgcccgggaaggacagggtcgacaccaccgagaagggtgggcagttcagcctccacatcctgaagcactccaccattgtcgccaagccgagagcgttctag

SEQ ID NO: 307 - DNA, 1389 bp, Oryza sativa
ggcttgaacagcaaaacggtggagcgctgcgttggccaactgatgatcagcggcccgacaatggcaggcgacatccccgttcccctttgtgagaaggaggcaaccgagcgtgaagcggtgatcaacgctctccctctgactgacgtcattggaccgctcgtggaccatcaggcggcggcctcgttgaaggagcgagtcgtccaggagacgtccgatgcggccactgctgttgccgcgagtagtgggagccgcccccagaggaggggaagaaagttcacctccgtactggcgtcggacgcgtctccgccacctcctcgacgacaaaagctggtgacgctaggcgagaagcgcgggcgaaggcggcacaagatgggtctggtgagacctccagcgcgtctcctgcggtggcctccacggacgtcgtggtcgccccacgaagtcggaaggcgacgccccactgcctggccggtgatctcgggcctgttcgcggcccgcctgccgatgtcctcagcaggggggagctccaagtcgagatggggcgcctcctcgaagctggtgctcgtggcataagtcgcgagattgccgaggcgaggacagcggcggcgtcgtcggccaacaagcgcgccgacaagctggagcgtaaactggcggaggttcgcgaggacctccagaagatgagggagctggtggccggcaacgagcgacagcggcggggtctcgagggccgtatggcagaactcgagagcaacctatcggagctccgtggcttgttgcgagtcacctacactggcctacaccagctcgccggggaatgtggtgtcaagaccacgatcccggtgaaccccgacaagttctcgctgacgtctttgctcgaggaactggctacggcgatggaggcgatatcctccaagcacacggccaggatcggggaggaggcgtccaacgggatctacaccggggcatgtcacgtcctcgcgtgtgtcaggttggcgcatccggaacttgatctctagcggatcttggagcagggggcgacgaacgacgcgtgtagaggcgtgatggaggaagtcggcgatctgggagagtctgttctcccgctctttgaagaggtcgatgtcgaggatgtccagcagcgtgggcagcctgtggcgccagcgatcattccggctctcgcgtttgaggcacacgcgtcgccggacgatgtagatgagattttaccctcgacaacgggggtggcgacgacttccttagctgcacctcgagtttctccatgaagggttcgctcgttctcgggggactccagcggagatagaccacctagcgaagtcgatggcaccgctggcggagaaagttttccagtctatggactggcattggccttcctggtag

SEQ ID NO: 308 - DNA, 1211 bp, Oryza sativa
atggcgacgaagaggagcgtggggacgctgggggaggcggatctgagggggaagaaggtgttcgtgcgggccgacctcaacgtgccgctcgacgacgcccagaagatcaccgacgacacccgcatccgcgcgtccgtgcccactgtcaagttcctcctcgagaagggcgccaaggtcatcctcgccagccatctggggccgtccgaagggtgtcacccccaagtacagcttgaagcctcttgttccacgcttgtctgagctacttggagtcgatgttgtgatggccaatgattgcattggtgaggaagttgagaaattggctgctgctttgccggaaggtggtgttctactcctagagaatgttagattctacaaggaggaagaaaagaatgatcctgagtttgccaagaagcttgcagctgtcgctgacctctatgtaaatgatgcttttggcactgcacacagagctcatgcttcaactgagggagtgaccaaatttttgaagcctgctgttgctggcttcctgatgcagaagaggaacttgactatcttgttggagctgttgcaaacccaaagaagccatttgcggccatcgttggtggatccaaggtctcaactaagattggggtgattgagtctctgttggcaaaggttgatgtcctcatccttggtggtggtatgatcttcacattctacaaagcccagggatatgctgttggaaaatctcttgtggaggaagacaaacttgagcttgcaacttcacttattgagaaggcgaaggcgaagggtgtttctctcttacttcctaccgatgttgtagtggctgacaagtttgccgcagatgctgaaagcaagtgttgctgcctccgctatccccgatggttggatgggtcttgatgttggcccagatgccatcaagacttccagcgaagcattggacacctgcaacactatcatttggaacggacctatgggagtctttgagtttgagaagtttgcagcaggcactgatgcaattgccaagaagttggctgatcttactaccacaaagggcgccacgaccatcatcggtggtggtgactccgttgctgcggtcgagaaggctgggctggccgacaagatgagccacatctccaccggcggtggtgctagcttggagttgctggaaggcaagaccctcccaggtgttcttgcccttgatgaagcgtaag

SEQ ID NO: 309 - DNA, 1188 bp, Oryza sativa
atgtcaaccctaagccaccagcaccaccatgttctcgtcctccaactcatcctacttctgccctttctccacctcgttgtccccggaacgccagccgccgcccgcaagttctccgacgtgttggcgagcggccgcaacgtgagcgacggcgacgtgctcgtctcccccggcgggtccttcaccctcggcttcttctcccccgccgccaccaggaggaggtggtgtggtcctcttccgccacgcgctgccttccgcgactacctcgccgcggcgcggctgctcgattccggcaacttggtggtgcaagggcagggctccggcaccgccctgtggcagtcgttcgactaccccaccaacaccctgctgcccggcatgaagatcggcaagaaccggtggaccggcgccgagtggtacctgctgtcgtggcgctcccccgccgatccttctccggggagctacaggtacgtcaccgacggcgacgaggcgctgccggagaacgtcgtgctcgacggcaatggcaccgaggtgtaccggaccggggtgtggaacggcaggaggttcaacggcgtcccggagatggcgtcgttcgcggacatgttcagcttccagctcacggtcagcccgggcgaggtcacctacggctacgtcgccaaggccggggcgccgttctcccgcgtggtggtgaccgacgacggcgtggtccggcggctggtgtgggacgcggcgacgcgggcgtggaagacgttcttccaggcgccgggggactcctgcgacagctacgccaagtgcggcgcgttcggcctgtgcgacagcaacgccggcgcgacgtcgatttgccggtgcgtgaaggggttcagcccggcgtcgccggcggagtggtcgatgagggagtactccggcgggtgccgccgggacgtggcgctcgactgcggcacggacgggttcgccgtgctgcgcggggtgaagctccctgacacgcgcaacgcgtcggtggacatgggcgtcaagctggacgagtgcagggcgaggtgcgttgccaactgctcgtgcgtggcgtatgccgcggcggacttgagcggcggtgggtgcattatgtggacaaagcctttcgtcgatttacgtttcatcgacaatggccaggacatctaccagcggctagcgaaatctgaaataggtaatttaacctaa

SEQ ID NO: 310 - DNA, 1150 bp, Oryza sativa
  N_region (6)..(6): n = any nucleotide
  N_region (10)..(10): n = any nucleotide
gcgccngccnaccgccgcgtcagggagagccccctcagctccgacgccatcttccgccagagccatgcaggccttctgaacctatgcattgttgtgctggttgctgtgaacagcagacttattattgagaatttaatgaaggtatggcctactaattagagctggattttggtttagtggaacatcgctggcagattggcctcttctcatgtgctgctcactttaccaactttcccgcttgctgcacttatggttgagaagttggctcaaagaaaacttattagtaaacatctccatatcgttattacaacatctgtccttgtctatccagttgttgtgattctaaaaggtgtgattcggcagtattatctggatttgtgttgatgtttcttgcaagcattatttggttgaagcttgtttcttttgctcatacaaattatgatataagaatgctgtccaaaagtattgaaaagtttaaaaggctatcctacttcatgttggccccaacactttgttaccagcagccaagttatccccgaactacatatattagaaaaggttgggtggtccgacaactgataaaatgccttgtttttacaggcttgatgggttttataattgagcaatttatttttcagtacataaatccaattgtgaagaattcgaagcatccattgaaagggaatttcttgaatgctatagagagagtattgaaattatcagtgccaacattatatgtctggctttgcatgttctactggtttttccatctctgttgaatattcttgctgagctcctctgttttggtgatcgtgaattctacaaggactggtggaatgccaaaacagttgaagagcctgttcacaagtgggtcattcgacatatatattttccatgcataaggaatggtttttcaaagctatgtgttgctgttccatgccacatttttaaattctgggcatttattgggatcatgtttcagcagattcccctggtattcttgacgaaataccttcaagataaattcaataacacaatggtgggcaacatgatattttggttcttcttcagcatcctggggcaaccaatgtgtgttctcttatactaccatgatgtcatgaacaggcaacaagcccaaacaaatagatag

SEQ ID NO: 311 - DNA, 1138 bp, Oryza sativa
atgtgtcaatcaccaggggctagggctagtgaagcccatggaagagatgctgatgggtgcaaatccaaatcctaatgggagctcaaatcagccaccgccaccgccgtcctcggcggccagcgcccagcggcctatcgccccaccggcggctggagcggccgccggcgcgggcgccgccggacctggggctggcacggagcgccgcgcgcggccgcagaaggagaaggcgctcaactgcccgcggtgcaactcgacgaacaccaagttctgctactacaacaactacagcctccagcagccgcgctacttctgcaagacgtgccgccgctactggacggagggcggctcgctccgcaacgtccccgtcggcggcggctcacggaagaacaagcgctcgtcgtcctcggtggtgccgtcggcggccgcgtcggcctccacctccgcggcggtgtccggctcggtccccgtggggctggcggccaagaacccgaagctgatgcacgagggagcgcaggacctcaacctagcgttcccgcaccaccacggccgcgccctgcagccgccggagttcacggcgttcccgagcttggagagcagcagcgtgtgcaaccccggaggcaacctggcggcggcgaacggcgccggtggcaggggcagcgtgggcgcgttctcggcgatggagttgctgaggagcaccggctgctacgttccgctgccgcagatggcgccgctagggatgccggcggagtacgcagctgcggggttccatctcggcgagttccgcatgccaccgccgccacagcagcagcagcagcaacaagctcagaccgtgctcggtttctccctggacacgcacggcgcgggtgcaggcggcggctccggggtgttcggcgcgtgcagcgctgggttgcaagagagcgcggcgggcaggttgctgttccccttcgaggacctgaagccggtggtgagcgccgcggctggcgacgcgaacagcggcggcgatcatcagtacgaccacggcaagaaccaaggtggtggcggcggcgtcatcggtggccatgaggccccagggttctggaatagcagcatgatcggcaacggcagcagcaatggcggcggcggcggcggttcttggtaa

SEQ ID NO: 312 - DNA, 1118 bp, Oryza sativa
  N_region (694)..(694): n = any nucleotide
atggcgcccccaatcgcctggaacggccacgccattcccggccgccttccatggccgccggccgccccttcccgagctccctcgtggccgcaccacctctccccgccttctccttctctctctccggcgccggccggcctccagccgcctctccctcctcgcccgagcaccgtccggtcgcgccgtcgccgccctcggcctcgcagccgcctcctctcccccggtcagccctccgtttcgcagggagacgcgtcctcgccggcaaaacagtggcgttgccgccactgtactgcctccagcctcccctgccgcgccgctcaggtgcgggccggccgcgccgtctcctccctcggcgtcgccgcgtcgacctccaccccggcctaccctctgattcgtccagagaccgccgtcaccagcgccgggctctccatcctcttcgtcgccggcgtcccttcggccgccccaccctcctccccggctcgtcggctcgctgcgacaccaccacctccggcatcgcagcggcaaggtcgccctcggcctcgcctccccttcgaccgacccccgccggtgttcgtcatcgtcgtcatcgttcctcctcgccggctcgttgtctcgctgcgccgcctccatcgtcggattcgcagcggcgtgttccacgccgtcctcgtctccgtgcagccgctgccggctgccntcgtcgcctcctcgccggccccggtcgtcgtcgtcgtcatcctctcgtcgttcccggttgtcgtggcgttcgtccgtccgtcaagccattctcgttcgtcgtcctcgttccgtcaagtgccgcagccccgtcatcgtcttcgtcctcgcctccgcgtcgccaagcattgcgccggccgcgtctcgccttcgtccaaggatcgacgccgaagtcgtcccctcgcctttcgtctccgtcattcccggccgtctccgccgcgcccgttcgtcgttgtcgttcccacgcctcgttgcatggtggtaaggatccctctccctcgctgccccgtcctcgtcctttcggtgtcgcccgtgcctgttgtgcggttgtcggccccggtacccgtgtatcggtgtcggcagtcgttcgcttgttcgtgtcgtga

SEQ ID NO: 313 - DNA, 1077 bp, Oryza sativa
atgtctgaggtgtccgttatggccgaggtggaggagacggcggcggcggcgccgctggacctgccgccggggttcaggttccaccccaccgacgaggagatcgtctcgcactacctcacccccaaggccctcaaccaccgcttctcctccggcgtcatcggcgacgtcgacctcaacaagtgcgagccatggcacctcccagccatggcgaagatgggggagaaggagtggtacttcttctgccacaaggaccgcaagtacccgaccgggacgaggacgaaccgggcgacggagagcggctactggaaggccaccggcaaggacaaggagatcttccgcgggaggggcatcctcgtcggcatgaagaagacgctcgtcttctacctcggccgcgcgccccgtggcgagaagaccggctgggtgatgcacgagttccgcctcgagggcaagctccccagccagctcccgcgctccgccaaggaccagtgggcggtgtgcaaggtgttcaacaaggagttggcgctggcggcgaagaacgggccaatggcggtgaccgaagcgaccgccgacgacgcggggatcgagcgggtcggctcgttcagcttcctcagcgacttcatcgaccccgccgagctgccgccgctgatggacccttccttcgtcgccgacatcgacggggtggacgacgccaaggtgtccgcgtcgacctccgggcaggccgcgatcgccgccggcttccatgtcgcgtcgcaggtcatgagctaccagcaggtcaagatggaagagccgttgccgctgccgtacctgcaccagcagccgccgcggatgctgcactcgggtcagtacttctcgctcccggcggtgcaccccggcgacctgacgccgtcggcgatccggaggtactgcaaggcggagcaggtctcggggcagacgtcggcgctcagcgcctcgcgcgacaccgggctcagcaccgaccccaacgccgccggctgcgcggagatctcgtcggcgccgacgtcccagccgttcccggagttcgacgacgggattctgggcctcgacgacttctggaactaa

SEQ ID NO: 314 - DNA, 1011 bp, Oryza sativa
tggtcttcttttggtttcttgatgcctgtagggataatactagccagaatgtcaagcaaatctaaaagcggcaggagcatcagagtccttttctattgccatgtcatttctcagcagattgcagctgtccttcttgctaccggcggtgcggctctttcactaatgaactttgagaattcattcagtaacagtcaccagagagtaggattagcattgtatggattcatgtggctccagccgcttatcggtttcttcagaccagaaagctttggaccggcctccttactttcgagctctccttactgcttttcttctacctcgagtcgctggggtggctgacggagtcggcggtgatgccgaagaagcacaaggccatcgagggggtcggcgccgcgtccatcctcgacctcaaggcgcagctctaccgcacccaggaggaggcccgggccaagaagcgcgccgctcctggtgaccccctcggcgcgaagaattccggcgtcgatgcccgcgcccacaagataagttggagctaaaagctgtgaaggatggttcagtaagttatgctgccttagaaaagaaggcagaattgtatgaaaaattatcaagaggcgagatacctgatgaagaagacaaggaaaaatattgtgttgactttttccaaaagagtttcgatcatgtctatgagcctcggcaaccagagagccagagtgttattgacagggcagaaccagaaaatgacaatgatgattctatgtcaagtgccaaaccagtaggccttggtcgaactggcactactattgacagagatgagcacaagcgctttgtaagagggaggttcatgaggaagtaagtgaggcaaggcagaaggcttcaacaatgaaatcccgacgacaagagcaggaggctgctcgtagagagaaactcaagcaggcttatttgaagaaacgcctggagaagttacttgctgagaaacgggccacttcagcaaccgacgaccaaccagctagctag

SEQ ID NO: 315 - DNA, 985 bp, Oryza sativa
gagaaatccgtaggctcagaggatttttggtagtcttgtttcgtgatattcgtgaagagggggggagctaaggggggattcgtaagatcagaattggatcacgcgggggcgcgctcgggatcgggggttccaaacacagcttcttcgttgaatttaagtggatgtactaatggagtcaaagggtggcaaaaagaagtctagcagtagtcgttccttgatgtatgaagctccccttggctacagcattgaggacgttcgacctgccggaggcgtgaagaagttccagtctgctgcttactccaactgcgcgaagaagccatcctgatagccctttcggcttctccatcctagtagtttaggatttcttgcaattccattttggcacttttcttctgacctatttctctggctgctgcttcctgataatcgaccagttctctagtcttgctccctgcactcctccctcctccatctccggcacagtgttctgaccaacctgctccaatgggtgtcttgtctgctgctgaccctcccccagtctcagcaattgggtttgagggctatgagaagcgccttgagatcactttctctgaggcacctgtctttgctgaccctgatggtcggggtttgcgcgccctctccagggcccagattgactctgttctggatcttgcacggtgcaccattgtgtccgagctgtccaacaaggactttgactcctatgtcctctctgagtccagcctgtttatctattctgataagattgtgattaagacctgtgggactacaaagctcctgctcacaattccaaggattcttgagcttgctgaagggctttctatgccacttgctgctgtgaagtactcccgcgggatgttcatcttccccagtgcacagcctgctccccacaggagcttctctgaggaagttgctgtcctcaaccgctactttggccatctgaaatctggtggtaatgcttatgtga

SEQ ID NO: 316 - DNA, 885 bp, Oryza sativa
atggagaagccccggcaggtggtgcggaagttcctggcgcggccgcagcacgagggcgtcggcgccgtcgttcgccggagcatcgggaggtttgagctgaggtacttcgatccgttcctcgtcctggacgagttctcaggtgtctgctccggctgggttccctgaccatccacacagaggtttcgagaccgtcacttacatgctcgagcagggagccgtgacgcacgaggacttcgagggccaccgtggcacgatcaaggccggcgacgtgcagtggatgacggccggacgcggcatcgtgcactcggagatgccggcggggcccggcacctccaggggcctccagctctgggtcaacctctcctcccacaacaagatatcgagccggggtaccaggagatacagagcaaggacatcgcgagcacgacgtcggacggcgtgacggtgcgggtgatcgccgggcagtcgatgggcgcccggtcgccggtgcgcacgcggacgccgaccatgtacctggacttcacggtccgcccccacgcggcggcgcggcagccggtgtgcgcgacgtggaacgcgttcgcgtacgtgctggagggggagggcgtgttcggcggcggcggcggcgacaaggccggggcgcaccacctgctgctgctcggccagggcgacggcgtcgaggtgtggaacaggtcggacaagccgctccggttcctgctcatcgccggcgagcccatcggcgagcccgtggcgcagctggggcccttcgtcatgaacaccgaggaggagatcgacatgaccatcaacgacttcgagttcagcatcaatggcttcgagaaggccaagcactggaagtctcaggcgctggtggcgctgggcttagagtag

SEQ ID NO: 317 - DNA, 884 bp, Oryza sativa
atggcggatcagatcgagcacctccacctccccatccgtggcctcaacctccacatcgctgtggtgttcttgcacgggttcccggagatatggtactcgtggcgccaccagatgctcgccgcggcggccgccgggtaccgcgccgtcgcgccggactggcgcgggtacgggctgtcggggcagccgccggagcaggaggaggcgacatgggacgacctcgtcgccgacgtgcttgccatcctcgacgcgctcgccgtgcccggggcgttcctggtgggcaaggacttcggcgccatgcccgcctacgacttcgcgctccgccacccggcgcgcacccgcggcgtggcgtgcctcggcgtccccttcagccccgccccggcctccttcgacgccatgcccgagggcttctacgtcctccgctggcgctggcaggaggcggggaaggcggaggcggacttcgggcggcacgatgtgcggcgggtggtgcgcaccatctacatcctcttctccggcgccgacatccccgtcgccaaggaagggcaggagatcatggacctcgccgacgcctccacgccgctgccgccgtggctcaccgaggccgacctcgacgtctacgcctcgctctacgagaactccggcttccgcttccccctccagatgccttacaggtgccggtgctgatggtgattggggagaaggactacgcgttcaagttcccggggttcgaggccgccgtgcggggcggcgccatggagaggttcgcgccggagctgaagatcgagttcctcccggaggggagccacttcgcgcaggagcagctcccggagcaggtcaaccggctcctcctcggcttcttcaccgagcacccggttgccgccgattga

SEQ ID NO: 318 - DNA, 872 bp, Oryza sativa
atggtcccgggcgcgggccggcctaccggccggcacggcacggcagcggtgtccggtgtgtgggcgtgtacacgagttgactacggcccgtgacgatgcgtcgatcgggtttggatgtccaagagaccattctgctcagtgcaaatgtcaggctcccaatgtgtcctctgccatcaatcaatcccaaatacaatcgatctttcgtgcccacctctcagcctctatttctagtaaagagaagtagccgaccagttgacaaatctaggcatcaagcagtggagaccaggcggagaggtcgggctaaggagcgcctcctcccgccggcggccgctgctcgcctcctcccgtcggccgtctcctcccgccggctgaggcgccaccgcctcccgccgacgcggctctcagcgcccgcaccgtcgtcgttgccgttgtcgggtccgcatcgtcatcgtcaccggcaggcgtctccgagctcgcgcctcctcccgccggcggccgcctcctcccgctggccacctcctcccgccagccgccgcctcccgtcgacgcggctattgcctcccgcatcgtcgtcgtcgtcgggttcgcatcgtcgtcgtcgccagttcgcatcgtcgtctccgccaacgtctccgagctcgtcgctatcgtccctcttcccgttgccgcgccagcgccggccactgcgcccgtataacgcgccggcccactcgcccgggcgaccgcctccctccctcgctcgcccgggcgctcaggcggctggatccgggcaaatcggccggatccccccatccagcatctgggggaatattcctccccgagccgccccatcccacccctgcccagcaaccaaacacctacaaaaaaaatag

SEQ ID NO: 319 - DNA, 863 bp, Oryza sativa
atggagagctgggtccgcgcggtggtggaggctatccactcatctcgcgcccaggccgtcatctacctcgccggcggcgcctcgcagctcgggtggctgctgtccgtgcccggcgcgtccggcaccgtcctcgaggtcgtcgtgccctactccatggcctccatggcgcagctgctcggcaagatggcattggccgcgttcaaccgcgccctcaagctttctggaccaggtaatgggtgttggcttcactgggtcactggctagctcacgtccaaaacatggtgagcataggaaagcgtggaacaatttgatgaagaccaagaactccagcaagttattgatgggcaagtctgcataggaaaataattctacctggttcattcaatcccctgcatgatggacaccttaggctgttagaagttgcatcaagggtcttccatgctttgagatatcagcaatcaatgccgacaaacctccactatctatcgcagaaatcaagcgccgggttgagcaatttagaaaagtagaagaatgtgataatatctaaccaaccatacttttacaagaaagcggagctatttccaggcagtgcatttgtaatcggtgcagacactgcagctaggcttgttaatcctaagtattatggaggtgattacaatagaatgctagagatacttctcgaatgtaaaaacacaggtacaacatttcttgttggtggtcgaaatattgaaggagttttcaagaaggtccttgaagatttggacattccagtcgagttaagggaaatgtttatctctataccagaggagaagtttcgcatggatatttcatctacagatataagaaaaaaacaagggccttga

SEQ ID NO: 320 - DNA, 843 bp, Oryza sativa
  N_region (72)..(72): n = any nucleotide
  N_region (81)..(81): n = any nucleotide
  N_region (106)..(106): n = any nucleotide
  N_region (354)..(354): n = any nucleotide
  N_region (432)..(432): n = any nucleotide
  N_region (732)..(732): n = any nucleotide
  N_region (772)..(772): n = any nucleotide
  N_region (775)..(775): n = any nucleotide
  N_region (789)..(789): n = any nucleotide
atccgctggtcgcgcgcctgcgacgccacgtggaagggctgggcgcgccccgccgccgtggcgagcggcctngccggcctngtccgccttgccgtgcccagctgcntcggcgtctgcctcgagtggtggtggtacgaggtggtcaccgtgctcgccgggtacctgccggaccccgccgccgcggtcggcgccgccggcgtgctcatccagaccacgagcctcatgtacaccgtgcccatggcgctcgccgcctgtgtctctactcgggtggggaatgaactggggggagggaagccgaggagggcgaggatggcggcgatggtggcgctggggtgcgcggtggtgatcggggtngtgcacgtggcgtggacggcggcgttcagccgggagtgggtggagctgttcacgcgggaggcggcggtggtgaggctngcggcggcggcgatgcccatcctggggctgtgcgagctgggcaactgcccgcagaccacgggctgcggcgtgctgcgcggcacggcgaggccggccgtcggcgcgcgcatcaacctgctctccttctacctcgtcggcacccccgtcgccgtcaccctggcgttcggcgcccgcgtcggcttcggcggcctctggtacggcctcctctccgcgcaggccgcctgcgtcgcgctggtcctcctcgccgtcgtgtggcgcaccgactggcacctcgaggccctccgcgccaagaagctcacnggcctcgagatgatcgccgccgccgccgaaggcgacgacnacnagtgcaagcgcctnatcgcgccgctgccgccgcccgatggtcacgatgtcgccgtcgacgtcgtgtag

SEQ ID NO: 321 - DNA, 841 bp, Oryza sativa
  N_region (9)..(9): n = any nucleotide
  N_region (87)..(87): n = any nucleotide
  N_region (126)..(126): n = any nucleotide
  N_region (165)..(165): n = any nucleotide
  N_region (176)..(176): n = any nucleotide
  N_region (178)..(178): n = any nucleotide
  N_region (259)..(259): n = any nucleotide
  N_region (298)..(298): n = any nucleotide
gtcccccangccctctaccgagctctccacgccgatccccttcgccgccgctcgccggcgatctccagccgcccgccaccgccgctnccgtcgctgccgcgctgcgccgccaccacttccctcctncaccgccggaaccaccttcccatcgcgaggccgagccantaccgccacanancgccttcagccggccgctgccgctgcgttagtcgtcgccggaacttgccgcttgcgccgtcggaaacgccgtgccaagctntaccccggcctccgctccgtttccccattccaccaccgnaaccacccttccaccgtgcatcccgagccactccaccatacgccgcctccagccgtgtgccaccgtcgccttagccgccgccgcgtcgctccgtcttcacctctcgcctcgcagcgccgtgcagcacctcggtcaccgttgttcatcgccggaaacccaccggaacgtggtacctctcggtcgccggtgagccccaccattcctctcctctctggcgtggtattctcgccgctccggtcgcctatttccctccctaaccgctccaataatttccctaggtcttgccggccctcggccgcggctccgccatggtcgggcgtcgtcggaccgccgttcccgtcgcctcccgtgtcggccgccgccatcctttccgccgccggtcgcctccccatggtcgtcccgtcgccggcgctcctcggtgaggacccccttcatctcctttccctttcccctcttttcgtcgcctcccgtgcgtgccgtcgcgccggtggtcgtcgccggcgaccatcgggccgtgcgccgtcgctcccggccggccgaccg

SEQ ID NO: 322 - DNA, 807 bp, Oryza sativa
atgtgcccaagatgtcagctggccacgtcacccaatctctttcctctttctttttctctattcctctccttccttcttgtcgctctctgctcggggtggccagcgacgggcggcggggtggcgtggcgacgcagcggcggcagcccgggcgcaggcgggcaacgcggcggcgggcccggacgaggaggaggaggagggcatcgacagcggtgcccgccggtacgaatcccatcaccgcgccgccatgtcctcctcccacgggccacacttgttccgcctcggcattgtcgccacccatgtcgtcgtcagccattgaggccatggacgagctcatccagctcgccgagtccatgcgccaggccgcctccctcctgggtgacgacgacccctccgacgagtccagccgcgccgcccctccaccttcctcaacgccgtcgcgcttggcaacgtcctcgcccacagcggcggtcgcatccgccgcccgccccatgctggatccgcccctgtcgacgaggccgtcggcaagctcaagtccgtccttgataacggcgaaggcgacctcgacgaggtggtgctgcaggcggaggagctgatggcaccgctggagagccactacagtgggtggcggcggtggctttagtgggattccgtccaggcggtcgtggatgcgtcgccgccccggctcccgccgccgtgtcgcctcgtgctcctacctccgcgtcaccggccgtgtcgcctcgtgctcccgtgctcccgccaccacgtcgccggccgccccggcgtcctcctccccacccgccccggtag

SEQ ID NO: 323 - DNA, 779 bp, Oryza sativa
atgacggcagcgatgacgtcagcaccggcggcagctcgggagcgcaagctcgccggcgaacgacggcgcgacgacgagaacggagggcaccaggacgtagagcgcggtgcggcgaacttaccggtgaccaaaacggcggcagaaaagcaacgaacggccccggcaacgaggaagaagcggcggcggctccggcgttggcgaagcggtggacgaggacggcggcgacttggcgatcacaatggcgatcttcccgagcgacgacgacgaccggaacggcggcggcgcacagctggagcggcgacgacggcggcgctaggtcacacgacgctagggcgcttccgacggcgagagacgaaggcgagggaggtggcgggtagaggagagctcggggatccttataaaggggcaaggaggcggcggcgaaggcccacggcgaccggcggcgagaaggaaagagagaaaaggaagaggagatctcgaagatcatttcccctcaaaagattcggccggagaaggaaagacgcggccgaattggaaagcggcggcgcacggctcggctagggttcgggcggcggcggcggcgcgaggaggaagacggctccgacagatggggcccatctgtcagcggctgagagagagaggaggaaggggcgcggcggactgggccgagggaaagagagagagagggttttgggccggctttcggcccaaagccaaaacagacttttaaaaacctttttcaatttaaattattcatgaaatgcaattccatttattaa

SEQ ID NO: 324 - DNA, 768 bp, Oryza sativa
  N_region (329)..(329): n = any nucleotide
atggcgggcagcaccaagctgcggccattcctcctgacgctgctcctcctcctctccaccaccgtggcttccatcctcgcggagtacgacccggaatgcgactgcgacaagcccaagcaccccaagccctcgcacccttctccctctcccggccaccccaagggccccaagaaccctacccctcgcccccccaagggccccacctacccgtctccggtcacccgcccgccgccgctcgtcgcccctcccaaggtccccgtcacccacccgccgaagggccccgtcacccgtccgccgccggtcacctaccccacacctccggtcaccanccccccggtcgtcgtcggcccgccggtcacctaccccatacctccggtcaccacccctccggtcgtcgtcggccctccggtcacctacccgacgccgccggtgacatacccgacgccgccggtgacgtacccgacgccgccgacgacgacgccgtgcccgccgccgccgccggcgacgcagaggtgcccggtggactcgctgaagatcggggcgtgcgtggacctgctgggggggctggtgcacgtggggatcggcgacccggtggtgaacaagtgctgcccgctgctggaggggctcgtggagctggaggccgccgtgtgcctctgcaccaccatcaggctcaagctcctcaacatcaacatctacctgcccctcgcgctccagctcctcctcacctgcggcaagaaccctccccccggctacacctgctccatctag

SEQ ID NO: 325 - DNA, 691 bp, Oryza sativa
atggcggaggagctggtgctggacacggcgatccgggactgggtcctcgtcccgctctccgtggtgatggtgctcatcggcgtgctccgctacttcgtcgccaagctgatgcgctccccgtcggcgtcgccctcccccgaccccaagctcgtcaaggagggcaagtggtaattagggcgaggaacctgaggatcaattcgcagtacatcccggccaaggccttcaaatcacgcaaggaaaacggattgcttcatgtcccgaaagaggaagcacagaaagctcaggctgccatgttttcagatccaaacatggccatggacatgatgaagaagaacctctctatgatagttcctcagcagacacttacatttgcatgggtgaacttcttcttttcgggttttgttgcaggctaagattccctttccattgactccgcgattcaggggaatgctgcaaaacgggatagacctgagtactgttgatgtgagctatgttagcagccgttcatgtactttctcaatttgtttggtttgaggggtctcttcagtctgatcctcggtgaagaaaatggttagataacaaattggccgcagagaaagacaacctggatataatccagcatgactgggctttaccaaagatggagcatcatgctgaggaagtgctgaggaagcttctgaagaaatgatag

SEQ ID NO: 326 - DNA, 667 bp, Oryza sativa
  N_region (505)..(505): n = any nucleotide
gaggtccgcgcggtggagcggcgcgcgctcctcgaggcgctggcgtccaagctgccgccgggcgccatctccttctcgtcgaaggtgcggcgcgtcgccgtcgccgggcagcagcaggggcccggcggcgccaccgagctggagctcgaggacgggaggcggatcgtcgccaaggtggtggtcggctgcgacggcgtgaactcgccgatcgcgcggtggatgggcttctccgagccgaggtacgtcggccacatggcgttccgcgggctcgcgcgctacgacggcgacggcgggcagccgttcgaggcgaaggtgaactacatctacggccgcggcatgcgcgccggtttcgtccccgtctcacccacccgtgtctactggttcatctgcttcaatcgaccaagcccagttagggccaaagatcacggacccggcggcgctcaagagggaggcgctggagctcgtccgcgggtggccggaggacctcctcgccgtgatgcgcganaccccggacgacgccgtggtgaggacgccgctggtggaccggtggctttggccggtccttgccccaccggcgtcgaggggcctcggccccttcctcgagcacaccaacttcgactgtggcctgctcgagccgtcggcggcggcggcggcaccgtcgccatga

SEQ ID NO: 327 - DNA, 661 bp, Oryza sativa
  N_region (305)..(305): n = any nucleotide
  N_region (337)..(337): n = any nucleotide
  N_region (367)..(367): n = any nucleotide
tcagtcgaggaatccggtgcggcgcaggacggcgtttcggacgcggcggaggtcgcggcccttgagcgtcctcccggcgccctccagcaccgagctgtgcgccgcggcgcgccgcgcgacgacctcgtgcggcgggacgaccatggcggcgtccccgtcctcgccgccgacggatgactgcgccgcggcccacttccccttcttccccgccgccgccgcggcctccgagggtatcctcacgggcgccgacctcgccgcgcccgccgtcggggttcaacggggcggtctccgggacaggtcgggangcggaccgtacggcggcggggcccgcgcgctncttcttcttgctcccctcgtcgtcggggancgcggcgaggaggcctggggcagaggaggcgggccagaggacgtcgcgctcgaggaggtcgccgtccgccaccgcggcgacggaggaggaggaggccggtttccgggggcgaaagagcaggaggcggtccatggtgggtgggcgggtgtgctccggggatcaccaggacggcggatctccggcgatgtggcggcgctccggcatcggagggtggggggcggcgcgggtggaggcgagagtgaacgaggccgcgattccggcgaggtgaggcggggggcggtggggtggttatag

SEQ ID NO: 328 - DNA, 616 bp, Oryza sativa
  N_region (541)..(541): n = any nucleotide
atgtcacgtaggatagatacacaacgaatccacaccgttcacagtgcagggtactacaggggatcccaaaccaaccaccccaacctattctatctcccactttcccctttctcccctactttcccttttccctctcctactttcactcccacccacccgatagagccggagcgcgcagcggtacaggtcgccatcgttgcccacggaggcgcgcgccatccccgcgaatctctcggcggcgacgagaaggcggagcgaggaggacggcggcggcgcggatctggagcggcgacgcgggagtacagcggcggcggcgcggattctggagtggagcggtgcgcgcgtcctcgtgctcgtgctcagcgcgtcctcgccctgccctcctcaccgacggcgctctcctcaccgcctgccccaacgccgagcggcggcagcatcctcgggacctggcgaagaagcggcggcggaaagacggcgacggcggcgcgtccttgccccaccctcctcaccgacagcgggcgcgtcctcgcctgccctcctnaccggcgacggcggcgcggatttgagctggacccggagtcgtcggagtggaaggagttctggctcgggaatcaag

SEQ ID NO: 329 - DNA, 596 bp, Oryza sativa
  N_region (99)..(99): n = any nucleotide
  N_region (112)..(112): n = any nucleotide
atggcggcggcggcggcggcggcggtggagagcgtggtggtggtgcacaacgtggcgaagcggcacaacgtggggacgctggcgcggagcgcgacggcnttcggggtggcgnaggtggtggtcgtcggccgccgcgacgtcagcgccttcggcagccacggcgccacctcccacctccgcttccgccacttcgcctccctccccctcgcccgcgcctacctcaagtgtgacatttgcggcgtggagatcacccacaacgcgctgccggtgacggcccatccgttccgccggagcaccgccttcctcttcggcaatgagctctcgcagaaggagtgcgagatctgcgacttttttgtctacatccctcagtatggtggtggaaccgcatcattgaatgttacagttgcagcgtcgattgttcttcatcactttggagagtctgggctggctttccagaacgagggcgagaaggtaataaattcgttgtagctgataaaccaaagggccaatctaggggactctactgtacagactcaattgaagaagtgattgaagaacggaagatgcgaagagaaaatgcctgtgacatatttgag

SEQ ID NO: 330 - DNA, 545 bp, Oryza sativa
ccatggcggccggtggcgacacgcgcggtcaccggccgcgcgagagccggcaacggcaagcgacggcgcgggaggcggcggcggacgacgcacaggccggcggcggcggacgaaggcgatggcgagcgcaggggcggcagcgcgtgcgggacagagggaaggagggaggagaggagctcctcaccgtgagcacggcggccggcgcgaagaatgaacacggaagcgatgaccgacgatgcggaggcacggacgggcggcggcgacaccctaggagaagatggagaggcgttaggagaggagacgacgaccacggcggcttgaattgccggccggagatggaggggagggaaaaactcaccggctcgcgaggggagaggcgctccggtgggattccggcgacgcgaggcggcggccgggaaagctcttgcggcggtgaagctaacggcggcggcggtttggcgcggcggcgactccagcagtggcggcgcgcggccgaagacggcgacaagcggcggagctcgggtgtgacggcgcgggcgcggtag

SEQ ID NO: 331 - DNA, 485 bp, Oryza sativa
  N_region (60)..(60): n = any nucleotide
aagtcggagtggtgggcggtggacggcgagatgcacgagatcggggagggcgtgccgcancgcgagcgcttcgccatcccgcgcgacaacctccccaaccgccgccggaagcagatgcgggagcagttcatgcgccgcacgcgcctcgtcctcaaggacacggaacatgaagcttggtgtaaaaaatatatggaactataccaagaacttagagagaattgggaaaggttatattgggatgaaggttattccaaaaagattgctgaagatcatgctaattatgattctgctgaagaagatgatctagacttctcaccttacagcaaggtgaaacatgggaaagggttactcaaattcgtgacaagtttgaatatgacagagagagaagaatgagggaacgaggtaaacatcatgtcttcatagttcatactggaatttttcttttttgtctgccattgctatttgtaccctcagataatgtatag

SEQ ID NO: 332 - DNA, 482 bp, Oryza sativa
  N_region (301)..(301): n = any nucleotide
atggcgtggtgtcgtctccgctggccgcgccgcgcctcgccggcgtgtcgcgctcgtcgtcagggcccagtccgagtgggacgtgctggcgttcagcgggccggcgccggagcggatcaacgggcggctggcgatggtggggttcgtgtcggcgctggccgtggaggcgtcgcgcggcggcgggctcctggaccaggccggcagctggagccgggctggcgtggttcgccgccaccgccgccgtgctctccgcggcgtcgctggtgccgctgctccgcggcgagaccgcggaggcgaggancggcggcgtgatgagcgccgacgccgagctctggaacgggcggttcgccatgctcggcctcgtcgcgctcgccttcaccgagttcctcaccggctcgccgctcgtcaacgtctaatttaattaattaattaattaagctgtacgtacaatacgtgcatgtacgtatgcgtgtactgggtag

SEQ ID NO: 333 - DNA, 474 bp, Oryza sativa
atgaagcgcaacccacgcgtgacgagctcccggaggaagtgccgcaaggcgcacttcacggcgccgtcgtccgtccgccgcgtgctcatgtcggcggcgctgtcgtcggagctccgccacaagtacaacgtgcggtccatcccgatccgcaaggacgacgaggtgcaggtggtgagggggagctacaaggggcgcgaggggaaggtggtgcaggtgtaccgccgtcgctgggtcatccacgtcgagcggatcaccagggagaaggtgaacggctccaccgtcaacgtcggcatccacccctccaaggtcgtcgtcaccaagctcaagctcgacaaggaccgcaaggccatcctcgaccgcaaggcgcgcggccgcgccgccgacaaggccaagggcaagttcaccgccgacgacgtcgccgccgccgccgggggtgccgccgccaccggcgcctcgctccaggagatcgattag

SEQ ID NO: 334 - DNA, 456 bp, Oryza sativa
gcgccttcaatcgccgggaacggacgcgccaaccccggccaccttccatggccgccggcccggctcgtcgtctcgctgcaccgccaccgtcgtcggcatcgcagcggcgtgttccacgtcatccttgcctctgtgcagctgctgccggctgcaatcgtcaatctcctcgccagccccggtcgtcatcgtcgtctcgttgttcccggtcgtcgtggcgttcgtccctccgtcaagccgttctcatccgtcgtccgcgtccgtcaagtgtgccgctgcaaccccatcgtcgtctttgtcctcgcctccgcgtcatcaagctctgcgccagccacgtcttgccttcgtccaaggatcgccgccgaagtcgccccctcgccgttcgtctccgccattcccgtccatctccgccgcgcccgttcgccgtcgtcgttcccacgcctcgtcgcttggtggtaa

SEQ ID NO: 335 - DNA, 432 bp, Oryza sativa
  N_region (303)..(303): n = any nucleotide
  N_region (340)..(340): n = any nucleotide
atgcgaattccggcgacgaatcccgacggggaagggcggacgaggtggagtttggcctcgcgaacccgacggcagcgacggcgcggtgcggcggcgaccctagcggcggctagcggcgaccggagtaacggaagcggcggcggcgggtggttgcacggcgcgggagcgatggggggcacgagggagttcggcgaaatggggaaaaagagagagggggcgacggcggagcttaaataggggaggggaatcccggatttggccgaggggcaggattccgccggccaacgcggggaattggggagngagagagagggagagaggggattgggtgcgggaagtncggcgcatgcgcgggcgtgaccgacgtggcctggaggaggcggaggcgtgggcgcggcggcgcaggcgcgaggtaggagacgggcccgacag

SEQ ID NO: 336 - DNA, 390 bp, Oryza sativa
  N_region (1)..(1): n = any nucleotide
  N_region (51)..(51): n = any nucleotide
ntggcaaagcagttaaacctccggccgcgccaggtggaggtgtggttccanaaccgccgggccagctgaagcggtgctgcgagacgctgacggaggagaaccggcggctgcagaaggagctcgccgagctccgggcgctcaagttctacatgcacctcccggcgacgacactctccatgtgcccctcctgcgagcgcgtcgcctccaactccgccccggccaccgcctcctccgccgcaacatcgtcgacggccgcgccgcccgcggcaccctcatccggcggcattgcggccacctcctcctccgccgccgccgccgcggcgccggaccacaggccgtcgtcgttcgccgcgctgttctcgtcgccgcgtggcttcccgctatccgtag

SEQ ID NO: 337 - DNA, 357 bp, Oryza sativa
aaacgcgagggtttcgcatctccgccgacgcctagaggaagaagggatccgccgccggtagccaagccatgccgaagaacaagggtaagggagggaagaaccgcaagaggggtaagaacgaggccgacgacgacaagcgcgagctggtgttcaaggaggacgggcaggagtacgcccaggtgacgcggatgctcggcaacggccgctgcgaggccatctgcgtcgacggcaccaagcgcctctgccacatccgcggcaagatgcacaagaaggtgtggatcgccgccggggacatcatcctcgtcggcctccgcgactaccaggacgacaaggccgacgtcatcctcaagtacatga

SEQ ID NO: 338 - DNA, 1287 bp, Oryza sativa
  N_region (570)..(570): n = any nucleotide
  N_region (835)..(835): n = any nucleotide
atggatcgtggcttcaacgagatgatcttgagcgagagcgtgtggaatggcggcggcggcggcggagatggagatggtggggcggtggtgctgccgccggaggtgggtggtgtcaatgcggtggacgggagcggcatgacgatgctggagaggctggtgctcgacgaggccctggcggcggcgatactcgagctgcagggcatccaggcgccggggtgcggcgggggcggcggcaaggtggcggtggtgccgccgccgacggccggtgacggcggcgtcgaggcggcggtcgccttcgcggcgatggcgacggggacgcctgcctacgctgacgttgacgcggatgtcctgcagcgacagcggcagcatcaccatcgccaccagggcgcgatggggatggctgccgagtacgacgtcgcaccagcaacaccggctgtcacgttgagcgctgtaccaccaccaccaccaccacctgcgttcgcgaccgcagccgcctccgttgacggcggcggcgccatggacgcgacggtcttctccggcatcggcaacgacgacgtcgtcgacgcggtnagcgccacggtggcgatgactactgccactgcaacgaccagccagtgcgaacgagacaaccctctctgcagcctcctggcgtcgaacaccgccggcgccgacggcggcatccagatcgcgttcagcacgagcgccccggcgtcgaagcgggcgaagccgtcgctgagcagcagctcgtcgagcatcagcttcgacggcaggggccccggcggcaactgcggcggcggcggcggcgacgacccactgtacgagcccgacacggagncgctggcgcaggtgaaggagatgatctaccgcgcggcggcgatgcgccccgtgaccctcggcgccgaggacgccggcgagcgcccccgccgccgcaacgtgcgcatctcctccgacccgcagacggtggcggcgcggcagcggcgggagcgcatcagcgagcgcctgcgcgtcctgcagaagctcgtccccggcggcgccaagatggacacggcctccatgctcgacgaggccgccaactacctccgcttcctcaagtcccagatcagggagctgcaaaccctagaccgccggaactacccgaacgccgccatgtccatcaacaccgccgccgccaccaccatggcgacatccagttcaccaacctacaacaacagcaacgccgccatgccagccttcgccttcccggaaaccctaggatgcggaggaggaggagtcgagcagctgatctaa

SEQ ID NO: 339 - DNA, 1182 bp, Oryza sativa
atggtgacggcgacgaaaaacggcaacgggagatggccggcgacgacaaatgatgacacaacgccggcgacgagcttcgagcggcggcgagatcgggacgactgtgacggcggctttacggcgaacactggtggagaagaaggggttagggaaaaattcgggaaaaaggaggaaacggaagaggaggtcgaggggctgctatttatagccggaagagggagaggggaatccgtttttgcaaccaattttggaaacggagcacgggatgcaccggatcgagcggaggatgcggcgtcggcttcacggtcacgggacgggagagatgctggaggaggaagatggcactgtagcctagtgggccccaggggtcagagagaaagaaggaggagggagctaatgcagacttcggccaagggagaggcacgggctgcggaagggagaagggagagagaggaatgtgctttctcaaacatccacagcgaagcggtgtgttgcggggatggcatggaggatttgagttgggcggagagcaatgggggagggcaggaaggggcggcaaggcgttgtgggaggctgtcaatgccatggctaggttgcagacttgcggtgatggtggtggcagcagatgcggagaaaaaccaggaagcgagagggggagttgctttgcattgtgatgggcgtagatgcaaagagaaagcacatgtttgcctgttatccgaaccattggatttggcgatcaaactatccatattacgtgaatgcaaagttcaattcagtgcagtgaagaacctgccaacatatcaagggcgagggcaggggaagggtgctgagtgcttcgacacatttgcgcttccagatcactctagcgtgtggccttggtgtactagccacttgccaggaaaaggagttgatggattatgtgggggtatgggagtgggagcttatggcacgagctggagacatggagagagattagcagcccctcacctaatagctctcaaagctcttgttcagacagtttcttcatccacaacgttaaaggtgaattttgcaaagtctgtgagagcttctcctcattttatagaggctaacgacagttgtaggttagtggttaaggcagttaacacccttaaccgtcattggggacagatggggagttgccacatggaagctgatggttag

SEQ ID NO: 340 - DNA, 1041 bp, Oryza sativa
atgcggaccccacatgtcaacctaagggaccatggcaaaccgggtacacagagacagtccacgggtcgatggaagcggatcccacaccatgcgggctgcacatgtggaaaccacgcggctaccaagcgggcacacaaacacggtcaccacacgcacacacaaacgactaccgacaccggtacacgggtagcgggatcgacaaccgcacaacgggcaggggcgacatcgaaaggacgagggcggggcagcgagaggagagacccttaccaccatgcgacgaggtgtggcacgatgatgacgaacgggcacggcggagacggctcagggacgacggaggcgaacagcgagggaacgacttcggcggcgatccttgcacgaaggcaagacgcggccggtgcaatgcttgacgacgcggaggcgaggacgaagatgacgacggggctagggacgaacaccacgacgaccgggaacgacgagaggacgacggtgggaaccggtgaggaggcgacgacaaacgccggcgggttcggccgaaggggaggcgatgccgaggacgacatcaccgctgcaatgccggacggggcgacgagccggcaaggaggaacgggcggttggcgcggcggcggcgtttcagcgaacttcgggcgacgccgcagccgggccggagaagaggatggcgctgcagcaccgacagaggtggcagcgacgtcggcctgcactcaggcgaggtggcagggatggttggagatggccgagcgagaacacggcgcggccggccggcgcacaggcactgcggcaggggcggccggagttgaccgtcagcacaggagagagaggaaggtgatggggaggtggctatggttcgggagagggacagagcggaacggccggctagaggaggaagactaccgcgcgtgggcccctcctgccagcgcgtgggcccctcctgctagcacgcggtcagcgcacacagcgcacgggagttgggccaaggggaaggagggcggggcggcccttgagagacagagtgtcacgccctaa

SEQ ID NO: 341 - DNA, 1035 bp, Oryza sativa
atgggctatgctacaaccatcacctgcacgcgccgtcagcttgtcacgccttctggtataccggtatgtgtaattcccccaacgtgtacgtgcgtgcgctaccgttctcgtcaaccattgaattgtagcctcgcgtcacggcaaggcaagctgctccacaccatctcatctcacgggggcagcttaaagagccatacacgcaatcacgcgtcagtaacagcagtaggtttgcaccgtttcaggctagcagccgagacaaatccccaaatctcccacgctccaaagcccgaaaccctagctcctgttcacatggcgccagggctccagcgcttcaccgacatcgccggggacggcgggccccgcctcgacgccgcctccggcgaggagctcctccgcatggaccgcgccgcctccgtcgccctcggccgccgcgcgccggagcccccgggtaccctgttcgtcaccaccaggagggtgatttggcttagcgaaacggaaaagggccaaggctatgcggtggacttcctcgccatcacgctccatgctgtgtcgcgcgacctggaggcgtacccctccccttgcatctacacgcagattgacgcagaagatggctctgatgaggaggctggtggatcagatttcgaagcaaatggtgatctgcagctagcaaaagtctctgagatgcgcattatactttcagaccctggtcaacttttggatcctttacaaagtttttcagttgatgcacttttcgatgtcttctgccattgtgctgaactgaaccctgatcctaatgctgtgcgcaatgaagagaatggctggtccggtggtgaaaatatggctgagggtgggtggattcatggtgatgaagacatgattgatggaaatgatcttgaagcccacatgttctttacgaacttgataggccaaaatggtctacatgaccttggtcgttctgtacgtgagcttcaaattgatgaccagcgtttcgaggatgctgaggaagaagacgagatccaagaaaatggacattag

SEQ ID NO: 342 - DNA, 972 bp, Oryza sativa
  N_region (198)..(198): n = any nucleotide
atgaagatcccgccaagtcaaccaaaccacaagtactacgtccccaccacaccacgtacgtacgcgacagcgcgcgaaacagcatccgtccgtctcgcggtcgcgccgtttcgcctgtcctgtggctcgctcgcggcctcactcccaatctccgactcgattcccactcccactcgcgacgtatataaattcccccangcgcccgcgctctccgacccatacaccgccacacgccgcgccatctcttcgaaccaacgcgacacgacgcgacaccggcagcagctagccgcggtgatcgctacgacgatgaggttcgcgtgcttcagcgccgcggccgtggccgacgaggcggaggccggggctcgccaccaccaccaccggagcggcggcggtggcggccggcggcatcgggggacgtcgtcgtcgctgcggagcaagttgtttggcggtaggacgacgaaggcgggcagcaagaagtactcttcggcggcggcgctggacgatgtctacgacgcggcggagtggtcgtcgtcgtcggtgccgtggtcctcgacgtcggcgctgtcgctggactcggcgcgctcgtcgtcgtcgtcgtcgtcgacgacgacgacggcgccttgctcccgctcccgctccttgtcgtcgctgtcggacgcgctgtctccgcctgctgcgaggcgcgcgccggagaggagggggaggacgccgcggccggcggcgggcttggccgcggtgatcgtgtgcctcgtgatggtgatgctctgcggcagggtcggagccacggcgctcgtctcggcggcgttctaccttttcccgcggcggtggcggccggtgggtgccatcgaggcggcggagagcgcggcggcgtcaccggagcatgactggccgtcgtcggcgacggatcaggagacgacgacgaagaggaaggtggttaaggaggggttcttggcgcggaactgcaagaagtga

SEQ ID NO: 343 - DNA, 813 bp, Oryza sativa
  N_region (465)..(465): n = any nucleotide
  N_region (472)..(472): n = any nucleotide
atggcggtacaggcccagtacccttccagtctcctcttccacgatagaggtgagccggagaggacgaaggagatggacctgcccaggccgcagatgttcgccggagtctcgccggaggtgtactttcccagcggaggagcgagtgggattaatcggaggaataagcgctcgagggaggccattgccatggcgccgccgccggccaaggaggagttggtcaatctgttcacgctccagccgcagcagtctacgtcgtttgtcaacatggcgcagctccacaacagggtatcggcgtcgccgtcccgcgcgccggcggcactcgtgtccactggccttcgcctggcattggatgagcagcagcagcagcagcagcaacaacaagagagcaaacgcctgaaagccttgtgctactcgtcgtcgcccatgccgttcgtctcgttctcgaagagttgccgaaagatgaancggcaanatgaggacgcgaaggccctctcggagcaggccgccgccgtgtccctccaagcgcagctccagcaggccgcggccgcggcgcgggcgtccggcgatgagctccgtggcggcgaggcgggcccggcggagtcgtcctcgtcggcgtacgtggacccgcgccgcagcgggtctgaccgcgcctgcctcacctgccgcctgaggccggccaccgtggtgctcctcccctgcaggcacctcagcctctgcggcgattgcttcgccgccggcgacgtggacgtggccatggcgtgccccgtctgccattgcgtccggacagggggcgtggaggccatcctctgttga

SEQ ID NO: 344 - DNA, 807 bp, Oryza sativa
  N_region (45)..(45): n = any nucleotide
  N_region (48)..(48): n = any nucleotide
  N_region (422)..(422): n = any nucleotide
  N_region (792)..(792): n = any nucleotide
  N_region (798)..(798): n = any nucleotide
atggctcgtaaggagaagcatggacctggaacccctccggttccngtntggcagcttcggccgcccccggatccgccgctcagacagggcggcgtgacaggaggaggaagaagagtcaaaagtttggctgagcggacgaggaagtgggaggaggagaggaggcaggagcgccgagagggcaagtccccggcggttccttccggcaatcggcgaagtgaggccaagcagaaggcccccgccgaggacatcgatgacggcgatgatgacctaggtttccaagagcctggggccaccattgccactgtcgatgggggagcgtgtgctcacgtttctcgccggagcctcaaggccatgaagcgagagcttctggccgcggcccctactcatgaggcgacgcgccgggcgcggtggtcggaggttgncctcaccttcgaccagaccgaccacccaccgtgcgttgcccggggaggacagatcgcaatggtggtttcccccactgtttgcaacgtgaagctggggcgtgtcctcattgatggaggagcagccctcaacatcctttcccccgcagcctttgacgccatcaaggccccggggatggtgctccggccgtcccagccaattatcggagtgacgccggagcacacttggccgctaggtcatatcgacctcccggtcaccttcggtggatccgccaacttccgcacggagcgggtgaactttgatgtggcggacctcagtctgccctacaacgcggtcctagggaggcccgcgttggtgaagttcatggcggcngtccantacgcctaa

SEQ ID NO: 345 - DNA, 804 bp, Oryza sativa
atggggctccttgaccagctctgggacgagacggtggccggcccgcgcccggactccggcctcggcaagctccgcaagtactcctccttctcgccctcctcctcctccgccgccgccgccgcccccgggacggcgccgccggatgcgccggccgcgacggtgacgcgcagcatcaccatcgtccggccgccgtcgctgtccgtcccgtcccgcgccgcgcggcggcggcggcgagtacagctcgtccgtgccgtcctccccagccagcgcgccggactccccgttcgcgtcagagccgccctcgcatcgatgcactgtagaactctagatctgcgttcgtggttggttggttgggggattggatcccgatgcgacgagagaccatggttgcgtgtcaatctgtcaacagaatacagatctacggagttcattcatctgttcttgattgatgctatctgtggagttcatctaatcaagaaatgctactacgcccaagggggacagctggaggaggcttcgccggaaacccaagacggccaccgacgccgcgccggaggcccccgccgccgtcgggccgagaagccccaccgtctacgactggttcgcactcttcccttctctctctgcaaggttacagttccgccatggttggttggctctgatctgaaactcttggttcttcttgctgtgcttgcaggacctgaatctagtgattcccagcaggaaatagctctcgctcggttctatatggctgcaaactctttatgcttgtcaacttgcaagtatatggatttgcttttctag

SEQ ID NO: 346 - DNA, 735 bp, Oryza sativa
  N_region (273)..(273): n = any nucleotide
atgatggaggcggcgccggacgaggaggccgggctggcgctccccgagggcgagcggattctggaggtcaccctcatctccgcgcaggggctgaagcctccctccggcctgcggcggcggctgctgcaggcgtacgccgtggcgtgggtggacgcggcgcgcaggctccagacgcggccggaccgcgcgggcggggtcgacccggagtggcacgagcgcctcctcttccgcgtccacgaggccgcgctcgccgacgactcccgggccgccgtnaccgtcgagatctacgccgcgcccgccggcggctggcacatcgggggggactccctggtcggctccgcccggttcctgctcggcgaccacggcctcctgtcccggcccgtcgggtccccgtcgatgttcgccgtcggtgtgcgccgcccctccggccgcgtccacggcctccttaacgtggcggccagtctcgtcgccgcgccgccgtccccggcagctgcccacgctctccgctcatcccccgccgtctccctcagcggcctctccacggcgcccatcccagcaggccgcgtgctccgcgtcctcaaccgctcgtttccgacgcccccaccctctccgacggttcttacgaccaagaagcagcagattgcagccaagccgaacaagaagtgcgctgacaagctggacgttgcggtgaagctgaacaatggcgcagatgatcggagcgatgaggagcactag

SEQ ID NO: 347 - DNA, 708 bp, Oryza sativa
atgattctcgcaagcagccgaaattcacaagcggctgagaacactgcatcaattttccacttcattttcaacaagcaaacatcaatacatgtagatgaaattgcatcaacaaccgtcgaccattgttgtgccgaccgtcatcgtggcagtatcgtcgcagcgccgcccactcccgaagcctccgccgccggcggatctgcagcccgtgcccggagccacggtcgcccacaatccaagctgccgcccgtcccccgagctgcatggctagatccgtcgtcgcactccggccacacctcgagctctgccacgctccgaaccgccgccgcccggatctgtcgccctagctgcacctcgagctccgctgtcggccggatccgtggcccacgatcgagccactgcccaggatccgccgtcacacttcgagccgccgactgctggatccatgcctcgagctccaccacactccgagccgtcgccctagctgcacctcaatctccgccgtcgaccggatctgtcgcccacacggccgcgcctcgagctccgccgccggctggatctgtcgctagcggcggagccaccgccactgaagatgtatcattctctagcggtgacttaaccgggccaccagcgaagatccattttcgctggtggtccttagcccccagccctcgttacgtacttgctggcggctttccatttggctgctag

SEQ ID NO: 348 - DNA, 696 bp, Oryza sativa
atggcttcggggctgcttctaggatctattaacgtgcttcacagggattgccatgatggagataaagctctcggaaaggcaattgagcacgggcggtccacgggcagcgcccaaaatcagcaatggagggagctgacttgccaggcgtcggcggcggcgcgacgtggcggcgaaaagaggggaaagggagaggagacggagggggtcctcaccgaggggcgtcggcgacggaacgacgacggaaggcagccggcggagctcgggcggagaggggtttgcggcgctccggcgatgggcggcgccaacagaggggcggccaaggggcgccgtgacctgaggaaggtgattgatgggttcgacgagcgcggggtggccgggaaccatgaggaagggcaactggaggcaacaagcacggcgacggagctcacctcgcgcggggcagatggcgttccggcgggggatggcgatggtgaggaggcaaccaagggaatcctcgtccttgcagagccgaaggaggcgacggcgcatcgcgaggtggtctgggacggcagcaggaggcggcaaatgcggcggcggcctcaggttggcggtggggatggtttttcggtggtggttgaaggaagaggagcggctgccggggtggagctcagcatggcgatgctgacggcggcggtggcgcagcgcagcggccactag

SEQ ID NO: 349 - DNA, 666 bp, Oryza sativa
atgcggggagtcgggggcccgctgctcaccatcggcgacctcctcagcgacctcgccgtcgacggcggcgccgacctcgccggcggggaggtgtccgtcccgtcgtcgccgtcgtcggcggggcagcaggcggaggaggccgacccatccgagctgaaccggctattcggggttagggctcccttcctcttctttcctctcctccccgttcctagatttggtcggcaccaatcgatcgatccatcctaccatatgagatttagttccctaatcatgcgtccgtcctgcaattggttcgatttcctgagctatctgttgggtgccgatgtgcttcaaattgaccgtgtttgctgtaaaattcaaattaaatctatagtacagatgaatgatcttcaggagcactatgacaatttgatgaaagcgctgcaagaaaatgacccttcatggccttcattgatgctgaagctgtgcacggctctgaagaccgcagataagctggtgagctgtgcgagtattgatgctgagcagctgctgcagaaggtagagttgctggagcgcctcttagtgaggggcgatcgtgcggtcacggcaatagttgaggaactccagcgctcacgcccctccgaggatagtcactcatcgaaatcaaaaccaagtggcaaatag

SEQ ID NO: 350 - DNA, 654 bp, Oryza sativa
atggtcgtcgttgtcggtgaggtgggggaggcggaggaggggaaggggaaggatggttgcggcggcatggtgcgaggcgacgacgaaggaggctgggccccattggccagctcagagcgatgcatcggaggggccaccgacgcagaagagggaagccctgccccggccatggcagcggcggcggcgcaaccgccgcaaaggaggctaccggcgcaccgcctctaccgatcgcacccgcacttccgtcatcgacagcctttgcaagaactccacaactcctgcaacacacgatctagatggccgcgacgaggtgctcggcgtggtggccgagatccaagagtggcacgacgcgcctccgcctccagatgctcgacgtcgaccgccgtccgccgcttccgtcgcctctgcatccgcggctccacccccaccaccgtgtgcatcctcgctcacctcgtcgccgcctgggcccacgccgcggccgcggcgatgacggcgacgagtgtccgttggccaccatatgctgaacgggatgctaaatctaatgggccgatcgaaatattaggaccttatacgccatcagaagaaaatgggttaggttgggttgggttgggtttggatggacctcttgaaaaagggttagaatggactaggtag

SEQ ID NO: 351 - DNA, 615 bp, Oryza sativa
atggtcgccgccggcgaccaacggcgcggcggagcggcggccgagagaggggagggaagagggaagcgaagcggcgcggaggaaagcggcggcgcggttcgggacggcgaggacgacggtgctccggcggtcggcgggcgaaacggaggagcggacgaggtcgacgacgacgcggcgaagccgatggaggtgacgccgagacgggaggaggtccggagcgacgacggcggcgaaccggagcttggcggcgacggcggagagagagtacaacggcgcgagcacgaatccgacggaaagagcgagcggcgagcggcggaaacggaggagggaggcacggggaacgtttatatagtgccgggagagagagagaggggccggaggggaaggaaacggccgcggcgatctcgggcgccattgatgcgccggcgaagatcgcgggagcaaatccgaacgaatccgagggagagagagagagaaaagtggggggaaagagggagggaatcacggggagtgatttccccctctttatggcgcgcggggacggcgggatgcggcggattcggcggcggcggcggcgctagggcacgggcgggcggcgggagcggcggaaggtag

SEQ ID NO: 352 - DNA, 555 bp, Oryza sativa
atgggacccacggtttgggaatcccgggtcgcctttaaagcgagtcccctctccgtcccaagccagtttgccgctctccggctcctccacctttctgcagttctgattccattcttgcaagttctagaactacagaaagcagggagtaatggcgtccaactacgtggacactgctggggaggaaggcaggttccacggccacggccaccacagcagcggcacgacgccgaccggcgcggcggcgtcgccgaagatgcggaggagctggtcgtccgccgcctcggcgtcgtccggcggcggcggacacgggtccggccccaagtgcgtctgcgcgccggcgacgcacgccggctccttcaagtgccggctccaccgcagcagctcgcacggccacccgtcgtcctctcccaccgccgccgccgcgccggcggcggccgtgcagtcctcgtcctcccgcaccgtcgcggcgcagtgacgcaagaacggtctctcggaccaagaaacgcccaacaagaagagaggagaaggaaaaaagaaggaaagaacataatctaa

SEQ ID NO: 353 - DNA, 489 bp, Oryza sativa
atggatcgtcgtgacgattcttgctgccccggcggcggcggcggcgtctcatctctgatcggagaatttgttggggacgtggtgatgtggcggcggggcgacgtgagcgcctgcctgctggcggcgaccgtctccggctggctgctcttcggctccggcggctacaccttcctctccctcgcctccaacgtcctcctcctcctcctcaccgtcctcttcctctgggccaaggccgcccgcctcctcaacagcctgtggatcatttctatcattggcagcctgactgatttcaccactttatgttacacaagtattgttgctgttctgaccatccctgcattgtaccagaagtatgaggaatgcattgacagatacatgaggtttgcgtatttgaacctgcagatgtacgagatggtgtacgagagattctctgccaagtgcttccacagggctagggatttggttattgaggttctgaaagagccatga

SEQ ID NO: 354 - DNA, 453 bp, Oryza sativa
atggcatgtgttaacatgtacaacccggagcatcaccaccaccagtcgtcgtcgttcatggcgccgaggatatccttttccagcgacttcgcgctcgagccgccgccgccggcgcagcagcagccggcggtgcgggcgcctggggacgccgacttcgagttctccgtcggcagccacccgatgatggccgccgaccagctgatctccaagggccgcctcctgccgctccgggaggccccgcacggccacggcggcgccgacgccggcggccggccactcacgctccgcgacgagctgcgcacggacagccgccatggccgcgtcccccgcgcgcccaacattcggtggaaggagttcctcggcctcaagaaggcgcccaagaaggccccaaccgccgacgctgccgccggcgccacatcgtcgtcggccgacacccagatgagagagacctga

SEQ ID NO: 355 - DNA, 438 bp, Oryza sativa
atgggtgcgagcacggggaggtgttggatggagacggatggtggatattgttgggagtggggcagtgatccgtgggtgtcgctatcggtggcttcccattggctgcggctcgggaggggtggatcgatgggcgcgagcacggggaggcgtcggatggagatggacggtggagatgggttgggagtggggcagcgatccgtgggtgtgggtatcggtggcttcccattggctggggttttggtcggttggatcgatgggcgcgagaacggggtgggtttgggtgggggtggttcgatgggcgcaagcactgggaggtgtcagatggagacggacggtagatatgggttgaaagtggggcagcaatccatagatgtgggtatcggtggcttcccattggctgggcttcgggtggggtggattgacgggcccaccggttag

SEQ ID NO: 356 - DNA, 411 bp, Oryza sativa
gcttccttattaggccatggtcaacgctctagcgtgaagcttggtctcaccccttccgaggcaaatattcgcgctagctcggtcgggatcgcacccccgcacagcgccgtgacccccagcagagggccccgtagtttcgttagcttttggtcgaggagttgcgttgaggagatgcctcaccccaagccgttgccccgcaccagggaagaagatggagagggagtggactggagagaagggacacatcgattcccaccgcacggctccgatctgcaccaccttcaactcgatccgccgccgccacaccttgatccgccacctccacctcgatccgccggcaccgcccccgatatgtactatctctgccttgatctcccaccactgcctcaattttcacctactccaccttga

SEQ ID NO: 357 - DNA, 402 bp, Oryza sativa
atggcgaagctcaccggcgcacggcgcttcggggttccggcggcggattactacggaggaggggtggatgggacggcccgcacgacggcgaacgcgacgacgtcgacgacgcggctcggcacggcggctagcggcggcggcggcggcggcggcggcggagaggaggtcgatgacgacacacgagggttgatcgtggccgggagaccgcgatttcgccggaggagtggggagaggtggggaggagaaagaggcgggattcaaaaattgaatcctggccgtgtcgagcgctggcgcggggcgcggcggtgccggctggaggtgggagacgggcccgacaggtgggccccacctgttggcgacccggggagagaggaggggggctcgggcggctggctgaactag

SEQ ID NO: 358 - DNA, 396 bp, Oryza sativa
atgcgggccccacatggcggtaacccgaggagggcggtccacggcggaccgggtccacggaccgggaagaagcggcgtaccacgtggcgcacacgcagcaccgacgtggcgcacacgcggcgaccacgcggcggccacgcggcagccgaaccgacggccccgatctacccttggatcgggcggcggcgcgagacggcgaccggtggcgaccgaccggcggcggagagcggcggcgtcgcggcgacgtgggcggcgaagcggcggctatgccgctacgcggcggctagcggcgcgggagagagagagggaggggaaggggacctcaccgacgacgaccgacgacggcgagcgacggagggcggcgacgttagcgggactagctccgggatcacctaa

SEQ ID NO: 359 - DNA, 387 bp, Oryza sativa
ggaggcgccgggctcggggatggcgtcgagggaggtggtggccgtcggggagcctggatcttgagcggccccggcctcgggggatggcggtcttgcgcaacggcagcggtcggcaatcgggtagaagcaggcagcggcgtggaggaggtcgacacggcggctaggacaaggtcgacagccgccgggcgtagatctggagttgaaggatgccggatcttcaagggaggaggaggcgacagcgttgaggacgaggaggcagcggcggaagccggcgatggcggtcttgggcatggaggacacggacttggagaggataccggcggcggcggcggtcttgggcgcggaggaggcactggcggcggtggatctgagagagtgagagtgtga

SEQ ID NO: 360 - DNA, 366 bp, Oryza sativa
atgggtgattttagaagtgaaaacgagaagagtatttttacgctcgctcaacccgagactcatggaaaggatatgggagagaaaaatgggatacctggtagtatcagagacatcaacaccatcgatactatcgaggaaagatcctcaatagcgaggagtcgtgagaccccccttctcgtgagttcggccgggggcagaggctcgtctcttggaaatcactcgctcgtccctaagactaccgacaagcttgcacatagtcggattatacaggttttctgggcgtcgtccccccgtttcagtgggccgggtcctccttttatagctcaaggggataccacatgcgccgcctctacctaccctccatag

SEQ ID NO: 361 - DNA, 350 bp, Oryza sativa
  N_region (277)..(277): n = any nucleotide
  N_region (305)..(305): n = any nucleotide
  N_region (331)..(331): n = any nucleotide
atggacacgaccccctccacgtcctccaccttttcccccactcaccccgcaagaaacggcgccggtttgacctccccacgagctccacttcgccgccccacttcccctcgaaatccgccgctccccggccctctcctcgcccccttgagctataaaatcaatccccgtggactcctcttcctttttccccgttttcccgagtcccccacgccctctaccgagctctccacgccgatccccttcgccgccgctcgccggcgatctccagccgcccgcnaccgccgctcccgtcgctgccgcgctgngccgcggcaacctatagcatcacagnggccttgccggaaccccgg

SEQ ID NO: 362 - DNA, 315 bp, Oryza sativa
  N_region (4)..(4): n = any nucleotide
  N_region (126)..(126): n = any nucleotide
atgngcgccggggcggcgctggtgctgctgtcggcgacggcgcaggcggtggcggcgacggcggcgcgggcggctgcgaacggggcgcggttcctgtcggggttctttgccctggtggcgcacttngccggcgcgtacaccgccgccgtcctctccgagctggtccccgtcgtggtcgccgccgccggcggggtctgcgccgcgtccggctacaagcacatgctggtcgcccactacgtcgttctcgacataccgctcatcgtcttctacctcgccggctttgtcgcgcttattaatcagtatcatctagaatag

SEQ ID NO: 363 - DNA, 1944 bp, Oryza sativa
atggatttcggaccttgcaacgagacgctcgacaccgaactgctacacgtgctgacctccggcgacgaggtccgcatggcggacctgctgggcagagaacgccgtggccatggccactccctgtcccaggtggcgatacgcgtcgacgacgacgacgacggccgcgcgccggcgggagcgagccgcctccttggcgtgacgacgggcaacggcaacacggcgctgcacgtggccgccacccgcgggcacgccgcgctcgcggcgctggtctgcgcgacggcgcccgcgctggccgccacgcgcaacagagatgctgcgagccggcggcgcggcgtcagcgcgctgccgctgcggcgggcgacgaactgcctgggcgccaccgccttgcacgaggccgtgcggaacggccacgccggggtggtggctctcctcatggcggaggctcccgagctggcctccgtggccaacgacggtggcgtctcgccgctgtacctggcggcgacggttggctccgtggacattgtccgggcgctgctccacccgttgcctgatggaacgccctcgccggcctcggccgctggtccggacggacggacagctttgcattctgcggcaactactagcaaagaaatcgcgcgagaaatactggactggaagccagagggtcgaacactgctaaccaaagctgattcgtcgggcagaacacctctccactttgctatatcatcacaaattgagcggtttgacgtgtttcagctgttcctagatgcagagccctccctagctctggtttgtgatatccaaggatcatttcctttgcatgttgctgctgtgatgggcagtgttaggatcgtcgttgagctcatacagaaatgccccaacaactacaacgatttggtcgatgatcgaggaagaaattttctgcattgtgctgttgaacataacaaggaaagcatagttcgctacatttgccgagatgacaggtttggtatcctgatgaatgcaatggacaatgaaggaaatactcccctccatttggccgccgagtatgggcacccaaggatggtcagtttactcttggagacgatgagcgtcgatgtagccattaccaacagggatggtctaactgctgctgaccttgcttatcgccatctgcaacctggtttgcactattttctgaatcctcgagccgtggtaaagaatctcttctactgcaccagagcaccggttaccctagaaggggatcatgctaggactggcatcccatcggccatggaggatgccgatgctcccaaggacagtggtggcgtgacatccaccggaacagtcgcgtccgtgctgatcgccacggtgacgttcgcggcggctctcaccgttccggggggctacgtcgccgacgaccacccgaacgccgggacggcggcgtcggccgggcggttcgccttcagggcgttcgcggtgtcggacaccatggcgttcctctgctccatcgtgggcacctgcctcctcgtcgtcggcgaggcgagggaggtccggccgagcaggggccgtctccgcgcctaccaggggtcggcgtgggcgctcgtgacggccggggcgcagttcatggtcgccgcgttcgcgttcgggctccaggtcgcgctcggcggcggcgcggacagccggtggctggtggtgttcgtccacgcgctgtgctcggcatcggtgctgctctgcttcccgggcatctgggcgccgttctgcctcgggaaggtgatctggaggcgcgccggatggcgagggctcacgaatcttcaccggtgtccgtccagtttggaagagttcttgtggtgtttcgtgacaagcttcttggccaaaactctcttgcggacattcctcccggtgcttatcgcggtcaccttggtcgtcgccatcgtgctaaatattgcaaagcccaactgctga

SEQ ID NO: 364 - DNA, 1677 bp, Oryza sativa
atggcgcgtcgtcgtgatttgaccccgctgccgccgtgcagggaagggagggcagcgcaagcgagtacaacaaagaaaacaattctttcgttttacaacgtgcttgagaatttggaatttggatacgcttggcgagtaagctcgctgctggtttcctctttcatggctaccgaggccatcgtctccggcgtcgtcgccgacatggccggcaggctcgtgtccctcgtcgccggccacctgctggccgaccggaggggcgtcgacgacaagctgcggagggtgcggcgcctggtcgtcaggatcgagagcgcggtggaggcggccgaggcgaggcggatcaccgggcgcgcgctcctcgcgtggctctcggacctcgtcgacggcgcgcaccagggccgctacttcctcgacgcgttccccgtggtggcggaccacgacggcgacggcgacgtcgaggtggcgccgtcgtcgttcaaccccgccaagcggctgcgcgtcgcggcgaggaggctggtgttccgcgacggcggcggtgtggctgcggagctcgacggcgtccttgccgacctagagagtgtctccggcgatctcaccgggtttatcatgatgcttcagagctgcccgccggcgatgcaccggccgctggccacgaacatctacgcggacagccagatgttcggccggcaggtccagaggcgccgcgtcttcgacttcttgctgcaagacggcgacggcgatgacggcggcgagccggcggcggcggagctcggcgtcctctcgatcatcggccgttccggcctcgggaagaccacgctcgtgcagcacgtctgcgacgaccccgccgtgcgccgccgcttctcgcggatcatcctggtggacttccactgcgtgagcctcatggcggccggcgagacgactgctctactgcgctccctgttcgccgccgccgccgccgccgctggcacggggagcactagcatctccggcgtcggcgagaagctgagacttctcgagaagaatctgcgcggcgagaggctgctcatcgtgttcgacaacgtcgacgcgcggaggaggccggcggtcgacgcgatcatgcgggcgctgcggcgcggcggccggcgagggagcaaggtcatcgtgacgagcagcgacgccaggcacgtcgcgggccttgccaaccgcggcggacaccatcaccctccgccccccgccgccagcggagtactggctcttcttcaaggcgcacgcgttcggcggcgcggacgacgccgacgccgaccggcggctggcggcggcggggcaagccatcgccgagaggctccgcctgcgcgcgtcctacttcggcgggaaggcgctgggcgccctcctccggtggcgccccgaccaccggctctggcgcagggtgctgagcagcggcgccgcagacctgccatgcctcggcaccggcgactacatcgccgcggcggccggctgcctgttcccgccgcacctgaacctccacggcgtcaccgtctcccgctcgccgctgagaggtctcgtcggcctccatggctcctccttgatgactcctcctcccaccgactccggccgccgctcgccggagttgcccgtgttgctgtgcaagtcagtcttcccttcctactgcctctactacgccgcgcattgcaccatcgatga

SEQ ID NO: 365 - DNA, 1293 bp, Oryza sativa
  N_region (1165)..(1165): n = any nucleotide
  N_region (1180)..(1180): n = any nucleotide
atgcacgcgcaccagcaccagcacgcgctgctcgcggcgctcctcgcgtgcgcgctcgcggcgtcgtcgtcgacggccggagcgcagccggcggggcagcaggggtatgcctacggcgacgtgtccgggcagcaggtgcacgtcagcacgacgatgatcgtgctgctggccgccgtcgtcggggttttcctgttcatcgcgatctccaccatctacctccgccactgcaccggttacgaccccgcgacggagggcggcggcgtcggcgggagccgttccatgatcctccctgccaacagcttcgtctcgaggcggcagcggcggccgcgcgggctcgactcgtcggtggtccggatgttccccaccatgaagtacgccgaggcgaaggcgctgcgggtggggaaggtcgccggcgccgcgctggagtgcgcggtgtgcctcagcgagttcgaggacgacgagatgctcaggttcctgcccaagtgcagccacgccttccacccggactgcatcggccagtggctcgccagccacgtgacctgccccgtctgccgccgcaatctcgaccctaacaaggacaccaccgaagaggtgatcatcccggccgccgccgccgccgatccgaacagcacctccagtgaaatagttgtgatacggcaagaagacggggcgcacccagcagccgtggtgatcgacgtggtcaccgaggaggacgacgaggagcggaggaaggaggagctagagcttcaggcgataggcacccagctccgcgcgatgcggtcacggtcggggctgcggccaaagacgtcggcggcgaagcttccccggtcgcactccactggccactccctcgccgtccggctcgacggcgacctagagcggtacacgctgcggctgccggagcacgtacacagggagatggtcgcggcgggggagcagagcgtgcgccgcgggaggagactcggggaaggggtcggcatgggcgctcggtgcagcccccggttttcgcggtcgggcagatggtcatcttttctctcaaattctttgtcaggaaagctgtctttcctctccccgtcgtcgaggagaacgccggatagcacccaggtggaagtgtcatcatcctcgtcgtcgtcggtgacgaaggtgaaagggaagcgcgtggccnccgtcgatgttgccnacgacggttctgctcatgggactgcacagtaccctggttgcactgtggccagctcggcggcggcggcggctgtggacgtggagaaggcagctaccaggcaagttcgaacatag

SEQ ID NO: 366 - DNA, 1290 bp, Oryza sativa
  N_region (70)..(70): n = any nucleotide
  N_region (83)..(83): n = any nucleotide
  N_region (85)..(85): n = any nucleotide
  N_region (90)..(90): n = any nucleotide
  N_region (99)..(99): n = any nucleotide
  N_region (101)..(102): n = any nucleotide
  N_region (104)..(105): n = any nucleotide
  N_region (115)..(115): n = any nucleotide
  N_region (154)..(157): n = any nucleotide
  N_region (214)..(214): n = any nucleotide
  N_region (222)..(222): n = any nucleotide
  N_region (262)..(262): n = any nucleotide
  N_region (487)..(487): n = any nucleotide
atggcgcacgacataaccctgatcgaaggcggcggcaatggtggaagctcaccggagtgcgaggagatgngagctccggcgangnaattngacgggagnanngnngaacgaggtngatctcggcaacgcggacgcggacggcgccgatggcggnnnncggcggcgaccctagcgactgctagaggcggccggagcggtggagatggtggcggcnggtgggtncacggtgctagggcgatagggagctcgggagcggacggcnaaagagggaaaaaggtggagagaggcgcggtggtcggttatatagaggtggggaggccggacgtggccgggagcggcggttccgcggcgacgacgtggagaggtggaggaggagagagagggggagaggattcaaatcgaatcccgccctctcgagcgcgcgcacgggccgggagatgcggggagagggcggcgacgtgggcgtgcggtacgggcggagtgggcncgggaaacggggaaaccggcggcgtcggtggcggtttcggcggcggccggcttggggagcggcggcgggagttggaagaaggggccgacaggtgggccccacctgtcggtgacccggaggggtttgggaggagggaggaaccagcttgggccggcccagccgagggaaggccggcgcgggagcaagggaggggaacttcagggcgtgacactcgtccaccgagtcgtctctctctctctctcagctctctcttttttctttctccaccgaatcggcatgcgacgatgggagggaatactgctgctacggcagcgggtcgacgacatgaggggaagcggcggtggtctgacggccccgcagcggcgccctcccctccgctagatctggtgggaggggaggtcggtggcgtgaggggaggcggcagtggaggtggcgatggtggtgccgcggcagcggcgctcccctcctctccatccaacgacaatggcggctgtggagacgttagtggcggtagtagcggtgctggtgaaggcagtgacgccctcctctccttccgattcatgatgagcattcttgatgaatatgggatcggcttgacggctcaatgcatcgagccgtttttttggctcatgggcgcctcaaaggtgccggttaaaaccgcctcggtcatcagtgccgccaaccggagtagaaccgattcaacgtcctactacatggaagtacttggtcaaagctacaactcatggacgatgaagagaatgagctctatgtggaagcactttgatgtgacgatggaattgtga

SEQ ID NO: 367 - DNA, 1272 bp, Oryza sativa
  N_region (253)..(253): n = any nucleotide
  N_region (450)..(450): n = any nucleotide
  N_region (465)..(465): n = any nucleotide
atggacgccgagatggccatgggcgagagcttcgcctactactgggagacgcagcgctaccttgagtccgaggagctcgacagcatgtacctgccgacgcaggatgactccaactacgagtcgagctcgccggacgggtcgcactcgtcgtcggcgccggcgccggcggccgtgggcggggacgcagccgccgcggtggcgggtagcggtggcgggatgacgacgatgatgatgggcggcggcggcggcggtngcgacgacgccgttggcgcgaacaagaacatcctcatggagcgcgaccgccgccgcaagctcaacgagaagctctacgcgctccgcagtgtcgtgcccaacatcaccaaggcgtcgatcatcaaggacgcgatcgagtacatccagcgcctgcaggcggaggagcagcagatgctccgggaagtcgccgcgctcgantccgccgccgcggcnagcgccgccccggccgcggcgaacccgttcgccggcctcggcgccgacgaggaacacgagtacggccaccaccacccctcgtcgtcgtcggagcggacgaagaaggtgaagcgggcgctgtccgtgtcgtccatcagcgacgccctggttgccgcggcggagccggcgccgccggtggagatccaggagctgcgcgtgtcggaggtgggcgacagggtgctggtggtgagcgtgacgtgcagcaagcgccgcgacgccatggcccgggtgtgccgcgccctcgaggagctccgcctccgcgtcatcaccgccaacatcacctccgtcgccggctgcctcatgcacaccctcttcgtcgaggtagatcacatggatagtgtccaaatgaagcagatggtggaggctgctctctcccagcttgtggcgaccggcaggtgtggaagtgcttcacatgactacttgctatttgtcgaccacggcgccgtcgtcaatgtccgatactgtgaattcttcctgctgtgcagctccagaaccctcgccaatctccctccccggctctctttggaggctgtggcggcgcatacaccgatgccgccgttaactcgagttgaggtgggagcaaccgggacaggggtgcgcttcatgtgggagtcattgccctcgctgatgaggatggtgccgattgggtcattgaagccagcggccaatgtcagagcttgtgcggaggtggctgcaacatcgggggagtcgaacctcacgtgcagccagcaacaagtccacctccgtctcaagctttcttgcgcttaa

SEQ ID NO: 368 - DNA, 1254 bp, Oryza sativa
atgaagcgccgccacctcccgcccgtcctcgtcctcctcctcctctcaatcctctccctctccttccgccgccgcctcctcgtgctgcagggccccccgtcgtcgtcgtcgtcgtcccgccaccccgtcggtgaccccctcctccgccgcctcgcggccgacgatggcgccggatccagccagatcctcgccgaggccgccgcgctgttcgccaacgcgtcgatctcgacgttccccagcctcggcaaccaccaccggctgctctacctccgcatgccgtacgccttctccccgcgcgccccgccgcggcccaagaccgtcgcccgcctccgcgtcccggtcgacgcgctcccccccgacgggaagctcctcgcctcgttcagggcatcgctcgggtcgttcctcgccggccgccgccgccgcggccgcggggggaatgtggccggcgtgatgcgcgacctcgcgggggtcctcggccgccgatcgacgcgcacgacctcgtcatccgccttaacaaaggcgcgcgttgccgggtttgccgcggaagtcggcgtcaagacctccctttccttcgtcaactccaacatcctccacatttgcgccgcccgcaacgccattacccgggccgcctgcggctgccacccgtacggcggcgaggtgcccatggcgatgtacgtctgccagcccgcccacctcctcgacgcgctcatctgcaacgccaccgccacgccgtcctccccgttcccgctcctcgtcaccgacgcgcgcctcgacgcgctgtgcgcgcgcatcgccaagtactactcgctgaggcggttcgtctccgccaccggcgagccggcggcgaactggacgcggaggcacgacgagaggtacttccactactcgtcggggatgcaggcggtggtgatggcgctcggcgtctgcgacgaggtgagcctcttcggcttcggcaagtcgcccggcgccaagcaccattaccacaccaaccagaagaaggagctggacctgcacgactacgaggcggagtacgacttctacggcgacctccaggcgcggccggcggcggtgcccttcctcgacgacgcccacggcttcaccgtgccgccgaatcccattgtaatttgtaaattcagggggaatgggaggagatacggacacaagatgtgtgtcagatttgggagctttatcttgcttaggtatgaaaatgatccagtagctgatgctactaataactattacgtctttgtttaa

SEQ ID NO: 369 - DNA, 1233 bp, Oryza sativa
atgggttacctttaccgcaaggttgagcaaatgctcgtgatgtgctcggcggcgtgttcgctcgcgcgcgcgcacggcggcggcctccggcgaggtgtagagcgtgccaacatgcgcggccgcctcctcgccgacgcggcggtggcaggaggcggcggcggcgtcgtgccgatctactggtcccagccgctctacatggcgaacctcaccatcggcacgccgccgcagccggcgtcggcgatcatccacctcgccggggagttcgtctggacgcagtgctcgccgtgccgccgctgcttcaagcaggatcttcccctgttcaaccggtccgcgtcgtccacctaccggccggagccgtgcggcacggccctgtgcgagtccgtcccggcgagcacctgctccggcgacggcgtgtgcagctacgaggtggaaaccatgttcggggacacgtccgggatcggcggcaccgacaccttcgccatcgggacggccacggcgagcctcgccttcgggtgcgccatggacagcaacatcaagcaactgctgggagcttccggggtcgtcgggctagggaggacgccgtggtcgctcgtcgggcagatgaacgccacggcgttctcctactgcctcgcgccgcacggcgcggccgggaagaagagcgcgctgctcctcggcgcctccgcgaagctcgccggcggcaagagcgccgccacgacgccgctcgtcaacacctccgacgactcctccgattacatgatccatctggaagggatcaaattcggcgacgtgataatcgcgccgcctccgaacggcagcgtcgtcctggtcgacaccatctttggggtgagcttcctggtcgacgccgcgttccaggccatcaagaaggcggtgacggtcgccgtcggcgcggcgccgatggcgacgccgacgaaaccgttcgatctctgcttcccgaaagcagctgcggcggcgggggccaacagcagcttgccgttgccggacgtcgtgctcacgttccagggcgccgccgcgttgacggtgccgccgtcgaagtacatgtacgacgccgggaacggcacggtgtgcctcgccatgatgagctcggcgatgctgaacctgacgacggagctgagcatcctgggaagattgcatcaggagaacatccacttcctcttcgacctcgacaaggagacgctctccttcgaaccagcggattgcagctcactctcctaa

SEQ ID NO: 370 - DNA, 1176 bp, Oryza sativa
atggcgagcggcggcgtggtgaagaaggagatcggcgggaaccacgacgtcctccgcttcggcgtcaacgacagcgtcaagggggacctcgcgccgccgcacccgctccaggccagcgtccacaaggatgccaagttctgggcggacaagaagaggttcggcgcggaagccatctacggatccgccttcaacatccgcaaggatcttgatgcccaaatcctctccaagttccaaaggccccctggtgcattgccgtcatctatgctaggatatgaggcactgactggttccttagatgattttgggtttgaagattatcttaactacgctgcggcctccgaggatggctgggtcctggggcgtggagctctggaattgctgctcggcggcaccgcctacacacaagcgacaagtgcgccacaaatctctctctcgatgcagcaagtgcagcggagggagctgcaactggtcgccgtttctgccatgctgatagattgcaagtacgaggagatttgggccccagaggtgaacgacttcatcttcatatcagatagtgcatacactagggaacagattcttgcaatggagaaggggattctgaataagcttcagtggaatctcaccattcctacaccatatgtcttcattatgatgctatctgcgtctgcagataacaaaagtgacaaggagaatgctgaggccctcaagttcaaaagattatcacagagccggcaacaactcattgattggtcagtaaaaataaaggtttcaaaggagcatgggggtttcatgagatttatccaggtttcttgcctaggagcatcggcctcttcttctagaatgctgagggccaaggctgctggggaagaatctgtgttgaaggaatttcctgagccattacggcttttaatcagtcataggcaatcaatggggacctgcatcttaaacttccacagcaggattcagcctgtttatgttgtggatgttgctgctgctattgtcaactccctcaaggatgatggcaccagcatgggaaagagctacggacttggtggaccagagatttatactgttcatgatctggctgagctgatgtatgagacaatatgtgaatggccacggtacatcgatgttcctcttcctattgcaagggctatcgcatctcctgaaagctga

SEQ ID NO: 371 - DNA, 1158 bp, Oryza sativa
aggaaggtgactgataaggcggatgatccagaacttggtaaggaaaatccagtgccggaagtgccaccggagattgcattgccggagacagccaaggagattgcaccgccggagacagccatggagattgcaccgccggagacagccatggagattcaagtgccggatgtgcccatagagattacagtggcagaaccagaggtggaatttgtggcatcagtcgggtcagacaaagatgaagtaccaggattggaatgggatggtacagagccagagatatttgaagacccttctcctgcgaaagaacccgaggtgccacgagtgattaggagccacgaatccaagtccaaagatgcgaacaaggagaagttcatgctaaccgtctttagagggggtaaggaacgtgccaagctcagagatgacgacccccagaaggcttctgtgctagccgggccaacatacttcgcaaccgatgattgcccggaaaagtacgaacatgggaaagcactcttgccggaatgggcactgaaagaggcaccatgggagatgagaaggttacataacttctacatggaggccagcaagaaaggcttgggcaatataacagctcgatcaccggcagattgtttcggcgaagaaggttactgtcacaagcaaccgcgaggaacggtcctttgcgggtattatgcgtgcgaattccttagggttaatggacggtacaggactaacgcggaggataaattccacgcagcagctgagctctcgatctcgccacagagccaggtgtgcgtctccgggatcgatgaggcagctcatccggcggctctcccgcgtcggcgactcctccgccgccgccgcctcgtcgtcgtcgccggggaagcggcggggcgcagggacgaagaagaaggcggcggcggcgggggtgccgccggaggggcacgtgccggtggacgtcggggaggaaggggaggaggcgacggagcgttcctcgtgcgggccgagctgctggggcggccggcgctggccgagctgctgggccgcgccgcgcaggagtacggctacgaccaccgcggcccgctccgcatcccctgctcccccgccgccttccgccgcgcgctcgccggcgccggggatggagaccacgacgacgacggctag

SEQ ID NO: 372 - DNA, 1107 bp, Oryza sativa
  N_region (395)..(395): n = any nucleotide
atggtggacccgtcgacggcttgtgcgatgcagaggcgacttcatgttcatcccacactgttgaagctcgtcggcagggccggcggtcaggcaccatggatccacatcgatagctcgaggtcttcatcactgcactggttcctcttttgtgcacacctctatctgtttcaccccaatgtatatcttcctccattggcttcaccgctggtgttcattgctcgccctcttgtgcaacctgtcctccctctgagagggctgattgcaaaaatatgtgctagcatggaacaccacgttgacaattgcgacgtacccgtcgacagcgagtcgcctgtggtgacttcgtcaatctctacaggatttgccggcacagtcttcgaagatgctcataggggtanggacgtccgtgtctccctctaccttggcaccatcaccggcctcctccatgctgacgatggcgtcaccgtggggccattggtcgtcgccgccatcggcatctctcctccctcccctgatccttctccacggctggcaaggcagagatggggaagaggaaggccaatgtgtgatggagaaggcgacgtcggtgttcctgatccggtcgcctttgctcttcagccaagatctgttcgcctttcctcgccgcgaggagtcttgtgcgacgatgatgccaagctggcttcatgccacactgccaacaagcccctcacgggcaagggtgagatcggagcttcggccgagaccgtgcaaaccatgtggtatgtcctttcgttcgctccctttgttcgccactgcacacactgttcgccactgtatacacccttcgtcatggctccccgcaagcctaacccctcttcggcgaaagggcccgatcttgaacggatcaacgacgactccaccgcttatttggggatctctctcatagacgacggtgaattggcgaagttggtcagctctggggcgctagtcgaaggacaggctttcgccccggggaaagccgttgtaccgaagcccgtcgacaaccgaacggtggtgttcgccgtgttttttgaggcggggctccggtttccgtgcagcgcgttgttgccggagatccttcgccttttctag

SEQ ID NO: 373 - DNA, 1074 bp, Oryza sativa
atgttgtacccggagcggccgagccgcgtcaacgggacggccaccgtcgactgctcggcctacccgctcgactgccacccggtctgcccaggcggcagctgctacgagatcgccgagcccccgccgccgtcgccggtggtcccgcgcgtcgacgtggccgtcgacgaccaccacctccccgtacgcctcctcctcaccgtctcactcctctccgccttcctgttcatctcgctctctgtctccacgatcctgctctaccgccgccgcgtcgtcctgcgccgccggcgccgggccgcgaccgcgccgctccccggcgacgacgggttcggcgacggggatgaggaggcggggggcggcggcggggatgtgcaccacgtgtggtacatccgcacggtggggctggacgaggccaccatcacgtccatagccaccgcggagtaccgcgccggagttgggtggggaggggactgcgcggtgtgcctcggcgagttccgcgacggggagttggtccgcctcctcccgcgctgctcgcatccgttccatgcgccttgcatcgacacctggctccgcgcacacgtcaactgcccgctctgcagatccccagtcgtcgttccctccgatctccccgccacggctaccgaaggtgaggcggagggtggtgggcaagcggaagagcaccaggtgtttgatgaaatctcgctatcggaatcacgtgccgatgtctccgaggattctgacacctcttcggacactcaaagtgaggacacagcagcttcaccagaggatggtgggagggtgatgcccaagccaatacggcgctcggcgtccatggactcaccgttattcctggtggttgtgcctgaagcgcaggacgatgccatgcggggtgatcgaaaatttccgaatggtcaagagatgaagttattcagcgtgaaagagaaggatgcaacagggacgtcttcttcctcttgtcaggcagggcggtttgggattggcagatcgatgtcgagcagtgggcaggggttcttcttctcacggaatgggcgctccagtagtgctgtgttaccactgtga

SEQ ID NO: 374 - DNA, 1024 bp, Oryza sativa
  N_region (40)..(40): n = any nucleotide
  N_region (44)..(44): n = any nucleotide
  N_region (160)..(160): n = any nucleotide
  N_region (170)..(170): n = any nucleotide
  N_region (173)..(173): n = any nucleotide
  N_region (191)..(191): n = any nucleotide
  N_region (217)..(217): n = any nucleotide
  N_region (227)..(227): n = any nucleotide
  N_region (263)..(263): n = any nucleotide
  N_region (316)..(316): n = any nucleotide
  N_region (698)..(698): n = any nucleotide
  N_region (703)..(703): n = any nucleotide
  N_region (709)..(709): n = any nucleotide
  N_region (771)..(771): n = any nucleotide
  N_region (795)..(795): n = any nucleotide
  N_region (804)..(804): n = any nucleotide
  N_region (819)..(819): n = any nucleotide
  N_region (854)..(854): n = any nucleotide
atgggccggccggcccaaggcggcccaagtgcgcgccttncggnagggaagaagagagagggccggtggaccgggctcaccgtgcgcggtcccgggtgggacccgcttgtcagcggctcggttcaccgtgcggagggagcacgcggcgaacgcgcgcggncgggggaggnacntggtgcacgcgcgcggtntgcggaggaacggatgcggcgggccnacgcgcagcntcacggttcgcggtggaacgcgcgcacgggaggggntgaccggggtcggcccgtcccgacctcggctgagctggcgccgacgtggcgcntacgtggctgccacgtgggctggcgggaggtagacgacgacgccggccggaacggacggcggacaacagcggcgagcggcggagcgaaccacggcgataccggcgaaagcgagcacgccgggtggttgcacgagacgaggggagacgagccaacggctcggattcgccggaggaagcttgacggcggcgaatcgcggcggcgacaaccggcggggagggaagagggaaaccggcgacgaggccacgaggggcccgatttcccggcggtgagagcatccacgcggccacgggaatccgatgctagcgtcggattgggcggacctacgccgatcgaggcttgccaacttccgggtgctacggagctcaagcggccaccgttgcnagcanacggcnagcgacggcaatggttggggcggcgccggctagctacggggagtctactcgtgctaccaccnaagactaaggggggagatggagcnaggaggaanaacggagaggggcantaccgtgcgggtcggggcgctgtgacgagaggccnatggcgcgggagtaatctttccggcctcgggccggagaagaggaaggagagggcgcggccgaagttcccttccgcgggaaaaggggaagggagggcgcctgggtttatagggggcggcaatgtcggtttggaaaccgactttggcggtcaaggcgcgagctggcgtccgg

SEQ ID NO: 375 - DNA, 981 bp, Oryza sativa
  N_region (455)..(455): n = any nucleotide
atggctaagcgcgggtcccacacgtcagcggcacaagggggagggcgcacggtggaccaagtccacccgtggccttgggcgcgcgtccaccacgtggacggcccagatcggcccaagcggctgaggggagcggtggccgggcacgggcacagccggggctggcccgaccgaccacagaggttggcggtgcgcagacggccggacagccggcggcgcaacgcgatgctggcacgggaggcggccgacgaaggggagaaggaggagggaggcggctcaccgagactggatggcgagagcgaggaggcagacgaggtgcagcacacgacgacgaagccgacaaaggtggtttcggtggtggtgagggagagaaaaacggtggccgagcttgggcttgcggcgacgaagccggcggtggcggcggagcagtgctacggtggttctagcaacgggaagtngcggctggcactcacaaaggcaatggcagctcgggttggcagtggaggtggcagcccggtggtggattgggggagtggagcggtggacggcgtgcggcgtggagcggtgatgccgacgtcagtggttgcgtggcgcggcggtggcgctagcggcgacgaggccgaggtgcagcgcgcgacggcgaagctattggtggcggctgcgcagtgcggcgacggcgggagcggcggtggcgcgcggctggtgatcgccggcgagcggcggcgcgctcggggagggagaaccgtagccgagcggggcggcaacggccggggtgcgagcgggaaggcgccggatttgacgggacgtgggtggcaaccgtcggccatggctgcttcggcctggaaggccggagggcggctgctgctggtgccgctccagtgcgggtgcctctcccactcgcccaatgcatacgcgcctatgcagtaccagatcaacactgacgacacattctggatcgtctggggaaattggaaatttgattga

SEQ ID NO: 376 - DNA, 969 bp, Oryza sativa
atggaagcagacgccgtgtgccaaccgaggcgagtggcagacaaacggactccactagacaccacgcgggctgcacacgtgcaaaccacgtggctaccgagtggacacccaacacggtcaccaaacgcacccacgaatgactaccgacaccggtacatgggtaccggggtcgacaaacacacaatgggcatggggagacaacgaaaggacgaggacggggcagtgagaggacggatccttactaccacgcgacgaggcgtgggaacgacgacgacaaacggcgcggcagagatggacaggaacgacggagacgaacggacgacacttctccggcgatccttggacgaaggcaggacgaggccaactcagggcttgacgatgtggagccgaggacgaagacaacgacgaggctgcagcagacttgacgaaacgcgggcgacgaacgaacgcggcttgacggagggacgaacgccacgacgatcgagaacgacgggaggacgacaaccagaaccggcgaggaggcgacgagggcagccggcagcagctgcacggattcgaggacggcgcggaacacaccgctgtgatgacgacgatggaggcagcaccgcgggacgacaagccggcgaggatgaacacgcatgggaggaggaagggccgaccggggaaattccggcaaggcggatggagaggccggcgcggcacggcggtgttccggcgaaatacgggcgacgcctggacggggaagatgacggcgttctggttccgggaaaagttgttggcgacgtcggccagcgcacaggagacgcggcagaggcggccggaggcggaacagtggcggcaacgccactgttgccggcggggatgcacttccggaggcaatggaggggagtgccgaccactggaggggacgggaacgatgccggagagcgtggccggcggcatcaatggcggtcaaagaagagggattaa

SEQ ID NO: 377 - DNA, 948 bp, Oryza sativa
  N_region (678)..(678): n = any nucleotide
atgatgaagaggttctactcgtcgatcgggcagggggtggaggcgctgcaccggagtctggcggtcggcgaagtggggttcatgtcggcggcgttcgtgcagcaggctgcggcgctggtgcggtcggtgcacgcgcagctgctggaggtggtggggaggctgcacctgccggcgggggaaaggtggctggacgagtacatggacgagacctcccgcctgtgggacgcctgcctcctcgtccgcgccggcgcctccgccctccacgcctactccgccgccgccgcccacgccatccaccacctctacgaccatgacgacgactacatccacgccgcccgcgccatcaacgcccctcgccgccacgccgccggcctcctccaggacaaccgcgccctcctccacgacaacatcctcgacccggcctccctcctcctcctcgaccaccgctccccgagggacctcaacctcaacgccttcaacggcttccgcgccctcctctacgccctccgcaacgccacctccttcctcctcgccatcctcctctctgccaccgtctcctcctgcctccccgaccacctcatctccacctgcactccccttcccctgcccaccgcacccggctacgcctcctccatggctcgcctccgccaccgcgtcgcccaggagatgcgcgccctngccgcccccgccgccgacggcatcctgatgtacgagttccgccaggccagggccgccatcgacagcctcaaggccgacctcgacagggtcgtcgccaccggcaccggctacgcccaccgggaggacatggccgagagggcccacctcgtcaaaggctgcctcgccatgctcagctccggcgccgaggccgtcatcgccgagctcgacgacttgttcgatgacattgtcgagggcaggaagatgctctccgacctctgcagccatcgctga

SEQ ID NO: 378 - DNA, 903 bp, Oryza sativa
atgccgcaaccacctccacctccgccggagggaagtggccggaggagagcgtggcggaaaaggaggcgacgccagccaccacctcgcagcaaggaggtggatctagaggaggaggggagaagaatggaggaggaggaggaggagtggactactactacacctacattgacaattttgacattcgacgcagcgcccaaaacccaagcgaagcgaagcgtggacggcgttggtgttgtggtcctctctccccaccgacgcgtccgcgccaccaaccgcctcatactgtactgtactatactagaacgtgaacgaataggtgtaactcgtacgtttttctcatcgggtttagatggtgttcgtttgtactatcgaagattaagttatatcacaggaagtaataacaagggatccagcaaccagcatcgatcatcaagttcctcaagctattacctagctaaatttgatgattcccggacggcattgtcctggcttttaatttgggagcccagttcatcagccaggatggatcgatcagtacgtgagtacagtgttcaagtccttaaaattgcaatttgccactacaccgtacccatatgtgcccaaaaagaagaaaataatttgaagggggggcgaaaagacattcccccgctgcggccccccggttttacctcttctcgcgaacaaagaaggagcaaactgtacaatagagctggtggtggtactggcagtaccaccactgcagcatctcaagcccaatccaacgtgcacagttcagaagaaaactgcatctgcattggctgtcataactgcattgcagccattgaagaagaagaaacacatcacacatgcagcaagcgctgcaaagcaaggcattgcaatgtggtcacagaaaggggtttgtaa

SEQ ID NO: 379 - DNA, 900 bp, Oryza sativa
atgacgacccgatccaacggcgagcaccaccacgggccgccctcgtaccagcagcggcgcccgcactacgggggcgggtacggcggcgggtcggcctcgttccgcggctgctgctgctgcatcttcctgctgctcaccttcctggccctcctcgcgctggccgtcgcgctcgtcgtggtgctggtggtgaagccgcggaagccgcagttcgacctcaaccaggtgtccgtccagtacctcctcgtcaccccgccgtcctccgccgcctccgccgtgggggggaccgtggccgccgcggtccccgccgcggcctacctctccctcaacatcacgctcctcttcaccgccgtgaaccccaacaaggtcggcatccgctacggcgccacggcgttcgacgtcatgtaccacggcgtgccgctcggggtggcggccgtgcccgggttcgagcagccggcgcacagcacccgcctgctccagacccgcgtcatcgtcgaccgcttcaacgtgctccaggccgacgcccaggacctcgtccgcgacgccgcgatcagcgaccgcgtcgacctccgcatcaccggcgacgtcggcgccaagatcctcgtgctcggcttctcctccccaaaagtccagtggtggggacgaggtgtactcgagaatttacggttacctggaaatgaggggcgtgggttaggcgataaaccatttgtaaatgcagacctgcagagttgcggaagaacgttttggagaaggaacgtggcccttccgtgttgtgtcgagtgtcagacggcaggaatataccgtagagtagtcctcatgccgactggagagtgtcttgaacctggttataaaggtgggtctccggacacagcaccgggtttggacttcccaggcttaacgtaa

SEQ ID NO: 380 - DNA, 876 bp, Oryza sativa
atgggactccggtttgataaaagtatagagcaggaaatagaggattttttcgcaagtaaaaatctggatacagtagcgcagagcccatacatagggcttattcgcgctgtagagcttttagagaaagagggagatggacctgccccagccaatgggaatgacgcagggagcccaggcccagcggggagtgaaaggctctcctcgtcgggctcatcggtaaaccaacctgagccgttgacacaggatttattggctgatgctgtgacctatgagagcccaaattatttatcagatgcggaaagcacaaattctttaggaccagtaactgatttggcgagccccttggatccattctccattcacccaataatggatcttcttatgggcaactattatttagcattcacaaatgaatcattgtctatggcgacaaaaagctacgcgcaaattctcattggatctcggttgttcttaacagcgatggctattcatttaagtcttcgggtagcaccaccagatcttcaacaaggtggaaattctcgtatttcgtatgtacatgttcctgcggctcggatgagtatagttatttatatcgcgacagctataaacagttccttgttcccattaacaaaacatcccctttttcttcgctcttccggaaccggtacagaaattggtgctttttctactttgtttacgttagtgactgggggatttcggggaaggcctatgtggggtacctttcgggtgtgggatgctcgtttaacttctgtattcatcttgtttcttatttacctgggtgcactgcgttttcaaaagcttcctgtcgaaccggctcctatttcaatccgtgctgaccgatcgatataccaataa

SEQ ID NO: 381 - DNA, 854 bp, Oryza sativa
  N_region (557)..(557): n = any nucleotide
  N_region (574)..(574): n = any nucleotide
gtggggtcggtgtcgtgctggggcccacgcgtcagtggcgttgggtcttcccgtcggcgcgggggctcgaggaggaccgcgtggagctccctgacacgtgggacccaccaaacctcttgtccccacccgccatccagagcagctcgaggaaggaggaggaggaggttgattcgatggggatggaggcggagtgcgataggataaaggggccatggagccctgaggaggacgaggcgctgcggcggctggtggagcggcacggggcgaggaactggacggcgatcgggagggggatcccggggaggtcggggaagtcgtgcaggctgcggtggtgcaaccagctgtcgccgcaggtggagcgccgcccgttcacggcggaggaggacgccgcgatactccgggcgcacgcccgcctcggcaaccgctgggccgccatcgcgcgcctcctccccggccgcaccgacaacgccgtcaagaaccactggaactcctccctcaagcgcaagctcgccaccgccacggacggcggcgagatcgaccggccgtgtaagcgcgtnagccccgggccggggancccgacgggatcggagcgcagcgagctcagccacggcggctgcggaagcggaagcggcggcgggcaggtgttccgccccgtgccgcgccccggcggcttcgacgccatcagcgcggcggacgtcgagatgatccgcacggaagtccgcaactacatggccggcgtcgggctccgcgccggctgcggcccgggcgccgtggccgagtccttcatgccgcagctcgtcgacggcgtcatgggcgccgccgccgagagggtcggcgtcgtgacccgccaataa

SEQ ID NO: 382 - DNA, 836 bp, Oryza sativa
ctggcgctgaccgtggggacctccgagcgaaaccactgatgtcaccgaagaagatcgtcaaggagagagttgtcaagcggatggaagatggaagcgaaggggagatggtagccgaagagggagcagagccttcggcctccgagccttcagcctcgcaagagaacaaaagagaagaagagatactcttcgacattgtcaacatcccctacaactacaacgcaatcttcagcaggggcactttgaccaagttcgaagcagtctctcatcacaactacctcaagctcaagatgcctggcccagccggaagtccacaccctagaggtcgaaggacaagaaaaaacaaagccaataccaaagcctgcccccacggcaaggttatccagtggcatatagatgaattcgaccccgccaaagtcatatcgcttggtggagacctgagcgaacaagaggttgtcagcatcctggttgtacttaagaagaacattgatatcttcgcttgggggccagacaatgtagggggtgtttcgccagatcttatcatgcaccatctcacagtcaagcttgaagcaaagccgacgaagcaaaagttgaggaaaatgtcggcagatcgccaagaggcggcgaaagcagaggtgaacaagctgctgaaagctggggtcatacaagagagtgaccacccagagtggttagcaaatccggtactggtgaagaagtcgaacggcaagtggcgaatgtgtgtcgacttcacggacctcaacaagatgtgcccgaaggatgatttcccattgccccggatcgatcagctggtcgattcgaccgccgatgcgaactcatga

SEQ ID NO: 383 - DNA, 819 bp, Oryza sativa
  N_region (471)..(471): n = any nucleotide
atggaccccaaattccccccacccccaccgctaaacaaaacggagcccaccaccaccaccaccaaccagcagcatcaccacgatgagcagcagcagcagcatcgcctccagattcaagttcatcctcagcagcaggagcagcaggatggaggtggaggaggagggaaggatcagcagcagcagcagcagatgcaggtggtggttgcggcggcggcgggggagaggaggatgcaggggctagggccgaagcggagctcgaacaaggaccgccacaccaaggtggacgggcgggggcggcggatccggatgccggcgctgtgcgccgcccggatcttccagctcacgcgggagctcggccacaagtccgacggcgagaccgtccagtggctgctccagcaggcggagccggccatcgtcgccgccacggggaccgggaccatcccggcgtccgcgctcgcctccgtcgccccntccctcccttcccccaactccgccctctccaggttctccggcgccgactccggggtgatcggcgggatcatgcagcggatggggatccccgccgggatcgagctccagggcgggggagcgggggggttggggggtgggggtggcggcggcggtggccacatcgggttcgcgcccatgttcgccagccacgcggcggcggcggcggccatgccggggctagagctagggctctcgcaggacggccacatcggcgtgctcgccgcgcagtcgctcagccagttctaccaccaggtgtataatagccgagagctggatggactggatcatcgctgtcgagtcgttgtgtag

SEQ ID NO: 384 - DNA, 816 bp, Oryza sativa
  N_region (52)..(52): n = any nucleotide
  N_region (55)..(55): n = any nucleotide
atggctgccagccgactcctcgtggacctcgtggctcagcgcagggttgtgntgntcgtcgtcatggtcaccgacgacgaccaccgcctccggctccgtctcgtgcgtcgggctgctgctgctgggggacgcggcgcgcttggcggcggctgctccggcaagcttggcgccgtgcttggagttggagctggaggaggcgcgcttgaagcgggtgcggccgccgcgcgcgacgcggagcaggttggcggcggcgtcggcctcggcgtccttggagacgtggcggatgtcgtaggccctgagcggcggggtggcctgggcggcggcggcggcctcagaggagacctgcacgacggggtcgcccttgaggacggcctcgacggcggcctggcacgcctgccactggcccgaccagagcaggccgacggagccgtagatcgggttgacgatgcggccgcaggcctcgtagaggagcgagcggaagacggcggggcggaggtggtcaggcccggcagcgagcaggttgagaagcccggcgcggccgtagaacttggcgaggaagacggtggcgttggcctgcgcctcgggggtcttgatccactgcaggcacggacggatggtgcacccttcgctgcatcccttgcgcagcacccggcaaccgttgcaactcatccgcatcttcgaaatgcttctgcaaacccttatcaactgggcgccggacttgttggagatccgaggtggtactattcttccttcttcttctccaagcctgtgcgaggactcgactcgatactgccttgcttgttggagatgagttga

SEQ ID NO: 385 - DNA, 792 bp, Oryza sativa
  N_region (54)..(54): n = any nucleotide
  N_region (534)..(534): n = any nucleotide
atgggaacggcagtcggcgagggaaggggaggggagcaaatcgagggtggcctnggagaaccgggacgggaagcggagcgccgccgatggctgccgtcacgcggggaggaccgtggtggtcatctgccttccctcctcccccacgtgccgtgcgcggccattgccatgaccgtgcgtcatcgtcggggtgaggcggctggcggctggtggctggcgagggaggagcgcggcgaagaggagggcagatgcggtggcggcggcgtcaccgatgcggcagggaagagggacggtgcggccgacggggaaggagagacggagaggaggaggagcggcgaagagggtcggcgcggccgacggggaatgagcggcggggaaggggagggcagcggcagggcaaggcagcgtcggcgggtgttcgcggtggcggagaggcagcggccgcagcagcagcaggcgagcacggctgcggatggggagcggcggcgccgacgactccgtgccgcccggcctcatcgtcgtcggcggcttcggganggggcgccacgccgccggcttcttgtcgcttgtccgctaggccgcggccggaccggagtggcgagcgtggacgacgacgaggcatgcgaactggtgagcggcgtggacctcttcatcggtggcgacatcgacgacgagggcaagggcgtccgtgcatacctcctccgcctcccctgccggccgcagctgcgcgccgccatcgccgacgcccgacggcagcgacttgatggcggcgttgtcgagtcgatctccgcatga

SEQ ID NO: 386 - DNA, 705 bp, Oryza sativa
atgcccatgccattgccatcccaagtgcaccggtgccaccttctcccagcgccaccacactctccatctcttgtcaccttgctctactctccccttcttaacctcttcacgccaccgccggccaccaccaccactctctactccggcgacatcatgttcatcaacacggccagcttcgtcgccggcgccgtcgtcgcttcgccggagcagccggccaagcttgtccgggatcagaggagggtggtgcctggctcctgcagggcaagaagaggtgcagcatccaatggcttcagaacttactgcatgcagacatggaaccctttcaccaacaggaggtacgaggcgatgtcttacctgcctcccctgagcgcgaagtccatctccaaggagatcgagttcatcatgtccaaaggatgggtcccttgcctcgagtttgacaaggagggggagatccaccggagcaacagccggatgccggggtactacgacgggaggtactggacgctgtggaagctgccgatgttcggatgctctgacgcggcggcggtgctccgggaggtggaggaatgccggagggagtacccggacgccttcatccgcctcatcgccttcgacagcagccgccagtgccagtgcatgtccttcgtcgtccacaagccgccgtcggccgccgcttctccggccacggtcgccggagctgaatga

SEQ ID NO: 387 - DNA, 673 bp, Oryza sativa
  N_region (220)..(220): n = any nucleotide
  N_region (362)..(362): n = any nucleotide
  N_region (407)..(407): n = any nucleotide
atggcgccgctagcacgtccttccctagctgcgttgctcgcgctgtgcgcattcgccgcggtggagcggccgccggccggcgtcggcgccgccaacgtgccgatcacgacgtgccggtccttctgcggcaacatcacggtggactacccgttcgcgctccgggcggggtgcggcacgccggggcaacggttcgtcgtcgagccgtggcgcgcgccgtacntggcgccggaccggacaacgtgttcctcctcctcggctgccgcgccagctcgcgctgttccagggcttccccgacgcactgccgtgccggaacgtctcggatgggctgcggcgagtactacggctgccccgcgtgggacgantacggcggcgcggccgtcgggcgccgcgtacggcgccgccgcgcngcccgagtgctgcgcgtgtcgtgggacgccatccgggcgtgaacgtgagccgcctcgagtgcgaaggcgaaccgcggttctgcggccgtgccgcgccacgggcggggtgtgcggccacgacggggacagccacggcgacctctgcctctgcggggactggaactccacctccaactgcgactcctccgccgacgcggcacggccaaatgccgcctccgcggcgccgcgtgccatcgtcgcgctttgcttgggtgttcttgcctcag

SEQ ID NO: 388 - DNA, 627 bp, Oryza sativa
atggcgatgcaggtggcggcgccgtcgcggaggaggccgagcttggggcggcagaagatcgagatccggcgcatcgagagcgaggaggcacgtcaggtgtgcttctccaagcgccgtgccggcttcttcaagaaggccagcgagctgtccattctgtgcagcgccgacgtggccgccgtcgtcttctcccccgccggcaaggcctactccttcggccacccctccgtggagtgcctcctggagcgattcctgccggactcgtcgtcgggagcggcggcgcgggtgcggcgaggagcgaataataatggtggtggtgggatggtcggggagctcaacaggcagtacggcgagctgcgcgcgatggtggaggcgcacaaggcgcggcgggagagggcggacgagaagatagagatggagcgcgcggcggggaggtggctgcccatggacgccgatgtgcgccgcatgtcgccggaggagctcatggctttcgggacgggcctcatggctgtgcaggctgccgtctccgcgcgcgccgaccagatgctgcgcgacgcgctcctcattggccgcaggccgcccaccaccaccaccgccggcttcggcttcttccacatgccacactactga

SEQ ID NO: 389 - DNA, 603 bp, Oryza sativa
atgtcgacgccgacggtgcagatggtggcgccggcggcggcggtggtggaggacccgagcaagcactggacgcggcacgggccggtgctgacggcgtgcctcgtcgggatcaacctgctcatggtcctcctcgtgttcttctacttctggcggttcttctccgggaagcgtggcccgccgacgtcgtcaacgtcaacgatggccagcggcggcgacgacgacgaggaggagggggcgtcgtcgtcgtcgtcgtcggccgacacgtcgccagggcgccaccaccaggatcgggaggacatcgcgtcgtccctgcccgtgttcgtgtactcctcctccgccgccgcccccgacgtcggcgacgccggggggaacgggaaggcggcggcggcggcggagtgcgcggtgtgcatcgtggagttccgcgacggcgaccgggcgcgcctcctcccccggtgcggccaccggttccacgccgactgcatcggcgcgtggctccagctccactccacctgcccgctctgccgcgccgccgtgctgctccaccccgccgccgccgagccggccaagaacgatcagcccaaggatgacgactgcccggtgtga

SEQ ID NO: 390 - DNA, 577 bp, Oryza sativa
  N_region (6)..(6): n = any nucleotide
  N_region (17)..(17): n = any nucleotide
gccganagggtggtccnaaaggcgccgagccggagtcgccatagagctcgacttcacctgcggcctaggcgtcggcgtcggcggcgccaagcagtcctacagctcctacaccgccaccgacctcgctcacagcggctcgtcgtcggaggtgggcgtggtgccggaggccatgtgcggcggcggcggcgccatcgatctcgacttcacgaggccgaagcctcaaccctacatgccgtacacggcgactcctcctccgagccacagcgtagtaagcgcgcagatgtcgtcgtcggtggtcgacgtgggcgtggtgccggagcgggcggcggcgatgggggaagggagggaggcgaggctgatgaggtacagggagaagcggaagaaccggcggttcgagaagacgatccggtacgcgtcgcgcaaggcctacgccgagacgcgcccccggatcaagggccgcttcgccaagcgcgccgaccacgacgccgacgacgccgaagccgacgccgacgaccccgccgccgtcccatcctcctacatgctcgacttcggctacggcgtcgtcccgtccttctga

SEQ ID NO: 391 - DNA, 567 bp, Oryza sativa
atggacaagaagcagtgcggcgccaagggcggaggcggcggcaatgctcgccggagcgcgacgggcggcggcgcggggaggatgcatcggaaggggaagcatcagggcgacggcggaggcggaggagggaagaggagggagatcaaggtggtgtacatcgccaacccgatgcgggtgaccaccagcgaggagggcttccgcgcgctcgtgcaggagctcaccggccggcacgccgacccgtccaagtaccgcggcggcggcggcggcgcgcccgtcgacgagaccagcggcggtggtggcggcggcggcggcgagatgatgcagggcgcggcggcgatgatgcagcccagcccgggcagcaccgtggactcgtcgtcgacggaccacggcggcgccggcgccggcgggcagggcgccggcctgcaggcggcggcgctggacgacgacgagaacagcttcatcgcgccggagctgatcgacaacaggtactccgtctgcttctcgccgccgacgttcctctacggcggcggctcgcacacctacgacggcgacgactacggtttgtag

SEQ ID NO: 392 - DNA, 516 bp, Oryza sativa
atggctgccgcggtcgcctcccatcggttcctctccgtcgccgaggcgggcgccgccttccgctggaccccgtcccagctcgaccccaagatgttgtcattgcaaaacgaaatcttcattacatctggtggagaccgggatttgattaataggattctcagcaaaagcaaaactgaaacggttcctgagaacaaggatgatggtgagtctgatgatgataacgatgaggagggagatgacgaggatgctgaaaatcaaggcgacgatgatgctggtgatgaagatgcctcggaagaggaagggaatgatgaggacgaggacggggaccctgaagccaatggtgaaggagggagtgatgacgacgatggtggagaagatgacgatgacgaggatgaggacggggacgatgatgagggtgagggcgagggcgaggatgacgatgaggatgaggaggaagaagaggaagaggatgacgacgatgacgtcccgcaaccacctgccaaaaagaggaaatga

SEQ ID NO: 393 - DNA, 492 bp, Oryza sativa
atggaggagatgtgcagggctgggcgcgcagaggatgcgttcgagctgctggaggagctgaaggagaggaagcgagggcccaaacagcaagagaagagaagagaagagaagagaacgcgtcccgcttccgactccggcgaaagcgagaccgagagcgcgcggcggcggcggcggccggaggaggagaagacgatgggttgctgctgccggtgcctggagatcctctgcgccatcctcctcccaccgctcggcgtctgcctccgccatggctgctgcaccctgattaattatttattaattcctctgatgatttctttcttttctcttggcgttgttgggagggagcagatggagttctggattagcgtgctgctcaccatcctcgggtacctccccggcgtcctctacgccgtctacgtcatcgtctccgtcgaccccgaccgcgaacgccgccgccgcgtcgaccccgacgaatacatctacgtcgcctga

SEQ ID NO: 394 - DNA, 488 bp, Oryza sativa
gctcgtcgacgccggcgggccgcgttggccgcgagcagaaaaggttgggtggtgaggaagcggcggggaagacggtggcgatggcgatcccgacgcagcggatggcgactgcgagcaaggcggtggcgatgactgcaacgactggcaggccaaatgatgccggcggcgcctgcgtggatggtgggaaagacgacaccggcgctgcgcagctgctgccagcgacagttgcgcggatggcagactcgatgacgacagcggcggacgaggcaagcatggcggtggtggatggcggcctagacctcggcgacgaaggcagccgcggcggcagagccatcctcggcggagagtgggaggccgcagcgatgctcgccgcgctggaggcggccgacggcgagcgagaagctgaggcgatgctcccggcggcagtgctggaggtcgcgcttctggccctgccgaccacccgtgtccgtgtgtatttcttctactag

SEQ ID NO: 395 - DNA, 483 bp, Oryza sativa
atggctcgacccttagcaatggcgatgagtcagggagcctgggtgtgccacttcctcgcggagattgtggagctcatggccttcatcttctctcttcctttccgcctcctcgccgaaatcctctccggcggcggcggcgacggcgacctgcaggacgcccacgattacttcgtcgaggaaggcaggaagcacctcgccgggcctggggcgctccacttgctgggcgagcgccgccgcgacgcgctgagcgccctcgacgcagccctcagcacaggctacggctacggctaccacgacctccttccgctggaggagcgcgccgacgcgctcgtggcgcgcgccgagatcgagctcgtgcgctatctccgctgcaccctcctcaactccggccaccgcggccaggccatcgccgacctcagggaggccgtccgcatctgccccgacaacggccgcgccaacgcgctgctcctgaagtacaattaa

SEQ ID NO: 396 - DNA, 426 bp, Oryza sativa
atggcgtcgccttctctctcctccctcttctccgcggcggctcccctggccggcggcggcggcggcgccggagtacgcacgctcggatcgcccgcgtccgtccggccgatctcacaccggcagcggaggcggcggctggtaatagcgtccgtgaagtggaggtacaaggggacggcgaggaaggaggcggcgctgtcggagctgatcgagcggaaggtggcggaggcaacggaggcgtgcgccggggaagccgccggggatgcggggtgccgggtggcgtgggacgaggtggaggaggtgagccaggcgaaggccgacctccgccgccgcatcgcccagggcgccgacgaccccctcgagcccttctgctcccacaatcccctcgccgacgactgtgccgtcgtctacgacgacgacgacgaatga

SEQ ID NO: 397 - DNA, 342 bp, Oryza sativa
atggagaacatcaagggggggcatggcgcggcggcggcgggcggccggaacgggtggatgacggtgccggcgttcggggactgggacatgaagaacggcgcgctgccggactactccatggatttctccaagatccgcgagatgcggaagcagaacaagaaggagctctcccgcaccagcctcggcggcgacgacgacctcctcgcccagcagaagcagcagcagccgcagccgcagcagaagcccgccaaggccaacctcggccggccggccgacgaccaccgccaccggcaactccatggccgccacggctcgccgacgtacaagattggctttaactga

SEQ ID NO: 398 - DNA, 327 bp, Oryza sativa
atggcggcggccgcgaagacggcggtgcagccggccgtggtggtgggcggggggcgggtggggcaggcgctgctctccatgggcccgccgggagcggacgtgctcgtcggccgcggcgagaaggtgccggaggacgcgcccggcccgatccttgtctgcacccgcaacgacgacctcgacgccgtgctcgacgccaccccgaggtcgcggtggcgcggtcgttcgtcagtaactcagtatgcgtttgattggtgcctgtggtgcatcgcttcgttttcacccgaaaatgcggacggcttggacgaatttaaccaagttgtgccgtga

SEQ ID NO: 399 - DNA, 4155 bp, Oryza sativa
  N_region (2810)..(2810): n = any nucleotide
  N_region (3461)..(3461): n = any nucleotide
  N_region (3518)..(3518): n = any nucleotide
atcttatcagaacgtggtgcttgtggtgttggatttgtcgcaaacttgaaaaatgagccttcattcaatattgtccgggatgcccttgtggctcttggctgcatggagcaccgtggtgggtgtggagcggacaatgactccggtgacggttcaggactgatgagtggtatcccatgggacttgttcaatgactgggccaacaagcaagggcttgctcccctggacagaacaaatacaggtgtcggaatggtctttcttccacaagacgagaatgaaggccttgaggttcttggctggagaactgttccttttaatgtatcagtggtaggtcgctatgcaaaagaaaccatgcctaatatacaacagatatttgtgaaagttgcaaaagaagataatgctgatgacatagagagagagttgtacatctgccggaagctgatagagcgggccacaaaatctgctagttgggcagatgaactttatttctgttctttgtcaagcagaactatagtctacaaggggatgcttcgatctgagattcttgggcaattctatttggaccttcagaatgaactctacaaatcaccttttgccatataccatcgaagatacagtaccaatacaagccctagatggcctcttgctcaacctatgaggttacttggacacaatggagagattaatacaatacagcaggggaacttgaactggatgcgatcaagggaagccacactacaatctcctgtatggcgtgggcgtgagcatgaaatacgtccatttggtgatcctaaagcatctgattcagcaaaccttgacagtactgctgaattactgctaagaagtggcagaagtcctgctgaagctatgatgattctcgttcctgaggcatacaagaaccatcctacattgtcaataaaatatcctgaggacttctatgactactataaaggtcaaatggaggcttgggatggacctgctttgctcttatttagagtgatggaaggacagtaggagcatgtcttgatcgaaatggtctccgcccagcacgctattggagaacatctgatgattttgtttatgttgcatctgaggttggtgttataccaatggatgagtcaaaggtagtaatgaaaggaagattgggtcctggaatgatgataacggttgacctacaaactggccaggaaaacacagaagtgaagaaaagtgtggcttcagcgaacccctatggatcctggttgcagcaaagtacacgttcaataaagcctgtcaacttccagtcatctgttgctatggacaatgaaacggtcttgagacaccagcagcctttggatattcgagtgaagatgttcaaatggtaattgaaacaatggcttcacaaggcaaggaaccaacattttgtatgggtgacgacattccattagctgtgttgtcacaaaagccacacatgttatttgattatttcaaacagcgatttgcacaagttacaaatcctgctattgatcccctcagagaaggtttggttatgtctcttgaagtcaatattggtaaacggcgcaatatcttggaagttggccctgaaaatgctgatcagcaggttaccctatcaagtcctgtgcttaatgaaggtgaactagaatcacttttgaatgactcaaaactgaagcctaaagtactctcgacatacttcgacatccgtaaaggtctagatggttcccttgataaggctattaaggttctttgtgatgaagctgatgctgctgtgcggaatggttctcaacttcttgtgctttctgatcgttctgaagcactcgaaccaactcgccctgccatcccgatacttctagctgttggtgccatccaccagcatttgattcaaaatggtcttcggatgtctgcttccattgttgctgatactgctcagtgttttagcacccatcagtttgcttgcttgatcggatatggtgccagagtgctatatgtccgtatctggcactagaaacatgccggcaatggaggctgagcaacaaaactgttaatttgatgcgaaacgggaagatgcccacggtgaccattgagcaggcccaaagaaactttatcaaggcagtaaaatctggcctactcaagattctttcaaaaatgggaatatcattgctctcaagagttattgtggagcccagatcttcgaaatttatggccttggtcaagaggttgttgatctcgccttctgtggaagtgtatcgaaaattggaggtctcacccttgatgagctgggtagagaaacattatcattctgggtgaaggcgttctcagaagatactgcgaagaggctagagaactttggattcattcaatccagacctggagggtgaatatcatgcaaataatcctgagatgtcaaagctgctgcacaaagcagttcgtgaaaaaagtgacaatgcatacaccgtctaccaacaacatcttgcaagccgtcctgtcaatgacccaatccgctggagtccccttgcagatgtagaggatgggtattctccaacacttcctcatctcaagggtctacagaatggagacactgccacaagtgccattaagcaggtgcagatcaatccaaaagcgaaggtatctgtaaagcttgtagctgaagcaggaattggaactgtagcttctggagtatccaaaggaaacgcagacataattcagcagatatcaggtcatgatggtggcactggagctagcccaattagttcaatcaagcatgctgggggtccttgggaacttggtctttcagaaacgcaccagacacttatacnaaatggattgagagagagggtagtacttagggtggatggtggattcagaagtggcctagatgtccttatggctgctgccatgggcgcggatgaatatggttttggttctgtggctatgatagctactggatgtgtcatggcacgcatttgccacacaaacaattgcccagttggagttgctagtcagcagagagaagaacttcgtgctaggtttcctggtgttcctggtgatcttgtaaactacttcctctttgttgcagaagaggtacgagcgacattggcccaattgggttttgaaaagctcgatgatataattgggcgaacagatatacttaaagcaaagcatgtctctttggcgaaaacacagcacattgacctcaaatacctcttatcggtacagagagtgctggattacccaaatggagtagctctcagataaggagtcaagatgtccacagtaatggccctgttcttgacgagacaatccttgccgatcctgatatatccgatgcgattgagaatgagaaggaggtttccaagacatttcaaatttacaatgttgacagggctgtctgtggtcgagtagcaggtgtcattgccaagaagtatggtgacacaggatttgcaggccagctcaacattacggaagcncagggcagtcctttggatgtttcctaactcctggaatgaatattcggctagttgganaggccaacgattatgtgggaaagggtatggctggtggaaagctggttgtagttcctgtagaaaaaacaggatttgttcctgaggatgctgctatagttggtaacacttgtctgtatggagctactggtggtcaggtatttgtgagaggcaaaacaggtgaaagatttgcagttagaaactcccttggtcaagcagtggttgagggcactggagatcattgctgcgagtacatgactggtggctgtgtagttgtacttggcaagttgggaggaatgttgcagctggaatgacgggtggccttgcctatattctagatgaggatgatacactcgtcccaaaggtttcataaccttgaaacttctggttttactagcttgataacatgcacaacaaggagattgtgaagatgcagagagtgaatgctccagccgggcagatgcagctgaagggcttgattgaggcttacgttgaaaaaacaggcagcgagaaaggtgccacgattttgagagaatgggaggcatatctgccactcttctggcaactggtaccaccaagtgaagaagactctcctgaagcttgtgccgagtttgaacgagtacttgccaagcaagcaacaacagtacaatcggcgaagtga

SEQ ID NO: 400 - DNA, 1598 bp, Oryza sativa
ggtgcgaagcctttggtaatacagttgcccattggttcagaggacaatttccaaggagttatcgatctagtcaagatgaaggctattgtatggacaggagaggaacttggtgcaaaattttcttatcaggatatacctgctgatctccaagagatggctgatgactacaaagctcagatgatggaaactattgtagagttggatgatgatgttatggagacttatctagaaggtggcgaaatagacgaggaaactgtcaagagattgatccgaaagggaacaatatctgccagctttgttcctgttctatgtggttcggcctttaaaaacaagggtgtccaaccactgcttgatgctgttgttgattacttgccatcaccacttgacctaccaccaatgaagggcactgatccagaggaccctgaactgatccttgaaagaaagcctagtgatgatgagccattttctgggttagctttcaagatcatgactgacccatttgtgggatcattgacatttgttcgcatatactctgggaagctggttgctggttcatatgttctcaatgcaaacaaagataagaaggaaagaatcggaaggcttctagagatgcatgcgaacagtaaggaagatataacagttgctgtggcaggtgacatagtagctcttgctggtctcaaagatacaattactggtgaaactcttagtgacccagataagcctgttgtgcttgaacgcatggaatttcctgatcctgtcattaaagttgctattgaaccaaagaccaaagctgatgctgacaaaatggcaaccggactaatcaagcttgctcaagaagacccatcattccacttctctagagatgaggagaccaaccagactgttattgaaggaatgggagaattgcaccttgacatcattgttgacagattaaagagagaattcaggaggttgaagcaaatgttggagctccgcaagtcaactaccgtgaaagtatttccaagatttcagaagtacaatacgttcacaagaaacagtctggtggatctgggcaatttgcggacattattgtgcgattcgagcctttggaggctggaagtgggtatgaattcaagagtgaaataaagggaggggcagttccaaaagaatatgtaccaggcgtgatgaagggaattgaggaaagcttgcccaatggtgtccttgctggttaccctgttgtggacctccgagcggtgctggttgatggctcataccatgatgttgattcaagtgtcctggcattccaaattgcagccagaggtgcattccgtgaaggattgaggaaggctggtccaagactcctggaactataatgaaagttgaggtgataaccctgaggagcatttgggtgagttaatggtgatttgaactccagaagaggacaggttgtcgatgctttcgtgccacttgcggagatgttccagtacgtcagcacgctgagaggaatgaccaaggggcgcgcgtcttacacgatgcagctcgccaagttcgacgtcgtcccacagcacatccagaacgagctctctgcggcgaaacaggaggaagctagtactgcttaa

SEQ ID NO: 401 - DNA, 1100 bp, Oryza sativa
  N_region (52)..(52): n = any nucleotide
atggattggacacgcgtctctctcgcctccttcccaatcccaccaccaccantgcctcttcctcttctccgggagtcccaaactgcagcagcgcgcggcacaggagagcgaggaggaggaggagatggcggaggcgaagcagcagcagcagcagccgcaggcggcgacggcggcggcggcgagcggggtgtggaagacggtgaagcccttcgccaacggcggcgcctccgggatgctcgccacctgcgtcatccagcccatcgacatggtcaaggtgcaggtgaggatccagttgggtgagggctcggcggcttctgtcaccaagaaaatgcttgcaaatgagggaattagtgccttctacaagggcttgtctgctggtttgctcaggcaagcaacatacacaaccgctcgtctcggatcctttagctgtattccctcagggttctaacaaacaaagcggttgaagcaaatgatgggaagccactgcctctagtccagaaagctggtattggtctcaccgcaggagcaattggagcctgtgttggtagtcctgcggatttggcactcattaggatgcaggctgattcaacgttgccagcagcccaaagtcgcaattataagaatgcttttcatgcactttatcgtattgctgctgatgaaggtgttctagcactttggaagggcgcaggtccaactgtagtgagagctatgtcgctaaatatgggcatgcttgcctcctatgatcagagtgtggagttatttagagacacacttggtgctggagaaggggccagtgctgtttcagggttatgtgcgtctgcttgcagtttaccctttgattatgtgaagacacagattcaaaagatgcagcctgatgcctccgggaagtatccatacactgggtctcttgattgtgccatgaagaccttgaagagtggaggcccatttaagttctacactggctttcctgtgtactgtgtcaggattgcaccacatgccatgtgacttggatattcctaaatgagatccagaagctcgagaagcgtttaggcctctaagagctggttggttcggtcatgctgtccttacctaagacataa

SEQ ID NO: 402 - DNA, 714 bp, Oryza sativa
atggtcgcgtgtaccgtctgcagggaggagggttcggtgcgcggcgactgcgccggcgccgatgggggagaagacggagtaccgggacgggccggtggagcgcgccttcatggggctgttcgcgcgcaagatggagaaaagaagaaggagaagagctcgaggtcggtgtgggagtgggactacgagagcttcgtggacgtgtcgcggcgggtgatggtggggcggacgcgggcgcagcagcaggaggccgtccgcgaggtgctcctctccatgctcccccccggcgcccccgagcagttcaagaagctcttcccgccgacgaggtgggcctgcgagttcaacgctgccctcaccgtccccttcttccactggctcgtcggcccatcagagcaggttgtggaggttgaggtcaatggggtgaagcagaagagtggagtgctgataaagaaatgcagaggtacctggagaacagcggctgcgtcggaatgtgcgtcaacatgtgcaaaattccgacgcaaaacttcttcaccaacgagttcggactccctctcaccatgaatccaagaagatatgagctgtgaaatgatttacggccaagtgcccccacccttggaagaagacccagcatcaaaacagccctgctatgccaatctatgtgagtttcacccaaattgccaacatctcagattgaagaatctgaccaaatctagctag

SEQ ID NO: 403 - DNA, 1002 bp, Oryza sativa
  N_region (17)..(17): n = any nucleotide
  N_region (82)..(82): n = any nucleotide
  N_region (85)..(85): n = any nucleotide
  N_region (178)..(178): n = any nucleotide
  N_region (200)..(200): n = any nucleotide
  N_region (217)..(217): n = any nucleotide
  N_region (242)..(242): n = any nucleotide
  N_region (244)..(244): n = any nucleotide
  N_region (270)..(270): n = any nucleotide
atggaaggggacgacangtcgccggtggtgggaggggcgtactgggggctggcggcgagggcgtgcgacgcgtgcggcgggnagnctcccgcggctgttctgccgcgccgacgcggcgttcctctgcgccgggtgcgacgcgcgggcgcacgggcccgggtcgcgccacgcgcgggtntggctctgcgaggtctgcgagnacgcgcccgcggcggtnacgtgcagggccgacgccgccgcgntntggccgcctgcgaagccgacattcantccgccaacccgcttgcgcgccgccacgagcggctccccgtcgcgcccttcttcggcgcgcttgccgacgcgcccaagccgggttccggtgcccacggcggcgacgcggcggcggccgacgatgacgggagcaacgacgccgaggccgcgtcgtggctcctccccgagcccgaccacgggcagaaagatggcgccgtcggtgcaaccgacgagctctacgccgactccgacccttacctcgaaatcgacttcgcgcgctccatggacgacatcaaggccatcggcgtccagaacggtccgcccgagctcgacatcaccggcggcaagctcttctactccgaccactccatgaaccacagcgtatcatcctcggaggcggcggtggtgccggacgcggcggcgggcggcggcgctccgatgccggtggtgagcagggggcgggagcgggaggcgcggctgatgcggtacagggagaagcgcaagagccggcggttcgagaagaccatccggtacgcgtcccgcaaggcgtacgcggagacgcggccgcgcatcaagggccgcttcgccaagcgcaccaagggcggcgcgggcgcggacgccgacgcggacgccgacgccgacggcgaggacgaggagatgtactcctccgccgcggccgccgtcgccgcgctcatggcgcccggcggctccgacgccgactacggcgtcgacggcgtcgtgccgaccttctga

SEQ ID NO: 404 - DNA, 693 bp, Oryza sativa
atggaagcagcagtggctactccttccttgctcttctctagcccaacccccaggaggccttcctcctgcttgcctcctcctcctccttgcagcagcagcagcagcagctacgcctcccatggtttcaagctgctgcagccgcagttgctgttcatcaatcggctaaccagcagaaacagcaacgggagtagcagaagaagcatttccattttgtcgctgaggtgctcttccagtggcactgacagcgcgtcttcttccgccacttcagaaagatgggttctcgagcctgcaggagacggcgattggcgtcatatcgggtaccgcgtcgcacgacccggcggcttccagatagcatccgaggcggcggtgacggtgggtcgggttcctgaacaggctgacatcgtcctgtctgtcgcaacagtttctgggacgcacgcacggctggagaagaaagaggggagcttgttggtaacagacctggagagcacgaatggcacctacatcaacgagaggcgcctcaccccgggtttccccactcctatcgatcccggcagcctcctcatctttggtgacatccacctggccatgttccgtgtctccaagatgatcgtcgatgtgtccagtgacaccaatgaagctgagcaggaagctgagacggctcaagtatcagcggcaactcaacaaaccaattag

SEQ ID NO: 405 - DNA, 1210 bp, Oryza sativa
  N_region (173)..(173): n = any nucleotide
  N_region (183)..(183): n = any nucleotide
  N_region (210)..(210): n = any nucleotide
  N_region (342)..(342): n = any nucleotide
atggcgtcctcctcgtcggcggcggcgctctggacggcggcgccccaaccccacggcagctgcatcaggatccacgccatcttccaccagcgtcaccagcggagggggaagaggccggtcgtcgtcgcctcgtcggtgaggccgctgcaggccgcgagcctggcggtggccanggcgcccgtngccctggcgtcgaggaggacggcggcngaggaggccgtctacgaggtcgtgctgcggcaggcggcgctggtggaggaggccacccaacgccgcggcgcgggggcgccgcggtgggcggaggaggacgccgtcgactggggcctcctcctcggcgacgcntaccaccgctgcggcgaggtctgcgccgagtacgccaagaccttctacctagaggtactcagcttatgactcctgaaaggcgcaaagctgtctgggcaatctatggtatggattaggtatggtgcagaagaactgatgaactggtagatggccctaactcgtcttacattacaccaaaggcacttgatcgatgggagaagagattagaagatctcttcgaaggcaggccatatgatatgtatgatgcagccctctcggacacagtgtcaaagtttccagtagatatccagcagccattcaaagacatgattgaaggaatgaggcttgacctgtggaaatcaaggtataggagctttgatgagctctacctctactgctactacgttgctggcacggttggtctcatgacagtaccggtgatggggattgcccccgactcgaaggcctcaaccgagagcgtgtacaacgctgcgctagctcttgggatcgccaaccagctgacgaatattctcagagacgtaggcgaagaaggaggggaagaatctaccttccattggatgaattggcagaggcaggtctgacagaagaagacatattcagagggaaagtgactgataaatggaggaagttcatgaagggacaaattctgcgtgccaggttattctttgatgaggcggagaagggcgttgcgcatctagactctgcgagtagatggccggttctggcatctttgtggttataccggcagatccttgatgctatcgaagcaaacgactacaacaacttcaccaagcgcgcgtatgtaaacaaggcaaagaagctgctgtctttaccggtcgcttatgcaagagcggcagttgcatcatga

SEQ ID NO: 406 - DNA, 1004 bp, Oryza sativa
gctcttgctggatttatgaggcaaatcatgcaaggatcagtgtcctttgaaccatctcaggtggttataacatctggtgcaactcctgcaatggaaatactgagtttctgccttgctgatccaggaaatgcatttcttgttccatcaccatactaccctggaaatggcgcactgtgaattgagtgatacctgttccttgccgtagcactgacaacttcaacattagtatcactgctctagaaatagcctacaatcaggcaaagaagcgaggaataaaggttcgtggggttctcatatccaacccaaataaccctacaggaagctttgtgcccaagcaaacactgcatgatcttctagagtttgctgcagagaagaacatccacttgatatctgatgaagtgtttgctggctcaacatatggatctggaaaatttgtaagtgtggcagaggttgttgatgatctagaagactttgacaaaggcagggtgcacataatatatggactctcgaaagacctatctcttgccgggtttcgggttggggtaatatattcctataatgaaagcatcgtgacagcagctgctaagattgctaggttctcgtctgtgtcaactccaacacaacgcttgcttgttgccatgctctcggaccaaaagttcatttcagattacctaaaagttaatagagagagattgcgcaagatgtaccatttgtttgttgatgctttggatcaagtggggattgagtgctacaagagcagtggagggttctactgctgggcagacatgagcaagttcatcaggtcttacagcgagaaaggggagcgcaagctttgggataggttattggaggaggcaaaggtcaatgtcactccaggttcatcttgccattgcatcgagcctggatggttcaggtgttgcttcacgacattgagcgaacatgatatccctgtcttagtgcaaaggctcaggacgattacagatagccataaaccgaatcattga

SEQ ID NO: 407 - DNA, 882 bp, Oryza sativa
ttcaacccgttcgggttcgtgacggacaacccgtcgagccgcggcgccatccagctgccggagtcgccgcccaggacggcaatgtcggccagatgctctacaggatcgaggacaaggggagggagttcggctcaagagtgaaatcaggaaagctgcggtggtttgtgagggaaacagtatggtgatacaattgtaggttccgctggtgcacgacgtgggactgtcgtgtttattcacggtgctccatctcagtcatttagctatcgtatggttatgtctcaggatgctggctaccactgctttgctcctgattggataggatttgggttcagtgatatgccacagcccggatatggattcgactacacagccattcttcttagttgtccagtcatatgggctaacatgggcactaaagaactcaagcaaagttctgaaggtagcaattcttaacagtccactcactgtttcttctccagtgcctggattgtttaaccagctaagcaatgcaggttgccactttttggtgaatttacctgccaaaatgctgttttggctgagagattcattgaagcaggtagcccgtacaagtcggagaaggctgatgtatacagattaccatatctatcaagtggtgcacctggatttggcattgcttgaagctgccaggaaagctaacttccgagatgtattaagtagaatttcagccgggtttgcatccaacagtcctgcagctgggaaaaaccaatattgcttgcatgggggatttctgataagtacttgccactccccatagctgaggagttccagaaaggtaatcctgcagccataaaattggagccaatagaaggagctggtcatatgcctcaagaggactggtaa

SEQ ID NO: 408 - DNA, 869 bp, Oryza sativa
ggcaaggccgcccttccgctcaagcgcgaccgcacgaggtcgaagcgattcctggagatacagaagctgagggagagcaagaaggagcacgacgtgcccacggccatctcgctggtgaagcagatggccagcgcccgattcgtcgagtccgctgaggcgcacttccgcatgaacctcgaccccaagtacaacgaccagcagctccgcgccacgggttaatttgcccaaggggacgggccagtcggtgaagattgcggtcctcacacaagggtgagaagatagatcaagcaagagctgcaggagctgatattgtcggtggagatgacctgattgaccaaataaaaggaggatttatggaatttgacaagctgattgcatcacctgatatgatgcctaaggtcgccggattgggaaagattctaggaccgagaggacttatgcctaaccccaaagctgggactgtttctccaaacataactcagcaggctatcgaagagttcaagaaaggtaaagttgaatacagagttgacaagacagggattgttcacattccctttgggaaggttgattttcctgaagaagaccttattgcaaacttcatggctgttgtttctgtcgaaaggaacaaaccatctggtgcaaaggggatatactggaaaacggcatacttatgctcatcaatggggccttcaatcaagttaaacatcaaagaaatgcttgactatggctcagaatcatcagactaaatgccacgaaaagcaccagttaagaaatctggtgtttgctaccaccttcacaaaattaaccatccacccttagcgataaatgaaccgggaaacatggtgggggaaggcaagggaggtgcttag

SEQ ID NO: 409 - DNA, 623 bp, Oryza sativa
gcagatgttccacccactgtcgcagaaacaaagatgaattttctcaagtcatacaagcgtcctatcctaagcatttacagtacagttctacaagaacttttggtacagcaacatctgatgagatacaaaacaacatatcaatatgatgcggtgtttgctcttggttttgtgaccgtctatgaccaactcatggaagggtaccctagcaatgaggatagggatgcaatcttcaaagcatatataacagcgttaaacgaagaccctgagcaatacaggtgcctactagagctgacgcacaaaagatggaagagtgggctcgttcccagaatggtaattctttagttgagttttcatccaaagatggagaaatagaggccattctgaaagatatttcagaaagggcccagggtaagggaagcttcagctacagccggttctttgcagttggcttgttccgtttgcttgagcttgcaaatgcaacagagccaaccatactagacaagctttgcgctgctctaaacatcaacaaaagaagtgtcgacagggatctcgatgtttaccggaacatactctccaaattggtccaggctaaggaacttctcaaggaatacgtggaaaggtaa

SEQ ID NO: 410 - DNA, 599 bp, Oryza sativa
gagaaatcaccgtacgagacgctcggagctggacagggatgcagatgaggagacaataaagacggcatacaggcgattggccaagttctatcaccctgatggtttatgatggtaagggaacccttgaggaaggggaaactgccgaagcccgcttcatcaaaatccaagcagcatatgagctactgattgatgaccaaaggagaaagtcatatgacagagagcatcatgtgaatccaatgaaggcttctcaggcatggatggagtgggtgatgaaaaagcgaaaagcttttgatcaacgtggtgacatggcagtagctgcttgggctgagcaacagcatcgggaaatgacattacgtgctcgccgtctctcacgatcaaaggatcctgaggaggagaggaaactgtttgccaaggaaaagaaggcatccatggaattctacagcaccactctaaagaggcatacccttgtcctgcggaagagggatattatgcgcaagaaggcagaggaagacaagaagaaagagatcagtagacttctagctcttgaggggcttgagctagatacagatgaagacgacaacataaatttcctaaagtaa

SEQ ID NO: 411 - DNA, 589 bp, Oryza sativa
gaggaagaaaggaagcttgtcttctcagagaaggatgcaagttggttcactcattcttctctagtcaagattggtgctatctatgatggaattgtcggttcagttttccactacggtgcatttgttcatctgcgatttcctgatggtacccattggcaacaccccttgtcatttttgttgggaaattatcatcttactggccttgtacatatctctgaggtctcttgggatcttgtccaagatgtccgggattttttaaatgaaggtgatactgtcaaggtcatagtggtgaacattgatatgagaagtcaaggatagctttatcaatcagacaattggaggaagatcctctactggagacattggacaaagttattcctttgcttccaggacttgatggtatatgtaatgaactattgcaagaggatgggagaaacgtgttgtttcacaagatctggaactctggctttccttcaagcttcttgctcgagctgggcgacagcaggtccaagaactatatttgacaaccagcctagaccaggagggcataaagaaggcggtacagagagtactaggacgtgttccttga

SEQ ID NO: 412 - DNA, 578 bp, Oryza sativa
atggcggtcgtcggcgtcctcgcgctgcagggctccttcaacgagcacttggccggcagcgctgaggaggatcggggtgaggggggtggaggtgcggaagccggagcagctgcaggggctcgactcgctcatcatccccggcggcgagagcaccaccatggccaaactcgccaactaccacaacctgtttcctgcacttcgagaatttgttggtacaggaaggcctgtctggggaacttgtgctggactcatcttcctagctaacaaggcagtagggaggtcaggagcttattggaggactagattgtactgtccaccggaacttttttgggagccagcagcttcaaagctttgaaacggaactttcagtgccaatgcttgcagagaaggaaggagggagcgatacatgccgtggcgtatttatacgagcacctgctatcttggatgtaattgttgctgtaaggcaagggaacatcctcgctactgcttttcacccagaattgacatcagactctagatggttagtgccttttcctacataccatatcatgttttcatgcatcttgtttaggctctga

SEQ ID NO: 413 - DNA, 503 bp, Oryza sativa
cgctcatcacgcaatatagcaatcagcctattcaagcgatataaaaatgtcattgaccgaggaggtggagataacctgaaggagtttgttagtgctggggtgaatgcatatgctctaggctgtactgaagaggggctcaggaaggaacttatggatattgaagattctggccttgagattgaagtccgtgaatgcatcctgtggctcagtatagtattcattacaatcctgtgcacaccacaaccaacgatcatcagatggtctactaccccaccagtgtcagctgacgttttgcatcagtggaaaggattttgtgccttaatagcgaacgcttactataccaaaggaatggcatgttaccagtgaaaactttgcagctggaacaaatggctgtcacgggcagttcagaggagccatcagtagtagctagtcgcatgcaattagttttcagtacattagagtcaactctgcaggtagttagtcctcaatggccaagagtgtga

SEQ ID NO: 414 - DNA, 303 bp, Oryza sativa
tatgaaaatggtgatcgactgagccctgaacatgaaaaggcaattttggaacgattgcttccttatcacccacaatatgagaagaaaattggatgcggtattgactaccttacggtagggttacatccagaatttgagaactcaagatgtcttttcatagttaggaaggatggtgagcaagttgatttttcattctggaagtgcatcaaaggtctcatacgacaaaagtaccccatgtatgcagatagtttcattctcagacattttcgcaggaggcaagattaccgaattagtgactcgtaa

SEQ ID NO: 415 - DNA, 1179 bp, Oryza sativa
atgaggacccacaggatagtgactgaggcgaaaatgatgaagaaaggcggtgaatgtggttcctctgaaccaaggttcagtcaaacctggagtgtgactaatcaccgccagcttccactagagttagaatataggaagatagtgagggaaagctccgaaaaaagtgcccaaaatatcggagttccctccgagtttcggaggagtgcatgtcgacattctctccatggggtgtactggaggattgctagagatgtcggcactctctcctatcttgtacctcgacaaatacttcttttatataactcgttatttagcatggctaggtcactcgctgctctcctactccttctggtcgccgccgcgggagacagccatgccgcgtcgccagcggagatgtactggaagatcgcgctcccgacctcgccgatgcccggcgccatccgcgacctcatcaacccggcgagctcagcggggtcagcttcgaaggaggacacggtgggcaacgtgttcttcctcgagaaggacctcttcccgggctccaagctgacgctccacttcacccgcgccaccgccggcgccgcgctgctcccccgcggccgcgccgactccgtcccgttggccaccgaaaagctcccggagatcctctcccagctctccgtccccgccggctccccgggccgccgacgccatgagtgcgaagccgcgccgtttgccggcgaggcgaagcaatgcgcgacgtcgctcgagtccatggtggagttcgccgcgtccagcctcggcacccgcgacgtgaacgccgtgtccacggaggtcgacagggcagggccggcgccgaggcaggcgtacagggtggaggccgtgaggcccgtgccggtgtccggcggcgacatggtggcgtgccacggcatggcctacgcgtacgccgtgttcgggtgccacacgaccacggcggcggcgtacacggtggcgctctccggcgccgacgggactagggcggaggcgctcgcggcgtgccacgccgacgcggcgccgggggtggcggaggcgtacaagaggctcggcgtggcgcccgggagcgtgccggtgtgccacttcttgccacaggacgacatgctctgggaaaacgaatacgaaagctcggatatgaaaacaaatatgaattatctcgaatatgaataa

SEQ ID NO: 416 - DNA, 441 bp, Oryza sativa
  N_region (175)..(175): n = any nucleotide
atggccatgtccctctccctcgcgcgcgtcgcgctcccgcctctgctgcagcagcaggggggcgcccccaggaagctccaccccggcgccctcgcgttccccgccaagtcgttcttcggcgcgccgctggcggccgtcgcggtctcccccgcgtcggcggcggcggcgtcgccgntccgtcgcaggccgtcgtccgcttccgccgtcgtcgcggcggggaaggggtacaagatgaagacccacaaggcgtcggcgaagcggttccgggtgacggggagggggaagatcgtgcggcggcgcgccgggaagcagcaccttctcagcaagaagaacaccaagcgcaggaagaggctatccaagatgatccaagttaacaagagcgactacaacaacgtgacgggcgcactgccctacctcaaagtgaacaggaatgcagaatga

SEQ ID NO: 417 - DNA, 2931 bp, Oryza sativa
  N_region (1271)..(1271): n = any nucleotide
atggcgcgcggcagagggctacacggaggagctcgccgtggcgcacgtgcggcggctgctcgacatcgtcgcctgcaccgccgcgttcgggccgaggaagccgccgccgaagctgggacagttctacgagttcttctccttctcccacctttccccggccctccattgtttgtagtgggaagccggtgaccatcgtggcctccaaagctggattctatccagcagggaagcgagcgctcatcagccactcccttgttgggctgttgcagcagacgagccgggcgtttgatggagcttacaaggctcttatgaaggcttttgttgagcataataagtttggaaatcttccttatggattccggtcaaacacttgggtggtccctcctgctgttgctgatttgccatcggtgtttccaccccttccaactgaagatgaaacatggggtagcaatggtggtggtcagggaagagatggaaaacatgaccataggccatgggcaaaagaatttgccatactggctgcaatgccttgcaaaacagctgaggagaggcaaatccgagacaggaaggctttcctactccatagtttatttgtagatgttgcagttcttaaagctgttgcagctattcagcaaatggtccctgacaagagttcacttgaaacaccgaatgacaccacaaatccagatttgcacacgcaacaaattggagatatgaaaataacagtcacaaaggacaaagcggatgcaagttctaagttagatgtcaagttagatggaagtcaagctccaggaatgctgtctgatgaacttgctaagagaaatctgttgaagggcatcactgctgacgagagtgcaacagtacatagcttaaggatgctgcttcataaaccatgtattcaaccatctggaggagttcagcggttgcaaagttctcctcaagagagtgaatatagtacaaattttgtccgtaagataatgacagatagtctgcagaagcttgaatgtgaagctccaagagaaacaagaccaataagatgggagcttggagcttgctgggtgcagcacctacagaatcagacttctgagaaggccgacactaagaaaaatgaggagaccaaggatgttcctacagtgaaaggtctggggaaacagtttggaagctgctttccagagactaaaggaatctgaaactggactgcatgctaagtcacctgatgaattaattgagatggcgcacaaatattatgatgatacagctctgccaaaatngcaggtagcagattttggttcacttgagctttcccctgttgatggaaggacattgacagattttatgcacaccaggggactccagatgcgctcactaggacaagtggttgagcttgctgataagctcccacatatacaatccttgtgtatacatgaaatggtagttcgagcatttaagcacgtacttcgggctgttatttcagctgttcatgatataaatgacatggctgaggtggttgcatcatgtttgaatatcttattgggaccatttccagaagaaaataacgatggcaagtgctatgaggataacaatctcaggcaaaggtggctggaggtctttctagtaaagagatttggctggacgtggaaagacgaatatcgtgctgatctaagaaaatatgccatccttcgtggtatctgccataaggtaggacttgagctagttaccaaagattatgacatggatatgccacatccattcagaaggtcagatataatcagcattgttcctatctacaagcatgttgcatgctcatcagcagacggtcgaaccctgttggagtcatccaagactttcctggacaagggaaagcttgaggatgctgttaactatggcacaaaggctcttgcaaaacttgttgctgtttgtggtccttatcacagaatgacagcaggagcatacagccttttggcagtagtgctttatcatactggtgacttcaaccagtatgtgaatcgtgccctatatcttttgcacctgacatgtggaccctctcatcctaatactgctgcaacttatattaatgtggcaatgatggaagaagggctgggtaatgttcatgttgcacttcgttaccttcatgaggctctaaaatgcaacaagaggttgcttggtgctgatcacatacagcagactgctgctagttaccatgctattgctattgctctgtctttaatggaagcatactctttaagtgtccaacatgaaaaaaccactttacgaatacttcaagcaaagcttgggtcggaagatcttcgtacacagcaggatgctgctgcttggcttgaatattttgagtccaaggcactagagcagcaggaagcagcacgtaatggtactccaaagcctgatgcttcaatagcaagcagaggccacctgagagtgtatcagatcttctggattatatcaatccagatgatgaactcaaggctaaggaaatgcaaaagaaacaagcccgcgctaagtcggatgaagggtggcaagaagctgttccaaagggacgatccactgggaaccgcaaaactggttcatacaaggaagttgcaatagctgcaccagggactcttgtcaaaaagctttctgctgctgctgctccattcaatccctccactgttccagcttttgggtcaatggccattccaggtttcagagaacatggaggattgctgccatcaccagccaatgtacccccgatgttgtcgatccctcaccaatctgcaaccgcaagagtcccttatggtccacggttggctggaggctacaacagatcagagggtgatgaaccctaacgcagccgagtttgtgccaggtcaatctcggagtcctaatggcaacccagcatctccaaacggacctctagcatcaccaggtggcactgaa

SEQ ID NO: 418 - DNA, 2699 bp, Oryza sativa
atgcaacccccgacgggcgccgtgtcagcagggtcgtcgtcgtcgtcgctggagtgcgtgagctcgtgcaggacgtcgtggaggggcggagggaggccgtacgaatgcagcgtgctctcgtgcgcctggaacgcgccgcgggcgctcacgggggcgctcgccagcaccaccgcgcagtgctcctcctgcagccacgccgaggctgggccaggttgaaggcggcggggccagtcgcagcggagtaacaattcggttactgcacataacctgggcagaaggcatcaacagggggaagtttggttatggttcatcagcccattcttttcccactggaaattttttcaaatcttggtcaacttccgtggatccaacatggagagttttctgctattcatcatctgaatcgttcaatcatatttctccagaaactttgtgggagaggatctcaagccagctatctcgtaccttcaacctgaagaattgaactttgtacacgatgctctgaagagttggcatatgaggcacataatgggcagaaacgccgaagtggggaacctttcattattcatcctgttgaagttgctcgtatccttggggagcatgaacttgactgggaatcaatagctgctggtttattgcatgacactgttgaagatacagacatggttacttttgaaagaatagaaaatgagtttggtgtaaccgtacgccgtattgttgaaggggagacaaagaggtatctaagctaggaaaacttcagtgcaaaaatgagggtaattcaaaacaggacgtcaaggctgaagatttaagacagatgtttcttgccatgacagaagagaggttcgtgtaatcattgtgaaactggcagacaggctgcataatatgcgtacactcacacatatgcctcagcacaagcaggcagtatgccattgccatggagacactgcaggtttttgcacccctagctaaacttctcgggatgtatcgaataaagagtctgagctagaatatctgtccttcatgtacatgaatcctggtgatttcgctgaactaaagaaaagagttgaggacctctacaaggcccatgaacaagaattggaagagaggcaaatcaaatcttaggggaaaagattgctgaggatcaatttcttgatcttgttagtgttgaaacacaagtgcgttcagtctgcaaagaactctacagcagcatttataaaactgcgctgaagtccaagagttcaataaatgagataaatcaggttgcacagcagctgcggatcatcataaagccaaaatcctgcaatggtgtggggccattgtgcactgcacaacagcagatctgctaccatgtccttggtcttgttcatggtatctggacacctatacctcaagctgtgaaagattacattgcaaccccaaagcctaatggataccaaagtctacacacgacagtgataccatttctgaatgagagtatgttccatttggaagttcagcagataagaacagaggatatggatctcatagcagaaagaggcattgctgcgcactacagtggaagaggggttgtttcagggcctgttcgtcctggaatatcaagtggaaggaattcaaatgggaaagtgatatgtctgaacaatacaggctttgctctgagggattggttggctcaatgcaatccgtgaatggcaagaagagtttgttggtaacatgagttctagggaatttgttgatactatcacccgagatcttctgggaagccgtgtctttgtgtttacaccaaaaggcgagagattaaaaacttgcctaagggggccactgtggttgattatgcttacctgattcacacagaaattgggaacaaaatggtagctgcaaagaggtgaatggcaatctagtttcaccaatccatgtacttgcaaatgctgaagttgtggagattataatttatgataaattatctgctaaatatgcattccagcgtcaccagcagtggcttcaacatgcgaaaactcgcagtgcaagacacaaaattatgaaattcttgcgggagcaagctgctctttctgctgctgaaataactgccgacgccgttaataactttgttgccgatcttgaagatgaaagtgactatgagcagtcgattccaagctctgaaaataaggactatacattcaactggcagaagatattgaattctgacaaactatcctttggaaacaagaagagcgactgctttttacctgttaaaaatgtctctgtgccaaaggttaatgggaagcacaacaaaactgtcaaagaactgggcatcaaaattaatggttcaacatttcgtggtgatagcttcactgattttattcaccctggtgtttccagcagtaaagaagttctccctagtgtggataactggaaagctggtaaaatttgtgcgtggcacaatacagaaggcagctctatccaatggctctgcatagtgtgtgttgatcgaaaaggtaggtatggttgcggaagtttcatcagctctaacagcgtgtggaatcaccatatgctcgtgtgtgggcggagcgagataagagaaggggaataggtgtgatgttgttccactttgagggggcatatgagaatgtggtggtcagtgcatgctccggtgttgatatgattcttggggttcttggttggtccgttggatgcagctgtaa

SEQ ID NO: 419 - DNA, 2139 bp, Oryza sativa
gaggatagggataaggttagggagtcattggatgaggtgttggagaaggctgagaagctcaggaagacaaaaacacttaagagcgtatggcgaaagggaaaccctgtgtcaactgtacataaggtgcccatcctgattgataaatttgcttccaataaaccaatagtggatccagttgtagctgcagcactgatagaacctgtaaagccagtacgaggcccaccacgcaaggggaggagatggagcaaggcaaaacgcagagctgcaagacttcagcttgaggcttcacaagttgaagagccagttagagtcgagatccttgaagttggtgaagaaggaatggtaattgaggaattggcatatcaattggcaattgacgaatcagaaattctgcgatttttatctgtgagaggagctatgcttgacaatgttcagacacttgataaagatctggttaagatggtttgtatggaatatgatgtagaagtactggaaagtggtccagtgaaagtggaagagatggcaaagaagaaggaatttcttgacgaggaagatttggacaagttggaagacagaccccctattgtaactatcatgggccatgtcgatcatggaaagactaccctgttggattatatacgcaagagcaagggtggtggcatctgaggctggcggaataacacaagggattggtgcctatcaggttattgtacaggttgatggaaaccctcatgcttgtgtttttcttgatactccagggcacgaggtatagcaaaagcatttggtgcaatgagagctcggggtgctagggtaactgatatctgtatcattgttgtctctgcggatgatggtgttcgtccacaaacaaatgaggcaattgcacatgcaaaggcagctggagtccctattgtgatagccataaacaagatagacaaggaaggagctaatgctgaacgggtcatgcaagagctttcccaaattggacttatgccagaggcgtggggtggtgatatcccaatgattcagcagataagtgctcttaatggagagggtgtagatgaactattggagactatcattcttgttgctgagctgcaagaattaaaggccaatcctcatagaaatgcaaagggtacagttattgaagcatgccttgacaaagctaaaggatctcttgccaccctagttgtacagaatggaaccctaaacaagggtgatattgttgtgtgtggtgaggcttttggaaaggataaggctgggccatccaatgccgtgcaggttcaggttattggcttgaataatgtaccccttgctggtgatgaatttgagtctgtggacaaccttgatgttgcacgtgaaagggcaaacgcacgtgctgaagcactgagaattgaaaggatatcttcgaaagctggggaagggaaagtcactctgtcatccattgctgcatctgtttcatctggaaaacaagtaggaattgatacacacgagcttaatatcatccttaaagttgattttcagggttcagttgaggccattaggcaagcaatccaagtgctgcctcaagaaaatgtctccttgaggttcctacttcaagctccgggagatgtgagtgtcagtgatgttgatctggctgttgcttcagaagggattatatttggttttaatgtcaaagctccaggatcagttaaaagctatgctaagaagaaaagtgtggaaattcgtctgtacaaggtgatctatgatttgattgatgatttgcggaatgccatggaaggacttcttgaacttgctgagccaattggttcagccaaagttcgtgctgtttttagtagtggcagtggcaaggtggcgggttgcatgattactactgggaaagttgttcatgactgcaatgttcgggttcttcgtaaagggaaagaagtttatatgggtacacttgattcgttaagacgggtgaaagaaactgtaaaggaggttggtgctgggctagagtgtggcattggggtagatgattttgacgaatgggaggaaggtgatgtcgtggaggcattcaacacagttaagaagacaagaaccctagaggaagcctctgcttctgtgactgctgctctaaaggatgccggcgtccagctgtag

SEQ ID NO: 420 - DNA, 1694 bp, Oryza sativa
  N_region (15)..(15): n = any nucleotide
gccatcgcgtcgccnaactcggtgctcagcgagcacgcgttcaagcggctgcagctcagcgacgagctcgccattgccaggctcggcctgcccgagcagctcgtatccacgctcgagaagcgcgggattacccacctgttccccatccagcagagggctgtattgattccagctcttgacggccgtgacctgattgctagagcaaagacaggaaccgggaagacgctagccttcggcattcccatgatcaagcaattaatggaggaggatgatggacggagtgtgagtttggtaggcgaggtcgtattcctcgtgttttggttctagcacctactagggagttagccaagcaagttgagaaggaaataaaagaatcagcacccaagctcagtacagtctgtgtttatggaggtgtctcatataatgtccagcagaacgcactctcccgtggtgttgatgttgttgtaggaacacctggtcgcattattgatttgataaatggcggaagtcttcagttgggagaagttaagtacttggtccttgatgaggctgaccaaatgcttgcagttgggtttgaggaggatgtggaaacgatattacaacagctaccagctgagaggcaaagcatgctcttctctgccaccatgcctggttgggtgaagaaattatctaggcgatacttgaacaatcctttgacaattgacttggtcggcgatcaagatgaaaaacttgctgaaggaatcaaactttatgctatcccgctcacatctacatcgaagcgcactgttcttagtgatctcattacggggaaaaccattgtgttcaccaagacgaaaagggatgcagacgaggtatcattagcactgacaaacagtattgcttcggaggcactgcatggtgatatttcacagcatcagcgtgagaggacactaaatggttttcgtcaaggaaaatttactgttctcgtagcaaccgatgttgctgcccgtggtcttgatataccgaatgttgatttgatccattatgaattgcccaatgatccagagacttttgttcatcgttctggacgcactggccgagctgggaaagcaggaactgcaatcttgatgttcacaaacagccagagaaggacagttagatcacttgagcgtgatgttggatgcagatttgacttcataagtcctccagcaattgaggatgtgctggagtcctctgctgaacatgtcatagctactttaagaggtgtgcacacggagtcgattcagtacttcattccagcagctgaaagactgcaagaagaattaggacctaatgctcttgcttctgcattggcacatctgagtggattttctcagccaccctcttcacgttctcttatcagtcatgagcaggggatgggtgactttgcacaaggtgcagttttcgatttacctgaggagattgcgagggatttgcttagtatggaactgcccccaggaaacaccataaccaaagtgacaaagctacctgcattacaggatgatggtcctgctactgatagttatggccgattctcaaactcggaccggggtttcaggaacagacggtccaggggtggtggctcaagaggcgggcggggtggtaggagcttcagtggtgcttgcttcaactgtggcgaaagcgggcaccgagcatcagactgcccaaacaagtag

SEQ ID NO: 421 - DNA, 1624 bp, Oryza sativa
atgctgctggcggcggcgagcgcgtcgcggccgtcgtcgtcgctggaagggttccagccgctgtcgaagatcgccgtccacaaggccaccccttccgctgacgactggattgctgtcttctctccggccgatttccaattcgcaaactactcggcgaactacgtgtactggggcaagggcagcatccggttccagctcatcaaccagcgctacgacttctccttcgccctgttcaccggcggcctggaaaaccctaagctggtggcggtgtcggaggcgatatcgttcaagaaccccaaggcgccggtgtaccctcggctggcgcagggcaagtcgtacgacgagatgaccgtcacatggaccagcggctacgacatcagcgaggcgtacccgttcgtcgagtggggcatggtcgtcgccggcgccgccgctccaacccgcaccgccgccggcacgctcaccttcaaccgcggcagcatgtgcgggtgagccggcacgcactgttgggtggagagaccccgggttcatccacacagctttcctgagagacctgtggcccaacaaagagggcatgaactttctgacggatcaattgtctggggcaagcaatacactttccgggcgccacccttccctggccagaactcgctgcaacgcatcatcgtcttcggcgacatgggcaaggcggagagagacggatcaaacgagttcgccaactaccagccaggatctctgaacacgacggacaggctggtcgaggatctggacaactacgacattgtcttccacatcggtgatcttccgtacgccaatggctacatctcccagtgggaccagttcaccgcccaggtcgcccccatcaccgccaagaagccctacatgattgcaagagcggtaaccatgagagggactggcccaacaccggagggttcttcgacgtcaaggactccggcggcgagtgcggcgttccggcagagaccatgtactactacccggccgagaatcgagccaacttctggactacgggatgttccggttctgcatcgcggactcggagcacgactggagggagggtaccgaccagtacaagttcatcgagcagtgcctgtcgacggtggaccggaagcaccagccgtggctcatcttcgcggcgcaccgcgtgctgggctactcctccaactggtggtacgccgaccagggctccttcgaggagcccgaagggagggagagcctgcagcggctgtggcagcgccaccgcgtcgacgtcgccttcttcggccacgtccacaactacgagcggacgtgcccgatgtaccagagccagtgcgtctccggcgagaggcgccgctactccggcaccatgaacggcaccatcttcgtcgtcgccggcggcggcgggagccacctctcggactacacctcggcgatccccaagtggagcgttttcagggaccgggacttcgggttcgtcaagctcaccgcgttcaaccactcgtcgctgctgttcgagtacaagaagagcagcgatgggaaggtgtatgactccttcaccgtggagagggattaccgcgacgtgctcagctgcgtgcacgacagctgcctccccaccacgctcgcctcctga

SEQ ID NO: 422 - DNA, 1527 bp, Oryza sativa
atggaattctcctcgagttcaacgtctctcttcctcctcctctctatcctgcctctcctctactttctttgccagcgccacgaccccaagaagcagcctcacgcccatgggctcaagtcctaccccgtcgtcggcacactgccgcacttcgccaagaacaaggatcgcttccttgagtttataaccgaaatcatgaagcggagccccacgcacaccttgtcgttcaaggcgctcggcctcaccggcggcgtcatcaccgccaacccggccaatgtcgagtatacgctgaagactaactttggtaactaccccaagggcgagctcgccgtgtccatgctcgtcgacttcctcggccatggcatcttcaactccgacggcgagcagtggcagtggcagcggaaggccgccagctacgagttcaacaagcgctcgctgaggaacttcgtggtggacaccgtcaggtccgaggtcgtcgagaggctgctgccgctgctggagcgggcggagcgcgacggccggacgctggacgtgcaggacgtgctggagcgcttcgcgttcgacaacatctgccatgtcgccttcgacgaggacccggcgtgcctcgccgaggacagcatggcctcgccccagagcgcgaagttcatgcgcgcgttcagtgacgcgcagaatgccgtgatggaccggttcatgtcgccggtcaagtcgcggtggcgcttcaagaggctgttcaacatggagcccgagaggcagatgcgggaggcgctcgccacgatccacggcttcgccgagcggatcgtccgggagcgcagggagagaggggaggccgggctggcgcgcagtgacgacttcctgtcgcgcttcgccgcgagcggcgatcacagcgacgagagcctccgtgacgtggtgaccaacttcctcatcgccgggcgcgacacgacgtcgacggcgttgacctggttcttctggctactgtccggccggcccgacgtggaggacaagatcgtacgcgagatccacgcagtgcggcgcgcttccggtggcacaggcgacccgacgttcaacttggacgagctgcgtgacatgcaatacctccatgccgccatcaccgagtccatgcggctgtacccacccgtggccatggactcgcacagctgcaaggaggacgacttcctgccggacggcacgttcgtggggaaagggtggtttgtgtcctacagcgcgtacgcgatggcacgggtggaggacatctggggcgcggactgtgaggagttcaggccagagcggtggctagacgaggccggcgcgttccggccggagagcccgttcaagtacccggttttccacgcggggccgaggatgtgcctcggcaaggagatggcctacatacagatgaagtccattgtagcatctgtgcttgagaggttcagtctccggtatgccggtggcgagggacacccggggttcgtgctctggttgacgttgcgcatgaagggcggtttaccgatgcaagtgaccactagaggttga

SEQ ID NO: 423 - DNA, 1456 bp, Oryza sativa
gtgcgggcagagatgtttgggcagctcacgaccgggctggagtccgcgtggaacaagctgcggggaacagctgacgaaggacaacatcgctgaaccaatgcgggatatcagaagagcacttttggaggcagatgtgagtttgccggtagtgagaagttttattgagtccgttactgaaaaagctgtaggcactgatgtgattcgaggtgtcaagcctgagcaacagctggtgaaggtgaatgatgaacttgtacagttgatgggtggggaggtatcagatttggtgtttgcaaaaactgccccaacagttatcctattggcgggtctacaaggtgttgggaaaactactgtttgtgcaaagcttgcctattatctaaagaaacaggggaagagttgcatgctgattgctgcggatgtctacaggcctgctgccattgatcaactcactattctggggaaacaggttggggttccagtttactctgaaggaactgaagctaaaccttcacaaattgccaagaatggcataaaggaggcaaaaagcaagaaaactgacgtaatcatagtggatactgctggaaggctgcagagataaagccatgatgagtgagttgaaagagcctacagaagttctacttgtggtggatgccatgactggacaagaagctgcatgcattggttagcaccttcaatgttgagattggtattactggtgctatactgacaaaactggatggtgattccagaggtggagcagcactaagtatcaaagaggtatctggaaagcccatcaagtttgtagggcgaggagaacgcatggaagatcttgagcctttctatcctgatcgtatggcacaacgaatcttgggaatgggagatgtactttcatttgttgaaaaggcacaggaagtgatgcgtcaagaagatgctgaggaattacagaagaagatcctgagtgcaaaatttaacttcaatgacttcttgaagcaaacacaagctatcgcacaaatgggttcatttagtcgtataattggcatgattccaggcatgaacaaggtggttacccctgctcaaattcgtgaagcggagaaaaaccttaaatttatggagtccatgatcaacgtaatgacccctggaggaaagggaaagaccagagctacttgctgaatcacgcgagaggaggataagagtggccaaggaatccggaaaaaacgaacgacaggttgtgagccaattggttgcgcagctcttccgaatgcgtgctcaaatgcagaaaatgatgggtgctatgcaagggcaagacacccctgatatggaaggcctcatggattccatcaaggcagaagagcaggtaaaggcacctcctctatcacagattccaacaagttctgctgcttttttttttctcagaacaattacttgggccttggggcatgttcatttgttcttctgttga

SEQ ID NO: 424 - DNA, 1360 bp, Oryza sativa
  N_region (9)..(9): n = any nucleotide
  N_region (38)..(38): n = any nucleotide
  N_region (100)..(100): n = any nucleotide
acagtggtncccatggtgcacgacaccggcggcgggcnagcgtcgtcgacggcgtgccactactcgccgtcgctggtggcggcgaacccgaaggaccacntcaagggccgctccaaggacgctttggaacaacacgcaccagggaagaagctaccagctgaagagagggaagagagtgagttcgacatctatctgagagatgataaaagccatgtcctttaccatccagaattcaggtacagcaggtgttcgttagatcgacgaggttactcgagaggagatccaagcggcgttatgctcctcgagcatcgatcgctgatgtttcctgcagcgctgacaattcgaagaagaaagagaaatcaaagaagtatggcagagttcttgaaccagatgagcctttcaagctgttcctaagagatcgggagacgacggaattcctgacagcaaaagaggagagacatttgttcagtaaaatacaggcaaagccttacttttaccctgtcatctttattttcagaactgctcagcagattcttatgaaaatagaggaggctcaccggaaactagaagttcaatgcggccgtgagccgacattggcagagtgggctgaggctgtagggatgagcagcaaggagctgcagtcctctattcgcaccggaagacggtgccgggagaagatggctcgatcgaacttcaggcttgtgattcatgtagctaggaaaggatggatgcagtgggttgatgaagacctttgagaagttcaatcccagcaaggggtgtcgattcccgacctacgcatattggtggatacgccaatcaattaagaagtcaatcttcaagaactcaagactaatccggttaccgttgcaggagagtgtgtatgcgcttctgagaaaggtgggcaaggcaaggatggaatgcatcatggaaggggagcaacccaccaacgcgaacgtagcgaggcgcgccggcatcaccatcgagaagcttgcgaagctccgagcgaaaacccggaaacccccggtcgatgcaggatcatgtctggtcagatgagggtgtcaccttccagcaggagatcacagaagacccaaatgtggagccacctgacctgagtgtggacaggatgatgatgaggcagcaggtgagggacttcctggggatcctgagccccagggagaaggagatcatcgagcaccggttcgggatccacgatggcgagccgaagacgctacatgtcatcggggacatgtttgggctgtccaaggagaggatcaggcagctgcagaaccgggcgctggagaagctcaagaggagtgcatccttgcaggggtttgatgtctactttgatttgctaacctga

SEQ ID NO: 425 - DNA, 1327 bp, Oryza sativa
atggcggtgacgatccagtccgtgaaggcgaggcagatcttcgacagccgcgggaaccccacggtggaggtggacgtgggactcagcgatggcagcttcgcgaggggcgccgtgccgagcggtgcttccaccgggaatatatgaggccttggagttaagagatggaggatccgactatcttggcaaaggtgtactcaagttggcaggctgtgagcaatattgataacttcatggttcaacagcttgatggaacctccaacaactggggctggtgcaaacaaaagaaacaatgacagcttggagcaaatgctattcttgctgtttcacttgctgtgtgcaaagcaggagccatggtgaagaagattcccctttaccagcagcacattgcaaatcttgctggaaacaagactctcgtgctgcctgtacccgctttcaatgtgatcaatggaggatcccatgctggaaacaaacttgccatgcaggctgtacaggagttcatgatcctccctactggtgcatcctctttcaaggaggccatgaagatgggagttgaggtgtaccaccacttgaagagtataatcaagaaaaagtatggccaagatgccacaaatgtgggggatgaaggtggctttgctcctaacattcagcaggaaaacaaagagggcctcgaactgttgaaggccgcaatagctaaggctggctacacaggcaaaaggtggtcataggaatggatgttgcagcttctgaattttacagtgaaaaggacaagacttacgatcttaacttcaaggaggataacaacgacggttcacacaaaatttcaggtgacagcctgaaagatgtgtacaagtcctttgtttctgagtaccctattgtgtcgatcgaagatccattcgatcaggatgactgggctacctatgccaagcttactgatgagattggacagcaagtgcagattgttggggatgaccttcttgttactaatcccacaagggttgccaaggcaattagtgaaaagacttgcaatgctcttctcttgaaggtgaatcaaataggctcagttactgagagcattgaggctgttagaatgtccaagcgtgctggatggggagtgatggcaagccataggagagtggtgagacagaggataccttcattgctgacctctcagttggtctgtctacggggtcaaattaagacaggagctccctgtcggtcagagcgtctggctaaatacaaccagcagctgctcaggatagaagaagagctgggcgatgctgcagtttacgctggagaaaaattcagagcccctgtggagccgtactaa

SEQ ID NO: 426 - DNA, 1323 bp, Oryza sativa
atgggggagtgcaaggtgggaggaggaggcggaggcggagactgcttgatcaagctgttcgggaagaccatccccgtgccagagcccggcgcctgcgccgccggcgatgttgataaggaccttcaacacagtggcagcagcacgactgaaccgaaaactcaagagaacaccgttcaagactccacaagtccacctccgcagccagaggtcgtcgacaccgaggactcttcagctgataagaactcatcagagaatcagcagcagcagggcgatacggccaaccagaaggagaagctgaagaagcctgacaagatcctgccgtgcccccggtgtagcagcatggacaccaagttctgctactacaacaactacaacatcaaccagccgcgccacttctgcaagaactgccagaggtactggacagcgggtggtgccatgcgcaacgtgcctgtgggtgcaggccgacgcaagagcaagagcgtatcggccgcttcccatttcctccagagggtcagggctgctctgcccggtgatcctcctctctatgccccagtgaagactaatggcaccgttctcagcttcggctccgacctgtccaccttagacctcacagaacaaatgaagcatctaaaagataagtttatcccaacaaccggtatcaagaacaccgacgagatgccagtcggtttgtgtgctgaaggattgtcgaaaacagaagaatcgaaccaaacgaacctaaaggagaaagtttcagcagatagatctccaaatgttgcacaacacccatgcatgaacggaggagccatgtggccatttggcgtggcaccaccacctgcttattacacttcaagcattgcaattccattctatccagctgcagcagctgctgttgctgcatactggggctgcatggttccaggagcttggaacgctccatggccaccgcagtcccaatcccaatcggtttcatcatcaagtgctgcttctccagtatccacaatgaccaactgcttcagattaggaaagcaccctagagatggtgatgaggaactggatagcaagggtaatggcaaggtgtgggtgccgaagacggttcggatcgacgatgtcgacgaggtggccaggagctctatctggtcgcttattgggatcaagggtgacaaggtgggagcagatcatggcagaggatgcaagcttgcaaaggtttttgagtcaaaggatgaggcaaaggcatcaactcacacagcgatcagcagcttgccattcatgcaggggaacccggctgccctaacacgctcggtgaccttccaagagggatcttga

SEQ ID NO: 427 - DNA, 1239 bp, Oryza sativa
aagaattcatttagctggaaagaatatgcaatttctgtagcattatcggctggattaatcactggcgcaccaacgttaggatggccagcacatgcttctcctcttgaaccagtgatcccagatgtttcagttttgatctctggacctcccattaaagatcctggtgctttattgagatatgctttgccaatagataataaagctgttcgtgaagttcaaaaaccactagaggatatcactgacagtcttaagattgctggtgttagagccttggattcagttgaaagacaagcatcgagggcactgagtaatgggaggaacctaattcttggcggtcttgctgaatccaaaagagcaaatggggaggaattattggataaattggctgttggacttgatgagcttcaacggattgttgaggacagaaacagggatgcagtagctccaaagcagaaagaacttctccagtatgttggaacagtgtagaagaagatatggtcgatggattcccctatgaagtgccagaagaatacagcagcatgcctcttctcaaaggaagggctaccgtggacatgaaggttaagattaaggacaatcctaatttagaggattgcgtatttcggattgttctggatggatacaatgctcctgtgactgctgggaacttcttagatctggtggaacggaagttctatgatggcatggaaattcaaagaggatggttttgttgttcaaactggcgatcctgagggaccagctgagggatttattgatcccagtactggtaaagttcgtacaatacctcttgagttaatggtcgatggtgacaaagcgcctgtatatggtgaaacacttgaagaacttggccgctacaaggctcaaacaaagcttccttttaatgcatttggaacaatggcaatggctagagatgaatttgatgacaattctgcttctagccaaatcttttggttgttaaaagagagtgagctaacaccaagcaatgccaatatactggatgggcggtatgccgtatttggatatgtcaccgagaacgaggactacttggcagacctcaaggttggggatgtcattgaatcgattcaagttgtctcaggcttagacaacctcgccaacccaagctataagattgtaggataaaatgtttctttttttcaggagttccttgataggcaattattttaccatattgaaatcagtgtaaagtgctataatctctaa

SEQ ID NO: 428 - DNA, 1031 bp, Oryza sativa
ctcctcggcctctccgaaccggatctccggcagctcgccgtcgacctcggccagtacagggggaagcagcttcacgacctcctctacaagtccagggccaagcaaatccaagaatttagccacgttccgtgaggccttggtcggcgctggctggaaggttggccgctcgccagtgcaccatgctgtgacggcctccgatggcactaccaagcttctcaagttggaggataacagattgatcgaaacagtagggatccctgtcgatgatgacaaaggcccgtcaagactcactgcctgcgtttcatcacaggtgcaggttggctgccccttgcgttgctcattttgtgccactggcaagggagggtttgcaagaaaccttcatgcacatgagattgttgagcaggttgtctctccacaacccacctagtacagcgtttatgtacaaaaaagttggccatagaggagacgttccaacacagggtgacaaatgtagtgttcatggggatgggtgagcctatgttgaacctgaaatcagttttagaggcacatcgatgcttgaacaagggtgttcccagcactataaaaaagttagcatctcacaagcttcagtcaacacttggaaagcctgcacgccccaaatcagaaactacgggaaacaattgttccaagtgcaaagtcatatcccttggaggcactaatggatgactgcaagaattacttcctcgaaactggctgggattaatgacgcaaaggagcatgctgaagaacttgcagagctactgcatacatgtggcggtggttatcatgtgaacctaattccttataatccgattcaaggttctgaatacaagaggccctacagaaaagtggcgtttgttgatgcgctagaagctcggaagataaccgtaagcgttcgacaaacccgtgggcttgatgctaatgccgcttgcggacaactaaggaatgagttccagaagaatccactgcttgaatcatcaccttcatcagagcccaacctcgtaccagcttga

SEQ ID NO: 429 - DNA, 913 bp, Oryza sativa
gttgaagaagctgagaccattgtaaagcttactgaggagttagattccatagatactggccttcttgaagaagcctcaaagatcataaaggcattaaacaaagcactagataactttgagatgacacagcttctttctggaccttatgacaaggaaggtgctgtgattaatattactgcaggtgctggtggcaccgatgcccaggattgggctgacatgttactgaggatgtatgttaggtggggagagaagcagcggtacaagacaagagtggttgagaaatcccctggtgaagaagctggaataaaatcagctaccattgaattagaaggaagatatgcctatgggtatctctctggggagaaagggacacacagaattgttcgtcagtccccattcaatgctaaagggcttaggcagacaagctttgctggtgttgaagtaatgcctctactgccagaagagtccatggatgtagaaatacccgaagaggatctggagataagcttcactagagcaggcggcaaaggaggccagaatgtgaacaaggtggagacggctgttcgcatggtccatatacccacgggcatcgctgttcgttgcacaggaggagaggagccagttggccaacaagataaaggccctgagccggctgaaggcgaagctgctggtgatcgccgaggagcagcgggcgtcggagatcaagcagatccgcggcgacgcggtgaaggcggagtgggggcagcagatccgcaactacgtcttccacccctacaagctcgtcaaggacgtccgcaccgcctgcgagacgtcggacatcaccggcgtcatggacggcgagctggacaccttcatcagagcctacctcaagtacaagctctctgccgctgctgaggagcaaagcgtcaagtga

SEQ ID NO: 430 - DNA, 912 bp, Oryza sativa
gtcggtgacctccacggtgatctaaaccaaacgagggcggcgctagtgatggctggtctcctgagctcggaatcggatggccatgtgctggttcaagttggagatatccttgaccgtggcgaagatgaaatcgcgatactatctctcttaagttcactgaatatgcaggcgaaatctcaagggggtgctgtgtttcaggttaatggaaatcacgaaaccataaatgtggaaggcgattatcggtatgtagatccaggagcatttgacgagtgcatacgcttcatggagtatttggatgaatgtgatggcaactgggatgatgcttttctcaactgggttaatgtttgtgaaagatggaaggaagaatatccaatgtcacctaatggtgactggcgtccttggaactttgtcaagttgaggcagaagcagaaaggtattgctgctagatcatcacttttcaagcgaggtggcccgttagcttgtgaattggcgcgacatcctgttgtgctaagtgttaatgactggatcttttgccacggcggccttcttcctcatcatggtcgaatatggtatcgagcgtatgaacagagaagtttcggtttggatgaaaagttcaagtggagacagtgatgatgaattagatatccccttcatagcaactagaggttatgacagtgtagtatggagtcgtttgtactcacaaggccctacggaaatgacgcgtcattcctggaagacactgaaatctgtgggagcaaaagggatggttgtagggcacacaccccagactcgtggagtgaattgtggtgtgttgatgtgggcatgtcttatggtgttctctattcaaggccagaggtaaactttcgttttgcctggaaatttggtatgccttggttcttcatagacatttag

SEQ ID NO: 431 - DNA, 853 bp, Oryza sativa
  N_region (37)..(37): n = any nucleotide
atggcgaaacccgcgccgctctccggcctccgcccgngcgctcccgctcccgctcccgcggcgcgcagtcgcctgtgcggccagtcgccgccggtcgtggccccgcggctcggggcgttcccgcggcggcgtggtggggcggcacggtgctcgccgcgcgccgaggccggggacgtggaggcgcttagggcgggggtgtcggtgtacaagccgcggtcctacgacgtgctcgtctccgacgccgcccgctccctcgcctgcgccatggacgagggcaagacccgcctcgagatcgagttcccggtgtttcctgacctaccagaaaagcgcagggcatcccagttgttcgggactgctctagactcgtatcagttccctggatgaggtatctaccggacctgttaataccttcttcagatcaatgagagataccctggattttgactttgctgacgatgttgaaggaaccaccatcgctatatatcttcatcaattgcagcacacgtgacctttcaactatagagaagtatgtggaacaatttgcctcatctgtcccagcccttctctttaatcttgaactagataccttgcggacttggggcttctgggattcccaccaaaagatttgcattacagatttctttctcagtttaccccagtattttatatcaggcagcgtgactactctaaggggccctggcaggtcatgcttaagcaagccgatggttcttatgcatgtgttgcagagagtgcagctcggttcactttgggacagaaggaagaactgttaagagttcttggtttgcaagaagaacaaggaagctcactagaatttctcagaagaggatacaag

SEQ ID NO: 432 - DNA, 845 bp, Oryza sativa
  N_region (427)..(427): n = any nucleotide
  N_region (429)..(429): n = any nucleotide
  N_region (432)..(432): n = any nucleotide
  N_region (435)..(435): n = any nucleotide
  N_region (437)..(437): n = any nucleotide
  N_region (439)..(439): n = any nucleotide
atggcggccacggctgtgaccctgccgtcctcgccggcccccttccccgtcaccaccaccgcctcctcctcccgtaacgtccgcctcctcctccgctccccgcctcctcgccgagccctccgcgtcgccgcctccgccgcggccgacgcgccacccaagccggcgccgccgccgacctcgccttcgggcatcgtcctcgtcgaccccaccgaggcacagaaggtgcaccgcctcaaggctgtatacgaccagaaggtggtccccctcatcaccgaggagttcggctacaccaatgtccaccaggtgcaggtgcccaaggttgagaagattgtagtgaattgcgggttgggggctgaagccggtaactccaaggggctcgaatccgccatgaaggacctcgccatgatcaccggccagtggcccgtcnangangangncnagaagtcctcgccagtttcaagatccgcgagggaacaccattggtattgccgttacgctccgcggcaggggtaatgttcaacttcctggataggctcatcaaccttgggcttcctaggaccatggacttccttggtgtcaaccccaacagctttgatggccatggcaacttcaccataggccttcgtgatcagggcgtgttcccggagatcccgtacgaggtcggtgggaagaagaatggaatggacgtctgcatcgtcaccaccgcgaagaccgacaacgaggctctcaggctgctcaccctccttggcatgccgttcgcggagcacatcaagtcctccgtggtgatccggaagaagaggttgaagcgccaccacttcatgagcaagggcaggggaagacggtga

SEQ ID NO: 433 - DNA, 776 bp, Oryza sativa
  N_region (370)..(370): n = any nucleotide
atggcgcagcaggcaagggcgcagtggccgcagaagcagaacaagctgttcgagcaggcgctggcggtgtacgacaaggagacgcccgaccggtggcacaacatcgcccgcgccgtcggcggcggcaagtcggcggaggacgtcaagcgctactacgagatgctggaggaggacatcaagcacatcgagtccggcaaggtccccttccccgcctaccgctgccccgccgccgccggctaccaggccgaaaggtataagccggccaagcaccgccgctgagccctcccgcctccccctctcggattccggcctctccggtatccgacccacccagtacccacccgatggcgagctttcaccgccccgccancgcctccgccgccgcgggaaccaaccgatacctagttacaagccctcgccgtcgcgcgaaggcattttctactgggaggtggtggttgcggcgctcaaatcaaggggaaccggagccacctcgactccgtggattcgtcttctcctacccggcctaactggtgactgctgtcagtctgtcggctactcggatctagtggttgctttgatgcctggatgcttagcactgctcgtttgatggtggtgaatacctattggatgagctacctcacacgatcaccagaattccacctcaatttccctcatattaacttaaggaaatatgagtaggtagtgtgtgttcagcctggattcatgcaggaataacaacacaactattgttgaagaagtcttcaagtactaaatag

SEQ ID NO: 434 - DNA, 743 bp, Oryza sativa
atggcggcggctgcggcggagggcgcggcggcgaaggcgctgcgggcggtgctggggcgcgcggcgaaggcggcggagcggtcggggcgcgcggcggaggcggtgcgggtggtggcggtggggaagacgaagccggtgtcgatggtgcgggagctctacgacgccggccaccgctgcttcggcgagaactacgtccaggagttcgtcaccaaggcgccgcagcagcttccagaagatatccggtggcatttcatcggccacctgcagagtaacaaggtgaaatcactgttaggctgctgttccaaatcttcacatggttgagggtgtagataatgtaaaggctaaccaccttgatcgtgctgttagtagcttgggaagggatcctttgaaagttttggtacaagtaaacactagtggagaagaataaatctggtattgatccctccagatgcgtcgagcttgccaagcatgtgaagttagcatgcccacacctaatattttcaggtctcatgacaataggaatgaaagactactcctcaacaccagaaaattttaaggtttgtaaggccattgatatgccggcagaacagtttgaactctccatgggaatgtctggtgactttgagcaagcgatagagatgggtagcacaagtgtgaggattgggtcaactatttttggaccaagggagtatccaaacaaaaagaattgaagctatgtacattgtactcctgactccatgtaa

SEQ ID NO: 435 - DNA, 714 bp, Oryza sativa
atggccaccgcctcctcactcttcctcgcctcccccgtcgccaccgcgccgacagcccgcgcccggtccacaccctcggcttcccctgcccggccgtccctgcgcctccggcggccgtcaacgttggccgcggccgcggtccaggccgagcaccagcccgcggtcgccgcggcgccgaagccgccggcactcccgttccgcgtcggccacggcttcgacctccaccgcctcgagccgggcctccccctcatcatcgggggcatcgacatcccccacgaccgcggctgcgacgcccactccgacgggggacgtgctgctgcactgcgtggtggacgcgattctcggcgcgctcgggctgcctgacatcgggcagatcttcccggaactccggacccccgttggaagggcgccgattcgtcggtgttcatgagggaagctgtgaaactgatgcatgaagctggctatgagctggggaacctagacgctacattgatcttgcagaaacccaaaattagcccattcaaggagacaatacggtctaacttgtgtgacttgctgggggcggatccatccgtcgtcaatctgaaggccaagacgcacgagaaagtcgacagtcttggtgaaaacaggagcatagctgctcacactgtagttcttctgatgcggaaataggaaaatggaagtgtactacatattacaggaattgaattgtaa

SEQ ID NO: 436 - DNA, 690 bp, Oryza sativa
atgagctggctcgggaagctggggctgggcgggctggggggaagcccgcgggcgtcggcggcgtcggcggcgctggcgcagggccccgatgaggaccgcccggcggccgggaacgagttcgcgcagttcggcgccgggtgcttctggggcgtggagctcgcgttccagcgcgtccccggcgtgactcgcaccgaggtgggatacagccaggggaacctccacgacccgacctacgaggacgtctgcaccggcgccacctaccacaacgaggtcgtccgcgtccactacgacgtctccgcctgcaagttcgacgacctcctcgacgtcttctgggcgcgccacgatcccaccacgcccaaccgccagactctttgtatgcagggtaatgatgttgggacccaatacaggtcaggtatctactactacacccctgagcaggagaaggcggcaagagaatctctggagaagcagcagaagcttctgaatcggacgattgtcactgaaattcttcctgcaaagaggttctacagggcagaggagtaccaccagcaataccttgcgaaaggcggtcgcttcgggttcaggcagtctgcggagaagggttgcaacgaccccatccgttgctacgggtgaagggcaagtttgaaccagaacgccacacaagaacagtgcttgaataaggataaataa

SEQ ID NO: 437 - DNA, 675 bp, Oryza sativa
ggttatggccctgctggatatgctttatttgtactagtgtatgcaggattggagcttgcgattccagcgataccattaacaatgtcagcaggtctattgtttggtagtattactggtacagttattgtctcaatcagcgggacagtaagctgcagcagtggcctttcttattgctagatactttgccagagagcgaattctcaaattggttgaaggaaacaagaagtttctggcaattgacaaagcaataggtgaaaatggatttaaggttgttactctgctgcggcttagtcccctattacctttctctcttgggaactacttgtatggcttgacttcagtgaagttcttgccttatgtcttgggaagagttggttgggaatgcttccaggatcatgggcctatgtcagtgctggtgcatttggacgagctataattgagtcagagatcggtttgggaggaaacagccagctactgacactgggcatcgggctattattcacagccattgctgctacatatgtaacacgacttgcaaaggtattgacttgctatgatctatcacacatactgaacaaatgggattcggcagtatttgaacatatgcttatttcgttagtggtcactttgggtttcaatttctctttttcgaaagccaattctaactgttcttaa

SEQ ID NO: 438 - DNA, 673 bp, Oryza sativa
tattttcttgatgttgataccggaagcgacttgacatggatacagtgtgatgcaccctgcacaaactgtgcaaagcaatgtgactatgagatcacttatgccgatcggagctcctctatgggaatccttgcaagggacaacatgcaactgatcactgcagacggtgaaagggaaaatttggacttcgtatttggtgtggatatgatcagcaaggaaatcttttgtcgtcgccagcaaacactgatgggatcctgggcttgagcaatgcagcaataagccttcctacccagctagccagccaagggataatttccaatgtttttggccattgcatcgcggcagatcccagcaatggtggatatatgtttcttggtgacgattacgttcctagatggggaatgacatggatgcctatcagaaatggtccagagtgatatttgacagtgggagctcatatacaagaacaatatctgcctaggagtgttggatggaacagagattggtcatgactcagcgatagtaatcggaggatgtttcccttcgaggaaagctagttgtatataacaatgatgagaagcagataggatgggttcagtcagactgtgccaagccacagaaacaaagtggatttcctttcctctttaaaagagtgctgcaaaatcaacttttgtaa

SEQ ID NO: 439 - DNA, 660 bp, Oryza sativa
gtcgccgaagactactacgctgttcttggcgttccggatgcaacacctcagcagatcaagaaagcgtactacaattgcatgaaagcatgccatcctgatctcagtggcaatgaccccgatgtgacgaacttctgcatgttcatcaatgaagtttacacgcttaccgatcccatccagcgagcggtgtatgatgagattcatggctatgccgcaacagcaaccaaccccttcttcgatgacagtgcccctagggatcatgtgtttgtcgatgagtttagctgcatagacaggatgtaaaaactgtgctaatgtgtgttctaaggtcttcgaaattgaggaagattttggtcgggcaagagtttacaatcaatcaggcaatgccgaactaattcaagaagctattgacacttgccagttgactgcatccattggacatcagctgcacaactttcactccttgaagatgaaatgcgaagagtagaaagagtgaatcaggttggtttgatgctagctgggatgggaagttcagttgatgtgtttcggatggagagagcaaagcgagcagcggcggcagcgaggaggtggagagaatactcgaggaaaggtgcagacaagcctcccacattcaaacttccagaggcagtgtccaacaaggagtga

SEQ ID NO: 440 - DNA, 585 bp, Oryza sativa
tatgaggttggggagctatttgagcttggaattcagttgtcttatcttctcatactacttggtcttcttggagctggtacattttttgtcattcgtcaagttcttgtccgtagagagcttgatctttctgccaaagagttgcaggaacaagtgagaagtggtgatgcaagtgctactgagtattttgagcttggagcagtcatgctacggagaaaattttaccctgctgctatcaaatatctacagcaagcaatccaaaaatgggatagggatgagcaagatcttgcacagcaggtatacaatgccctgggagtcagctacaagcgagataacaaacttgacaagtcgatccagcaatttgagaaggctgttgagcttcagccaggctatgtgacagcttggaacaacctcggggacgcatatgagcaaaagaaagatctgaagtctgcgctcaaggcattcgaggaggtactcctatttgatccaaacaacacggtcgccaggccacgccgagatgacctaaagcagcgtgtgggcatgtacaagggagtcccagtgaagtcagaaaaacgataggtcctgtga

SEQ ID NO: 441 - DNA, 542 bp, Oryza sativa
aagacggcggccaccgacgggtacgacgccgtgcaggtggggtaccacggcgtccgcgaggagaagctcacccgcccggagctcggccacctcggcaaggccggcgcgccgccgctccgccacctgcaggagttccgcctccagtccgtcgacgggtacgaccccggccagccgctcgacttcgccgacatgttcaaggagggcgacctcgtcgacatctccggcaagtccatcggcaaggggttccaagaggtggcatcaagaggcacaacttcaagcgagggctgatgacccacggctccaagagccacagagctctgggatcgatcggtgccgggacgacgccgggtcgggtgtacaaggggaagaagatgcccgggaggatgggaggaaccaagaccaagatcaggaagctcaagatcgtcaagatcgacaacgacctgaaagttgtcatgatcaagggcgccgttccagggaagcccgggaacctcctccgcatcgctcctgccaagatcgtcggcaagaacatccccaagaactag

SEQ ID NO: 442 - DNA, 446 bp, Oryza sativa
atgcacgattccgtatttgatttacttcacttgagtttctttttctcccaggtcatactgacagatgacatagcagaggtggggaagaaaggggacacgctttaaagtgagggccgggttctaccgcaacttcccttctgccaaagggcaaggcaacgctgctcaccccagaagtactcaagtaaaagaagaggcacagcaacttgcccgtgtttttgaaactattggggcattcaaagtgccacgtaaaggtgggaaaggaaaacagatatttgggagagcgtcacagcacaagatcttgttgacatcataaagtcacaacttaataggtcgacaagcgtctcgtgacagtgccagaaattcgtgaaattggggaatacattgcagagattaagcttcaccctgaagtcacagctcaagtaaggctgaccgtatatgcgaaataa

SEQ ID NO: 443 - DNA, 1188 bp, Oryza sativa
atggatacaccgccgccgttgtccgtcaaggcctcaagagggccaagactgggttttcacccgatagccccactggaggtgaaggggcggcacgacaacgccctcaagaaggcctccggccttgctccgcagccatcaaactgctcacgccgtcgctgtcgcccacaacccaccatgcccgcatgcggccgtcgctctccttcttccccattgccggtcacctccttcctcgcctcctctctggctatcgccgtcgtcgacacgccagtccaccgcatcctcctcccgtgcgccggccgtgtcccatctccctgcatgccagcgcagctccagccggcttcgcgcccgccgctgctagcagccaccgtcgctgccgccagcaccactggtcgccgccaccaaaaccactcaagcccggctgccatcgccagccgccatccccgccagatccgaccggcgcagcgcggatctggtcggggtgctctgccgccgccgctgccaccactcagcccaaccgccagcctccaccccacgagatccggccagaatggcgcggatctggacggttgccaccaccgccgccccgagcaattgccccgaccaccggacgcacgctgggcgcagccccgccgccgccgtccttgcggccacgcggctttgcctacgcccgctcaggcggcggcgaggcagagaaggaagaagggggaggagggagttggcggtggcgtcacctctcgtgttgcccatgtggagagcgacacgagatcttatggtctttctattacatccacaaatgttttcttttcaaagatcatctctaaagctttgtggtctgtatggagtcgtcaatcccaaaaaaaaaagtacgatcgttacggcagatcggaattgtatcactgtttgcatgcacagttgcccttcactcgcaagctcaactcacgcaaattaaaccttatccagtattgtgctcatgctcggacgcaggcacctccactccatggatttgatcatcgctctgatactggcttcagtactagtgcacataatgacctgaaagtacataatgacttgaagggtgcattatgctcctttcccgatgccacacattctgaaatgatgattcaactcgatccatcagttgggtcaaaaccgaaccagtatattgctctgatgagtacatgcatataa

SEQ ID NO: 444 - DNA, 969 bp, Oryza sativa
gaaatttcatcatctagtttagaccttgttcgccaggaggcactgacaggtgggcccgccgccccagagggtggggcgcggtcacatgcgcgtgtcgtgtccacgctgtcgtcgtccccgccagttgtgcagacggcgaggaaccagatcggttgccgctgtctgctgcttcctgcccccagccggaaacagccgcagtcacacacacacgccgaccggtgggcccggcactccgtacgtctacgtattggcgcggtgcggcggtacgagtgtacgtatagctggccgtatcgcccacgtctttcccggatggctactgttaaccgccggaaagaacagagagccctcgcgatggacggtcgtgatcgcctgacaacccgatctaacggctcacgtgggagtttgccgacccgacccgaccggtcgaaccacccaagggtcgttttgggctttggcgcgcagacgatccggctcgggccggggcacggggattggaccgtggcgctgacaggtggggcccgcaaagagggtctggctggctggctattggacggcgcggatttgtccgtccggtgcccacagaatcgaacaaacaaacaagagctagtactagcagtcacagccgttggatatgatgaattagtgcagcagacgatagatagatacactagtaccaccaaatatgtacagtatatgtatacggatattaatctatccaggtccatgaacagtatgagaaaacagaaaactcacggcttcagagaagaaaagaaaagaaaacgctttgatacgatgagaagaagtagaagtagatggacatgtcaatggcgattcgagcatgagatgaacagtgtgaccatcgagcctctgcaggccattgcaatgcggttggttgcaagtgccatccaagtacagactacagagacagtcacagatatatacagcagcagaggcaaacatgaaaggtaa

SEQ ID NO: 445 - DNA, 498 bp, Oryza sativa
  N_region (73)..(73): n = any nucleotide
atgctccccggcgagctacgacatcagagtacacgagtacagaagtattccgacgagaaccaggaggaacagngagacatcgatgcaaatcttctcgaggagcatcgtgagcgagttgccgtccgagcagccagctatcaacagtccctccgccgttatcacgagaagcacatccgagcacgcatactttcgatcggcaactatgtcctccgacgagttcaagcccaagcagggcctccgaggaacctaagggatcttcggctggggacgcccagagccgataaggccttgttagatcctatagagacaaaagaccatgtaagatctggtcgtgtaagagttctcgccgtgcatattaaccaagccgtgaaatcggaaatcaactttccaacctcacggctgggggctaggatcaaagcttattcaaccaaggcaggtcaagggtccaagagccttatcctccgagaaaactcctccgacgacaaggttagggtctag

SEQ ID NO: 446 - DNA, 4773 bp, Oryza sativa
  N_region (35)..(35): n = any nucleotide
  N_region (84)..(84): n = any nucleotide
  N_region (114)..(114): n = any nucleotide
  N_region (4367)..(4367): n = any nucleotide
atgcggccgccgaacccgccaaggagccctcgggntccaaggctggctccgccgcggccacgggcgggcgccgcacgggtcccnaacgccgtcgcctgctccggtggcaaagangcggccaccaaggacgaagccgccgccgctgcggcggctgcggctgccaaggagtcctcggcctccgcggagctggaggccgagatgagcggcgcgtgcccccgcctcggcgccttctatgagttcttctccctcgccaacctcactccgcccctccactttataaggcgagtggcgcagcctcggcaggaggaacagccttcggatgatcatctcttctttcttgaggcatatgaagatcttatgaaggcatttttggaacgtaacaagtttggaaatttcccttatgggtttcgtgcaaacacatggctcgttcccccaattgctgctcaatctccatcaacatttcctcccctcccttctgaggatgaaacctggggtggcaatggaggtggttggggaagggatggcaagagtgacatgttgccatgggcagatgaattcttgtatctcacatccatgccttgcaaaactgctgaggaaagggaaatccgtgacaggagagcattcctacttcacagcttatttgtagatgttgccatctttagagctattgcagctgtaaggcatgtaatggagattaaggatgtatcagcatcagccaatatagatgaagttttgcattctgagacagtgggaaattttagcatcactgtcacaagagattcttcagatgcaagctgcaagttggataccaagatagatggtagccgagccacaggaatggacttcaagcatcttgcggagagaaaccttttgaaaggaataactgctgatgaaaatacagctgcccatgatgtggagagtttgggcattgtcaatcttagatactgtggtttgaggatgctgctcaatgatgccaattcaactggagagaaaaagacgttgaaccttccacaaaataataagcaggaagaactaattgcagcacattcttttgtggagaacctgttaaaggagagtcttcagaagctcgaagaagaggaaagtgaaaaacagtcctttatgaggtgggaacttggtgcctgctgggttcagcatttacaggatcagaaaaattctgataaggacaaaaagcaaggtggtgagaaggaaaagaaaaaggtggtagataaatctgcgaaggagacaaagattgaaggtcttgggaaacctctgaaagctcttaagcactcaaaaaataatgttgatgtcgctgacaagggatcctcattgggagaaaaaagcatgtgtgatggaacaagttctgcagaaagccaaaaattcaagccatcagctgttcaattgcctcagggagaatctaatgcctcagagaatgaaagcttgctgaaggatttattatctgattctgcctttacaaggttgaaagattcagaaacaggactccaccagaagtcaccgcctgagttgattgagatggctttgaagtactatgatgaagttgctcttcctaagctggttgcagattttggttccctggaactttcacctgttgatggtaggaccttgacagagattcatgcataccagaggcctacagatgcgttccttgggacaagttacatgcgacaattagcacttgcaatagctgcagcgctgaatttactgcttggtgttcctgagcctgaggtctttacaagttccgatggtgtgcgcccactagtatggaaatggctagtggccttcttgaaaaagagatatgaatttgagctcactgagcaacattaccatgatgttaggaaatatgctctcctgagaggactatgccataaggttggcattgaactggcaccccgagattttgttatggattctgctttcccatttcaaaaacaagacattattagcttggtaccagtacacaagcaagttgcatgctcatctgctgatggaaggcaactgctggaatcctctaaaactgcccttgacaagggaaaacttgaagatgctgtcaattatgggaccaaggctcttgctaaactcataacagtttgtggtccctatcatcgaatgacagctggagcttatagtctgctagctgttgtattgtatcacactggtgattttaatcaggctacgatctatcagcaaaaggccctagacatcaatgagagggaacttgggctagatcaccctgatacaatgaagagttatggagatcttgctgtgttctactaccgtttacaacatacagaactggctctaaagtatgtcaagcgtgcactatatctactgcatcttacatgcgggccatctcatccaaacacagctgcgacatatatcaacgtagctatgatggaggaaggcttgggtaatgtgcatgtagcacttagatacttgcacaaagccttaaaatgcaaccagagattacttgggcctgaccatatccagactgctgcgagctaccatgccatagccattgctctctcattgatggaagcttattccttgagtgttcagcatgagcaaacaaccttgcaaattcttcgtgcaaagcttgggccagatgacttgcggactcaggacgctgccgcttggcttgaatactttgaatcaaaagttatcgagcaacaggaagctgcacgcaatggaactcggaaacctgatgcatcaattgctagtaaagggcatctaagtgtatctgatcttcttgattatataaatcccaatgaagaaagcaaaggaagagattctgaatcaagtaaaaggaggtactcaagcataaaggtcctgtcaaattcgaatggaggttccaatgtagcaagtcctgaggtatctccaagagactctacttctgcaaatgcagacgaggacaagcaaatcatagagccatcacaagatgatactgttaactttgttgctgaagctgaaattaagcaaaaccttaaatccgtagagtactcagcatcatctgagcaaccagtagagagagctgaggtgattaatgtaccaagggaggttgttcaggaggaactagtagaacctgaagatggttggcagcctgttcaaagacctaaatcggctgcaggttcagggaaacaaatgaagcatttcaatcccaccaccagaaagatgtatgaccctgataatcatgatccacaatatacatctcaatacaaggcacgaaattcctatccaaatagccgttactacttcttaaagaagcggactgttgtacctgcaacgtacacagaccctcatcagcacatgaaagtccagacatccagtgcaaggtttggtcgtaagatatacaaggctgtgacatatcggattaagccagggagtacatccacagaggcgcaagatgcttctgctgaacagatgagtggtaaagcagagtcccagatggcttactcacaagtacacagtactacttctgtagatcataaagaaagtgagccacatggaactttggtgacaagtagtggaaacgcgccatcatacaaagatgttgcattagcacgtccaggtaccattgcaaaagctcaaatacaaaaatcaagagatgatgtagtccagaatcaaccgtcacttggtcaaattattgcacaagaaatgaaggattccttggtagatacacatcaagtggaacaaggatctgtatctgcaaatatcaataatcccaaagaagtaggcaacattccagaagaaattcagcattcagaagacattaaagtgtctgatagagaactggacactggggatattgacacagatggttcaccaaatgatgagaaatccttaaatggcagcaatcttgcaaatgatcacacaagtcaagaaccagtaagttgtagcaatgaaaatgcagccgtcgagtttgcagagtcttctaattctgcaaaagatgaacagagtcggaaatcggatatggagattttcgaagaagctctgcccaccagcattggacctattgcagtttctgcttctacagctaatactgagggccttgcaggtgctggaaatgagaaatcaaagcccaatttgctgctaaatagtattgatttgagagagatgcctaataagaagttgtctgctgctgcaccgccatttaatccctctccgccagctatccttagtcctcttgcggtaagtgtgggtctcccgccaccaggtgctatcccaggagtcgcaccttggcctgtgaatgtacctatgcaccctggacattcaactatggtaccaagtggtcctccattgtgcacctcccctcaccatttataccctccagctcctcggtcacctaatctctngcatccagtgccatttatttatccaccatatagtcagccgcaggtcattccaagctccacatttcccatgaacactaatatttttcgccctaatcattatggatggcaaccctatatgaatgcaccttcatcagagtttgtgccaggatcagcatggccaagcaaccatccagttgattttacgccaactccacatgttgttaaccctatatcccagtctttagcagacacccacattcagtcggacgcagctgttgttagtataggaccttcactggacagcaatactatggcagtgaaggaggaaatggaggctacaatggttggaagtggcaatttgatcagcaacaaacgtcctgcagatgatcaggacaaacaattaaagatccagttagaattgaactga

SEQ ID NO: 447 - DNA, 3330 bp, Oryza sativa
atgaccccggtggttcattgctctgttggcaatatcagcctgttccacatcggcagtttcaggccaagccatgaaatccaaataaggaggttccgcagcacagagaggtattcaagagtaccttcacgtaggctgctgcaaccgcaacgagcattcaacttgatcagtatttacaagagaagcagctggtcctctgcccgcaggccaagaactctgtcagcagcaactgttgggactgatgttactgtagaggatccgaatccaccaccttccggagaaacttctgaagaaagctctgaggatacagcacctgacactgctgaagcaagtgagcaagctgaggcaagcacttcttccattcccaaagcaggacgaaacataagaaagagtgagatgccaccactgaatgatgaggatctagttcctggtgcatcttttactgggaagcattcacctgaaggccttgttcatatctctcgagtaagtgatggatttgtaaaagatatatcttccctcttcactgtcgggcaagaggtgtcagtgagattagtggaagcaaataaagagacagggcgcatctcattgacaatgcgaacaggtggtgattatgtcaagcctaaaacagaaacacctaaggctgcaagtggcgggaggaataccactgcaaccacgtccagaggctcgccaaggcaaacgagggaaagagatgaagccaagagcatgggcgaaacaaactatgtgcaaggacaatttctggatggcgttgtgaaaaattcaacaagagcagggtcatttgtgaccctacctgatggaagcgaaggattccttcccagagaagaggaggcagtggcattgttcacccttatcggacattctgcactggaagttggtcaacaggtaagggtgaaagtattgaacgtagtacgaggccaggtcacgttgacaatgaaggagggagaagatgatgaagaggatctggcttcattaaacacacagctgaagcagggttggtccagagggaccaatgcatttgagctagctttccgtaggaataaggaaatctctgcatttttggatcagagggaaaagataatagttccagatgtacaagaagctgctgttgcatcagtaggtactgaacttgatgcagaagtaggaattgagcaaagtccaggcaaggaacctgagacaggcaatgctgaatcagttgcaatcgatagttctataacggaggtcaaggagactgatagtatagctgcagtggagaaggatagcgaaattagcaagactgaatcagttgagactgctagttcagttgtaatttctgaagatgatagcacagttgatggcaaactcgttgaaccaactgcttcagtttctgcaactgaaactgagattaaagaagatagctctgagggatctgtcaccactgagcctacagaagctgcttcaacagaatttgtcaccgcagtcgttgaggaaagcgctccgactgctagttcagttgaaacttctgaagatgatagcacagttgatgacaaactcgttgagcctactgcttcagtttctgcaactgaagctgagagcaaagaagatagctctgagggatctgttgcttcaacagaatctgtcaccgcagtcgttgaggaaagcgctcctgtgtcatcagtagcaattgaagttcctgctcctgaagcatcagaggcctccgctcaggagataattgaggattctactactgtggaaggtgccgccgatgatcaaactgtagaatctgatagtccacctccagaaggtgttgagctgtcctcgaatggggctccagacagctctattgctgaggataagcctgatgaaccagaagaatcgttgatagtagaagaggttccagtaactgcaagtagtgagtctgaggataaagaacctgctgcggtacctgaagaagtagcagcctcaagtgagaaaactgcagatgttgctgttgcaggagctgaagcaagcacggccacagcaactatttctcctgctcttgtcaagcaattgcgtgaagcaactggagcaggcatgatggactgtaagaaggctcttgcagaatcagggggtgacattgagaaagcacaagaattcctccgcaaaaaaggtttggcggctgctgacaagagggctggcagggccactgcagagggaagaattggttcttacatacatgacagcagaatcggtgttcttattgaagtgaattgcgagactgactttgtatcccgaggtgacatcttcaaagagttggtagacgatctagccatgcaagtcgccgcttgccctcaagtacagtacatttctcttgatgacgtccctgaggaggttatgaagaaggagacagagctggagatgcagagggaggacctcttgtcaaagccagagcagatccggtctaagattgtagagggccgtgtaaagaagaggcttggagaatatgcattgctggagcaacccttcatcaagaatgacaaggtcacaatcagtgaatgggtgaagcaaactattgccacaattggagagaacatgaaggtcaacagatttgtccggtacaatctcggtgaagggttggagaagagaagccaggattttgctgctgaagttgccgcccagacagccgcgaaggcaccgccagctgctcctccaaaggatgataagcctgaggaaacagcagaaactgaagagaagaaaccagctgtggcaatttcagctgcattggtaaagcaactccgagacgaaactggtgctggtatgatggactgcaagaaagcactagctgagacaggcggcgacattcagcaggctcaggagttcctcaggaagaagggcctgtcatctgcagacaagaagtcctctcgcctaaccgccgaaggcctaattggcgcctacatccatgacaatcggattggttgcatgattgagatcaattccgagaccgacttcgtggctcgcaacgagaagttcaaggagctggtgaacgacctcgcgatgcaggtggtggcatgtccacaggttgagtatgtctccatagaggacatcccagagagtgttgtcatcaaggagaaagagattgagatgcagagagaggaccttcagtccaaacctgagaacatcagggagaagatcgtcgaaggccggatatcgaagaggctcggcgtgctggccctcctggagcagcctttcatcaaggatgacagcaagacggtgaaggatcttgtgaaggagacgatcgccacccttggggagaacatcaaggtacggaggttcacccggtacacccttggtgagaactga

SEQ ID NO: 448 - DNA, 2652 bp, Oryza sativa
  N_region (2491)..(2491): n = any nucleotide
atgccgctcctccacatctccctcccgccgcaccgcctcctcctcgtcgccggcggccgccgccgccgccgccggctgctactcctcccgccgtctccccgccgcgtctgcgtaagggcggcggcgtcggtggagttggaggtggccgcggccgcgggggagtacgggctccccttcccgtcggagcgcgccgcccaccaccgcgagctcgccgcggccgccgccgccgtcgagcgcgcctgccgcctctgcgtaaacgtcaagagatcactgctttcaggtgagaagaaaattttcgaaaagaatgaccaaactcttgtcacagttgcggattttggagtgcaagcccttattagtttagagctccagcgatcgtttccatcaattcctcttgtggcagaagaggattcagcttctttaaggtcatctaatgctgataacagtagcaatgtgcttgttgagtcaatttcaagtgctgttgccgacaatgtgagtaacaccgattcacttttaactcatgatgatgtgctgagagctattgacaaaggaggcaaggatagtgcatcctttgattcaaatcccgctacttattgggtacttgatccaattgatggtacacaaggtttctcgaaagtggatgatactctgtatgtggtgggcttggctcttgtggtgaatggaaaagtagtagcaggagtcatgggaagtcctaattgggccagtgataccatagccaacagaaaagatgacagcattgcttcccgttatgatcgtgggatccttatgattgctcatgagggttgtggtgcttggactaagcgcctgtatgatgagtttggccagttcactacgtcaaaggatacttggaacagatgcttcgtggattcttgttctgttgtacacaaggcacgctattgcctttccgataaccaaacctggaatatgataccactatctgttgtgttcaactcaacgacggatgaatcgaaacctagagatgagaatgaacttcttacttcatatgttttctctggcagacttttctgtatgaacctgaaagaaagtggcgagcaatgggccgaaatctcaggcccaaacaagcgaggatttggaaagaacgcaatgcaagggtgtttgagcagcgaaccagaaggccagaccaactcgtggaggctattaaggaagagattatggtctggaaggaagcctgatatttctcctaccaaggattgcagtcctgacaaccttttcatgtacccactagctttggtagaacaattcaataagtttgttttctctaagtgttacacttatggtttgtctttgcttcaagtgaagagaacgctgctttcgggtgacaagaagattcttgaaaagaatgaccaaactcctgtcacagttgcagattttggagtacaagctcttattagtttagagctccagcgattgtttccgtcaatacctctggtggcagaagaggattcagcttctctgaggtcatccaatactgatgataacagtagtaatgttcttgttgagtcaatttcaagtgctgttgcagaaaaagtgagtaacgccaattcacttttaactcatgatgatgtgctgagagctattgatagaggaggcaagaatgctgtatcctttgattcaaatcctgctagttattgggtacttgatccaattgatggcacaaaaggtttcttgggaggggacgatgctctgtatgtggtggggctggctcttgtggtaaatgaaaaggtagtagcaggagtgatgggatgtcctaattggtctaatgctaccatagccagcagaaaagaagacagcgctgctgcccaacctgatcatgggatccttatgattgctcatgtgggctgtggaacttggtctaggcatttgtctgtcgatattggccagttcactacggcacagagtacttggaatagatgcttagtggattcttgttcagttgtgaacatggcacgcttttgcattcctgatagccaaacctggaatatgataccgctatctgttctcttcaactcaacaatggatgaatccaatcctagagatgagaatgaaattctcctcttatctgtttactgtggcagcttgtgcaagtacctaactgtagcttctgggagagcctccgtttttgtacttcgagcacggacgaaaaatctcaagtcttgggatcatgctgtcggagtaatttgtgtacaggaagctggaggtcagattagtgactggagtgggaaaccgttggatcttgcagctgacctaactgggcgcagagacatttacccttcaggtggtgttctcgtcaccaacggtgctctgcacggcaagctgcatccacacacacctgaagcttgtgaggaggagaaaacttggaccaatctgacagcagtgcaccatgcagtgaatcaggatgctttcggtttggccaccaattcaagccgaagaaaaggacacccaaaagcattantaagagctactgatctactcgagaacaagaaaaattcagatgatctcctgctctgctctcctcacgccaaaagccgcaattacgcgttgatgatcagagataattctgctatgaaagcaagcaagcaagcaagcacggtgaaattaattcctggaccatga

SEQ ID NO: 449 - DNA, 2127 bp, Oryza sativa
  N_region (776)..(776): n = any nucleotide
atggcggccgccgtctccgcgccccttctccggttccaccaccaccaccgctgcctcctccgccactcctcctcgccgcgccgctacccagccggcttctcgcgtgggctcagctccgtctcgttcggcctcccgcgcagcaccaccaccgccgcgcgctccaccgcctcgccctcggcgccgtcggcggcggcggccgaggccacggatgcggcttccgcccaggcgggatccgacggcaagggggatgggattggggaggaggagcgcgtcgtgctccccaccaacgagtcctccgaccgcctgctccgcatccgccacaccgtacttgctttttgctgcctcccattcctcacttctctacctgtcattaatctgtgtgcgcatgtgatggccatggccgtccagaagctgttccccaactccaaggtgacaataggtccctggatagacaacggcttctactacgacttcgacatggagcccctcacggacaaggacctcaagaggatcaagaaagagatggatcggatcatccggaagaatctcccattggtgagggaggaggtgtccagggaagaggcccaaaagaggattgaagcgcttaatgagccatataagttggaaattttggagggcatcaaggaagatcctatcacaatctatcacattggagaagagtggtgggatctctgtgccggacctcatgtcgagtctactggcaaaatcgatagaagagctgttgagcttgagtctgttgctggtgcttactgganaggtgacgaaagtaatcaaatgctacaaagaatatacgggactgcatgggagactgaagaccaattgaaggcttacatccacttcaaggaagaggccaagcgccgtgatcatcggcgattaggtctggatcttgatctattctccatacaggaagatgctggtggcggtttagtattctggcatccaaaaggtgctattatcagacatgttttagaagactcatggaaacagattcacttgcaacgtggttatgatctattatacactccccacgttgcaaaggctgaactttggaaggttagtgggcatatcgatttctacaaagagaacatgtacaatcaaatggatgttgaagatgagctatatcaacttcggcccatgaattgcccttaccacattttagtatacaagagaaagctacattcatacagggattttcccattcgagtggcagagcttggaactgtctacagatatgagctatctggtagtttgcatgggctgttccgtgtcagaggatttacgcagatttcattaagtactactactacctccgtttcaggtctatttgtgcaggatgatgcccacatattttgtctggaggaccagataaaagatgaaattagaggtgttcttgatctgactgagcaaatactgggccaatttggctttcggtattatgagataaacctttcaacaaggccagaaaaatctgttggcagtgatgacatatgggaaaaagcaacacttgcactaaaagatgcactagaagacaaaggttgggagtacaaggttgatgaaggtggaggcgctttctatggcccaaaaattgatttgaaaattgaggatgctcttggaagaaaatggcaatgttccactgtgcaggtcgatttcaatttacctgagcggtttgacattacttatgtcaattcaaatagcgagaagaaacggcctatcatgattcatagagctatccttgggtctttggaacgattttttggtgtcctcattgaacactatgctggtgattttccactttggcttgcaccaatccaagctcgtattctacctgtgacagacaatgagctgcaatactgtaacgaggtggcttcagaactgaaatcaaaaggcattcgagctgaggtatgtcatggcgagcgtctaccaaagctaatacggaatgccgaaacgaagaaagtgccgctcatggcggtcgttgggcctaaagaagttcaagccaggaccctcactatcaggtccaggcatagtggggagattggtactatgcctgtggatgaattctttcgcagaatccaacttgctattgcgaacaaatcttcttcactatga

SEQ ID NO: 450 - DNA, 2046 bp, Oryza sativa
atggagacgacgacgacggagaggcggcggctgttcgcgacggagaaggtgggcggcagggcggtgtacaggctgcaggcggcgacggtggccgccgggatactgctggtgctctactacagggcgacgcgcgtgccggccgccggcgaagggcgggcggcgtggctggggatggcggcggcggagctctggttcgccgtctactgggtcatcacgcagtccgtccggtggtgccccgtccgccgccgcaccttcaagaacaggctcgccgagagatacaaagaaaatctacctggtgtggatgtttttgtatgcactgcagacccacacgcagagccaccaagccttgtcatctctaccatcctatcagtcatggcatacaattacccatcagaaaaaataagtgtgtatctttctgatgatggtggttcaattcttactttctacgctctatgggaggcatccatgtttgcaaagaaatggctaccattctgcagaagatataacattgagccaaggtccccagctgcttacttctcggaatcagaagggcatcacaatctgtgctccccaaaagaatggtcatttatcaaggttctgatagatgggaaaagccaaaatgcagttgatgacgacggaaatgtgctaccaacactggtatacatggcgcgcgagaagagccctcagtatcaccataacttcaaagccggggcattgaacgctttgataagggtatcagcactgataagtgacagccctgttatcttgaatgtggactgtgacatgtattccaacaatagtgattcaatcagagatgcgttgtgcttcttccttgatgaagaaatgagccacaaaattggatttgtccagtatcctcagaactacaacaatatgaccaaaaataatatatatgggaactctctcaatgttatcaatcatgtggagatgcgtggtttggacagtgctggtggatgtctctatattggcacaggatgcttccatagaagagagatcctttgtggtaagaaattcagcaaagattacaaggaagactggggcagaggaataaaggaaagaggacatgagaacatagatgagattgaagagaaggcaaaatctttagcaacctgcacttatgaacttaggacacaatggggcaatgagattggagtgaaatatggttgcccagtagaggatgtcatcactggattggcaatacattgccgaggatgggagtcagtctacatggaacctcaaagggcagcatttgtgggtgtagctccagcaacacttgcccagacaatactgcaacacaagagatggagtgagggcaatttcacaatttttctttcaaagcacaacaccttcctgtttggacatggaaaaatcagcttgcagttacagatgggctactgcatatatggattatgggcagccaattcactgcctacaatctactatgttatgattccagcactaggtcttgtcaaaggcactcccctatttccagagattatgagtccatgggctacacccttcatatatgtattttgtgtgaagaccctctacagtctttatgaggcattattatctggggatacattgaaaggatggtggaatggacaaaggatgtggatggtgaaaagaattacctcatatctatatggcttcattgacaccatccgaaaattgttaggattgtcaaagatgtcatttgaaattacagcaaaggtaagtgatggcgatgaagcaaagaggtatgagcaagaaatccttgagtttgggtcatcatctcctgaatttgtgatcatcgcaactgtcgcattactgaacttcgtctgcctagttgcagggctaagcaaaataatggcaggtgtgtggaatgtgtttttaccccaggtcattctatgtggactgatagtgatcactaatatcccaatttatgaggcaatgtttgtgagaaaggataaggggagaataccattaccagtcacactagcttcaattggctttgtaatgttggcattcctgttaccaatagtttga

SEQ ID NO: 451 - DNA, 1746 bp, Oryza sativa
atggcggcggcggagcgcccgagcaggtccgacgtcgacttcgccgacgtcttcggcggcccgccccgccgctcgtccgggcacgacagcctgaggcgctcgtcgatggactcgtcgttcggctcagcgacgaaggggaggagcggggcagaggagaggcccgtgttcggggaccgcacgagctccgaccggaggaggcagctcgggcaggaattctacaaggacatattcgccgggagcgagtcgatgtcacctaggcggggaggcgcggcgggggatctggatgtgtttggtgcgcaggcctcacccggttccaccagccgcctgcattcgagcttctccatgaagttcaacggaggcctggacagttctgtccctacttctccatctcggcatacatccaacaaaaacgatgatggaatatcatatgcttacagtgttccaacttcacctaattcatccatgaacagctttctagcccaaggggcaccccaacaagattccacaaagaatcctttttcatggcatcgctatcccttcttatcccggtttcgctctaacagtggagataagaaggacacctcccattatgtcagctctatggacagtgaatacgaagggactcctgttagcttggaaagtagcattgccaataacaagttccatttttcattctataaatggggagggaaaggtgccgttttggtattgccaactactgcacaggaaaatgctggtgatattgttggagtaaggagtttccctcaagtgattgtgcaaggtatggacctaattgatgaagaagatagcacgtcaactgccactggagcatcaaagagtcagactgattacgaagactacaaatctgggaaagatgtctcgttaggggcactcttaaaaaccaaggatggagcccttcctttagcttttgatgactacgtgctaggcgataaatctgaagaatcaggaacaaaacataacaccaataatgcaaagaacaatgtattaggagctagccccagctctaaaagttctcggtcaccttcaggagagaaaagtcgtggcagcagagtgaaaggaaaagtaaaggacttcatgaaaatatttagtcctgagagttcaccgaagagcaaacgagatcggacatccagtgggaaaaacggaagcaaaagtggtcctgaagataaatttagcatatccaattcggaggtcgatgacaatgtcagaacagccaatatgaacaagcagaatgtgttccctcctgtaccctctccaatcagcgaagcacaagacaggacggagataccggtttttacagtggataatgaaatggattcaaaggcagattttggaagaaaagaagttacacctccctcttttgatgagtcaagcgatgcccaaacaaaatataaggtagatgagataacagatcttgcggaaggtccagtggaagatcttgaagaatgtgtggttgaggatgtctctgaagattttattcttcgtaataatgaggaaaaagagcaaataaaggttctatggcctgagagtggatggaaaccagtcccccttgttgatataattgaaggagcagctgttaagaaggcctatcagaaggcattgttatgccttcatccagataagttgcaacaacgaggagctgctatgcatcagaagtatatagcagaaaaggtttttgacattctacaggaggcatggaaagaattcaatacagttacttttggatag

SEQ ID NO: 452 - DNA, 1167 bp, Oryza sativa
atggcggccctccgcccccgcgccgccgccgcctccgccgcagtcgcccgcccggtcgccgtacgccgaggcggcgtctcctcctcatcccgctggaagctgcagggaagtatgttgaattggaaatctaaatgcagtaccagaagtccacggactacagttgctggtgcaaagcctgatgactctgaatttgaaagtgtcaatgcaccactcgagccccaaacgtgggaaggaagcttcttgtgtggtttgttgaagaaccagccacaagtactcccagttgctgcggcaaagcaacttcaagaactatctaatcaaagaaaggacaccttgatccgctgggaacatagcatcggttctcctgaggactgccttcacaggaggattgctgaaatgaaggagcatgagtgccagactgctattgaggatatcatgtacactttgattgtttataaatttttcaagattgaagttccattggttccaaatctatcaaagcttatcagcaataaaagactacaaatatggccaccaagggaggcagaactagaatcaattcatggacctgaggtgctaggtttaattagggaacacttgaccagtattatcagatgggtacatagaaatggtcccaagatcaatcgctcaacacttagaatcaaaagaatgcaatttagtcggatttattctgcttcaataatgtacggatactttctgaaatctgtcactacaaggcatcgtttggagctgattcttgctcagtcacaagaattttgcccaccaattcagtttctgaatgcacaatttaatagcacccagaaacaagaacaggaagagtccattggaggttctgcagaaatatcatcttcctcaaaaccgagttctgttgttgatctgcatgacttgaagagttacatgatgggctttgatccaaagaccttggagttatgcgcaaggctgcgctcatgcgaagcttctaatctcattgagaagcacagttgggcactgttcagagaaagcatgaaagatttcctagagcctgatgaggcagtgatactcgatccgtcatccctaaagagattgttgcttgaagccattgcatttggttcctttctttgggatgttgaggattatgttgacgagatttacaagttgcatgatagctga

SEQ ID NO: 453 - DNA, 1020 bp, Oryza sativa
  N_region (100)..(100): n = any nucleotide
atggacatgttgcaaccaaactcagtacgtgcctgcgtacgaagcgacctagattttgacatggcggggcagcaggagcaaccggagattgcgccgcctncgccgcggcggcgcgtcgtgtgcgtcaccggcgccggcgggttcgtcggctcgtggctcgtcgagctcctcctctcccgcggctacgccgtccatgccacggtccgtgacccagctgctgactctattgcagtcacgttggctacttacagccgtcaaatcaagtttgatgccgagatcaatcgctacagtaattccaataaacactactcacaattcactgttcccctctgccatttaccccctgatgcgaacccaccaaacagaccctctggtggttaccattactgtacacaaacagtaaacccaattaccgtgggtaaccgacgtggcatctctttgtgtcaccctgttggtttgttggaaccatacgatcccaagaacgcgtttctgaagcaactggagaatgctccggagaatctgcaactgttcgaggccgacgtgctcgactgcggctcactgacggcggcgttcgccggctgcgagggtgtcttccatctggccactccggtgccggaagaaaagatcgttgatccacaggcaatatatattcagaaggagatgatggctcctaccgtggaaggcaccagaaatgtactcgaggcttgctcagctgcgagcgttcagaaactcgtcgtggcctcctccattgctactgtttgccttaacccgagctggcctcaagatatgccgaaagatgagacttcctggtcagacaagaagctctgcattgaaaatgaggattggtactctgttgccaaaatcgaagctgaagagatggccctggaatacggaaagaaaaatgggcttcatgtacttacgatttgtcctggaattgtttttggcccaatgttgcagacagtggaaatcaacacaagcagcaaagtgctcctctatatgattaagggttcaccattttaa

SEQ ID NO: 454 - DNA, 630 bp, Oryza sativa
atggccggggtggcggcgttgcagggcgcgatggcgtccctctccatctctgcgccgggggcggcgagcaccagcagcttctggggccacccgctctccaccttcgccgccgcgccggctggggagttcaggctcaggacctcaactagccaacaaccaacgttgtgtcaaaattttgtggttaaatttatgatcaagacatgcccaattcaaatgaggcttaagcgatgggagaggaagaagtgtaaaccaaacagtcttcctgtcctgcacaagatgcatgttaggattggcgatacagtacaagtcattgcaggccgtgagaaaggtaaagttggagaagttacgcggctttttaagcacaacagcactgtaatagtgaaggacttgaacttgaagtccaagcacaagaaaggaacagaagatgaaccgggtgaaatcgtcatgattgaaggccccattcacagctcaaatgtgatgctctactcaaaggaaaagaatgtggcgagtagggttggacacaaattccttgaggatggaacgaaggttcggtacctggtcaagactggtgaaataattgacagtgctgagaattgggtcaaggtgttcaaggaaggaagttcggagtga

SEQ ID NO: 455 - DNA, 543 bp, Oryza sativa
atggtgggagcaacagtctgtggacaggccctcgcccttctgtccatccgcttcaacagctcgacggcgaggagcgtgttgagggtgcccacgggggtcgaggccgtggctgtctcggagcagcaattcgtcgaacagcggctagcactcccaccgcctcatccattccaaccacaaccccgccgcccctccaactccaacccccttctccacccactgcctgcctcccctatcctccccacccccgtgatggaggtcgagatcaagctccgcatcctcgatgctgccgcggactgcagcctctcctccttcctcgcgccctgcctccgccacaccagcgccgcgcgtcccctctccgccgccaccgccgcgctccgcgtccatctctacggcctcaacgacccacattgttctcgtgctcaatgcagcatgtgcatcgaggccggtgtcagccgcgtcgaggaggtcgaggagcctctcgaccccaccatcaccctcgaggatgaggaggcgttggtggcgagtgcgggagacggtggttga

SEQ ID NO: 456 - DNA, 504 bp, Oryza sativa
atggcgcttgccctcgtctcgccaatggcggctctctcactccactccgggaggatctcagcggcggctatcggcggcggcctccgctctcgcagggcatccccgatgggcgccgccgccaccccgttcctccggagctccttcgtctcctcctcctccacgtcatccgcctccgcctcccccgccgcgctctctgccgcggtctcggcgtcgctgaccttcacctctgcctcctcatttgctggttcatctttgggaattgaattcagctacaacagagttacaacaggaagatcccggattctgcagattagggctggaaaggctgctctgtgcatgaccaagagaaatagatctaggaagtcgcttgcccgtacacatggttttcgcagacggatgaggactactgccggaagaaaggtcctgaagcgcagacgcgccaaaggaagaagggttctctgcacaaagacgaactcccccactgggaagaaacgaatgttctga

SEQ ID NO: 457 - DNA, 870 bp, Oryza sativa
ctatatgctaacgaagattacgacaaagagatgttctgggacaacttggatgcggatttgcgctactggaccagatccctgcgcccagtgcagcagtggtatcctggtcatattgcgaaaacggagaaggaactgaaagaacagctaaagcttatggatgttgtcatagaggtccgcgacgcaaggattcccttggcaaccagccatcctaagatggatgcctggctaggcaatcggaaaaggatcatagtcatgaatcgcgaagacatggtgtcaaatgaggacagaaatgcatgggcctcttactttgctaatcagggtaccaaagttgtttactcaaacgggcagctgggcatgcttggtcagggtacaatgaaattaggtaggatggcaaaatcactagcatctactgtgaacacaaagcgcagagagaaggggttacttcctcgtgcggttcgagctggaatagttggatatccaaatgttggcaaatcttccttaattaatcgcttgctaaaacgaagaatgtgtccagcagcgcctagaccaggtgttacaagagagctgaaggaagtgatttagagctattagattcacctggcattttgccaatgcgaataagtgaccagacagctgcaatcaaacttgctatatgtgatgatataggagaaaggtcgtatgactttgctgatgtggcagcgattctcgtacagttattagtgagacatccagctgtagttgttcaatggagatgccagccaagcagccttccgcatcttgtctgactaccggaaaggcaaatttggctgcgtggccctggagagacccccaacatgagcaatggagatctcagatattcttagatgttaa

SEQ ID NO: 458 - DNA, 786 bp, Oryza sativa
atggacccggcgctcaagaccgacgccaaccgcgtccggggatgcgtctcccaggtctgggtccacgctgcgccggaggagggcggcgcgccgggcagggtcagcttccaggccgactccgacgcgcagctcaccaagggcctcgccgcgctgctcgtgctcggcctctccggcgcgccggcgcgggatgtcgccatggtgcccgtcgagttcatcgagctgcttgggatcaggcagagcctctcgccgtccaggaacagcggcctgctcaacatgctcagcctcatgaagcgcaaggccctggaggttgccaccggtgaggtaaccactgaggaaattggcagccaagaagtggtccaagaggtcgctgaacggcctgctgcgaaggagaaggaacccgagtttgcggctttcggtgcgcgagaagaagagggttcagaggtgcatagcccacaggaggaacaattggaggaaatgccagctgatgtgatggaagggaatggtggtttggggggtgggaggcaggagaggataaaggagagccttgagcgcgggctttcgccggtgcagctccagatcgaggacatatcgcacctccataagggtcatgctggggtgtcaggaagcaatggcgagacgcattttaatgttcgggtggtctcagaggcgtttcaggggaagagcctgctcaagaggcacagggctgtgtatgatcttctgcaagatgagctcaagaatgggttgcatgcgctctccattgatgcaaagacaccatcagaagtctag

SEQ ID NO: 459 - DNA, 730 bp, Oryza sativa
atgatattcagcgtcacagccaagaagttaattagctatgactccttggcctcagatggaaagatgtggaaacaatttgatgctttcattcgaggtctactggcatttccaattggcattcctggcaccgcattctacaaatgtatgcagttgcaggggcgaaagaatatcatgaagatgctgtgcgctggatttgatcttcttgctgctatttgccagcttcgagaccacggcatccgctataaccgcagtggtcagatttctaacggataatcccgaggcattgcaagaattagcattacaggaggagcatgataacattcagaaaagaagggtcgacctgaactctgaaatcacatgggaggaatacaaatctatgaaatttacatctcataggcttgctaacattgctccagtgatgtttagaaaagccacagaggatgttcatataaaagtgtccttccacggttcacctaaaccctatgatttataaggatccaaatatattcaatccttggagatggaaggcctccaaggatttcatggcctttggagggggactgcgcttgtgtgttggtgcagatttcgctaagctgcagacggcgatcttcctccactgcttagtcaccaagtatagagatggaaagcgatcaagggaggaacaatggtgcttggtccaggactacgattccctgaaggttttcacatccaacttttcccaaaaccttga

SEQ ID NO: 460 - DNA, 464 bp, Oryza sativa
atggcggccacctcgagcctcacggcgaccgccgcctcccctccgctcctcctcaaacccgccccttccccgctcgctgcctcctttctccggcccgtctctcgcttctccaggttccagtccgtcaagaccaagacacaggccacagaaaatgatcagaccgaaaagagtcctccgaagggaagcagccttgtctgccaggactgcgaaggaaacgggtgcaatagtgtgcaaccagtgcaagggagatggggtgaattctgtcgatcacttcaacgggccgatttaaagctggagcattatgctggctttgcagattatacagaggaaagcgggaaatcttgtgcggtagctgcaatggtgctggcttcttaggtggattcatgagtacttccgattcaactgcagagtagtgtgaatggtttatattcttcttttggtttgtgtttgtattttgtatttga

SEQ ID NO: 461 - DNA, 2100 bp, Oryza sativa
atgaacaactatccagtcaacagtgttgttttggaggtgaaagatggggaaacacagggggattggaaggttctaaaagctaaggaaatgggaagtggaggagggaataggaaaggagctgactcgccgccaccgatcgccaagccactgaggctggtcactgtactgcctcttgtgttcgatggcttgaatgagcagcaaccagcagctataagctattgctttatgtattgctctccctgggcttgcttgggccgagacttgcactgcgaatcagctatggtgaagcccaacatggtctctaacaatctactctccttgaattcggcttgcgccgccgcgccgcttccggcgatggcacggaggccgtcccgcgtggcgcccccgggatactcccccgtcggaggagggtgcgcgctggcggtggagtgctcgtcgcggccgcagaagaaggcgacgaagcaccacatgaagacgcggcccaagaagtcgcagccgtgggacaggaagcgccgccccacgcagtaccggccgctgccggctctcccgccggactggacgctcgtcgccgccggcgccacggtcgacgcgtcggcgcaggccgaggatgcggatgaggaggaaccggagccggtggccgctccggtcgtcgagatctgcagcaatgtcccatgcaattcgctgtcagatatagacaaggatggtgctcatggcactaatgcacaccccctattcgatggaatgccaagccaacatgaggtgtctgaggatgattccaggctaccagagaaatccttggatgatgctctggatcagatcatggagaagcttgagttgatggaggccaagcgtaggcaaaatgagaagattaatcggattttggagaagttcaatgagatggagaagagggaaagggaatccatgcataggagaagggacatcatggaggagcttagcaccagcatcaaagtgaccactacggtcatcatggctacatcatcttcaccaatcatagcaccgtccccttcactaactaccaattgctcgacagaatgcccctatgccagcagcccggatgtgacacttagtgatggtggggacaaggaccaagctccctacattgtcatcaaggaccttctcaatgtcacgcctgccaagtgctcgacaaattactccatccccaacatcgtacctggcctcaccgtggctgccatggttacatgtgccccgacatctatggactccatgtatttggaagttggtgaggacatcaccagcaccaccagcgttgactttattggtcatcccaaggagacacacacaaagtttttgatgatgggcctcgatgtcatggaattgaagcttgatgctatcatcagcgtgggaaacaaggtgtctatagggtgttcaatgaaatgccctcaaagcgacaacaagcaactgatggagcatcccaacaaaaatccatggccaccccctacccacaatgttgcaatggaaaatcgacaggtgttgcaactagccttgccaatcctcagctatttcaggatcaaattgcaatggatgccaccttggctgccattagttggtttgctagaagctagacaagggaagtgttgcactcctgattctactgcgaaaaatgcagaagttttgggatccgactttccaggaggacttcgcatgaaggaggacgctggcaagcttgtgatggaaatgattggattgtggacgccggcaagcttcacgaccctgggtagcgcccaccacgccctagaatactggccgacggtagatagtcgatggtggctatcagtggatggcttggatgccgccgatcacgtggaggtcgagcatcaccatcacaatgaaatacacagcaatcgcacagtgaagagccacagcagcagaatatcaacggtgaggtcaatgttgtcgtcgcgcagtccaggtcattgccactccatcgaggttgagatcgtcgttgcgtggttgagatcatcgttgccgcgtggtcacaagcggaggtcggtctgccaagtgggagagagtgggggaagtgaggtgactgggagtgggggagaggaactgtgggagtga

SEQ ID NO: 462 - DNA, 2550 bp, Oryza sativa
  N_region (48)..(48): n = any nucleotide
  N_region (128)..(128): n = any nucleotide
  N_region (160)..(160): n = any nucleotide
atggcgccacctgccatggccttccaagctctcgctctcggccccctncccctttccccttcccgcggcgcgtcgccgccgccgcgtgcgagtcctcgccgtggccgcagaccacaccccggcgtcgncgccgttgccgttcttcccttcccgagccggngaacagcccgagccggctcctccccgccgctcgacgacgagcgcctcacccagcggttcctcagcagcccgcagctgtcgctcaaggcgctcccgctgctatcctcctgcctcccgtcggcgccgctctccgccgcagaccggacatggatggacgagtacctcctcgaggccaagcaggcgctgggctacccgctcgccccctccgagacgctcggggacggcgacgacgacggctgccccgcgcggcacttcgacgtgctgctctacctcgcgttccagcacctggacacgtcctgcgagcgcacgcggacgcggcacgtccggagtggccactccaggctctggttcctgggccagtacgtcctggagctcgcgttctgcgagttcttcctgcagaggtacccccgggaatcccccgggccgatgcgggagcgggtgttcgcgctgatcgggaagagagcgattcccaagtggatcaaggcagctagccttcacaatttggtgttcccttatgacgatttggataagatgattcggaaggaccgggagccaccagcaaaggctgtattctgggcactgtttggagctatatatttgtgctttggaatgcctgaagtctaccgtgttctttttgaggcgtttggcatggaccctgaagatgagagctgccagccaaagctgcggcgccaactagaagatgttgactatgtatcagtggagtttgaaaagagacaactcacatggcaagatgttgctgcctatcgggtaatttccctttctgttgtttgctgccaatcttccttcttgtcttcattcttacgttgtttgtcattgcatgtcatgaggccaccaccagatgccctctttgctcaccctaggctatttcgagcatgcgtgccaccaggcatgcatcgtttcagaggaaatatttgggattttgacaatagacccaaggtcatgaacacactgggatatccattgcctatgaatgatagaattccagaaatcacagaagcaaggaacatagagcttggacttggtcttcagttgtgcttcttgcatccctcaaagcataagtttgagcatccaagattttgtttagaacgcctggagtatgttggacagaaaattcaggatctagtgatggcggagaggctgctcatgaagcatctcgatgcacccggtaggtggttggcagagaagcatcggaggttgctaatgaacaaatactgcggacgatacctccgggacaagcacctgcaccactacattatctacggggagtcggtgcaagacagatttgaacacaaccgccggctgagaaatccttccacgaccgccgtccagcaagcaatacacggccttgcttactgcgtctatggcaaaccggatgtaaggcgattgatgttcgaggtgtttgacttcgaacagatccaagcgcagacagttctgagtctgatccccgaagtcgaaaagcaggagtttgtaatagatctgcagaacatctttgcaaccaatgatacaagcagcttcatcttttacatatcagtgcgcaattcttcatcgttggtcatggaattaatcggtaatcggtttggttgcaacgaagcgagtaattctaatatgggccgtcaggcccaatttataagaggaggacgacgaggaggaggtttgcgaggcagcggcagggagaggaagatgtcttcgctgcggaacgcgatccagcggcgcgctcacaaggagcgcgcccagccggagtcgaggaagaagttcgggcttctggagaagcacaaggactacatcgttcgggcgaaggctttccaccagaaggaggaaaccatcaggaaattgaaggagaaggcatcatttagaaaccctgatgagttctattttaagatgatcaacagcaagactgttgatggaattcataggcctaagcctgaagcaaacaagtatactgaagatgaactcatgctgctaaaaactaaagatatgggatacatccttcagggtattcagagtgaaaagaagaaaattgaaaaattaagctccatgcttcatgaactagacaacaagcgaccaaacaagcatgtttactttgctgaagacagagaagaggtcaaagaaatacaatctagaatagaacaaaagagcagttcacttggtttggacaacatcccttcccgtataaagaggaaaactgcttcgtcctatagggagttagaggagaggaaacagagggttcaaaagcttgagaaactgtatgcagacatggccttgcagaaagagttgaagaaacctggacggaaaagaaaactccgtgaggatgagattgagaatcaaacatcccggcctgtttataagtggcgagcacaacggaagcggtaa

SEQ ID NO: 463 - DNA, 1488 bp, Oryza sativa
  N_region (825)..(825): n = any nucleotide
  N_region (1305)..(1305): n = any nucleotide
  N_region (1316)..(1316): n = any nucleotide
  N_region (1319)..(1319): n = any nucleotide
atgagagccgccgccatccagacccacgccctcgtatgcgcgccaccgggggccgccgccgccgcgctggccccatggccgcggcgcgctgccggcggcggcgggggaggacccctcctccaccaccaccggctgaggagcgacctgccccacacgcgctccctcccctgccgggctcgctcgccgtcgtcctcctcgtcgtcgaatgtgaattctgggagaggggacgacgcggacaacctgctcgaggatttgctcagcaagcatggcgaggtggtgtacaacgccggtggggctccgggcattgatgccgacgatgacgccgagtgcttgtcctttgctgtctccctagctaaagttgcaagcgaggtgaaggctgcggatattcgtgtactatttgtgaagccgctcgtttactggacgaggttcttcatcatcctcactgctttctcaaatgcacagattgatgctatcagctccaagatgagagacatcggtgagaagcagtttagcatagttgcatctggtgatacaaaaccaaattcatggaccttgctggacttcgactcaactgccacgggagggatggcgcagccggagaccttgtcgctggccgggcggcgggtggcgttcacgacgccgcagaccgacgccggcggcggcggctacggcggccggctccacgccatcctgcggcagcgcggcgcgcggccggtcccggtgcccaccatcgccatccgcgcgcacgacccggacatcctccgccccttcgtcgcgccgggcggcctcgacgccttcgcggcgctcgccttcacctcgcgctcnggcatctccgccttctcccgcgccctcctcccgtcctcctcctcccccgcgcggcggccgcggcaccccgtctccgacgccgccaccgcgctacccttcaccgtcgccgccctcggcagcgacgccgacctcctcgacgcggcgttcctctccaggctctgcggcgacgcgggcgggagggtgtcggtcctcgtccccgacgtccccaccccggccggcctcgtggaggcgctggggagcgggtccggcaggcgcgtgctctgccccgtgcccgacgtcgtcggcctacgcgagccgccggtcgtgccgggcttcctcgccgggctggaggcggccgggtgggtcgccgtgcgcgcgccggcgtacgtcacgtgctgggcggggccgcgctgcgcggaggctctggtggacgccgcggcgcccgacgccgtcgtgttcacctccaccgccgaggtggagggcctgctcaaggggctggangccgcggggtnganctggccgcggctgcgcgcgcgctggccccgcatggtcgtcgccgcgcatggccccgttaccgccgacggcgtcaggaggctgggcatcgaggtcgacgtcgtcggcgccaggttcagcagcttccatggtgttctcgacgccctcgccgcgaaactcgaatcagattga

SEQ ID NO: 464 - DNA, 1308 bp, Oryza sativa
atggcatctattccactggtggtagtacagctgctgctcctgctgcttccacttcccctccgagagcacctctggtcaggccaacaccggcgaaacgacgtcgatgccggcgagctccacccgatcgtcgtgttgcccggggtggcatgcagcgacctggaggcgcggctcacggaggcgtaccggccgtcggcggcgaggtgcggcgcgatgaaggggaaggggtggttcccgctgtggaagaacagctccgacctctcgacgcaccgctacaacgagtgcttcctggagcagatgagcctcatctacgaccccgtcgcgaacgactaccggaacttccccggcgtcgagacccgcgtgccctacttcggtctcgtcaaaggctaccatcagaaatggccttttgacaagccatggtgccttacaccgcttatacgagccctggaagagatgggataccgtgacggggacaacatgcacggagctccttacgatttccgtcatgttcctccagtccctggccaggaatcccaagtctactcgcgctactacgaggagttcatggagctcgtggaggccacaagcaagaggcatcgcaagaagaaggtgatcattctcgggcacagccacggaggatgcgtcgcccttgagttcgtcaggaacaccccgttggcgtggagaaaggagtacatcaagcacctcttcctggtcacgcctacgctctccgccgggctgctcgacccggtggagaaccttgccaccgggccgcacaacctgttctacgtgccagacgcgacggagctgtcgctgcggccaatgtggaggagcttcgagaccagcatcgccaacctcccgtccccggccgtgttcgggcgcgagccgatcgtggtcaccgagcggaggaactactccgcgtacgatatggaagatctccttgccgccgtcggtttcggtgacgggatcgagcctttcaggagacgaatggttgtgaggatgaactacctcgaggcgcccatggtgccgttgacgtatatcaatggagtggggaagaggacgccacggcaattggtgtactgggacggtaactttgacaaggctccggaaaaagtgtatggtgatggagatgggatagttaatctggttaccatgttagcgttcgacgaggagatgcgtcggcagccaggacagagggggcaattcaagtcaatcaaggtcgagaacgcttcccatatgggaattcttatggatgaatgggcgctaaagagggtcatgcaagagattcttgaagtgaatcaggattcttcgtag

SEQ ID NO: 465 - DNA, 3148 bp, Oryza sativa
atgcggtcgctcgcttgttgcgcggtgcttcttctcgcttcggttcttggatctacagcaggtactgatctgggtccttctcctgtggtcgctaactcgccagatgctcaagatcaaacttctagccctcctgaacctacaatcgccctcggtccagtaactcttccaacagcagcaccctctgctccatcagcaagccctcctgtggcgaagggcgctgtcagcccagctgttcccactcgaccacaaaatgcgcctactccagtaacaccccctaaagagaatataatgcgcctcctccagttgagcttacgcctcctgctcccactcatgtggcgccagtagctcccccgcaagctgcagttgaaaatcctgcaccagtgcttcctgggacacctgctttgttgccttctgttcaggctcctgctccatctgtggccaggaatcctaatctaccgatagtgcaacctccttctgtgaacaatccaccaagcagaccaattggatcagagggaatggcgtccctccgtatccaccacctcaaagaagtttacctgccattcctccttccacttcagaggagttccgcgagaaagtgtaaaacctccagttgcaccacctattattgcacaagcaccacgtcagcaagcactggcaccaagtagtgaccatagcaatgggaaactcagtgcccccagcaaatacatcacctccccataagaatagtcatattccacgtgcactgccaccaaaggaatccagtagtcaaactggcacagctcacaaaccgccaattagagaggatcagcacctgcagaaactcctttgccccagaacacaaatatgccagcagtcccaaagaatggatcatcagtttctcatgaccgacccccttcaacagtagctgctcctaaaccagcaacttctagcagataccatggtcggggtggggcaccgaagaaaggagaacaccttccatttgccccatcttatccaccatctcatgctcaagagggcctcatatttctccaaccatgccaccaatccctccccaaccagggccgaaagcaccatcagcccatcctatttgggcattacctccaccaccgcctaatctagagttggagtccgcttaagtgttgatctgtattcattctttccattggtatcgattttgcggaagaagtgtcatctggggtaaatatggcacagagacaggttcgtgttatgggtgcaaatgtagctggtgatcagcctgacaagacagtagttcttgttgacctagtaccaatgcaagtgaagtttgacaatgctactgcttttttaacgtttgaaaacttatggagcaaaaaaatttccctaaaaccatcagtttttggggactacgagattctgtatgttgtatatccagcagggcttcctccttctccaccttcagcaccggaaagtgttggtgacggggcatttggaaacaacagaaatgcaagggcaatgaagcctctcggggttgatgtaggcaggcccaaaaaaagagtcaacggcagcctaattgctattgccgtcttgtctactgttatagcattgattatttgcactctagctgcatggttgctgataatcagattcaggggttcggatggcttggctcaaagatttccacatagcgcacttccaaaattttccagatcatctgggtacaggtcaaacactgttagctggtcgctatagttcaccatcaggtccatcaggttcattgggctcaagtatcgcaacatatgcaggacaggcaaagacattcaaatttgcctgagattgagaaggccacaaacagctttgatgattcaacagtacttggagagggtggcttcggatgtgtctaccagggcacgcttgaagatggaaccagggttgcagtaaaggttctgaagaggtatgatggccaaggcgagagagagttcttggctgaggttgagatgctgggacgcttgcatcaccgaaatttggtcaagttgttaggcatatgtgtagaggagaacgcaagatgtctggtttatgaacttattccgaatggcagtgtagaatcccatttgcatgggagtggatcttgagacagcaccactcgattggaatgcccgcatgaagatagccttgggggctgcacgagctcttgcatatttacacgaagattcaagcccttgtgtgattcatcgtgattttaagtcaagcaacatcctattggagcatgatttcacaccgaaagtgtctgatttcggactggccaggactgcaaggggggaggggaaccagcacatctccactcgtgtcatgggaacatttgggatatgttgcaccggagtatgccatgacaggacatctccttgtcaagagcgatgtgtacagctatggagtagtgttgcttgagctcctcaccggtagaaagccagtggacatgtctaggcccggggggcaagaaaacctagtttcatgggctcgcccgcttctgaccaatgtggtaagcctacgtcaagctgttgatccacttcttggccctaacgtacccctggacaatgtcgcaaaagcagctgccatcgcatcaatgtgtgtacaacctgaggttgcgcatcgcccgagcatgggtgaagtagtgcaggccttaaaacttgtttgcagtgacggtgatgagggcctcggatcaggaagtttcagccaggaattggcggcacaagctgcagcaatctatgatgtaactggcatggaagctgagagggtgctgttatctgagatgtttggctcaacccctgtcttcactcccgctgcggattcaggttctttccgaaagcagtccagctcaggtccactgatgacaggcaagaacagaaagttctggcagagattgcgaagcctatcaagagggagtatgagtgagcatggtgcctcaccagattttgagacgcgctcgcagtgtagtaatagagaagaaactgccatgtaaatctgacagaattgcttctgttcttccatacctctaacccagtggatgatgctgctgcatcagcaacttgcgagagttgatatgctttcttgagaatatggcataagtgctctgtttactacaaagtattttttttcagagaaaaagccgctttag

SEQ ID NO: 466 - DNA, 2214 bp, Oryza sativa
atggggagaggagggatcggcggcgcggggctggtggcggcggtcgcgaaggcggacgtggagaacaccgactccacccgcggcttcgtcaaggacgtgaagcgcatcatcatcaagttaattcgacaggtcggcaccgctgttgtgactgggccgaatggccggttggctatgggcaggctcggtgctctgtgtgaacagctaaattttgaggggtacgaggtgattctggtcacctctggtgctgttggtgttgggaggcagaggctcaagtaccggaagctcgtcaatagcaggttgcagagagagtttcgctgatctgcagaacccacagatggacatggacgggaaggcctgcgctgccgtcggtcagagtgtgctgatggcgatctatgacacgttatttagccagcagcttgacgtaacatcatctcagcttcttgttacggatcgtgattttatggatccaagttttgggaaccagctccgcgagactgttaattctctgttagatctcaaggttataccagtatttaatgagaatgacgccatcagtaccaggaggcaaccatacgaggattcatctggcatattctgggataacgatagtttggccagactgttagcgcaagaacttaaagctgatctccttatcatgctcagtgatgtggaggggctctatagcggtccacctagcgatccacaatcgaagattatccacacatacgtccatgaacaacatgggaagttaattagctttggggagaaatctcgtgtgggaagaggtggaatgcaagctaaagtagcagctgcttttactgcttcatcaaaaggaatacctgttgtaattgccagagtggatttgcaatcgatagcattattaaggtcatgcgaggagagaaaatcggtacgcttttccatagggaagcaaaccagtggggttgttccaaggaagcaacagcgcgtgagatggccgttgctgcaagagattgctccagacatctacagcagaaattgtcgtctgaggagcgtaagaagattttgctagacatcgccgatgctctagaagcaaatgaagatctaattacatccgagaaccaagctgatctggatttggcgcaagatattggttacgataaatcattggttgctcggatgaccataaagccagaagataaaaagcctcgcaggatcaattcgtgaaatcgctgatatggaggaccctatttcccatacactgaaaagaacagagccattgggtgttctcctaattatttttgagtcccgtcctgatgccttggtacaggtacagattgcatctttagcaatccgaagtggaaatggtcttctcttgaaaggaggaaaagaagctatgagatcaaacacaatactgcataaggtattatggtcataactggtgcaattccagatgttgttggtaaaaaacttattggcctagtgaaaaacaaagatgaaattgctgatttgctcaagcttgatgatgtgattgatcttgtaataccaagaggtagcaataagctcgtttcccagatcaaagcagcaaccaagattcctgttcttggtcatgctggacggtatctgccatgtttatattgacaaatcagctgacatggacatggcaaaacgtattgtattggacgcaaaggttgattatccagcagcgtgtaatgccatggaaacgttacttgttcataaagatctgaacaggacagaaggccttgacgatttattggtggagcttgaaaaggaagggggtagttatctatggcgggcctgttgcacatgacactttgaaactaccaaaggtagattcatttcatcatgagtataactcaatggcatgcaccctcgaatttgttgatgatgtgcagtcagcaattgaccatataaatcgctatggaagcatttcagtgcacacacagattgcattatcactactgatggaaaggcagcagagacttttctacagcaagttgatagagtgctgcggtattccataatgcaagcacacggttctgtgatggggctcgctttggtctaggtgctgaggttggcataagcacagggcgcatacatgctcgggggcctgttggcgttgatggactcctaacaactcgatgcgaggaagtggacaagtagtgaacggcgacaagggagttgtttacacccacagggagctccctttgcagtgag

SEQ ID NO: 467 - DNA, 1582 bp, Oryza sativa
atggctacaactctctccaatggtgtttcacagaatggccctcagaggaactatcaggtagttgttgctgctactcgcgacatgggcattggaaaggatggggtcttgccatggaagctccttggcgaccttaaatttttcaaggagcttacagtgactacagctgatcctgtgaagaaaaatgctgttataatggggaggaaaacatgggagagtttaccccttaaggctaggccattgcctggccgtttgaacatcatattgactaggtctggtagttttgagtttgcaacagtcgaaaatgttgttatctgtggaagcatgaactctgcattggaactactatcatcaactccatactgtttatccattgagaaagtttttgttatagggggtggacaagtactaagagggaatctcttaatggaccttcatgtgaggcagtccatttaactgacattcagtcaagcattgagtgtgacacctttattcctccgattgacttatcggtgttccaaccatggtattcatctttgcctgtggtagagagcaacattaggcattcgtttgtgacctatgttcgggttagaaaaacaatggcagaaacacatgactcaaatggcaaggaatcagctaatgatggtatcaagagtgacaaatttgaaaccgagaatttctcttttctccctaagttgatatttgaccgccatgaggagtatcactatctcaatcttgttgaagatattataaggagtggtgctcagaaaaatgacagaacaggaacagggacattatcgaaatttggttgtcagtcagatgcggttcaacttaaggaatagcttcccattgttgacaacaaagagggtattttggaggggtgttgttgaagaactcctgtggttcatcagtggctcgacaagtgcaaagaggttttacaagagaaaggcattcatatttgggatggcaatgcttcgagagagtatcttgacagagtgttggcttagcacatagggaagaaggtgatctaggtccagtttatggatttcaatggcgacactttggtgctgatataccgacatgcatgctgactatactggtaaaggctttgatcagctaatggatgtgattgacaagatcaagaataatcctgacgataggcgaattatcctatctgcgtggaatccttcagatctcaagaagatggcccttcctccttgccacatgtttgcacaattcttccagttttatgttgagagcggggagctatcgtgccagatgtatcaacgctctgctgatatgggacttggtgttccattcaacattgcatcatattctcttctgacatacatgattgctcatgtttgcgtctttctcctggagagtttgtccatgttattggtgatgcccatgtctatagaacacatgtgcgagctctggaggagcaaatccagaagctacctaaaccatttccattttgaagattaaccctttgaagaaggatatagattctttcgtggcatcagacttcaagctggtcggttatgatcctcaccagaagattgaaatgaaaatggcaatataa

SEQ ID NO: 468 - DNA, 1247 bp, Oryza sativa
atggaggcggcgttcgacgcttacttccgcgccgcggatctggaccgcgacggccggatcagcgggcaggaggccgtcgccttcttcaaggcctccgctctcccccaacccgtcctagcccagctgctgcagatctggacgtatgctgataaaaatcgaactggttttcttggccgtgaagatttctacaatgctcttagacttgtcacggtagcgcagagtggccgagaactgacaccggatattgttaggtcagcgttatatggtccagctgctgcaaaaattcccgctcctaggataaatgtttcagactccaaggcattggtgcctttggggaatggacaagctccatggccgaaaatcactcaagcagatgtagacagggaccgagatggaaaaattactggtgaagaggctaggaatctgttcttaagttggaggcttccaagaggtgtgggatttgtccgaccaggataaagatgggatgctatctttccgggaattttgtactgctgtgtacttaatggagaggcacagagagcagcgtcctcttcctgatgtactaccagatggattcgagagagaagactgagttctatcgcacaaagatgcaggagcttctttacaaaagtaggtgcgataacaggtttaatgaagtttcagaaaggatgtctgctgataaacgtgaggtactgttctcctcttgcagcgaaatatgatgagagatgtaagaaggttggagatgtagcatcaaagttatcgatggatgaggccactttccgtgagattcagcgagctaaccagatacaatctgatcttgaggagcttgttaaatctttgaatgaacagtgcaagagatatgggttgagagctaagccaactactcttgtggagcttccttttgggttggcaacctggaatacaagagacagcagctgtatgggatgaagaatgggacaaatttggtgatgatggttgattcttctgttcccagcacacctgacagcttttcaagatttgattccttccggagcaacgctgatcaaggcagcaatgacacctttgttcacgaggtatgattccatgaatagcagcagcgaccatgacagaacagatgcttttgcgagatttgattcaatgaagagcacggactacaacagccgagactggaccgttcaagtcatcagacacctctagcccgacgaagcatggaaccgacagatggagtgcattttgacaggtattga

SEQ ID NO: 469 - DNA, 608 bp, Oryza sativa
aagcggaggattctatctgcagtggttaaagtatccgcctaggctttggttttttattttccttagtcaaacttgtgattgccagaacctctcccgagggaatttcccaaggatgaggatcaaagccttgtgaagaggaacaagaggatgctggggaagcttcttgtcggtacattagagctgcgtgctcgagtagctgctaaggcagaagaaaagaggttggagctgttatacatgcagtgggctgagcatcacaaaaagctgtccaatttcttaagtttgtcaggacaactgcggaaccaccaatttactacatgccagctaaaccaataattgatgatccggctattgctgaggagaacaaggaaaagtttcaagaatggaaatctgaacgcagggctgagctaactcagtttcaaaagcaagtcgaagaacagtacatgtctaatgttgagaggcagttggaaaggatgcagaatgcgcggaatgcacggaggggtaatggtccttcaaacatgcaagaaatggacaaggagctggacacgcacagggcggagcatggtccaaaaactcgacgagttcttgagggtggcaatgacgatgaggat

SEQ ID NO: 470 - DNA, 6090 bp, Oryza sativa
  N_region (892)..(892): n = any nucleotide
  N_region (3590)..(3590): n = any nucleotide
atgtccacagttgctcaattgttggagcaactccataaagaagtgacgactaaaagattgcttgaactggccaaagaaaaaaaggaagcaagggttttgataggtagccattctcaggcgattccactatttatatctatccttagaagtgggacatctatagcaaaagtaaatgctgcagcactacttagcgcactctgcaaggaagaggacctgcgtgtcaaggtcctgttaggaggttgcataccacccttgctctctcttttgaaaaaggcggctgctgaagctatttttgaagtgtcttctggtggactttcagatgatcatataggtatgaaaatatttgtgacagaaggtgttgtgccaaccctctgggacatgctcaaacctaagtcacaccaagataaagtagttgagggttttgtcactggtgccttaaggaatctctgtggagacaaagatggttattggagggccaatcttgaagctggtggagtagaaattataactggtcttatttcatctaagaatactacttcacagtcaaatgctgcctcccttttagcacggttggtatctgcctttggtgatagcatccccaaaattattgatgccggggctgttaaggctcttcttcgcctcctaaatcgagacaatgacatttcagttcgtgaaagtgcggccgatgctttggaggctctatcttccaagtctagtattgcaaagaaggctgtggtagatgctggtggcattcctgttctcattggagcagttgtagctccttcaaaagagtgcatgcgtggggatacttgtcattctctacaaagtcatgctgttcatgctttatcaaatatctgtggtggaacagtatctctgttgctttatcttgganagctctgccaggtgcccagtccacctgttcccctcgctgacattcttggtgcacttgcatatacattgatggtatttagtggcactgatgtttgatccgattgagatagaaaatattttgattgtgctcctgaagtcctatgatagtaatcttgtgcttgatcgtattcttgaggctttagccagtctatatggaaatgcatgtctgtctggtaggcttaatcactcgaatgcaaagaaggtccttgttgggctgatcactatggcttctgctgatgtgcagaaaaatcttgttcatgctttaacgagcttgtgctctgatggtattggaatatgggatgctctaggaaagagagaaggaactcaattgctgatatcatttcttgggctttctagtgagcagcatcaggagtatgctgtttcattgttggctatattgagtgatgaagtagatgacagtaaatgggcaataaccgctgctggaggtattcctccacttgtccagctactggagacaggatctcaaaaagcaaaagaagatgctgctcatatcttgtggaacttgtgttgtcacagtgatgatatcagtgcatgtgtcgagagtgctggggcagttcttgcattgctttggcttctaaagagtggtagccctcatggacaagaggcatcagctaaagcactcaagaagattatacggtctgctgattcctccacaattaatcagttacgagcactgctgcttagtgactctcttagtacaaaggcccatgccattacagttcttgggcatgtacttgtgatggcttcccagagagatctagtgcagaatggagctccagccaataaagggctcagatctcttattgatattcttgagtcatcaaatgaggaaactcaggaacaagctgcaactgtggtggctgatattttcagtacccgtcaggatatttgtgatatcttaggaactgatgaaattattcagccatgcatgaagcttttgacaagtgggaaccaagttattgcaacacaatctgctcgagctttaggagcactctcccactcggctaatgccatgttgaagaacaagatgtcatgcatagctgaaggctatgtgcaaactcttatagagatgtcaaagtcaccatccattgatgctgctgaaacaacaattgctgcattggcaaatttcctatcagatgcacatattgccaaggaagcactagacggcaacatcgtcctggctttgactagagtacttaaggaagggagcttggaaggaaagattagtgcttcacggtcgctctgtcagttgctcaaccagttccccctcaatgaagttattccagattactcgcagtgctattttataattcatgcactgctggtgtgtctatctggcatcaatttagaaaatgctactaatttggatcccttgaatgtacttgcatggatggctaggaccaaggagggcgcgcactttagttctcccttgtggtctgcctttcttgatgttccagaaagcttagagcctttagtgcgctgtatcagtgttgggcttccaccgattcaagataaggccattcaaattcttgcaagtttatgtcaggaccaaccttctctacttggtgagcatttgaacagaagtcaaggatgcattgcttcccttgctagtagagttattgaatcaacaaacatggaaataagaattggcagtgccatcaccctcatatctgcaatgagacacagcagggaacactcaattgatgttattgaagcatcagggcatctgaagaatctaatatctgcatccattgatatgatgaagcaagattctgccccaacatccctagatattgaagttacagttgcgctttggttgctctcacttatttgttcttctcatttgagtagtaaacttactgttatggacctcggtggtgttgagactatatctgataaaacttgctagctacaccactaatcaacaggcccttcttttggctactttatttcaggattcaatgcttgttcaatctccagcaataatgcgaacaataccttctttagcttcgttgctaaaatcagacaagatcattgacaaatactttgctgctcagtcactggctagccttgtttccactggaagcagaagtatacagcttgctattgcaaattctggtgcagttatgggtactatagctatgattggacagatcgaatctactatgccaaaccttgttgctatggctgaagaattcaagttggcagataacccaagtaaaataatattgagaagcctttttgagcttgaagatgtccgtacgagtgctactgctcgaaggtccattccgttgcttgtggatctacttaaaccaatgccagacagacaaggcgcacctctggttgctttgcaccttctgactcaactagcggaaggcagtgagacaaataaagtagctatggcagaggctggagtcttggatgctttaacaaagtatctatctttaagtcctcaagactcaactgaaactactataatcaatctactgcggatcctatacacaaaccctgatcttctttaccatgaatcctcaattagcacttcaaatcaattggtagctgtcttacgtctgggctcaagaaattctaggcttaatgcagcaaggacgttacagaacctctttgattcagagaatatnagagacactgaagtggcttggcaagctattccgccattacttgatatgcttgagtcaggaactgaaacagaacagcaggcagcacttggtgctctaatcaaactttcttctgggaatatctcaaaggcttcagctttgtttgatgtagaaggcactacacttgaaagcctctacaaaattttatcctcattggagcttaagaatgatgccgctcagctctgctatattctttttgagaattctactataagggcatcacccattgcctctgaatgccttcaacccctgatatcattaatgacgtcaggctctacttttgttgttgaacctgcagttcgtgctctaaataggctactggatgaggagtacaatgcagagattgctgccactagtgaagttgttgatcttcttgttagttttgttcctgggactaatcaccaactgtctgaggcatgtattggtgctctcataaaattgggtaaggaccgtcccaactgcaagcttgagatggttaaagctggcattattgaacatgtgcttgatatgattcttgatgttcctgtttctgttagttcatcgattgctgagttgcttcgcattttgacaaacaacagtggcattgctaaaagttctgctgcagcaaaaatggtagagccacttttcttgcttttacgtcgcccagatgtcactatgtgggaccagcatagcgcattgcaagctcttgtaaatattctagaaaagcctcaaagtctcgcggcattgaagttaagtcccagtcaaataattgaaccgttaatatcattccttgagtctccctctcaagcaatccagcaacttggcactgaattactgacacatcttctagagcaggagcatttccaacaggatatcactacaaaaaatgcagttgtccctctggtgcagcttgctggtattggaatcttgagtttacaacagactgcagttaaagcgcttgagagcatatctcagagttggcctaaggctgtagcagatgcaggtggaattcttgaactttcaaaggtaattgtccaagatgatcctcagccaagtcaagcattatgggactctgcagcacttgtattatgtaatgttttgcgctatagctctgataactatgtccaagtgtcaatagctgtacttgtaagactgctgaattccaccatcgagagtactgttacaatagctctgaatgctcttcttgtgcaagagaaaagtaagtcacgctgtgctttagccatggctgaggctggggctgtgcgtgctctgttaaagctccttaagagccatcgttgtgaggaatccgctgcaagattgcttgaagctctgataaacaatgcaagggtccgggagacaaaagttgccaaatattctattggtcctctctcacagtaccttttagatccccagtctaagaatcagtcagccaagttcttggttactcttgcactgggtgacattttccagcatgaagcactcgcaagagcaagtgactctgtatctgcttgccgtgctcttgtaagcgtacttgaggaccagcctacggatgatatgacaatggttgctatttgtgcactacaaagcttagttctgcacagcaggacaaataggcgtgctgttgcggaggctggaggcattttggttgtacaggaattgcttctgtctccaaatgtagatattgcaggacaggctgctcttctaatcaagtatctatttttaaaccatacacttcaagaatatgtttcgaatgagctcattcgatctctcactgctcgcagctgccttggaaagagagctactctctacatcaaccatcaatgaagttattttgaggactatacatgtgatattcaacaactttaaaaaagtccggttttctgaggcagcaaccttgtgcataccccatttggtttgtgccctgaaggatggaaatgaggctgcccaagaaagtgtgctcgacaccctttgcttgctgaaagaatcttggccacaaatgaatgaggacattgcaaaagcccaatccctgatttctgctgaggcgatacctgtactacaaatgcttatgaagacatgtcctcccagttttcacgagagagctgatagcttgctgcaatgcttacctggttgcctgacagtgaccatcttacgtgggaataacttaaagcagacaatggggagtacaaatgcattttgctgcctgcaaataggaaatgggcccccaaggcaaactaaggtggttaacaatagcatctgcccagtatggaatgagggtttcacttggttatttgatatcccaccaaaggggcagaagctatacatcttgtgcaaaagcaaaaacacgtttggaaagacactcggtcgagtcaccatccagatcgacaacgttgtcaccgagggtgtatacagtggtttcttcagcctttcgagaaccctagagatagagattgtatggtctaataggccatccaatgacaatatgtag

SEQ ID NO: 471 - DNA, 5386 bp, Oryza sativa
  N_region (1142)..(1142): n = any nucleotide
  N_region (2895)..(2895): n = any nucleotide
atgtcggggcagcaggccgggctgaaccggcgcgggtcgaggagcgcggcgatggcgacgttctccatggaggtgttcgacaacgaggtggtgccgtccacgttgagcagcatcgccccgatcctccgcgtcgccgccgagatcgagcccgagcgaccccgcgtcgcctacctctcggttttacgcgtttgagaaggcgcaccggctggatcagaactccgtcggccgtggcgtccggcagtttaagacggctctgctccaacggctggagaaggataacagtcccagtctcgcgaaacgcgtgaagaagaccgatgcccgcgaaattgagagcttctaccagcagtactacgagaactacgtccgtgccctcgacaaaggggaacaagccgacagagggctcaacttggtaaggcctaccagacagccggagttctcttcgaggttctctgcgctgtcaacaagaatgagaaggtcgaggaagttaatccggaggatgtgcaagagaagaaagacatctacacgccattcaatatccttcctcttgatgccgccagtgcatctcagtccatcatgcagatggaggagaaagcagcagttgcagcgctgcggaacacgcggggcttgacctggccttccacatttgagccagaaagacagaaggggggtgatcttgatttgctggattggttgagagctatgtttggctttcagcagagggacagcgtgagaaatcaaagggagcatttaattctcctccttgctaatgtgcacataagacttgagccaaagccagagccacttagcaagcttgatgatcgtgctgttgatgaggtgatggctaagctattcagcaattacaggaagtggtgcaactttttgtcacgaaagcatagtttgagccacaggaaattcaacaacgaaatattttgtttctaggtctttatcttctcatttggggtgaagcagcaaacatccggtttatgccagagtgcctttgctacatctttcacaatatggcatatgagttgaatgggctgcttgctggaaatgttagtattgtgacgggtgaaaatatcaggccatcttatggtggggatgaagaagctttcttgaagaaagtagtcacacctatctatcgngtcataaaaaaggaaaaacaccacactcagcgtggtgcaattacgatgatctaaacgagtacttctggattgtttctcgttgggttggccaatgcgggatgatgtctactaaaagcacagggaagatgaattttgttgaaacaagaacattttggcacatcttccgtagttttgacagaatgtggaccttctatctgttggctctgcagcaggcaatgctgatttttgcttggagcgattatacactatctcaaattcttcagaaggaccttttatattctctatcaagtatatttgtcacagcagcatttctacagttcctccaaaattttagactttgttctgaacttccctggtcatcataaatgcaagttccttgatgccatgagaaacattctgaagataatagctagtgctgcgtgggctgtgatccttccatttttctacattagcaccgcatctaaagtcaatttaccaattaaagatctggataaatggtttcaatatgttaaaggagttccacctctatatatcctagctgtggcagtgtacctgatacctaatatcctaagtgcagcactcttcctgttaccatgtttccggaggtggatagaaaactcagattggcgtattgttaggttgcttctgtggtggtctcagcagaaacgaatttatgttggccgtgggatgcatgaaagcagtgtttcactttttaatatacactattttggatcttgctgctatgctccaagtttgcattcagttattttgtccagcagataaaacctctgatcaagccaacaaaggacataatgaatgttcataatattcattatgagtggcatgaattctttccaaatgaatgttggtgctgtcatgtcgctctgggctcctgtactcttggtctatttaatggatacacagatatggtatgccatcttctctacaatatctggtggtgtgtctggagcacttggaagacttggagaaatacgaacattaggaatgctgagatcacgatttcattctttgcctggggccttcaatacatttttggtgccgtcagataaaagacgaaacaggcgcttttcactctcaaagcgcttcgctgaggtcgtttctcccagcaagagaactgaggctgctaagtttgctcagttgtggaatgaagtgatatgtagtttccgggaagaagatcttataagtgataaagggaaatggacttactggtggttccttattcgtcagaccccagtcttaaactgatgcagtggccactcttcttgcttgctagcaagatacctatagctttagacatggcagcacaatttcgaccaagagattccgatctttggaaacgtatatgcgcagacgagtatatgaaatgtgctgtactggaatgctacgagtcattcaagcttgttcttaatttactcgtaattggagaaaatgagaaaagaggattattggtattatcataaaagaaattgaagctaacatcgcaaagaacacattccttgccaattttagaatgagcgcactgccagtcctgtgcaagaaatttgtggagcttgtatctgccctgtccaaatttgacaatgtagtattgctgcttcaagacatgttagaagtaataacaagagatatgatggtcaatgaaatcaggagctagctgagtttggtcatgggaacaaggattctgtaccaagaaggcaactttttgcgggtactggtacaaagcctgcaatcgtcnttccacccccaatttcagcacagtgggatgagcagcagatcaagcgtctgtacctccttttgaccgtgaaagaatcagcgatggacgtgcctacaaatcttgaagcccgtcggaggatagcatttttcactaattctttattcatggacatgccacgtgcacctagagtacgcaaaatgctgtcattcagagcgttatgactccatactacagtgaggaaactgtatattcaaggaatgacctcgatctggaaaatgaagatggtgtctcaattatattctacctgcaaaagatttttccagatgaatggaataattttttggaaagaattggttgccaaagagagagtgaagtttggggaaatgaagaaaatgtcctacaacttcgtcattgggcttctcttagagggcagacactctgtagaacaggttagaggcatgatgtactacaagagagccttgaagcttcaagcttttcttgacatggcttctgagtctggagatattggaaggatataaagcagttgcagatccagcagaggaggagaagaaaagccaaagatctctgtcatctcaacttgaggctatagcagacatgaagtttacatatgttgcaacttgccaaatatacggcaatcagaaacaatctggtgatcgacgtgcaaccgatatcttaaacttgatggtgaacctggtttgcgcgtggcatacattgacgaagttgaagagagagacggtgaaaaggtgcagaaggtcttctattcagttttggtaaaagctcttgacaatcatgatcaggaaatataccgcataaaattgccaggaccagcaaaattaggtgaaggtaaaccagaaaaccagaatcatgcaattgtctttacacggggtgaagctctccaaacaattgatatgaaccaggacaattatttggaggaagctttaaaaatgcggaatttactggaggagtttcacgagaaccatggtgtgcgccagccaacaattcttggtgtgcgtgagcacattttcactggaagagtgtgtcctctctcgcgtggtttatgtcaaaccaggaaacaagctttgtgacaattggacagagagtactagctaatccattgaagtacgttttcactacgggcatcctgatgtatttgatagaatttttcacattacacgaggtggcattagcaaggcttcctgtggtataaatttaagtgaagacatttttgctgggtttcaactcaacactgagacgtggaaatgtcacccaccatgaatacattcaagttggcaaaggacgagatgttggtcttaatcaaatttctctctttgaagctaaagtggcatgtggtaatggagagcaaacactcagcagagacatctatcgcttgggtcaccgctttgactttttccggatgctgtcgtgctactttaccactgttggattttatatcagttcaatggttgtcataattgtctatgtcttcttgtatggaagactttacctagcattaagtggactcgagttagcaattatgaagcaagcacgaatgagaggtaacactgctcttcaggcggctatggggtctcaatctattgtgcagctaggtcttttgatggccttacccatgtttatggagattggactagaaaggggttttagaagtgccctaggggatttcatcattatgcagcttcagctctgctctgttttcttcactttctcccttggcacaaaatcacattactttggccgcacaattctgcatggtggtgccaaatataaagcgaccggcagaggctttgtagttcgccatgtaaaattccctgaaaactatagaatgtactccagaagccattttgtcaaaggacttgagctcatgttattgctagtggtttatcagatgtatggtgatgtggctacagattcgactgcatatatacttctgacatcatcaatgtggttcctggtaatcacttggctgtttgcaccattcctcttcaacccatcagggtttgagtggcaaaaaatagttgatgactgggatgactggagcaagtggattagcagccgtggtggtattggtgtgcctgctaataaagcttgggagtcctggtgggaagaggagcaggaacatttgcagtctacaggttttttcggccgcttatctgaaatcatcttgtctctccggttcttcatcttccaatatggtatcatgtatcatctgaatatctcagctggaaacaaaagcatctctgtttatggtctgtcgtggctggtaatcgttgctgtggtgatggtcctgaaggtatccatgggaagaaagaaattcagtgcagacttccagctgatgttccggcttcttaagctgttcttgttcattggatccattggaactctggccattcttttcacccttttgcatctaacagtcggtgacatattcgccagcttccttgcctttgcaccgacaggatgggccattcttcag

SEQ ID NO: 472 - DNA, 3513 bp, Oryza sativa
atgggtggcatggataaaaaccatccttttgggattggacaaatggaaaatggcaatgggagctatgcatctgaggcagttacatctgatgagaattctgcagatggcagtggcattgttgtggagccttacgggatcccatgcatggtggagatttttcatttcctctgctccctcctcaatgttgtcgagcaaattggagttgatgaagatctgccattgtttgctctgaagttgatcaattcagcaattgagcttggtggatcttcaattcgtaagcacccaaaattgctgtcattagttcaagatgagcttttccgaaacctaatgcagtttgggttgtccatgagcccacttatcctttcaatggtgtgcagcattgtgctaaatctttatcatcatctccggactgagctcaaattgcagcttgaggcattcttttcttgtataatcctaaggcttgcacaaccccgattcggagcaacatatcatcagcaggaggttgcaatggaagctcttgttgatttttgtcgacaaaagaatttcatggtggagatgtatgccaatctggactgtgacataacctgcaggaatatttttgaggaacttgcaaatcttctgtcaaagagtgcatttcctattaactgcccattgtcttccatgcacattcttgctctggaaggtctgatctctgtgatccaagggatggctgatcggattgggaatgctacttcacgccctgagctcctgcctgtggagcttgatgaatacactcccttctggactgttaagtgtgagaatttttcagatcctcagcattgggtgaagtttgtccgtcaaagaaagtatgtcaaaagaagactaatgattggtgctgatcacttcaacagagacccaaagaagggtctggaatttcttcaaggcactcatttgttgcctgagaagcttgatccccaaagtgtggcttgttttttccgctatacagctggtttggacaagaatcttgtaggagactttctaggcaatcatgatgagttttgtgttcaggtgcttcatgagtttgctcaaacctttgacttccaggagatgaaccttgatacagctctgagactatttttggagacatttcgtctgcctggagaatctcagaagatacagagggttcttgaggctttctcagacagatactatgagcagtccccacaggctttcgcaaacaaggacactgctttagtgcttgcttactcaattataatgctgaacactgatcagcataacatgcaagtaaagaagaaaatgactgaggaggacttcatcaagaacaacaggaacataaatgggggtagtgaccttccgcgtgagatgctgtctgaactataccactccatatgccgaaatgagattaagaccacaccagagcagggtatgggatattttgaaatgtctcccagccgctggatagatttaatgcggaagtcgaagtcaacatctctgtatatagttggtgattctcagccctttctggatcatgatatgtttgctatcatgtctggtcctactattgctgccattgcagtggtgtttgatcattcggaacatgaagaagttctgttggcctgtgtggatggcttcttgggtgtcgcaaaaatctcagcatttcatcatcttgaagatgttttggatgatcttgtcgtttctctctgcaaattcaccactcttttaaacacctctttggttgaggaaccagttactgcctttggggatgacctgaaggctagattggcaactgagacattgtttaccatagctaatagatatggggactacatacgtactggctggaggaatgttttggattgcatattgaggctgcataagttaggccttcttcctgcccgtgttgctagtgatgcagctgatgattcagaagtttctgctgaaactgtccaaggaaagcctactcatagctcaatttccacatctcatattccagttatgggtacgcctcggaaatcctctggacttatggggagatttagtcagctgctgtcacttgacagcgaagaaccaaggtcacagcccactgagcagcaacttgctgcccatcagagaactctacagacgattcagaaatgccgaatagatagtatatttacagagagcaaattcttgcaacctgattcactattacaacttgctagggcactgatttgggctgcaggacgacctcaaaaggttgccagctcaccagatgatgaggacacagctgtattctgtctggaactgctaatcgcaattacgcttaacaaccgagaccgaattgtgcttctctggcaaggagtttatgagcatattgccaacatagttcagtcaacagttatgccatgtgctcttgtggagaaagctatttttggacttctgcgcatatgccagaggttattaccatataaagagaaccttgcggatgagctgctgaggtcattgcaattagttctcaagctggatgcgcgtgtagcagatgcatactgtgaaaacatcactcaggaggttgcacgccttgtcaaagcaaatgctggacacgtaaaatcacaaatgggctggagaactgtagtgttactgctctccattacagctcgacaccctgatgcttcagaagtaggctttgaggctatcatgtatatcatgtccgagggtgctcacctttcactatcaaattatgctttctgtatcgaagcgtcacggcagtttgctgaatccagggttggtctaattgacagatccattcgtgccctggatctgatggctgattcagccaatagtcttgcccgatggtcacaagagacaaaagggacaggcgaggaaactgacaaagtgttggaagcaatcagggagatgtggctcaaattgctgcaagcactgaaaaagttgagtttggatcagagagaggaggtgagaaatcacgcgctaacttcgcttcagcgatgcctaacagcaacagaaggggtgtgccttcagagctccacatggtcacatgctttcgatctcgtcatattcgcgctgctggatgacttactagagatcagccagaatcactcgcagaaggactacaggaacatggaaggatcccttgtgctcgccatgaaactagtcgcgaaggtctatctgcaactactgccagatctttttgggctaagcagcttctgcaagttgtggctaggagtcctcagccggatggagaagtacatcaagatcaaggtccgtggcaagcgcagcgacaagctgcaagagctgatccctgagctgctcaagaacattctaattgcgatgaagaacagggggatcctcgcaaagaggagcaccattgggggcgacagcttgtgggagttgacatggcttcatgcgaataacatctcgacgagtttgcagtctgatgttttcccaagccaggagtatgagcagcacagcagtgccggtagcccgagaggacccaacggcgttgagtcccgggactag

SEQ ID NO: 473 - DNA, 3159 bp, Oryza sativa
atggggattcttgggagttttttggtgctgctcctgcttgctgcccctgcatttggccagctaccttcacaggacatccttgcgctccttgctttcaagaagggcatcactcatgaccctgctggattcatcaccgattcgtggaacgacgagtcgattgatttcaatggctgtccggcttcctggaacggcatcgtgtgcaatggcgcaaacgtggcaggggttgtgcttgatggccatggcatctccggtgtcgccgatctgtccgtgttcgtcaatctgactatgcttgtgaagctctctatggccaataacaatctgtctgggagcctgccgagcaatgtgggtagtctgaagagcctgaagttcatggatatctcaaacaaccggttctcggggccgattcctgataacataggcaatctccggagcctgcagaacctgtcgcttgccaggaacaacttctcagggccactgcctgactccatcgatgggcttgcgtcgcttcagtcactggatgtgagtggaaactctttgtctggtccattgccttcatctctgaaaggtctccgcagcatggttgctctgaacctctcatacaatgccttcacaaagggcatcccatctgggcttggccttcttgtgaatctccaatctttggatctaagctggaatcaattggaaggcggtgttgattggaaattcttgattgagtcaactgttgctcatgttgacttcagtgggaacttgctcaccagtaccacccccaaagagctcaagttcctggcagatatttcagagacagttctatatctcaacttgagcaacaataagttgactgggtcattgattgatggagttgagctctcgaacatttgggagattgaagggttcaattatgtctatgatcttgaagttttgcgactggcaaacaatgcattcacggggtttgtacctagtggacttctgaaaggggattctctggttctcagtgagctggacctgagtgcaaataatctgactggacacatcaatatgatcacatcgaccaccttgcaagttattaatctttcctccaatgctctctttggggatcttccaatgcttgctggaagctgcactgtgttagatctgtcaaataacaagtttaaaggaaatttgtcagttattgccaaatggagcaatgatttggagtatgttgatcttagccagaacaatctaactggaacaattcctgatgtgagctctcaattccttcgcttgaactacctgaatctttcccataattccctagctgacaccatccctgaagctgttgttcagtaccccaaactcactgtccttgatctcagctccaatcagttcagaggtcctattcctgctaatttactcacttcgtccatgctgcaagagctctacatccacgacaatatgcttagtggaggtctatcatttccaggatcatcgtcaaaaaatctgagtcttcaagttcttgatatttctggaaatcactttaatggcagcctccctgatgaaatagcatctttatctagcctccaagctcttgatatatctacaaacaatttctctggtcctttgccagcctctatcaccaagcttgcagcgctcactgctctcgacatatcaataaaccagttcactgggtcattgcctgatgcacttccagatacattgcaatcattcaatgcctcttataatgatctatctggtgttgttccagtgaacttgaggaagtttccagaatcttccttccatcctgggaactcgagactagactatcctgctagctcttctgggtctggcagttcctctggttcagctggtggcaggtcactcagtgcagcagctaaaatagcacttatagcagctagtatcgttgctcttgtcatccttatccttgttgccattgtttgccattacaagcaaatctcacggcagttccctagctcagaaaaggtttcagacaagaacctccacaagactagcaaagacatggccagtacaaaaggaaaggatgacaaaggtggtttggtggtctcagcagatgagcttggtgctcctcgaaagggctctacatctgaagcactaagccaagaagagaagctgtcaggtgtagggggattttccccatccaaaggtagccgcttctcttggtcaccagattctggagaggcatacacccaggaaggcctggcacggttggatgtcagatcacctgacaggttagcaggggagttgcacttcctggatgaaacaatcacactgacaccggaggaattgtcaagggcaccggctgaggttcttgggaggagcagccacgggacttcgtacagagcaacacttgagaatggtgtcttcctaacagtgaaatggctgagggaaggtgttgcaaggcccaagaaagagttctcgaaggaggccaagaagtttgcaaacattaggcatcccaatgttgttggcttgcgtggttactactggggtccaacagcacatgaaaaactgatcttgtcggattatgtttcaccaggaagtcttgcgagctttttgtacgcagatcgtccaggaaggagaggccctccactgacctgggcgcaacggctgaagatcgcagttgatgtcgcgcgtggcctgaactacctccattttgaccgagcgatgcctcatggaaacctcaaggctaccaacatcttgttggacggacttgacctcaatgcccgtgtcgctgactactgcctgcaccgcctgatgacccaggctggagttgttgagcagatcctcgacctgggcgtgctaggctaccgtgccccagagctagcagcgtccaagaagccatctccctcgttcaagtctgacgtgtacgccttcggtgtcgtgctgctggagctcctaactggcaggtgtgctggggatgttgtctcgggttctgaaggtggtgttgacctgactgattgggtccgtctgcgggtggctgaaggtcggggatcagattgctttgatccagccatggcttcagattctgagaaccaagtttctgtcaagggcatgaaggatgtgctgggcattgccttgagatgcatccggccggtctctgaaagacctgggatcaagtctgtgtatgaggatctttcatcaatctag

SEQ ID NO: 474 - DNA, 2689 bp, Oryza sativa
  N_region (121)..(121): n = any nucleotide
  N_region (126)..(129): n = any nucleotide
  N_region (134)..(135): n = any nucleotide
  N_region (137)..(137): n = any nucleotide
atggctgtttcaatgagggaagtggatgcggtctttcaaggggctggtcaaaaaggattggaaatatggcggattgaaaaactgcaagctgttccagttcccaaggaatcacatggggganttttnnnnggggnntncctaatgtgatattgaagacaaccgctcttaaaaatggttcttttcggcatgatatccattattggcttggtaaagataccagtcagcaggatgaagctggtacagctgcaatcaagactgtggaattggatgctgctcttggtggacgtgctgttcaataccgtgaagtacaggggaatgagacagagagatttctttcatattttaaaccttgtattataccagaggaaggtggaattgcatctggtttcaggcatactgaaatcaatgaacgggagcatgtgacaaggttatttgtctgcagaggaaagcatacagtccatgtcaaagaggttccgtttgcaagatcatcgctgaaccatgatgatatatttattttagatacaaagtccaaaatattccagttcaatggatcgaattcaagtattcaggagagggctaaagcccttgaggttgtgcaatatttgaaagacagcaaccatgagggcaaatgtgacgaggacggcaagctgatggcagatgctgacgccggtgaattctggggtctctttggtggatttgcacctcttccaagaaaaaccttttctgatcttaatggaaaagattctgctttctcttcgaagttgatctgaagggtcagacagtaccagttgattttgatgttctaacaagagagttgctagattcaacaaagtgctatctgctagactgtggatctgaaatttatgtctggatgggtagagagacaccactcgaagagaggaaacgggcaggatctgctgcagagaggccaaaatctcatattgttcgtctcatggaaggatttgagactgtcatattccgatcaaaattcagtaaatggcctaagaaagctgatgctgttgtgtctgatgagagcagaggaaaagttgcaggctcttcttaagcggcaaggatttaatgttaagggtcttgcaaaagctgctcctgtgaaggaagagcctcaacctcaaattgattgcacaggcaacctgcaggtttggcgtgtaaatggcactgaaaagacattcctttcattctctgagcaatgcaaattctacagtggggactgttatatctttcaatatagctatcctggtgaggaaggcgaggagtgtctcattggtacttggttcgggaaaaagagtgttcagcaggttcgcctttatgaaggaaaggaaccagctgagtttttctcaatatttcagaacctggttatcttcaagggtggtgttagtactgggtataagaaatttgtctcagaaaacggtattgaggatgacacatattcagaaaatggggttgcccttttccgggttcaaggctctggaccagaaaatatgcaagccattcaagttgatacggctacctcgctgaactcttcttattgttatgtactacatgatggagatacactatttacatggattgggaatttaagctcgtcaatggatcaagagcttgctgagaggcagctggatgtgatcaagccaaatcttcagtccagaatgctcaaggaagggtcagaatatgatcagttttggaagctacttggagtcaagtcagagtaccccagccagaagattgcaaaagatcaagaaagtgatcctcatttgttctcttgtactttttcaaaggttgcaggttagagaaatattcaactttactcaagatgatttgatgacagaggacgtttttattttggactgtcattcatgtgtcttcgtatgggttggacaacgtgtggacacaaaaatgcgagcacaagctttgagcgttggagagaaatttttagaacttgacattttgatggagaactcatcacaagaaacaccagtttatgtcatcactgaagggagtgagccccaatttttcaccaggttcttcacttgggactctgcaaaatcagccatgcatggaaactcatttgaaaggaggttatctatagtgaaggatggagtaaaaccaaaattagataaacctaaaagaaggccaacgacatcatcatcacacactggacgatccagtgtacctgaaaaatctcagcgctccagaagtatgtcgttcagtcctgaccgtgtaagagtcagaggaagatccccagcattcaatgcattagctgctaactttgagaacccaaatgctcggaatctatcaacacctccaccagctatcagaaaaccatctccgaagtccccctcttcagatcctacaaagccacctcaacgagctgcttcaattgctgcaatttctgcttctttcgagcgacctaggccaactctgataccaaagtcaatcaaagacgatacaggaagatctgaaggagggagaaaacgaggaagggctcccagtgtatccatacgaacgcttgaggacatcttccatcaatcctgtgacagacattgatgtgactaagcgtgagtatctatctgcggcggagttcagggaaaggtttgggatgacaaaggaagcttttgcgaagctaccaaagtggaagcagaataggttaaagattgcccttcagctgttttaa

SEQ ID NO: 475 - DNA, 2687 bp, Oryza sativa
  N_region (1360)..(1360): n = any nucleotide
  N_region (2174)..(2174): n = any nucleotide
atggcggcggcggtggcgatgcggagcggcagcggcagcgacggcggcggcggcgggtacgacaaggccgggatggactccggcaagtacgtgcggtacacgccggagcaggtggaggcgctggagagggtgtacgccgagtgccccaagcccagctcctcccgccgccagcagctgctccgcgactgtcccatcctcgccaacatcgagcccaagcagatcaaggtctggttccagaacagaagaggtgccgagataagcagcggaaggaggcatcaaggcttcaggccgtgaaccgaaaattgacggcgatgaataagcttctcatggaggagaatgagcgtcttcagaagcaggtctcccagctggtccatgagaacgcgtacatgaagcagcaacttcagaatccgtcattgggcaatgatacaagctgtgaatcaaatgtgaccactcctcagaaccctctgagagatgcaagtaacccgtctgggactccttacaattgcggaggagaccctgacagagttcctctccaaggctacagggactgctgttgattgggtgccaatgcctgggatgaagaagcctggtccggattcgtttggtattgtggccgtttcacatggttgccgtggtgttgctgcccgtgcctgtggtttggtgaatctagaaccaacaaagagatcgtggagatcttaaaagaccgcccatcttggttccgtgattgtcgaagtcttgaagtcttcacaatgtttccagctggaaatggtggcacgatcgaacttgtttacatgcagcagatgtatgctcctactactttggttcctgcacgagatttttggacacttagatacacaactacaatggaggatggcagccttgtgggtctgtgagagatcattgagtggttctggaggtggtccaagtacagcctccgcacagcaatttgtaagagctgagatgcttcctagcggctatctagtgcgcccatgcgagggtggtggctccatcgtgcatattgtggaccatctggatcttgagaggcttggagtgttccagaagtgcttcggccactctacgagtcatctagggtagttgctcagaaaatgactactgcagcactacggcacatcagacaaattgctcaagagacaagcggggaggttgtatacgctttggggaggcaacctgctgttttgcggacatttagtcagaggttgagtagtagaggcttcaatgatgctataagtggttcaatgatgatggttggtctgtcatgggtggggatggcattgaagatgtgatcattgcttgcaatgcaaagaaggttaggaatactagcacttcggccaatgctttngtaactccaggaggtgttatatgtgctaaggcatccatgctactgcagagagtgtcccacctgcagttttggttcgatttttgagggaacatcgttctgaatgggcggattataacttcgatgcatattcagcttcatctctgaagacaagctcatgttcacttcctgggttgcggcctatgagattttctgggagccagatcattatgccacttgctcacacggtggagaatgaggagagattttagaagttgtccgtcttgaaggacaagcacttacacatgatgatggtcttatgtctagagatattcacctgcttcagttcagctttgcactggaatagatgagaaatcaatgggatcctgcttccagcttgtctctgcaccaatcgatgagcttttccctgatgatgctccgttaatatcttcaggctttcgtgttataccgctggacatgaaaacagtgagtttttctcatgatggtacacctgctggtagaacattagatttggcatctagccttgaagttggttcaactgcacagcccacaggggatgcatctatggatgactgtaatctacgatcagtgctgacaattgcctttcagttcccttatgaaatgcatctccaagacagcgttgcaactatggcccggcaatatgtccgcagtattgtttcctctgttcagagagtatcaatggctatttctccttctcggtctggcttgaatgctgggcagaagataatttcaggcttccctgaagccccaacgctagctcgttggatttgccaaagctaccagttccatttggggntggagttacttaggcaggcagatgatgctggggaagcactattgaaaatgctatgggattacgaagacgctattttgtgctgttctttcaagaggaaaagcctgtgtttacttttgccaacgagatgggactaaacatgctagaaacatctctcgtcgctctccaagatctctcactggacaagatatttgatgaagccggtaggaaggccctatacaacgagatcccgaaattgatggaacagcagggttacgtgtacctgcctggtggagtgtgcttgtccgggatggggcgccatgtttctttcgagcaagctgtagcatggaaggtgctcggagaagacaacaatgtgcactgcctcgccttctgcttcgtcaactggtccttcgtgtgacccaaaatccaatccaccatgctcgcagtcatcgtcgttgtcgtcagatctccattttttgcaatctctgtagaagagaggacaccaaaccaaccacaaacctgtcagctgttagctaa

SEQ ID NO: 476 - DNA, 2634 bp, Oryza sativa
cctcttcgagtccccacgtttcatgccaggggccctggtattctgttcttgcttatgatgcttgtgttcgcttgtgccttcatgcatgggctagaggttgcatggaagctcctgtttttctggaaaatgaatgcacacttctgcgaaatacattttgctgcaaaatgtgcttctacaatcagaagaagagctcatggcaaaacggacatctgagcttgttagcgatggagttgcatccaaacccaagaaaacaattggcaagatgaaggttcaaggatgtaccatctggttgcaatttctcatcactctcctctggatgggagtcggttcgaaggatccaaactttaccacagctacctgctaacagttccttttcaaaacatagcttagcgtacatgcaagcaagtgctcagtacatcaagcaggtatctggtgtgctaaaagttggcgtgactaccctgcgcaacagctcatcctatgaaacaccgcaaggagacttactcttgccaattgaggcttaaaagtacacctgaagatgatgttgtaccgatgcagccaggatctggtgaaacacatgtcttttcccggatagccttggagatgatttgatcattgatgtttctgattcaaaagaagcttcgttggtggtcaatataccgggaacctgagcatgaactcgtaggccgcatacagctatacatacactacacaactgctgcagatgagaacaacacgaagtctgttgcagaaactgtggcttatgatattgttttggaagttgcaatgaaagcacagcacattcaacaacggaatctcatcttgcatggttcctggaaatggttgttgacagaatttgcattgtactatggcgtttcagatgcctacacaaagctgagaggtatctctcttatatcatggatgttgcaacccctactgctgattggctcaatctggttcatgaccttttgttacccgtactaatgaagacccaaggcactgctgcattgagccatcaagagaaccgcatattaggtgaagttgaggagcaaattgagcaaactttagcgatggtatttgagaattacaagtctctgaatgaatctttgccgtcgggtttagtggaagattttagacctccaactggtttggctgcttgtgctctagaaccagctataaagctttacagtcttctccatgatgtattatctccagaggctcaactcagattatgcggttatttccagtatgtccaggctgctgccaggaaacgatcaagacgatacatgcttgagactgatgaatatgtagcaggaaattccgaaggcataagagtggatctggtgacctttacaacagcttaccagaagatgaaatcattatgctgtaatctacgtaatgaaatctttacagacattgaaattcataaccagcacatacttcccagagttttgttgacctccccaatttagctgcgtccatctatagtgtggaactctcaaatagactgcgtgcttttcttgtggcatgccctccaactggcccttcatcacctgttgctgatttggtgattgcaactgctgactttcagaaggaccttgctagctggaatatatgagcccaattaaagccggtgttgacgcaaaagagctatttcatttgtacattgtcttatggatcgaagacaagcgcaggacgttgctggaaaattgcaggatggataaggttaaatggtcaggagttaggactcagcatatgaccacaccttttgtggacgagatgtatgatttgctgaagaatacattgacagagtacgaggttatcatttgccgatggccagaatacatatttgttcttgagaatgctattgcggatattgagaaagcagtgatagagtctcttgaaaaacagtacggggatgttttggctccacttaaggattgtattgccccaaagaaatttggtctcaaatatgtgcagaaactcacgaagcgcaattcagttggcccctatactgtacctgaagatctgggcattctcctgaatacaatgaaaagactattagatgttttgcggccaaggattgagagtcatctgaagtcatggagttcttgtatgcctaatggaggaaactctgcagctattggggagagacttagtgaagttacggtaacactgagggccaaattccgaaactacatgcaagctgttgtggagaagctctcagaaaatcaaaatactacaaagctcaagaagatcattcaggattcaaaagaattggtgatggagtcagatattcgaagcaggatgcaagcgttgaaggaccaacttgttgaggcaataaatcatgtacacaaggtcactgaagtccatgtgtttgtagctatatgccgaggtttttgggaccgaatgggacaggtcttgagtttcctggagaatcgcaaagaaaacagagcctggtacaaaggcgcacgtgttgcagtatctctggatgatacatttgcatcccagatgcagcagctgctgggtaattcgatccaacagaaggagctggaaccacctagatccatcatggaagttcggtcgatcctctgcaaagatgcaccccgacagaagaactctagcttctattactga

SEQ ID NO: 477 - DNA, 2610 bp, Oryza sativa
  N_region (1407)..(1407): n = any nucleotide
  N_region (1525)..(1525): n = any nucleotide
  N_region (2200)..(2200): n = any nucleotide
  N_region (2203)..(2203): n = any nucleotide
  N_region (2239)..(2240): n = any nucleotide
aaacataatggcaggcttatcagccatgctgtcaaaaaattggtcgaggattatgaatcagatccaaaatctgtgatgtttcagatattagcgatgctatttgagcaggcttgtggagctaggcataacttttatgcagactacctgtatgaggcagatgtggatggtgttgtgttttcccttgtcgagctagcaaaaaagcaaacagaaggatctcaagaacttcaaagaaaatcttgtttccttttgggataccttggtccatgagtgtcagaatggccctttatttgatggtagcttattccaaaaaatcaaagactatgtggttgctttgtcatgactcctccaagggtttatcgccaagtagcttcattggttgggctccagcttgtgacgtccttaatatctgttgctaagactctcagtggacagcgtgagaccactcaaagacagttgaatgcagagaagaagaagcagactgatggaccgattgttgaatctctaaacaaaaagctagctcatactcacaaaagcattacttacttggaggaactaatgcggaaaatattcagtggttattcatgcaccgctatcgtgatgttgaccctgagatccggatgtcgtgcataaaatcacttggtatttgggttgtctcgtacccatcacttttcttacaagatatatacctgaagtatctaggatggacacttaatgacaagaatgctggggttagaagaacttctattcttgccttgcaaagcctgtatgaagtggatgaaaacataccttctcttggtctctttactgagagattttacagcaggatgatccagcttgcagatgatgttgatatttcagtagctgtgtcagctatcggactcatcaagcagttactgagaggcatcaacttttgagcgatgatgatttaggtccactatatgatttgcttattgatgagcctccgctgatcaggcgtgcaattggggaattggtttatgatcatctgatagcacaaaacatcaaaacctcccagtctggagcaagagtcatcagaggttcatattggtcgaatgctgcaaatcctgagggaattttcagatgacccagtcctgagctcttatgtcattgatgatatttgggatgacatgaaggctatgattggaagtgtataatctccatgcttctggatgaaaatccattaaccgagcttactgacatggatggaaccaatctagttcggatgctgcgagcctctgcaaagaaggctgttggggaaaggatagttcctgcaacagacaatagaaagatgtactacaataaaggccagaaggtgtcaatgaaatattggaaaacagcaagcatgaaataactactgctttgctgaagaaatatccacagcttttaagnaaatacatatctgacaaagctaagatatcacctctaattgatatgatgatgcttatgaaacttgagctgtactcactaaaaaggcaagatcagaaggctgccatagatctcattgcgnatgccttctttaaacatggtgacaaggagaccttgaggtcttgcatcaaggcaattactttctgttgcactaactgtcaggcagatcttcaaaattatgctgaaaacaaactgaaggatcttgaagacgagttggttttgaaagtcaaaactgcaatcaaggaagtagagggtgatgatgaatactccctcatggttaatttgaagcgattttatgagcttcagttgtcaaaacctgtctttctcctccttaacatgtaccttcaattagcatggtgcctgaatgctattgatggtgaaaacccatctgaagcttccattgacgaacttttatccaggcaaagctctctttttgaaaaactctattattacttggtggttctgcctacttatcagaaagagtgtgtcattactgctgagatgtggtgcctgtttaagaagccaaaatattcttcaacaaggctcgagagtttgggatatctcccgcaactagatgttgtccagaatttctggaaactatgtgaagatgcaaatgaagaatatattgaagacacaaacaaggatgttgtcatgattgcagctgcaaagctagtgctagctgatacagtttcaaaggattacctgggcccagagcttgtttctcactatgcatcccctggaacaagtactacggggntantcaaacatctaatcacctcgcttcggaaaaatgctnncaacaacatgggtgccttatttttcgaggcactgaaaaggcttgctggtcggctcgcggggtcctatgttggtgcctcgcgcaataaaaacaagtctgagatcttgaagataatccaagacggtgtttcttttgcatttgtggaccttccaaagcaattgtctttcctcgaggctgctctactgccatttgtttctaaacttccatcgtcagatataccagacatgatgtacagaagaggactcaagatactaatactaatgaagatccaagtgcttggcgcccgtactttacgtttgtagagcatctacgcgataagcatgcaaagaatgaggttttgcagggtaaagcgcaggggtcggccaaggaag

SEQ ID NO: 478 - DNA, 2579 bp, Oryza sativa
atggcggcgccgcccaaggcctggaaggcggagtacgccaagtccgggcggtcctcgtgcaagtcgtgcaggtcccccatcgggaaggaccagctccggctcggcaagatggtccaggccacgcagttcgacggattaatgccgatgtggaaccatgccagttgcatcctcagttgatgatgttgaaggaatagacacactcagatgggatgaccaagagaagataagaaattatgttggaagtgcaccagctactgcaagttctgcagctgctatttcagataaatgcaccattgaggttgctaaatctgcccgtacttcctgtagacggtgtggtgaaaagataaaaaagggaacgtggtatcacgccagctgttttctggagatgtccccagctgcaactgttgagaatttctcaggctgggagatcctgtcgcatgaggataaaagagctgttcttgatcttgttaagaaagatgcccccagctcagtaagggttccaagcgcaagaaaaagcttaaagagcagagtgacacactttggaaattgaaggatgaacttaagaagcatgtgtcaactgctgaactaaggaacatgctcgaagcaaatgggcaggatacatctgggccagagcggcatctattagaccgttggtgctgatgggatgctttttggagcattgggtacttgcccagtttgttctagcttcctatactatcatggtggccagtatcattgcagtggctatgtgtcagaatggtccaagtgtacatactctacgacagaacccgtgcgcagtaaaaagaaatggaaaattcctgacgaaatggataatggttatcttacaaagagtggttcaagtctcaaaaggctaagaaaccagagagagttcttccgccaatgtcacctgagaaatcatgtagtgagcttgagagtgagaatgctgaagtcaagaaagcaagaggaggttgaagataccaattctgcgagaaggttaccttggagaatgcattagaaaaaacagagtgcttccatttgatttgtataaagtagaagctgcattggaatcttcgaaaggaggcacaatgactgttaaagttaaagggcgaagtgctgttcatgagtcctctggtttgcaagatacaggtcatattcttgaagatggaaaaagcatatacaatacaaccctgaacatgtctgacctgacacgaggtgtgaacagagctattatatacttcaggtcattgaagaggataatgggtctgattgttatgtattccgaaagtggggacgagttgggaatgaaaaaattggaggcactaagttggaggagatgtcgaaaattcatgctattcaggaatttagaagattgtttcttgagaagactggaaacccctgggaagcatgggaacaaaaaacaaatttccaaaagcagcctgggaaattttatccacttgacattaaatgaaaagttcacttcctccccagttgctggagctcatgaatatgcttttcaatattgaaacatacaggctgctatgctggaattcaaaattaacatgtctgagatgcccctgggtaaactaagcaaggaaaatatccaaaaagtttgaagcattaactgagatacagaatctattgggtaacactaataatcaagaactggcggttagagagagcttgatcgttgccgcgagcaatcgtttcttcacccttattccttctattcatcctcacattatacaagatgaggatgatttgatggtgaaagaaaatgcttgaagctctgcaagatattgaaattgcttctaaacttgttggcttcgatagtgacaatgatgagtctcttgatgacaagtacaagaaacttcgatgtgccattacgccactccctcatgattgtgaagattacaagctagttgagaagtatcttcttaacactcatgctcctacccacaaggcataaggagtggtcactggaattagaggaagtcttttcgcttgatcgagatggagaattcagcaagtactcaagatataagaataatctacataacaagatgttgttatggcatgggttcaaggttgaccaattatgttggaatacttagtcaaggactaagaatagcacctcctgaggctcccgtgacaggctatatgaaaggcctctactttgcagatttagtaagcaagagtgcacaatattgttacgtggataggaagaatccagttggtttgatgcttctttccgaggttgctctaggtgacatgtatgaactgaagaaagccacggtccatggacaaacctccaagagggaaacactcgaccaagggcttaggcaaaaccgtgccgctcgagtctgagtttgcgaaatggagggatgatgttgtggtgccatgcggaaagccagtgccagcatctatcaagacatctgagcttatgtacaatgagtatattgtctacaatacatcccaggttcagtcaaattgttatccatactcttttgcgcgcttctgttcatcagaagcaggtgaagatgcagtacttgttgaaggttaggttccatcacaagaggtga

SEQ ID NO: 479 - DNA, 2568 bp, Oryza sativa
atgcgcgcgcacgaggcgcctgtgaccgtgcggctgtggtggtggtggtggtacctctccgcctccttgtcctactcgtcggcggcgctccagctaaaccctagtcccgtcgccgccgccaccgcggttctcctgccgggccccgtgatgccgcttcttgatccaggaaagctgcctctttggcgcagctccggaggcagcagagggcttttgagaaagatgggttcttcaggttgctcagagatagtcgaattggtggatgagtcgaaggatgcccgtcctggtggtgtcacccacctgagggtgagagtgaagccggtgggtcaggagcatggagcgcggtcgtgctccgtcgaggatgatctcgataggctcattagatcgattaatgtgcgcacatccgcacgggcttctgggcagacgagcacggataggaggcttatcgcgctcgggaagtcgccgatatcgagctcggagattgttgagtctgtgagcctgaaacaggccctgaggaagatgtgcatctcgcaggcgtcggagatggccgccatgaagaggatgccgaagccgacggcggtgtcaaataccccagaagctggggcaattaagaagctttatacatctgttgtggttcaaaccaacaaggagcgggatgaaaagaataagtttggaaaagtgtccgttttgcctgagaaggatgtaataagttcatcggtgaagtcaacggaagccaagaacaaggtacggaacaaaagcccagctaagaaaaatgtgcgttcagcatctccaaccacaacaaaggtccagaaaaccagaatccaagatgtgatcagtaataagtcatctgaggcaagtgaagatttgcctgcaggtcctgcggtggctaaacagagaaagggcaaaatgaaaacatctagcccccgtgcagttcctgtgggcggttcacgcctggtgttccggagtaaaacctccaccaagaagaaggtcaaaccagaaccagctgctgcagtggtatctcacaagacttgtgaggcaaaaagttccaattctcaagctaataagaagcacgaggccctacaggatgaacccagaactccaacaccaatcaacaagaaggctgcggctagctctatcagcactgatggagctaattgtggcaccaaaggatgtggtgttggtgagatccatggttcaaagcccagtgagttgtcaagatcgaaggaaaagggtgaatgctcccaaagctcaaagagcagcatgggtgattatagcaccagcacaagcataagcgatgatagttatggtagtttcagtggcaatggctgcaggcctcacatgtcaaaagatgtgagatggggggccattaggcgcatggcaatccaacaagggagcctgggactgaagaacttcaagcttctcaaacaacttggttgtggagatattgggactgtttatctagctgaattggtgggttctgaatgcatgttcgcattgaaagttatggatatcgagtacctgataagtagaaagaagatgcttcgagcacaaactgagagggagatcctgcaaatgctcgaccacccatttcttccaactctgtattcttttttcacgaccgataatctgtcttgcctagtcatggagtattgccctggcggtgacctgcatgttctacgacagaaacagcctaccaggaccttttcagaagctgctgctaggttttatgttgctgaagttctcctagcattggaatatctacatatgttgggggtcatatatcgcgatctgaaaccagaaaacatacttgttcgtgaagatgggcacattatgctctctgatttcgatctgtccctgaggtgctcagtaaatccaatgcttgtaagggcctcatcagtaggaagagatgaacctagtagaccttctggcccttgtgcggaaagctgcattgatccactctgtatccaaccgtcatgggccaattcttcttgcttcacgcctcggctagtttcctctaccccttccaggccacggcggccgaggggtgagcctcagaagaaaccatcactgccacagcttgttgttgagccaactgatgcaaggtcaaattcgttcgtcggtacccatgaatatcttgcaccagagattatcagaggagatggccatggtagctcggtcgactggtggactcttggcatctttctctatgaattactctatggcaggacaccgttcaggggacccggcaatgaggagacactgacaaatgtggtctcgcaggggctgaagttccctgataaccctgctgtcagcttccatgcccgggatttgatcagagggttgcttgtgaaggatccggagtaccggctaggctcaacgaaaggagctgctgagatcaagcggcatcccttcttcgaaggcctgaactgggcattgatccgatggactgcaccgcctgagactccgaaaagcttcgacgcggcaagcctcacgacggcacggaagaagaaggaaggcaagtgcctggagttcaggctgaatggagacgacattgagtttgagctcttctag

SEQ ID NO: 480 - DNA, 2333 bp, Oryza sativa
atggggagggggtgcctggctgcgctgctcggcggcgcggtggcggtggccgtgctggtcgccgtcgtccactgcgcggtgacgtacgacaagaaggcggtgctcgtcgacggccagaggaggattctcttctccggatccatacattacccgaggagcacacccgaaatgtgggacgggctaattgagaaggctaaagatggaggcttggatgtgatccagacctatgtcttttggaatgggcatgaaccaactcctggatacaattttgaagggaggtacgatctggtcaggttcatcaagactgtccagaaggctggcatgtttgttcatctccgcatcggtccctacatttgtggagagtggaattttgggggatttccagtttggttgaagtatgtaccaggcatcagcttcaggacggacaatgaacctttcaaggcaatgcaggggttcacagagaaaattgtgggcatgatgaagagtgaaaacctctttgcttcacaaggcggtcctattatcctctctcagcagattgagaacgagtatgggccagaaggtaaagagtttggggctgccggcaaggcatatatcaactgggcggcaaagatggccgtgggattggacaccggtgtgccgtgggtgatgtgcaaggaggatgacgcacctgacccagtgatcaatgcatgcaatggtttctattgtgacacattttctcctaacaagccttacaagcctacgatgtggactgaagcttggagtggatgtttactgaattcggaggaaccatccgtcaacgaccagttgaagatctcgcatttggtgttgctcgcttcgtacagaagggtggttcttttatcaactactacatgtatcatggaggaacgaattttggtcgcacggctggaggtccctttatcaccacgagctatgattatgatgctccacttgatgaatatgggacttgcaagggaaccaaagtttgggcaccttaaagaactccatagagctgttaagttatgtgagcagcctttggtttctgccgatccaactgtgactacccttggaagtatgcaagaggcccatgtgttccgatcttcctctggctgtgcagctttccttgcaaactacaattctaactcgtatgccaaagttatcttcaacaatgaaaattacagccttccaccttggtcaatcagcatccttcctgattgcaaaaatgttgtttttaacactgcaacaggtctacttgagcagcttaatgtcacaagagacaccagtgattacctctggtacattacgagtctgagaagtttctacaaggtggcacgcctctgtcactcactgtgcagtctgctggccatgcgctgcatgtcttcatcaatgggcaactccaagtttgtaggttctgcctatggaaccagggaagatcggaaaatctcatatagtggcaatgctaaccttcgtgctggtacaaacaaagttgcactgttgagtgttgcttgtggactgccgaatgtcggagtgcattatgagacgtggaacactggtgttgttggtcctgttgtgattcacgggttggacgaaggttcaagagatctgacttggcagacttggtcctatcagcaggttggcctgaaaggtgaacagatgaatctaaactccttagaaggctcaggctcagttgaatggatgcaaggatcattggtagcacaaaaccaacaaccgttggcatggtatagggcatactttgatactcccagtggtgacgagccactggctctggatatgggcagcatgggtaagggtcaaatatggataaatgggcaaagcattggacggtactggacagcatatgcggaaggtgactgcaaaggttgccattacactgggtcatacagggcacccaagtgtcaggcaggttgtggtcagcctacacagcgctgtatcatgtgccaagatcctggttgcaaccaactagaaatctgctagtggtttttgaggaacttggcggtgattcttcaaagattgcccttgcgaagcggacagtctcaggtgtctgtgctgatgtatctgaatatcatccaaatatcaagaactggcagatcgagagctatggggaaccagagttccacacggcaaaggtgcatttaaaatgtgcacctgggcagaccatttctgcaatcaaatttgctagctttgggacacctcttggaacttgcggaacattccagcaaggggagtgccattcaattaactcaaactctgttcttgaaaaggtgagaacgctgtttggtcattttggtctacctgaaatttttttcttaaaataa

SEQ ID NO: 481 - DNA, 2292 bp, Oryza sativa
atgctcgcgcggtggctgctcgtgctgctcctcttgctgcctgtttcttggtgtcatcaagatcggcatggccgccgccattacccgcggcggtggaggagcagcggcagtaggagggagctgcacgagccgctgttccctctcgagaacgcgcccgcgctgccaccgccgccgccgccgccaccggcgccgttctttccgttcttgcctgactccgccccgccgcagctgccaccgccggtgaccacgcccgctcccgccggtggcgccggagatggtggtacggacgcaggcgccgccgccaccggggacgcgtcttcgtcttcgtcctcgtcggcgtcgccgcaccccacggcgccggcgaacatctcgtacatggccatgcccatctaccactccgcgccgctccgctccttcctgtcgtcgcaccgcctcctcaccgtcctcctcccggtcgccgccgtcctcgccgccgtgctagccgcggcgctcgtctacctcctcacgcgacgccgccgctgctccaagggggagccgcacgcggcgcatacgaaggccgtgctgctttccccggggaactccacggcgctctacgacggcgaccacgaccagcatggccgggggtccaccgccaccgcagcctccagcgccagctcgccggaactccggccgatgccgcctctaccccggcagttccagcagacgaggacgagcatgccgtcaacttcgcaaaccatccatgaagccggagcagaggacaagcgagcgccgccaccgcagagtgttcgaccgccgccgccaccaccaccacctcctcctccgccgccaatgccgccgagaacggacaacgcgagcacgcaagcagcgcccgcgcctcccccgccattgccgcgagccggcaacggcagcggctggctgccacggcggtacacggagcgcgccgcgccgacggtgatcagggcctcggcgggggcagtccacccggaggagtcgccggcgcgcgcctcgccggaggagaaggccgccgacgcggccgctcggccgaagctgaagccgctgcactgggacaaggtgcggccggcgagctccggccggccgacggtgtgggaccagctgaaggcgagctcattccgagtgaacgaagagatgatcgagacgctcttcgtctccaactcgacgaggagagcatccaagaatggagtcaaggaggcaaatgcagcttgctgcaaccaggagaacaaggtgctggacccgaagaaatcgcagaacatcgcgatcatgctgagggcgctcgacgcgacgaaggaggaagtctgcaaggctctcctggatggccaggcagagagccttggaactgagctgctggagacacttctaaagatggctcctagcagagaagaggaaatcaagctgaaggaattcagggaggatgccgtatctaagctcggccctgccgaaagcttcctcaaggcggtgcttgcgataccatttgcgttcaagagggtcgaagcaatgctctacatcgccaacttcgattcggaggttgactacctcaagacctccttcaaaactcttgaggcagcatgtgaagagctgaggggcagcaggttgttccacaagatcttagatgcagtgctgaagaccggtaaccgcatgaacactggcaccaaccgcggaaatgcaagcgccttcaagcttgatgccctcctcaagttagtcgacgtaaagggtgcagatggcaagacaacccttctgcattttgttatcgaagagattgtcaagtccgaaggtgccagcatcttggccactggccaaacatccaaccaggggagtgccattgcagatgatttccagtgcaagaaggttggcctcagaattgttgctagccttggtggtgagctcggcaatgtcaagaaggcagctggaatggactcagacacactggccagctgcgttgccaagctttctgctggtgttagcaagatcagtgaggccctgcagctgaaccagcagctcggttccgatgatccatggcaagagattccgcgcctcaatcgggagacgaccgagttcttccacggtgactcggtgaaggaggaagggcaccctctgagaatcttcatggtggtgcgcgacttcctcaccgttcttgatcatgtctgcaaggatgtcggcaggatgaacgaaagaacagcgattggatcttcgctccggctggagaatgcacctgttcttgcgaggttcaacgcagtccaacccagtagctccgaggaggagagctcatcgtcctag

SEQ ID NO: 482 - DNA, 2274 bp, Oryza sativa
attttcttttcccccaaaaaaccgaataaagagaaatctctccgagcgaattcgacgagatcggaggctcggatcgagaggtattctccttctgatttgattggattcgggatctgctggcggggatccatctttaggtaggatttcataattttatggactttgattgcaaaacagcaagaggagactcttcatctgtgaatcgttcatgcattgtcactgaaggcactgtcgtccaggcaaagcccgtttctcacaacgggaaagctaaacactggaatagcctcagtacattgaataaccagaagtgcagttatgaattactttccgacccaaagaaaaatgttgaaacaagtgatggtgagaccgcctcaaagtgtgactcatggtgcttcactgatttgccatccgcattggtctgtgaagtgcttgaacacctcgatccaaaggaacttggcattgtatcttgcgtctccaccctactgcataccctagccacagatcatcaggggtggaagaagttctactgtgaaaggtgggggattcctactcctccagtcaccctcaatgggcccttggttccaggaggaacttcagattggaagtcttggaaaacattatttgtggagcgggagtttcgaagtaaatcattcatgggaagattcagtgtggatgttctccgtgaccacagtgaggatgtacgcactgtgttccttctagcatcagtaaatctgatatttactggtggtaatgactctgtgatccgaatgtgggacttggaggaagggcttttgattgataagtcccgcccactttgttgcaccatccgggccattgcagctgacactaggcttttggtcactgcaggaaccaatgcctttattcattgttggagggctgttgaaggtaattcttaccctttccacatctctgggaatggcactgaccagagtcctgagtttcgcctttgggggcatgaaggacctgtgacttgtcttgccttggattcattgaggattttcagtggtagctgggatatgactgtccgtgtttgggacagatccgaaatgaaatgtgttcagaagttcatgcatgcagattgggtttggagcgtggcacctcatggaaatactgttgccagtacagctggtagggatgcctatgtatgggatatcaggagtggtgagttggaaaatgttatttccaatgcccattatggtaatgcattttctttagctcgaacacacctagctgatgtgctgtttaccggaggagaggatggggcaattcgcctgttcaatgtttctgaggtctctgatgatgaagatattaagccagctgctacttgggttccacataccggccctgttcattccctcgcttttgagtatccatggcttgtctcagcctctagtgatggcagggttgcactgattgatttgaggaagcttctgaccccaagaaagtcatcaaaacaaccattcagggttaagaactttgatccaagttccattgaacctccacagagaatgcttcatggctttgggtgcgatcttttttctgtcgccattggtgcagacaggattgtctgtggaggcgaggatggcgctgtcaaagtctggaacttctcagaagcactggagattgagaagagggcacaagctctaagaagtatgaggcaggagaaccgcatgaggcgaaaaaaggcacaagtagagatgaatgcaaatggtagaaggtctgaccaatgtggctcaatagccatgaaaagaaaccaactgaagggtgataagagtgtcacttggcacagcaagcgtgccatcaatgataaggtcaagtcttagattaggatttgtacccttcacaactttacactctacagtagccatgagttgatagttcttttcttggaagtacctttgctgatcccaattaggcttgctgtgtaggttaacattggcattttcactattgaattttataaggttaccaatgcagtgtagccatgcatgaaatccgcatatgcaattcttattcgatatggcatatattgatctaacagaagctctcattgtcttactgttttgagctctagttgcatttgggttttgttcgtatctttctgctggtagctgttatgaatgggaatctacattgaactattccaggaataataagcttctgtaattatgtcactgctggattcttagaacattacttttgctgttacgtggtctgcaataagaaaatcctgcattccgactcatattttga

SEQ ID NO: 483 - DNA, 2169 bp, Oryza sativa
  N_region (149)..(149): n = any nucleotide
  N_region (173)..(173): n = any nucleotide
  N_region (276)..(276): n = any nucleotide
atggctgaggaaaccagcaacgacaacctggtggttcaaggcaacgagattgttccaagcaatggggaagctctagctgaggaagttcagggtgatgaattggtccttgcggaggacttaattcaaggtgacgaggtccaaggaaatgnattggtcagtgctgagatgagtanccctccaacatcaaggcgccgtaggaagaagtctctagtgtgggagcacttcactattgaagctgtctctggaggggctacacgggcgtgctgcaaactgtgnaagcaaacttttgcttacagctctggttcaaaaattgcgggcactagccatctcaagaggcacattaccttgggttcatgtcctaaaattaagaaccaagagcacaagctattactgactccagctggagggactgacaatgatggtgagggtactgtggagcgcccgtctaagaggcgttacagatatactggttatgcaaatgctgcttttgatcaagaacgcagttgctcatatctggcgaagatgatcattttgcatgactatccacttcacattgttcaacagccagccttcactacctttattgacagtctgcagccacgtttcagggttgtagatgttgagacaatggagtgggaggtgtatgctgtttaccagaaagaaaaggaaaacctcatgcaagcattcaacactatgcctggaaggatcagcctcgctattggattgtggacaactagccaaactcttggctatgtttcacttgctgggcagtttattgactctgagtggaagatgcatcgaagaatgctaaacttcatgatggtgtcttctcctcattcagagaatgcacttagtgaagctattagtacaagcctttcagactggaatatgaaggacaaactattcaccatcacattggacaatgattgctcatcacatgatatatacagtgcgaatctgagggattatctctccaacaagaacaacctcatgctcaagggccaactatttgttgtaaggtgttatgcccatatcctgaatgcagttgctcaggatgtcattgcttcaattcatggtgtcatctataatatccgcgaaagcattaagttcataaaagcttctcctagctgtgaggagaagtttgcagagattgctctgcaactagagatcccaagtaccaagaccctttgtctggatgttacgacacagtggaacactacctatctcatgctgctggctgccttggattataagcaggccttttctactctagagacaagtgatgataactacaacgaggcaccgtccgctgaggactggaaaaaagttgaggctgcctgcaattacttgaagctattgtatgactcagcacatagcatcatggctgcagcaaatccaacttcaaatctctttttccatgaggcatggaaacttcagctcgagctgtcaaatgccacagggcgtgaagaccctgttttcagcagcattgccaaggatatgcacgagagatttgacaagtactggaaagattgcaaccttgtgttagctattgctgttgtgatggatccgcgcttcaagatgaagctcgttgagttcagctactcgaaaatttatggtgttgaagctgcgaaatatgttaaggtggtggatgatgctgttcatgagctctacaacgagtatgttgcacagcccctccccttaacgccggcttacgttgagcaagggggaggtaataatgcacctgctagcgagaatagtactcaagcaactgctccttcaaccggcgatggacttgtggacttcgatatgtacctttctgagatagctacaagccagccaacaaaatctgaactggaacagtacctggatgagtccctcactccgcgcatccaggaatttgacattctgaactggtggaagctcaacactctcaagtaccctactctctcaaagatggcccgggatatcttggccattccgatgtcgatggtgagcagcggcaactctattttctctgctggaactggaactcgcatgcttgatgactacagaagctcatcgcgtccagaaattgtggaggcgctcgtttgtgccaaagactggcttcagtatttaccagctaccccggaggcaccgagtacagcgctggtcaaggtggatgcagcatag

SEQ ID NO: 484 - DNA, 2122 bp, Oryza sativa
atgggccccaaggccaacgccgccgccgccggcgacctcccggagtacgccgaggtcgatcccaccggccggtacggacgggtacaacgacgttcttggcaagggcgcgtccaagaccgtgtaaggtacagggcgttcgacgagtaccaggggatggaggtggcgtggaaccaggtgaagctgcacgacttcctgcagagcccagaggacctggagcggctctactgcgagatccacctcctcaagacgctcaagcaccgcaacatcatgaagttctacacctcctgggtcgacgtctcccgccgcaacatcaacttcatcaccgagatgttcacctccggcaccctccgccagtataggcagaagcacatgagggtgaacatatgggcggtgaagcactggtgcaggcagattctgagtggattgctgtacttgcatagccatgatccacccatcatccaccgggacctgaagtgtgacaacatcttcgtgaatgggaaccagggggaggtcaagatcggtgaccttggccttgccgccatcctccgcaagtcccacgccgtccactgcgtagtaggcacgccggagttcatggcgccagaggtgtacgaggaggagtacaacgagctggtggacatatactcgttcgggatgtgcgtgcttgagatggtcaccttcgagtacccgtatagcgagtgcacgcacccggtgcagatctacaagaaagtgatctctggtactaagccggaagcgttgtacaaggtcaaagatccgatggtgaggcagttcgtcgagaaatgcctggccactgcatcccggaggctctcagcgagagagctgctcaaggacccattcctgcaggttgacgatttggtcttttgtccgggtgatggagattacagcctgatgaactatctgcggcagccttatttagaacacgcttatagtaatgtctccatgatgagtaatggattatctgaaagcattgacgaggatacaccaacggaagatagatgggattgtgaagatgatgacattaaagctgatggtattgacttgttcaatgggcatgaagatgagcctcttggcaatgtggatatcacaatcaaagggagaaaaagtgaggatggaagcatattcctcagattacggattgcagataatgatggggcatgtacggaacatctattttccttttgacatagaggccgataccgcattgagtgttgcaactgagatggtagccgagctagatataactgaccatgaggttactcgaattgctgagatgattgatggcgaggttagtgcactggtgccagattggaggcctggcccaggcatagaggaatctcaagacactacatactgccataactgcggatcaaatgtatcgtcatgtggttcactttatgcctacatgtcatctgctgctcgaggttgccagtgtgcagagctacatgggcggtttgaggagataacattccaagccaatggagagcagaccgatttgcaggactccggaggcagctctgatgatggaggtggccaaacacaacatgtcaaagatcaggaagccgtacacagtaatgggtttgtacaaatgggtagaagaggtcctcgtgaccagttttgttttagttcattccaggaacagtcttgctcacctcggcactatgagtatgacactagcctccaagcaaaagggttcgacatgaagcatgaagtaaagatggccaaatacaaagcacggaaaatggcacatctaaggagagctattcatccatctctggactttgacaacttgaatggagaaaggaggatgaagtcttcactgaacaagttacagtcttttcatattggtaagaatcacaatttccgcataccgacctgcgagcgaagcccaggcgctagagacgctgaggaggaccctgacatttttaatctagcgtaccatagccggcaccccgatccaggagcccaaagggcccggcattgtgaggttgatgcacagagcagtccagatctcatgtttacagctaggagttactacacaggagctcagctgccaacaaatctcccaagaacaaaatctgtaaccctaaatgctgttgatgcctga

SEQ ID NO: 485 - DNA, 2073 bp, Oryza sativa
atgacgaagcaccaggccgcgcacatcgcggaccaccctggtgtcctcgccatctaccccgacgagcatctccaactgcacaccactcagtctccctccttcctccgtctctcaccgtccgttggcctcgtacaggcatcaaacggcggcggcacgggcgcggtgatcgcgatcttggacactggcatttatcccaagggccgcaaatccttcaccgctgactcgtcgtttcctccaccacctcgcaccttccgtggtcattgtgtctccactcgctcgtttaatgccaccgcctactgcaacaacaagctcgtcggcgcaaagtttttctataaagggcacgaggccaagatgggtcacctgatcaatgagacacaagagtccaagtcacctctcgacaccgaaggccacggcacgcacactgcatctaccgccgctggttcagcggtccctggcgctaactttgttggctatgccaatggcaccgcccaaggcatggctatacgtgcacacattgcatcctacaaagtatgctggagagatgatggaaatgcatcgtgcgctacctctgacattctcgccggaatgaatgaggcaattgcagatggagtagatgtcatatccctttccttgggtggtctaaagccacaactctacaacgaacccacctcccttggcgcattcaatgccatccgtagaggcatagtcgtgtccacctccgctggaaatgatggccctggcacgtatactgctaataacctcgcaccatgggtgataacggttggcgcatcaagcattgaccgtcggttcccagctcacgttgtccttggacataatcgcggaacctacatcggcacctcgctgtatttcggccaaaacacagccggttcatttctacctctagtgtacggtggtgatgctggttctgctctgtgtgaatacgggatgctttccagcaacatggtcaccggaaagattgtcctctgctatggcacaaaaaatactaccaaccccatagtgcaagaagctgctgtccaacaagccggtggtgttggtgccatcatttcaattgctccagaatatggtgatttcttacagagcttcgctgatatcttgccaacgtcgacgattaccttcaaggacaccgaaacgatccattcgtacacacagtcggtggccgacccggttgcaagaatcgacttcttaggcactgtgatcaaccaatcaccgtctgctccaagggtcgcagccttctcaagtcgtggaccgaaccgctttgctccagagatcctcaagcccgacatgattgcccccggtgtcgacatcctcgctgcatggaccggagaaatgtcgcctaccatggccaatgtcatcgacaataggcgcgtcgagttcaacatcatctccggcacgtccatggcgtgcctgcacatgagcggcatcgccgctatgcttaaggtggcacaaccgagttggagcccagcggcaatcaagtcggccatgatgacgacggcctacaatgtggacaatgatggcaatgccatcaaggacatggccacgggccaggcagccaggccgttcgagcttgggtctggccacgtcgaccccaaccgtgccctcgaccctggattggtgaacaacaccaccgccgacgattacataacattcctctgcagcctcggctacaacagtagtcagatcgcgctcttcacaaatgacggttcgacgacagactgctcgaccaggccacggaggtccgtgggcgacctcaactacccggcgttctcggtggtgttcgtgaggtccggagagcaggtcacgcagcgccgcgccgtgaccaacgtcggggcgaacaccaatgtcatgtacaacgttaccatcaccgcaccgcccggcaccactctcacggtgacgccaacgaggctcgcgttcgacgcgcagcgcagaacgctggattactccatcaccgtgtcggcaggggcgaccagctcgtccgagcaccagtggggatcgatcgtctggagcgatggccaacatacggtgaggagccccgtcgtggccacctggcaataa

SEQ ID NO: 486 - DNA, 1966 bp, Oryza sativa
atggcgggtgcaagccatcacctggtcgtcttcttggcagcgctgctcgcgttgctcccgggaagctcgcagctgcagtactcgcagacatggacgctgttcaagatccagcagatgctgaaccacccgccggtgctgagccactggcgccggaccaccgacttctgcggcggcggcggcacggcggcgccgtcggcggccgtggtgtgctacggcgacacggtgacgcagctgcacatcgccggcgtccgcggcgcgccgccgctcccgatgaacttctccatcggcgcgctcgtcatggcgctgtcgaggctccccgacctcaaggtgctcacgctgtccgggctcgggctctggggccccctgccggacaagatcggccgcctcgccgcgctggagatcgtcaacatgagcacgctgatcctcgacgacaacggcgagctcccggcgtggatcggcgagctgccgcagctggccgtgctgagcctgcggaacaactcgctgggcggcgccgtgccggcgtccgtgggtcgcatggagtcgctgaggtcgctggtgctcgcgtcgaacaacctgacggggaacctgccggacatgagcggcctcaccaacctccaggtgatcgacgtcggcgacaactggctcggcccggcgttcccggcgctggggcggaaggtggtcacggtggtgctcagccggaacaggttcctcgacgtgtcgtggaaccgcttcgtcggcccgttcatgccggcgctgctgtccctgccggccatccgctacctcaacgtcgccggcaacaggttcaccggcgtgctctccgacaaggttgcctgcggcgacaatctccagttcgtcgacctgtcctccaacctcctcaccggcagcgagccggcctgcctgaggccggacaagaagccggcgacggtggtgctcgtcaatgccaattgcctcttctgccagaaccaagccttggccgtggggataactcacggcggcaagaaaatttcaccaaatttgatgtcaaaattcactaagatttgatttcctactggtgtctgcgacaaaatcaaaacaggctacatatcacagacagtgaagctgggagctctgggaattccaccatacagaacattttctttggttgagcttgaagctgccactgacaactttgagaactctttgctactggggcaagattctttcggcgagcagatgtacagggggagactaggcaatggcacactagtggccatcaggagcctgaaggttaagaggaatcagtcttccctaagcttcagtcgccacattgaaacaatttctaggctcagacaccggaacttggtcagcgctctcgggcactgcttcgagtatgatcttgatgattctactgtcactcagctgtacctcgtgttcgaatacgtgcaaaacgggaacctacggagcaggatttcgcggaaggaagcttacatgggcacagagaatatcagctgccatcggcatcgccaacggcattcagttcttgcatgctgggaacaatctgaagatcaacaacattcttctcgatcagaatcatgtcgcgaagatcagcagctacaatatcccaatcctaggagaggccatgaaatctgaggataaaaccgacatcttcgatttcggggtgatccttcttgagaggaggagctttgccgaccaggaggtgagcaagggatgctctgacgagtcgctgaggacgatcatgcagatctgcctgaggtgcctggccaaggaggctgtgcagcggccgtccatcgaggacgtcctctggaacctgcagttcgctgcacaggtgcaggacgactgggaaggagataaccggagcagcgacggttcaatggtgtcgtcgtcgtcccggatcacgaaatcctccagattccagaatgagcaaaccaggtgtgccatacatccaaatcaatcaagtatcctctga

SEQ ID NO: 487 - DNA, 1766 bp, Oryza sativa
atggagagcaacggcggaggaggaggatctcccaaggaggcagcggtggtggtgccgtcctccggcgacgccaccctgggcgggcacctggctcggcgcctcgtgcaggtgggcgtgagcgacgtgttcgccgtgccgggggacttcaacctgacgcttctggaccacctgatcgccgagcccgggctccgcgtggtgggctgctgcaacgagctgaacgccggatacgcggccgacgggtacgcgcgggcccgtggcgtgggcgcctgcgccgtgaccttcaccgtgggcgggctgagcgtgctgaacgccatcggcggggcgtacagcgagaacctgccgctgatctgcatcgtggggggccccaactccaacgactacggcaccaaccgcatcctccaccacaccatcggcctcccggacttctcccaggagctccgctgcttccaacccctcacctgctaccaggccgtcgtcaacaacctcgacgaacgcccacgaccagatcgaccgcgccatctccaccgccattcagggagagcaagcccgtctacatcagcgtcagctgcaacctccccgccgtcccccaccccaccttctcccgcgacccggtgccctacttcctctccccgaggctctccaaccaggccagcctccacgccgcgctcgacgccaccctcgccttcctcgacaaggccgtcaagcccgtcctcgtcgcggggcccaagctccgcgtcgccaaggccggaggggccttcgtggacctcgccgacgccagcggccacgcggtggccgccatgccgtccgccaaggggctggtgccggagacgctgccgcgcttcatcgggacctactggggcgcggtcagcacggccttctgcgcggagatcgtggagtccgcggacgcctacctgttcgcggggcccatcttcaacgactacagctccgtggggtactcgtgcctgctgaagaaggagaaggcggtggtggtgcagcccgaccgcgtgaccgtcggcaatggccccgcgttcgggtgcgtgatgatgagggacttcctgtcggagctggccaagcgcgtccggaagaacacgacggcgttcgacaactacaagaggatcttcgtgccggagggacagctgccggagtgcgaggccggggaggcgctgcgggtgaacgtgctgttcaagcacatacagaggatgatcggtggcacggagatcggggcggtgatggcggagacgggggactcgtggttcaactgccagaagctgcggctgcccgagggttgcgggtacgagttccagatgcagtacggctccatcgggtggtcggtgggggcgctgctgggctacgcgcaggctgtccaaaaacgggtggtggcttgcatcggcgacggcagcttccaggtgacggcgcaggacgtgtcgacgatgctgcgttgcgggcagcggagcatcatcttcctcatcaacaacggcgggtacaccatcgaggtggagatccacgacgggccgtacaacgtgatcaagaactgggactacgtgggcctcgtcaacgccatccacaacggcgaggggcggtgctgggccacccgggtgcggtgcgaggaggagctggaggcggccatcgcgacggccacgggggacaaggcggacagcctctgcttcatcgaggtggtggcgcacaaggacgacaccagcaaggagctcctcgaatggggctccagagtctccgccgccaactccaggccgcccaacccgcagtag

SEQ ID NO: 488 - DNA, 1727 bp, Oryza sativa
atgaaggacgagctcgacgaggagggggactcctcctcccccgtggcaatgaaggtcggggaggagaaggagatcgggaagcaggggctcaggaagaggctcctcaaggaaggggaaggatgggatcgccccgaatccggcgacgaggtccaaggttcactacaccggcactctcctcgacggaaccaagttcgattccagccgcgatcgtggaacccccttcaaattcagcctcggccaagggggaggtgatcaaggggtgggatgagggtatcaagacgatgaagaagggggagcaggcggtgttcaccgttccgccggagctcgcctacggcgaggccggctcgccgccggcgatcccgcccaacgccacgctgcggttcgacgtcgagctgctctcctgggccagcgtcaaggacatctgcaaggacggcggaatcttcaagaaggtgctcgccgagggacacaagtgggagaatcccaaggacctcgacgaggtgctcggtcaagtacgaagcgaggctcgaagacggaactgtggtatcgaaatctgacggtgttgagtttgctgtcaaagatgggctatttctgcccggcgctttcaaaggctgtcaagacgatgaagaagggcgagaaggtcctcctcactgtcaagccacaatggctttggtgagcaaggcaaaccagcttctggagctgaagctgctgtgccgccaaatgctaccctgtacgtcgatcttgagttgctctcctggaagacggtcactctgatcggcgacgataagcgcatcctgaagaaagtcctcaaggaaggggagggctatgagcgccctaacgatggagcagtagttagagtatcggcaagttggaggacggcactgtgttttccaagaaagggcatgatggtgatgagccatttgagttcaggacagatgaggagcaagtcatcgaagggctggacagaactgtggtcaccatgaagaaaggagaggttgcattggtgagattaccacctcaacatgctttcggatccactgagactaagcaggatcttgctgttgttcctgcaaactccacagtctggtatgaagttgagcttgtctcattcgagaagaggagaaagaatcatgggatttgaaggacaatgctgagaagattgaagcagctgccaagaagaaagatgaagggaatgtgtggttcaagatgggcaagtatgctaaggcctccaagagatacgaaaagaggctgcgaagtacatcgagtatgacagctccttcactgatgatgagaagaagcaatcgaaagcactcaaggttagttgcaagctcaacaatgctgcttgcaaactgaagctgaaggaatacagggaagcagagaagctctgcaccaagaggttttggaactggagagcacaaatgtaaaggccttgtacagaaggacgcaggcatacattgagcttgctgatctggaactagcagagttggatgtcaagaaagcactggagattgatcctgacaacaggtgaagatggtgtataagacattgaaggagaagatcaaggagtacaacaagagagacgccaagttctacggcaacatgttcgcgaaatggaggaagctggaacacatggagaacaagtgggaagcaggaggcacagcctatggccattgacagtgccgcttgaggattagctctgctttcttttttctgaacctggttactgctag

SEQ ID NO: 489 - DNA, 1724 bp, Oryza sativa
atgcctggtcaagcggcaaagccgaagggcactggggaacagggaggtgatgctgaggtggtttccgaggagcgaacaccatctgaccagcatcaaggttctccggcatctacgctggacaaggagctttcaggcctctcttcggagtctgggatcctggatgattcgttagtcgcggaggaggaagattccggcgaactgaaggagatccaaaacttggattgtaatgggaatcaggagaagaagacgtcacagaagagtagtacgagcgatagttttgcttctgctaaagtgagtgatgggacgaatagtttgaggaagaccagtggtagtgctaagacaagtgacagggctaatttcactgagagtgggaagagcagcatgtgtcgcgcgagcacgagcagcgacataagtgatgagagctcacgcagcagcatgagcagcgccaccacaaagccgcacaaagggaatgattcaaggtgggaagcgatccagacggtcaaaaccaaggatggcattcttggtttaaaccattttagattgcttaagaagttaggttcgggagatattggcagcgtgtatctctcagaattgagtggtactaggagttactttgcaatgaaggtcatggataaggcatctttggcaagtcggaagaagcttcttcgatcgcagactgagcttgagatactgcagtcgcttgatcatccatttctaccaaccctatatactcacttcgaaacagataaattttcatgtctggtgatggaattctgccctggaggggacctccacactcttcgacaaaggcagcctggaaaacatttttcagagcaagcagcaaattctatgtagcagaggttctcctagcgttggagtacctgcatatgcttggtatcatataccgtgatctgaagccagaaaatgtcctagttcgggaggacggccacatcatgctttccgactttgacctctctcttcgctgttcagtgagcccaactgtgatcaagtctgcaaatcctggtttagatgcactgcagaggaataatgcagcgtactgtgtccagcctgcttgcatagagccatcgtgcattcagccatcatgtgttgctccaaccacatgctttggaccacggttcttcaagtctaagtccaaatcgaagtccaagaaagagaaatcaaagcctgaagctgcaaaccaagctagcttgttccctgagctcatcgctgaaccaactgatgctcggtccatgtccttcgtcggcacccatgagtacttggccccagaaataattaaaggcgagggccatggcagtgcggtggattggtggacctttggcatattcttgtatgagctattgtttggcaagacccctttcaagggttcaggcaatcgagcgacgctcttcaatgtcgttggccagcccttgcggttcccagaatccccaatagtgagcttctcggcaagggacatgataaggggattgctggtcaaggaccctcagcaccgacttggctacaagcgtggggctactgagataaaacagcatccattctttgagggtgtcaactgggcgctcataagatgcgcgagccctccagacattcctaagcccgttgagctcgattgtcgcccgaagcaggtgccgtcaacgaatggcaaggttgcaccagcttccaaccagaagggctcagacaattatctagagtttgaatttttctag

SEQ ID NO: 490 - DNA, 1705 bp, Oryza sativa
  N_region (305)..(305): n = any nucleotide
atgcgatcttcatgggctgactcagctgcgaacgccgaggaatcggcgcccgcggctgctgctaaccacggcaactcgcgcctcccgcgcagctcatacgttcccccgcacctccgcggaggaggtggtggtggcggtggtgcatggaactcccgccctgggggttgggaccgaagagaccgtgaaccggatccttttgccaatagtgaggctgcggaagttgactttgagggcgagaacactggcatcaattttgaagcctatgaagacatccctgttgagacaagtggccatgatgtgccccnaccagccaatacatttgcggagattgatttgggtgacgcgctgaatgagaatatcagaaggtgcaaatatgtgaagccgacaccagtgcagcgttatgccatcccaatctccattgcaggacgggatctcatggcctgtgcacaaacaggatctggaaagacagcagccttttgtttccctatcatcagtggaatcatgaggtcaaggccaccccccaggtcacggggttccaggaccgcatatcctcttgcactaatcctatctcccactcgtgagctgttcggtccaaatccatgaagaagcaaggaagtttgcataccagactggtgttaaagtggtcgttgcatacggaggagcgccaattactcagcagctgagggagttagaaagaggtgttgaaatccttgtggcaactcctggccgcttaatggatttgttggagagggctagagtctcactgcagatgataaagtatttagctcttgatgaagctgatcgaatgcttgatatgggatttgagccccagatacgtaaaatagttgagcagatggacatgcctccacgtggagagaggcagacgatgttgtttagtgctacatttccaaaggagatacagcagagaatggcttcagatttcctcgccgattacatatttcttgctgtcgggagagttggttcaagtactgatttaattgtccagagggttgagtttgtccttgatgctgacaaaagaagctacctcatggaccttcttcatgcacaaagggcaaatggtacacatgggaagacaaagaggggagctgatgccctggagaactggctttataacaatgggttcccagcaactagcattcatggagacagaacacaacagcaggaaagagagtatgccctgagatccttcaagagtggagcaactcccatcctcgtggcaactgatgttgctgctcgtggactggatatacctcatgttgcccacgtcattaattttgacctcccaaatgatatagacgactatgtccatcggataggaaggacagggcgtgcagggaaatctggtctggcaactgcatttttcaacgagagcaacaccccactggcaaggccgctgagtgagctcatgcaggaggctaaccaggaggttcctcaatggcttgagaggtatgctgcccgttcatcgtttggaggcggcggcgggagaaaccgcaggtcaggtggtggtgctaggtttggtggccgggacttccgacgagacagaggcagtggtggtggagggtatggtggtggaggtggaggttatggaggtggcggatatggtggtggtggcggtggaggcggctatggtggcggtagcagctacggaggtggcgggcaaggtttttctagtgcttgggactga

SEQ ID NO: 491 - DNA, 1626 bp, Oryza sativa
atggagggagctggcagagatgggaaccctcttggcggttaccggattggcaaaaccctagggattgggtcatttggcaaagtgaagatcgcggagcatatattgactggtcacaaggtggcaatcaagatcctcaatcgccgtaagatcaagagcatggagatggaagagaaaggttggtactgatccctttgacccttttgttcaagatgtttgtagaatatatacgaaatgatagatacttggagttaaaagagaaatcaagatacttagattatttatgcacccacatatcattcgcctttatgaggtgatagacaccccagctgatatttatgttgttatggagtatgtcaaatctggagagttgtttgattacatcgttgagaagggaagactgcaagaggaagaagctcgacgctttttccagcagagatcatatctggtgttgaatattgccatagaaacatggtggttcatcgtgatcttaagccagagaaccttcttttggactccaaatgcaatgttaagattgcagactttggcttgagtaatgttatgcgtgatggtcactttctgaagacaagttgtggtagcccaaattatgcagcacctgagaggtgatatctggtaaactatatgctggccctgaagttgatgtgtggagttgtggtgttattctttatgctcttctttgtggtacccttccatttgatgacgagaatattcccaacctttttaagaaaataaagagggtggcatatatacccttcccagtcatttgtcacctttggcaagggatttgattcccagaatgcttgttgttgatcccatgaagaggatcaccatacgtgaaatccgtgaacatcagtggttcacagttggtcttccgcgttatttagctgtgccacctcctgacactgcacaacaggttaaaaagagctcgacgatgaaactctgaatgatgttatcaatatggggtttgacaagaatcagctaatcgaatcacttcacaagagactgcaaaacgagaggcgacagttgcctactatttactattggacaataggctgcgcacaaccagtggctaccttggagctgagttccatgaatctatgatcttctctcgctcaagtaactccagctgagacaccaaactcagccactgatcatcggcagcatgggcatatggaatctcctgggtttggcttgaggcatcatttcgcagctgacaggaaatgggcccttggtcttcaggttttatgctgttactataagcagtctcgagcacatccacgagaaataataactgaagttcttaaagctctgcaagagctaaatgtttgctggaagaagattggacattataacatgaaatgcagatggagtcctagttttcccagtcatgagagtatgatgcataacaaccatggctttggtgcagaatctgctataattgaaactgatgacagtgagaaatcaacccacactgtgaaatttgaaattcagcagctttacaaaacaagggatgaaaaataccttcttgacttgcaaagggtcagtggaccacagcttctctttctggacctgtgctctgcctttctaactcagctgagagtcctttaa

SEQ ID NO: 492 - DNA, 1575 bp, Oryza sativa
tacgactacattgtcgtcggcgggggcaccgccggttgccccctggcggcgacattgtcgctcaagtacaaggtgctcctgctggagaggggagggtctccgtatggcaaccgcaacgtctcctacatggagaacttccacattggcctgagcaatatggcgccggactcggcgtctcaggccttcatctccactgacggcgtcatcaatgcccgagcgagggtgttgggaggtggcacctgcatcaatgccggcttctacagccgggccagctcaaaggctgggatgaagacctggtgaatgagtccttcccttgggtggaggacaagatcgtccagtggcctaagatcgcaccttggcaggctgcactaagggatgggctactccaagcaggtgtatctcctttcaatggctacacatatgaccatgtttctgggaccaaagttggtggcaccatctttgatgagactggctaccgccacacagcagccgacttacttgcagctggagaccctaacaacctaagggtgctgcttcatgctagtgtgaacaggatagtctttaactcgcagagagccaagagcaaccggagttcagttcaccgatgagaatggaggactccaccaggcattcctcaacagcaactgtgatagtgaaatcattgtctctgctggcgcaattggcagcccccagctgctattgctcagtgggattggacccaagaatgaccttaggagccataaaattcctgtagttctccataacaagtatgtgggtaaagggatggctgataaccccatgaactccatattcataccgacgaaaagcccccctcgccagtccctgattgagactgttggaataactgaagctggtgtgttcattgaggccagtagtggttttggccagtcaccagaaagcatccattgccaccatggaatcatgtccgctgagctgtccacaattcctccgaaggaaagaagcctggaaaaagcacagaagtatgcaaataccaaacttaatctacccaaagagatattccatggtggttttatcctcgagaagattgatggtccactgtctacgggacatcttgccctgatagacactgatgtcaagaagaaccctgcggttaccttcaactacttcagtcatccacaggatctcactcgttgcgtctatggtatcaagaccattgaacgaatactgaagacaaaccgtttctctgaactgtctgccaacactgatggacattcaatggaaagagtgctcaatatgagtgtgcaggctaatgtgaacttgatacccaagcatacaaatgacacagaatccctagagcaattttgcagggatacagtaataaccatctggcactaccatggtggatgccatgtagggaaggtggttgatcagcaacaccgtgtgcttggagtttcaggcgtccgtgtagtcgatggctcaacattttctagatcaccagggacgaaccctcaagccacggtcatgatgatgggcagcagatattttggagtgatgatcctaaggggaagactaggtcgagcagctggagtgtaa

SEQ ID NO: 493 - DNA, 1573 bp, Oryza sativa
  N_region (844)..(844): n = any nucleotide
  N_region (1286)..(1286): n = any nucleotide
  N_region (1289)..(1289): n = any nucleotide
  N_region (1523)..(1523): n = any nucleotide
atgagctcctcctctcatcagtcatcactacactcacttagctagtggcaaaaagatagatagctctagctcgtactgcatcaaacgggcggtagttgcactgcccgtttcaagggaactccagtgacaaccagcttcttgccaattcagaacgtgaccgtgtggtacgtacggccaaggcagtggctagctcgcgatggcgtcggagtgggaaatggccatgggcgtcgacctcggcatggggatgagcacgtaccacaacgcctccggtggcatcgccgccgcgccgatgatgggccaccacggcggaggaggcggcggcggcgggtactccgccgcgcaccaccaccaccaccattactacgggatgcctcatcaggcggcgatgggcgacgccatgcgcgtcgacgacctcctcgacctctccaacactcccggcgcccacgacttcttcccggcctccgctgccgccgccgccgcaggtgaccacgggcaccaccaccaccaccacatcggcggcatgggcgagccgtcgggcgccacgccgtcggccacgtcgtcagatcaccagacgtcgatgctctccttcgccgacgacttctacatacccaccgaggacgctgccgagctggagtggctatccaagttcgtcgacgactcctactccgacatgccgaattaccagtcgtccgcgcacgccgcaatggcggcggcggctgcttccgcggccaacaacggcggcggcagctcggccggccaagacagctgcctcacggcggcgcctggccgcggcgcccgtagcaagaggtcgcgcgcgacggccgcggccgccgccgcgtggcantccctcgtcccggggcccgccgtcccagtcgtcgccgtcgtcgtcgtgctcgtcgtccgacttcccgtcctcgaacaagccatcgggcaccgcgaggccgaacggctcaggaggcggcagccgcggcaagaagagccccggccccgcgggggccgaggtgggcatggaggccggcgtgcggcggtgcacgcactgcgcgtcggagaagacgccgcagtggcggacggggcccctgggccccaagaccctgtgcaacgcgtgcggcgtgaggttcaagtccgggcggctgatgccggagtacaggccggcggcgagccccacgttcgtgctgacgcagcactccaactcccaccgcaaggtcatggagctgcgccgccagaaggagctcctcatcatccgcggcagccaccgcgacgccgccgcggccgcagcagcagccgcngcngccgccgccgcgggatccgccgcggcgaccgggaggccggagctcatgttccgcgactacggcgtgtgctgatcaagcggcgcacgcggcgtccagagcgagccatgcaggcgcagctacgcatcacatcgcatgcatggatggatgcatgcacagcacagacgcgcgggcttagatccttttgcgaaattctcccgtctccctttctctcgtttatttcctctcccttttttntccttttttgccttattccagatatttttcaatgcttttttgttaattaa

SEQ ID NO: 494 - DNA, 1561 bp, Oryza sativa
gttcggttccattatggtcatcctgatattttcgatagactcttccatattactagaggtggcataagtaaagcctcaaagactataaatctaagtgaagatatattttcagggttttaattcaacaatgagagaagggaatgtcacacatcatgagtatatgcaagttggtaaggggcgtgatgtgggaatgaatcaaatttcaagctttgaagctaaggtggcaaatggcaatggtgaacaaacattgagtcgtgatatctatcggctggggcgcagattcgatttttatagaatgctatccttctactttactacagttgggttttactttagtagcatggtacttacagtttatgtgtttctatatgggaggttatatctagttatgagtggtctggaaaggtctattttgctggatccacgtatcgagcagaacattaagcctcttgaaaacgcactggcctcgcagtcttttttccagctaggtttgctgcttgttctccctatggtaatggaagttggcttagaaaagggattccgcacagcattaggagagtttgttatcatgcagcttcagctggcatctgtgtttttcacattccagcttggcaccaaaacgcactactacggaagaacaatactgcatggcggggctaaatacagacctacaggtcgtggatttgttgtctaccatgcaaagtttgctgacaattaccgcatgtactcccgcagccactttgttaaaggacttgaactgttgatacttctggtggtttatttagtgtatggaagttcctaccgcagctcaagcatgtacctatttgtcaccttctccatatggttcctggttgcatcttggctcttcgcaccctttatcttcaatccgtcatgcttcgaatggcagaagacagttgatgactggacagattggaggaagtggatggggaaccgtgggggtatcggcatgtctgtggatcaaagctgggaggcttggtggataagtgagcaggagcaccttaggaagactagcattcgctctctcctcttggaaatcattctttcgctccgcttcttgatctatcagtacggtattgtgtaccatctgaacatagcacgccgcagcaaaagcattctggtttcgattgggcgacagaagtttggaacagatctgcagcttatgttccgcattctcaagggcctcctgttccttggttttgtctctgtgatggctgtattattcgtcgtttgtaacctcacaatttcggatgtttttgctagtattcttgggttcatgcctactggttggtgcattcttctgcagattgggcaggcatgttcgccgttggtgaagaaggcaatgctgtgggattccatcatggagctcgggaggtcgtacgagaacctgatgggactcgtcctcttcctccccatcggcctcttgtcatggttccccttcgtgtccgagttccagacacgactgctcttcaaccaggccttcagccgtggcctccagatctcaaggatcctcgccgggcaaaaggacattggagaggaatga

SEQ ID NO: 495 - DNA, 1555 bp, Oryza sativa
atggccggcggctcgtcgccggcgatacggccgatcggcaagtcggcggtgcaccggatctgctccggccaggtcatcttcgacctctcctccgccgtcaaggagctcgtcgagaacagcctcgacgccggcgccaccaccgtcgaggtcaccctccgctcctacggcgaggactccttcaccgtcgccgacaacggcaccggcatctcccccaccaatttcctcgctctgaagcaccacacctccaagatctcggacttcggcgacctcgcctccgtcgccaccttcgggttccgcggggaggcgctcagctcgctctgcgcgctggggaagctgacggtcgagacgaggaccaaggacgagcccgtcgggacgcgcctggagttcgcgcactcgggcgtggtgaccggcgagaggaagatggcgcggccggtcgggaccgccgtgaccgtcgagaagctgttctccacgctgccggtccggagcaaggagttcagcaggaacattcggaaggagtacgggaaagtgatctccttgctgaatgcctatgcgttgattgccaaaggggtcagattagtttgcacaaatactgttggcaagaattctaaatcggcggtgcttaggactcaagggagcagttcactgaaagataatatcattaccgtatttggtctgaacactttcaagtgcctgcagccccctggtagtggtcgcaattcaggggatagacagttcttctatgttaatggcagacctgtggatatgccaaaggtttccaaacttgtcaatgagctgtacagaagctcaaatgccaagcaataccctgtggctgtattgaatttctgtattccaaccacatcttatgatgtgaatgttgcgcctgataagagaaaaattttcttctcatctgagcatgccattttgctatctttacgggaaggttgttgggcagtttaatcttggttttatcattggaaagctggaccaggacctatttattgttgatcagcatgctgctgatgagaagtacaactttgagaacctttcacagtcaacaactttaaacatacagcctctccttcagtgaccactgagacttgacctatcaccagaggaagaagttatcgtttctatgaacatgagcactatcagagaaagaacggttttgttttagcagaagatctgcatgcttcaccttgcaaccgctattttataaaagccgttcccttcagcaagaatattacatttggtgctcaaggatgtgaaggagttaatctccatgcttgctgacagtcaaggtgactgttcaataatcagcagttacaagctcgacagaactgattctatttgtccttcaagggttcgtgctatgttggcttcgagggcttgccgaatgtctaccatgataggtgatccattgacaaaaactgagatgaagaagttgaggtccccttggaattgccctcatgggaggccaacaatgcgccatctagcagatctccatgctataaaaactgaaggtaagagattgtcggccaacactcatattctctag

SEQ ID NO: 496 - DNA, 1308 bp, Oryza sativa
atgaccaaagatgaggatttcaagctggtcaagatccagcagacccatgtactgagggtgaacatacactgtgatggctgtaagcacaaggtgaagaagctgcttcagaagattgaagaggcgtgtactcggtggccttagatgtagacaaccataaggtcacagtgactggcaatgtggactccgatacattgattaggaagctcaccagaggaggtaagcatgcagagctgtggtcacagcagaagggtggcagcaaccagggccacaagggcagcaacaaccagcagaagcagcagcagcagcaagggcagcagcagcatggacagcagcatcagaagcaaggtgccaacccaagcaaggatggcaacaagaacaacaacatcctcaaggaccagggcaagcaaggaggtgttggaggcctcatccagggcctcaaggccttcaagaaccagcacagcaagaaccagctccctgagcttgattcagaggatgatgacttgtatgatgacgaagacgatgagtttgatgatgactatgaggacgatctccgctttcttggagacaagatgagccagcttggtttcctcaggcagcaagctgcagctgcagcggcggccaatgtcaagaacaagaatgccaacactgccaccgtcaacaaccaccacaacaacgtcaatggcaagaaaggtggtggcggcggtggcagtgctggaggtggaaatcaccatcagaacaaccaccaccagaaccagaagaatcccaatgtgatcaacatggcagcagccaatgccaagatggccaatggtgcccagaagaacactggcgccatcaatggaatgatgggcctcaaccatggcctcggaacagccggtgccactcctggttttcagggctacaccggcttcaaccacccgtcctatgcttctgccggctatggagggcttcaacaacagcacctccagcaacaacagcagagcaacaatctcatggcaagcatgcagggttaccatcatcacccagcagccacggcggcgatgatgaacaacctgaggggtctaaacaacaacatgatgatgatgcatcagccacaacagcagccacagatgatgtaccaccggtctcctcagattagcccttacaccgcctactacaacccttacagctactactaccaccctggcgccgccggttatcatcccgccagcaatggcgatgtggagaccatgttcagcgatgagaataccaagggttgtgttgtcatgtagtagggatgctgttacagtgttacaatgtagaggttggtga

SEQ ID NO: 497 - DNA, 1281 bp, Oryza sativa
atggagaacatgagatctgagaactttaaccaagaaggtgtttcaatggagggcgtcaagcatgcgcccgagatggcaaacaccaacaggagggctctgcgggacatcaagaacatcatcggagcacctcaccagcacatggctgtgagcaagaggggtttgctagataaacctgccgctaagaaccaagctggacaccgtcctatgacgagcaggaaatttgctgcaacactggcaaaccaaccctccagtgctcccctgggcacccattggaagtgagaggcaaaaaaggacagcagattctgcatttcatggtccagcagatatggagtgcaccaagatcacatctgatgatttgccattgccaatgatgtctgagatggacgaagtggatgggttctgaactgaaagaaattgagatggaagacattgaggaggcagcacctgatattgacagctgtgatgcaaataactcccttgcagtagttgaatatgttgatgaaatttacagcttctacaggaggagtgagcagggtttgagctgtgtctctcctaattacatgttgagccaaaatgacataaatgagaagatgcgcggcattctcatcgattggctgatagagaggtgcattacaagttagagctattggatgagaccctcttccttactgtgaatatcatagaccgattcttggctcgcgaaaatgtggtgcgaaagaagcttcagttggttggcgtgactgccatgctgctcgcctgcaagtatgaagaagtgagcgttcctgtagtggaggatcttatcctaatctgcgaccgcgcctacacaagaacagatattctcgaaatgggagaggatgattgtaaacactcttcagtttgatatgtcagttccaactccatactgtttcatgagaaggttcctcaaggctgcacaatctgacaagaagaaacagcttgagctcatgtctttcttcataattgagctgagccttgtcgagtatgagatgctcaaattccagccgtcaatgctggcggctgctgccatctacactgctcagtgcaccattaatgggttcaagtcctggaacaaatgctgtgagctgcatacaaaatactctgaagaacagctgatgggagtgctccaagatgatggttgagctccaccaaaaagcaggacatgggaagcttactggagttcatagaaagtacagcacatttaggtatggttgcgccgcaaaatcggagcccgccgtcttcttgctcaagagcgtggcactgtaa

SEQ ID NO: 498 - DNA, 1248 bp, Oryza sativa
gcaagaagtggcaagcactggaggcaaaacagagcatcctccagcactctgctgcgaagaaaagggaaagccgccaccgccgctgcctccattgctgccgccaccacagccaccagcagcccaatcacagaacacagtcttcaatgtggttgattttggggcccgtggagatggagttacagatgatacgcagcaggcttttgaagaagcatgggcagcagcatgcaaggtggaggcatctacagttcttgtaccatctgaacttgagtttgtcgttggcccaatctcattttctgggccttactgcaaaccaaacattctgttccagcagctagatggaactattttagctcaaaccagtacaagagtgtggggttctggtttgcttcaatggcttgaattcacaaaacttagtggaatatcaattcaaggaagtggtgtcataaatggcattgaggttttatggtagttccaatgtcacagtaactggtatcaccattgttaacagctcacagtgccatctcaagtttgatagctgtcaaggagtaatggttcatgacctgaccatctcatcgcctgagaacagtcccaacactgatggaatacacctgcaaaattccaaacaagtcagcattcaccactctaacctcgcttgcgggcgatgattgtgtttccatccagacaggctgcagtgacataaacatacataatgtgaactgtggaccagggcatgggatcagcattggtggtctaggaaggtacaacacaaaagcatgtgtatccaatgtcaccgtaagagatgtcaacatgttcaaaacaatgactggtgtcagaatcaaaacttggcagcagggaggttcagggttggttcaaggcataaggttctcaaacatacaagtgtcagaagttcaaacacctatcataatagaccaattttactgtgacagaacaacttgcagaaaccaaacatcagcagtggcggttttaggtgttcagtacgagaatatcagggggaccttcacaatcaagcctgcccattttgcatgcagtgatagctcgccttgttcagagatcactcttactggaatacagctcaaacccctgatagtgccacagtatcacctgtacaacccattctgctggcaagcctttggagagttgtccacccccaccatccctcccatatcctgcttgcagatcggcaaaccatctgggaacaacgtgatgtcagattatgatctatgttga

SEQ ID NO: 499 - DNA, 1242 bp, Oryza sativa
atggggcgcgggaagatcgagatcaagaggatcgagaactccaccaaccgccaggtgaccttctccaagcgcaggagcgggatcctcaagaaggcccgcgagatcagcgtcctgtgcgacgccgaggtcggcgtcgtcatcttctccagcgccggcaagctctacgactactgctcccccaagacctcggctatcaagaatcttggagaagtaccagaccaattccggaaagatactgtgggatgagaagcacaagagagccttagcgcggagattgatcgaatcaagaaagagaacgataatatgcagattgagctcagcaggcacttgaaaggtgaagatctaaactctctgcagcccaaagagctcatcatgattgaggaggcacttgacaatgggatagtgaacgtgaatgataaactgagatggaccactgggaaaggcacgtgagaactgtatgataagatgctggaagacgagaacaagctgctggcttttaaactggtgggcaccagcaagatatagcgctgagcgggagcatgagggatcttgagcttgggtaccatccagacagggactttgcggcccagatgccgatcaccttccgcgtgcagcccagccaccccaacctgcaggagaacaattaagctgctaggttgccccgccacttcgatcagttatctcatccactgatccaccactggattgaatgtcctagtgcattgtcaactgtatccctgttttcatgtctgtttcgatgaactattgagcatgtcatatgtgagttgctttgtgtgccaatatatagtctgtctctagtacaagctctgtgcttgccattctgcctcgctgtagatagcaccagcaatggagctagctcagatatcagtaacttcgtgcaagctgcaaggtatgcttgtgttatcaccgcatttgtcagatggtgaatagtagtttgtgattgtaacaaacaatttatgcaagcttggtttcatgctaatgtcgtttcacttgcatttcaacacatgatatactgtcagttactgagttacatgactctgaggctctgagcatcagttagctaccacttacaaattaaagtacagtatatattatgcataatatcattagcattccaacacaaagacagtgatacactgtcatttacatcaactattggtgttgactaactctgaacatcagttggtctgcattcgttgcaattttacatgctgcaataaa

SEQ ID NO: 500 - DNA, 1232 bp, Oryza sativa
  N_region (82)..(82): n = any nucleotide
  N_region (159)..(159): n = any nucleotide
  N_region (432)..(432): n = any nucleotide
  N_region (529)..(529): n = any nucleotide
atgctgcggaggatggtggtgtcggacacggacgccggcggcggccgccgggaagccgggaaggttcaaggtggtggcggcngcggcgcggcgctgttcgccgtgccgaggttgtttgttgggctggccgcgaagcccggggccggggatggccggganccggcgtcgaggagcccgacgtcgccgctggaccccaaggcgctcctgctccggtcgccgcggtcgccgaggacgtggtgggacgccgagccggtcggcctcgccctcgccgccgccgccgacgacgacgccgccaagaactgcctcctcctcagcccgcgcgtcgggccgctgaagtcgttcgcctcgctgcccaaggactgcggcggcgggcactcgccgcgcccgggggagctcgccaaggcgatgtcctgcgccgcggcggccaccgcnaccgcctccgccgccggcggtatgtccgtgccgtgcggcgtgttcttctacggggatctgaagtctggtccggaggccactcgatccggtggcgctnaccccaatgccaagcgccgctccttcgatctcggcggcggcaagatccctgggccgggctctctgccggcgtcgatcggcggcgtccggcggttcatcggctcggtctcggcgagcgagatcgagcagtcggaggactacacctgcatcatcgctcgcggccctaatcccaagacgacccacatatttggggactgcatcttggagccccagacgatggacgcctccgcctccgccgccgccatggatgtgacggaagcacccaccgagtcctactgggtggtgaagtgcgacgccggcgccgccccggcctccggcggcggcgacttcttgagctcctgcttcacttgcaagaagaagctggagggaaatgacatttacatttaccggtggtgagaaagcattctgcagcgccaattgccgggaccaacaaatcccgatcgaagaggaagccgagaacaacaccaccatcgtctcctccccgccctcatcctgctcctccctccacgaggacatcttcatggccggcatgttcgtcgcgacatgacctgacccttcccgtggcctggaccgaccgattgaacctgtcctcgcctccgcaagttgtccaaatttttttccccctggtcttctaccaggggatagatcaagatgatcgaatcaccagctcacattgctatctatcatcagtctgttgtttttga

SEQ ID NO: 501 - DNA, 1149 bp, Oryza sativa
atggggtcgtggcggcgcaaggcctacggcgccctcaaggactccaccaaggtcggcctcgccaaggtcaacagcgacttcaagttggatattgcaattgtgaaggccaccaaccatgtagaatgccctcccaaggacaggcacgttagaaatattcgtggcgacctccattaaccgccctcgagcggacgttcaatactgcatctatgccttgtcaaggagattgtccaagacaaagaattggacagttgttgcattgaagacattgatagtggtacataggctcttgagagaaggtgatcctacattcaaagaagagttcctggcctactcatacaagggaagcgttttgcagagagcaaacttcaaggacgattcaagccaattaggcttgggattgctctgcgtgggttcgcgcctacgcgctcttcctagaagaacggctcgagtgtttcaggatcttgaaattcgacatcgaaaccgagcgtctgatgagatctcctgagtgttccagcaagagaactagaaccctgccttgcattgaacttctggagcagttgcctgccttgcagcagctacttttcaggctaattggctgccagcagcctgaaggtgcagcaggcacgaactaccttatccaatatgcattagccctggttttgaaggagagcttcaagatctactgtgcaatcaatgatggtatcatcaatcttgttgatatggtaaagatgctatcaaggctcttgttgtctataaacgagctggccagcagcagccaccatcatcattcattgcaacaatggaagagtacatccgagaagcaccccgtccctcgattaacagcgtggctggaggctttgacaagctgctactcgacagcctctacgaagacgagacgaggcggcggcagatcgccggagtcacctacaccggtagcattggaggaggagcacccaaccctttcgacaccaacgatccatttgctacgtcgagcagcttcttgcccccatccaatgtccagtttgcaatgctgaaccagcagcagcatcagtactaccagtctcaacaccagcaacaatactaccagcctcatcatttccaggatcatcaacatcaccataacattccaatccgtttggtgaccctttc

SEQ ID NO: 502 - DNA, 1124 bp, Oryza sativa
  N_region (96)..(96): n = any nucleotide
  N_region (103)..(103): n = any nucleotide
  N_region (275)..(275): n = any nucleotide
  N_region (286)..(286): n = any nucleotide
  N_region (313)..(313): n = any nucleotide
  N_region (316)..(316): n = any nucleotide
  N_region (319)..(319): n = any nucleotide
  N_region (340)..(340): n = any nucleotide
atgaacagggagaaatccccgatcccgggagacggcggcgacgggttgccgccgcaggccacccgccgggcgggccctccggcggcggcggcggcngcgcgantacgacatcagccgcatgccggatttcccgacgaggaaccccggccacaggcgcgcccactccgagatcctgagcctccccgaggacctcgacctgtgcgcggccggcggcggcgacgggccgtcgctgtcggacgagaacgacgaggagctcttctccatgttcctcgacntggagaagctnaacagcacgtgcggggcgtcgtcggangcngangcggagtcgtcgtccgccggngccgcagcccatggagcgaggccgaagcaccagcacagcctgtccatggatgagtcgatgtcgatcaaggctgaggagctcgtcggggcgtcgcccgggacggaggggatgtcgtcggcggaggccaagaaggccgtgtccgcggccaagctcgccgagcttgctctcgtcgatcccaaagagggcgaaaaggtaggatttgggctaacagacaatctgcggcaagatcaaaggaaaggaaaatgcgatatattgctgaacttgagcgcaaggtgcaaaccctgcaaacagaagcaacaacactgtcagcccagttggcactgctacagacagagagataccagtgggctaactactgagaatagtgaactgaagctacgtctgcagaccatggagcagcaagtccacttgcaagatggctttgaatgacaccctgaagtctgaggttcagcggcttaaggttgcaaccggtcaaatggcgaatggtggagggatgatgatgaacttcggtggcatgccacaccaattcggaggcaaccagcagatgttccagaacaaccaggccatgcaatctatgctggcagcacaccagctgcaacagctccagcttcatcctcaggctcagcagcagcaggtgctgcaccctcagcatcagcagcagcagccattgcaccctctacaagcgcagcagctccagcaggcggcacgagacctcaagatgaaatcgccgatgggcggccagagccagtggggagatggcaagtcaggaagcagcggcaactga

SEQ ID NO: 503 - DNA, 1034 bp, Oryza sativa
atggcggctgctgcggcggcgctcttggccttcgtcgccgtcgccggcgccttggttgcgcaggccaccgacccctacgtcttcttcgactgggacgtctccttcatcaccgcttccccgctaggccttccccagaagaggttatcgcaatcaacaagcagttccctggccccgtcatgaacctcaccaccaactacaatgtggtcgtcaatgtgctcaacagcttggatgagccattactcatcacttgagggatgggatccagcaaagaaagaattgctggcaggatggtgttcttggcacaacctgccccatacctccaggttggaactggacctacaatttccaagtcaaggaccagattgggagcttcttttacttcccaccccttagcctgcagcgtgctgctggtggtttcggaggtattactgtcaacaaccgcgccgtcatttctgtcccattcgacacaccagatggagatatcaccttgttcattggggactggtacaagaagagccacacggggacctgaggaagatgctcgatgatggaaaagagctcgggatgcctgatggagttctgatgaatggcaaggggccgtataggtacaatgattccctcgtccctgctggcattgaacatgagactatcaaagttgaaccagcaggaaaaacataccgtttccgtgtccacaatgtgggtatatcgacgagcttgaacttcaggattcagaaccacaatttggcccttgttgaaactgagggatcatacacaatgaagcagaatttcacaaatcttgacatccatgtgggacagtcctactcatttttgatcaccatggatcagaatgcaagcagtgactactacattgtggccagtgctaggtttgttaatgaatcactgtggaccaaagttaccggtgttgcaatcttgcagtattcaaattcaaagggaaaagcttctggccctcttcctgatccaccaaatgatgagtacgacaaaactttctcaatgaaccaggcacgctccatcag

SEQ ID NO: 504 - DNA, 1016 bp, Oryza sativa
atggaggagcaccagaactggaagaagaacgcgccggtgctctacgacctcgtcatctcccagccgctcgagtggccgtcgctcaccgtccagtggctccccctcggcacccacacctccgacgagacgcccaaccacctcctactcgccaaccgcgcccgctgcatgccgcagaggccgtacacggtggctaccaagacctgcgtggatgaggtgcacgtgtaccatcttggcgacggcggcgagaagggcggcgccgatgtggtgctcagggggcatgaagcggaggggtatgggctggcgtggagtccgatgaaggaggggttgctgctgagcggctcgtatgataagaagatttgcctttgggatctcgctgctgggagtggagcttcgtctctggatgcacatcatgtgttcgaggctcatgacgatgttgttgaagatgttgcatggcacctgaaagatgaaaacctatttggatctgctggggatgactgcaagctgatgatgtgggacttgcgtactaataaaccaggacaatctatagtagcacaccaaaaagaagtaaactctttgtccttcaatccgtttaatgagtggatcttggcttcagcatctggagatgcaactattaagctatttgacttgcgaaaactgtcaagaagcctgcatgtattcgacagccatgaggtttttcaggttgagtggaatcctaatttggagactgtgttagcatcctcagctgcagacaaaagggtgatgatatgggatgttagcagaggatcggagacgagcaggcagaggaggatgcaaacgatggtccaccggagctgctgttcgtgcatggaggccacacagccaagatatcagagttgtcgtggaaccccacccagaaatgggtcatggccagcgtggccgaggataacatcctgcagatctgggagatggcagaaagcatatactgtgatgacaattatctccatgacaatgatgatgactcgtgcccagccacataa

SEQ ID NO: 505 - DNA, 1004 bp, Oryza sativa
atgacgacggaggtggcgctcctccgtggcccgaccaacctcgcttcccccacaagctccaccctgcgctatttagccaatggcgacagcgatgtctcgctcccaaggagaagcagccgcgaggaggagagccctgcaggactccaagaggaggaggaggaggaggaggaggagaggtggtcgttcttggcgctgctgcttgagctgctgcggaagtcgctgctccggtgcagtacggtgcaggagggcggcggcgagtgcgggatggagattgggtggccgacggatgtgcagcacgtggcacacgtcaccttcgacaggttccatggattcctcggcctccccgtggagctcgagcccgaggttccccgccgggctcccagtgcgagagtgcaagtgtctttggcgtttcaacagaatcaatgcaatgttcctacgattccagaggaaacagtgtaccaacgattctcttgatgatgcaaagacgtctttatgaacaaggcggtcttcgggtggaaggtatttttcgtataaatgcagagaatagccaggaggagtttgtgagagatcagttaaatagtggaattgtgccggatggcattgatattcactgtttgtcaggtctaatcaaagcctggtttagggaactgccgagtggggtgctggattctatcccacctgaacaggtgatgcaatgccaatctgaagaggattgtgctcgagtcgccaaatgccttccaccagctgaagcagctttacttgagtgggcagttaatttaatggctgatgttgtccaagaagaacagataaacaagatgaatgctcgtaacattgctatggtttttgcaccaaatatgactcagcagatgtcagatccattgaccgcactgatgtatgcggtgcaagtgatgaattttctcaagatgctaatacagaagaccctcaagggtagacaagagtccaatctggaggacacatctctgccccataaggacccatctgat

SEQ ID NO: 506 - DNA, 957 bp, Oryza sativa
caacaaattattgatgcaattttggttttgaacattgatgatcctccctgcactattggtgcagctgctcttctattcgttttggcaagtgatgagattctcttaagctgtcaagagatcaagtcgctcgacaaagatgacaagaaaacaacaaggccagaactgtgtccaaagtggcttgctttgttgacaatggaaaaggcatgcttgtctgctgtttcagtggaggacttctgacactgtgtccagagtcggaggaaattttaaagagacattaagggagttgggcggtcttgatagtatttttgacgttatgatggattgccattcaacattggagcaaagtgccgctctcctcttgaaatgtttgaaaatattggaaaatgccacatttctaagcgatgataacaagtcctcgctttcttttgttggtgtcattatcagtattattgagttattatcagcttttggaagactgcctcttggcatcagttaaggttcttatgaacttagcaaatgacaacccatctggttgtgaattgattgcgtcatgtggtggacttaacaccatggcctccttgatcatgaagcatttcccctcattttgttttgtcgtggacaacaactataacacgagagatttgcgagatcatgaacttgattttctggttgccatattgggcttgcttgttaaccttgtagagaaggatagccttaataggatgtcatagcactcctctgttctgtattcttagcaagtcaaggtgctagtgaagcttctggaactatatcaccggatgatgaggagtctttgatgcaaggagcacgggaagctgaaatgatgatcgtagaggcctatgcagcccttcttcttgcgtttctttcaactgaaagatgatcacagaggaaacgcactcagctgtcacagaagttatcgagaaatgcaaactttcatag

SEQ ID NO: 507 - DNA, 926 bp, Oryza sativa
atggcggcgattccccgggaggcatgggagggctgcagcgtcctcctcgacatcaacgacggcgaccgcctcgccttcttccgcctctcgctgcagccgctcgtcggtcgccccttcggctccctcttcagcgtcggcccctccggcctcgtcccctgcgccgacgccccatcttctcgcgagggacaatagatctcttgtcgataataatacagcacagaatttatctagcgatgacatagaggcaatgaagagggtgatgagattgtagaagctttgatagcaaatagctccacatttgggaagaagacccttttttcccaacaggagaaatacaaactaaagaaacagaagaaatatgcacccaaagtgcttttacggcgcccctctacccgaagtttatgcgagttgatgcactgtccctcttgttgtctatggcaaatgttggtccatattcggatgtccttgtggttgatatggttggaggtttagtagttggagctgtagctgaacgcttaggagggtactgggtatgtttgcagcacatatcttggatctgctgctagctccatagacattataaggatgtataatttgagcagtgacatgactaccagagtttgattgttgctgctccggggcatgatgttgaaagttttgttgctgatctgcttcccctcttgtcttattcagctccatttgctatctatcaccaataccttcagcagcctctcgcaacatgcatgcacagcttgcaagtatcaaaaatggctctcggattacaaatttctgaaccctggcttcgtgaataccagcaggtccttccatcacgaactcatccacacatgcaaatgaatgcatttggtggttatattttgagtggcattaggatacacaatggcgatgcatgtaatggaagcaagtga

SEQ ID NO: 508 - DNA, 857 bp, Oryza sativa
ctggatgctgtgcttgatgttggtggtgtctatgatcccagccggcatcgctacgatcatcaccagaagggctttaatgaggtctttggacatggctttaacacaaaacttagcagtgccgggcttgtttacaagcactttggtaaggagataattgcaaaggagcttgaagttagtgaagaccatgaagatgttcatcggttgtatcttgcaatatataaaagctttgttgaggcgcttgatgcagtcgacaacggaatcaatcaatatgacacagaccaacccccaaagtatgtgaacaacacacacttgtcttcacgcgttgggcgtcttaatccagactggaccgatccagaccagtcacctgagaaggaaaatgctgcatttcaacaggcaatgatgcttgctggaagtgaatttatggaggtataatagtctctgttcgctttcatgttaagtcatggttacctgcgagatctattgtcttggagtgtttgttgtcaagaggaaaggttgatccaagtgaagaaattatggttttggatagattctgcccatggaaacttcatctgtttgagcttgaagaggagctgaagattgatcccctcacgaagtatgtgttgtaccagcaggatgagaggagcaaaagttggagagtacaagctgttggcgttgctccggatagatttgagagccgaaagcctctgccggaaaagtggaggggcttgagagatgatgaactgtcaaacgatattggcattccaggatgtgtctttgttcatatgagcggcttcattggcggcaataagacgtatgagggagcgttggaaatggcaagagctgctatcaagtgttga

SEQ ID NO: 509 - DNA, 806 bp, Oryza sativa
aacctgtcgctcaacgcgtcctgctcctcggatgcctccgtggagtcgctccgcggccgggactcctccggtgggaggctggagaggagctggtccaagaggaggtgcgcgtgggtgactccgaccagtgtcagatccttgctatgtcatcttccatgatgaggagtggggtgttccagttcatgatgacagagattgtttgagctgcttgtactgtctggtgcattggccgagctcacatggcctgaaattcttaaaaggaggcaacttttcagagggaaattttcgtggacttcgatcctgttgctatctctaaaataaatgagaagaagcttgtagcaccaggaagtgttgccaactcccttctgtcagagcaaaaactccgagcagttgttgaaaatgctcgacagatacttaaggaatttggatccttcgatcgatactgttggggctttttgaaccacaagccaatagtgagcaaattccgatatccaaggcaagtccctgtcaagagccccaaggcagacatgatcagcaaagacatggtccgaaggggtttccgaggcgtgggcccaacaatcatatattccttcatgcaggcagcagggctgaccaatgatcaccttgtcagttgctttcggttcaaagaatgcaatgaagctccaactctttgcacgagtgatactagcaatgcaaattcagaggcagatctaagtgcagatgaactgagaacaaaaatctgcagcaaggagatggctgcaaaagcagagctgttgaggacgatcggtacgcttatcatttcatag

SEQ ID NO: 510 - DNA, 732 bp, Oryza sativa
gtgaatagttgtactgggaaaatggggaaggctgttgctgaagcagctgtatctgctggtcttcagttagttcctgtatcattcagtgctattgaggttcctgatggaaaggttgaaatttgtgatagggaaatttatattcgtgacccatctgaaggagaaagtattctcccttcgattgctaaggattacccagatatgatagttgttgactacactgttcctgatgctgttaatgaatgctgagctttactgtaaacttggattgccatttgttatgggcacaacaggtggaaataggcaactgttgcacaaaacagttgaggacgcaaacgtgtatgctgtgatatccccacagatggggaagcaggttgtcgcgtttcttgctgccatggaaatcatggcagagcaattccccggtgcattttcaggttacaaactagaggtcatggagtctcatcaagctacaaaattggacatttctggcacggccaaagctgttatctcttgctttcagaagttgggtgtgtcatttaacttgaacgagcgggatcctcaggaacagcttacattggttggtgtcccagaagaacatctttctggtcacgcatttcacatgtaccatctcacttcaccggatgagacgtttcatttgagtttcaacacaatgtatgtggccgttcaatttacgcagagggaactgtggatgctgccctgtttctccataaaaag

SEQ ID NO: 511 - DNA, 698 bp, Oryza sativa
atgcaaagctcgccgggcgcccccaagctccggccaccccctataaaacccgccgctcctcaccgtcaccggcaagcacagcaaagcagcagcagcaaaggtaaggtaatatttgcagcatcgtctgaagaagcacaggagcaggggagatatggcggcgagcaaggggaacgcggcggcggcggcgtgcgcgctcgtgctggtgctgctggccgtgggcgcggaggcgcagggcggcggcgggggggagtgcgtgccgcagctgaacaggctgctggcgtgccgcgcgtacgcggtgcccggcgccggtgaccccagcgccgagtgctgcagcgcgctcagctccatctcccagggctgcgcctgcagcgccatcagcatcatgaacagcctgccttccagatgccacctcagccagatcaactgctgtatctgcctaagacgagacgagagttaaccccggacgccatggaagaagaataatcaaggtgttgacgaagccgtcgttgtcttcgtgtctcgtttagtaaaatcttcagattgtactgcagttgctattgatgtcgatgaataataccagtaagtactatggaacaatcatgtaatgcccggttgctggttcattaacgatgacctcctttggctatcgtgcccctctttgttttccttgtgtgttttcctttctcagcttatgttaa

SEQ ID NO: 512 - DNA, 582 bp, Oryza sativa
gcggcgtcaggggcggtgcagtgccagttgatggatatggttcaccctggggtggtgccaatgcacaagtttgatgctaagaccgagtatgacatgatccagaactacaagattcttcaagatgtgttcaacaagctgcggttgagcaaggaggtcaacaagcttgtcaagggacgtccattggataacctggagtttctgcaatggttgaaaagatattgtgattctgtaaatggtggaatcatgaatgaaactacaatcctgtagagaggaggtctaagggttgcaaagaacgcagtctcaaaggttccaacaagtcgtccaaatcactacaagctaatagattgtctagtgcaaattcagctgatggagctgaaaatttctatggatagcgcggagaaagaaagagacttctacttttctaagctgcgcgacattgagatactgtgtcaaagaccagagttggagcatcttccggctgtacagaagatactttatgcggctgatgcaagagattcgccattgcctgaggctaatgaaataatcacccggtcaccaagcatgttcccagatgaagcctag

SEQ ID NO: 513 - DNA, 488 bp, Oryza sativa
gacttagtttgggagatagcagcccttgaggaggaagttgttcgcaaggaactgcatttgctttccctctacagggcagcatttgatcaacacctagaatctcagatcgctgataaaacgacttgagaaaattgacccaacaaaaatggcacatgaagagcagctctgtttttggatcaacatccacaacgctttggtgatgcatgctgcatataatgtgggtgggctttcagtaaacgcccaaattatccagaactcaattattggatgccaatcccatcgcacttcagtgactctatttactccactgaaaaaatcggcatcagggagctccatacatccatatgctcttcatcctccagagccacttgctcattttgctctttccactggagcaatttcagatccacctatcttcctacctaaagttctccatcattatgcgaaggatgctgctctcgagttgcctgacttggttgagatggcat

SEQ ID NO: 514 - DNA, 462 bp, Oryza sativa
atggcgcccaaggcggagaagaagccggccgcgaagaagcccgcggaggaggagcccgcagcggagaaggccgagaaggcccccgcggggaagaagcccaaggcggagaagcgtctccccgccggcaaggccgagaagggcagcggcgaggggaagaaggcggggaggaagaaggcgaagaagagcgtcgagacctacaagatctacatcttcaaggtgctcaagcaggttcaccccgacatcggcatctcctccaaggccatgtccatcatgaactccttcatcaatgacatcttcgagaagctcgccggagagtccgccaagctcgcccgctacaacaagaagcccaccatcacctcccgggagatccagacctccgtccgcctcgtcctccccggcgagctcgccaagcacgccgtctctgagggcaccaaggccgtcactaaattcacctccgcttag

SEQ ID NO: 515 - DNA, 441 bp, Oryza sativa
aagcgggtgatggtggtggtggaccagagctccggtgccaagcacgccatgatgtgggcgctcacccacgtcgccagcaagggggacttcctcaccctgctccacgtcctcccccacggcggcggcgacgcctccgcgctcgccaactccctcggctcactctgcaaggcctgcaagcccgaggtggaggttgaggcgcttgtgatccaagggcccaagctgggcaccgtcctcagccaggtgaagaagctggatgcatctgtgctggtgctgagccaatgcaagccatctcctttctgctggagcagcggcgaggagttcgtggaggagtgcatcaacagggcggactgcctgacgctggcggtgaggcggcagagcaagggcgtcggcggctacctcatcagcacccggtggcagaagaacttctggctgctggcttga

SEQ ID NO: 516 - DNA, 420 bp, Oryza sativa
atggcgggcaagggaggcaaggggctcctcgcggccaagaccacggcggcaaagagcgccgacaaggacaaggacaagaagaaggcccccgtctcccgctcctcccgcgccggcctccagcagttcccggtggggcgtatccacaggcagctcaagtcgagggcgtcggctcatggccgcgtcggcgccaccgccgccgtgtactccgcggcgattctcgagtacctaaccgccgaggtcctggagctggccggcaacgcgagcaaggatctcaaggtgaagcgtatcaccccgcgccatctccagctagccatccgcggggatgaggagctcgacacgctcatcaagggcaccatcgccggcggtggcgtcatcccccatatccacaagtcgctcatcaacaagacctccaaagagtga

SEQ ID NO: 517 - DNA, 1836 bp, Oryza sativa
  N_region (522)..(522): n = any nucleotide
  N_region (1515)..(1515): n = any nucleotide
  N_region (1612)..(1612): n = any nucleotide
atggtcatctacctaccggtcgttaagctctccaaagaacttgacatgcatcgcgtgatgctgatgcagttgcagcttaagtccaaggagaatttatcagagaggacaccagaaaaaacactaattaacagtctgaaaaacttgctaatagaaatcgacatctcttcatccaaaaataatttaaatcatagctatgaatcgggacaaacatttacccagtgcagtggcgaggccagtgacacagcgagagtgacaagtggtggcgaggcgaggaggcagctcgcggcgccggtcatggccgacgcgaacaggcgcatcgacctcgccgcgccgctcgtctccgtgcggcgccatggcggttgcgccgccggcgaggcggcgacgcggacggatggcacgcggcccggtcatcccaagagcgtccgcacccggcgcgcgacgatggtgcacgccacggcgagggacgaggagcccgcgcgcgacgccatggcggtggtcgccgtcgccgcgccggtgcgggancgggatcaggaggcgcggttctccgacgcgctctccgtggcggacagctgcctcaccgtgaactgcagcagcgccagcggcctcagcgacgccgtcgcccagcctccgcgcggcgtcggcgtcggcggcggcgtcatgatggaccgcttcctgccggcggcgcacgccgtggctgtcctctcgccgcaatgcagctcccggaaggccagcgtcgccgcggcggccgcgcgcaacggccacggcgccgacgcgttgctgcctcctcccgagccaacgccgacgattcgaacactgtgcatcgttccgagggagaagaccgacgacgccgacgccgccgtcgacgacaacggcggcggcggcgagtgggacgcgcacagtacgcggggcgtctcgtcgaggaggttcgggctgcttcttcccacgcggtgcatgaagagcaccttgctcctcctcaaaccagcgcccgccatgagacgccgcggcggttgccggcggcgaaaaccgcggcgcgcccctcctctccaagatcggcaggagccaaagcttggggaacccactcgtccggagcgcgcacgacacgggcatcatggtaagcagcaacaaacatctcctccacctccacctgctgccgcgcgacgaatcaaaacgcgagcgattctcacttgttcgtccggtgcgtcgttgcagcgatcctgggaggaagtgtatatcaactccctccggcgatcaggccgcggcggccggaagggtatcggcgcgttgctgtcgccggagctggacacgacaatgccgtcggtgcgcgagctttacctggaacaaggagacggcgccgtccaccccaaggctacccacctcggcttcctcctggtgttagacagaagccacgaccaatgccacgacagccacgacgatcccaagctgctgccgcctcctcgcttcccaaggccggcgccgcccaaggtgttcgacggcgggaagaaacaaaggcgcgangccgccggcgccggcggaggcggcggcggcggcggctacgggtggccgctgctattggaggacaaggccgcggcgagccgtgacatggtgcctccgntcccgccgctgccgtcgatgaagtcgccgtcggagtcctggctctcgcgggcgctgccgtccgtgtcgagcaaccctccggcgacctccttcctcggcatccacgtgcagcacaagaagcagtctccacctccaaggtgttcgtcccgagctccggccaagctcgtggccgacggccatgccaggccacggcaaatgcgaatacatgatctacagaaatcatag

SEQ ID NO: 518 - DNA, 999 bp, Oryza sativa
atgctcccaaaactagtccaaaatgcagatccagtttttctcaaacggttcgtgaacggtgaatcatcggaggacgtggtccggctgactgtccgagctcctgctggctgctgcaatcctgcactgcagccctccctctgccgctttcctctcctgcgtgagggtgacaacacgggcatggattacgatgcgacacctgggtcgacctggcaggaatctctcgagtgcggacagcggcggccgagcaaagcagcggcaacgcggccagtaggactagagtgcatctcaacgatcgaccatcataacgagttccacgtagctattcgtacatacgctagacctaataatactgcccacgagttcacctaccctgttcaatcgagagccagagcattcaccgaaaacaaatcatgggaatttgaaggaggggcctggaggaggaggaggaggcagcaacatgccaatggcgacggcaagctgctgctgccatccatcggcatgcccaagaaaggcgaccagtctagtggccctggcgctcattcctcgttgcccccacaatctgctaaagcgaagccatttcctagtcaagaagaggcagagaagagtgaagagcaaagagggcggcctccgccgaggacagttctacgcatgcatgccgtcggcggcgacctggagaaggggttcgagatcaagtacccggtgatgaagccgatggcgagctcccgcgccatgatccacgacatcgacgacggcttcgagatcaagttcaccccagggaaacctgcagcatggaagaacgacagcaagggagacggcaaagggcatcagcagcaacatcaacaacaccaacaccaacaccatccacagcagcatggcatgccccaacaccatccgcagcacggcatgcccatgcccccaggtttcaggtaccctgcaaatgtggtcaggcaagggcagataagaggtggaacattcatttctgcgaagcccagtacgtga

SEQ ID NO: 519 - DNA, 915 bp, Oryza sativa
atggtttcgttactatgttggaagcacaacctacgctcgtggagcaagatagccgaactcaagaagattatgcgggttggtaaagcccgcgattttcctgaagaggagcaaggaacaatctggatgggagaaagattgtgtgtgcctgataatgaggaattgaaggatttgattcttagtgaagctcatcagacccacgagttaaagcagaacatcacagcaggtttgttgcaacctctccaaattccggaatggaaatgggaagaaattgtttgcgcccttgattttggtggatcttgggataagaatttgccgtatgcagagttctcttataataacagctatcaagccagtttgcagatggcaccgaaaaagttaagagcaatcagagagagattgaggattgcacaatctcatcagaagagttatgctgacaatcgtcgccgagagcttagttttgaagccagagatcatgtttatcttcgagtcatgccgctcagaggggtgcacagttttcaaaccaagggaaaattggcaccacgttacgtgggaccatatagaattcttgaacgaagaggagaagtcgcgtatcagttggaacttccacccaatatggcgagtatccatgatgtgtttcatgtgtcacaattgaagaaatgcttaagagtacttgagttacaggcaagtcccgacagaattgagatacatgaggatttaacttatgttgaaaagcctacgcgtattcttgagaccagtgagaggagaaccaggaataaagtgatcaagttctgcagagttcaatggagtcatcatttggaagatgaggcgacatggaaaagagaagatgagttgaaagccgcccatccgcatctcttcgcaagttcttccgaatctcaaggacgagattccgtttaa

SEQ ID NO: 520 - DNA, 717 bp, Oryza sativa
atgtacgcggaccagatctccaccggccggaagcgctccatccacgaccgcatcgacggcgaccagcccgccgcccgcgctggcgccggcgccggcggccggggggcccgtaacccgccgtccaagaggcaacggcaaactgatgaaaaatggaagcatgatctttaccgggaagacgatgaaccagcttcaaaatcaattgatccacgggatttgcgattgaagcttcagaagaaaagctctcagcaaagctttgctggccaaaggggttctggtgtacgtgatctacgtgagatgctttctggaacaatgcacccacagccagtcaatgcggaccctccaaaggcaaagccatcatcagagatcgtgaaagtcacaaggcgtgaaaatgcagatgtaatgcctgtacgtcaaagtaagaaagtaccaaaaccgacgtcatcgaagaagacatctcagccgaaggctgacagtccacttgatattttcctgaaatctcttggacttgagaagtactcgattaccttccaggcagaagaggttgacatggcagccctaagacacatgactgacagtgatcttaaagctttgggcattccgatggatataggtggcaccaaactaatatggaaacttaaggtgggtgttctttcagggtccccggaagaagatcatgcttgccttggaatcgagagcgtagggagggctggcgtgtaa

SEQ ID NO: 521 - DNA, 516 bp, Oryza sativa
atgaaagaagaaggtgcgacggggctacccgggttcgatgtgccaccgagggtagaggaggacgacgtcgctgatgtcggtgatggcaaggagctagtggacaaacgcatcttgggctccgagagctgccggttgacggcgaatggtggcggcgaacatgttggcactcgcttcttcctcaacatcctgaagggccatgctgctcctctgccggtgtatctgcctgcgccgcttctcccacttgacctcccgggttgtctccttcatggacagctgcttggacagtatcctcttcttgccactgctgctggtggcgacctgctggagcatcctcgtcgtcgccagcgcctgaccagccatgatgacctcaccttgctccctctcgatgtagagcgacaacggcggatccttcctggtgcgatagatatcgcagcagctgtcgtgccacgacttacgacagctgctgcaggaggaaggagaaggaaatggcagggcaaagaggggacagggagatga

SEQ ID NO: 522 - DNA, 465 bp, Oryza sativa
atggagcatttcacaagaggagtggtgctcgggatgccttccatccaaagatgccattcactgtcatgtcaaatgggccaggcagagcgcccacagattgatgtgcggaaggcagtgatccagtgtaaagaggaatcacggtgctcaaaatgctgccatcctgcagatatgccgatcattcctgagcaggcaatggagttcctctctcgaacatggagcccctcatcatcagatttcttccaacaactcaacgctggctacatgaaagcaattcttcgaggtcatttcttgagtgctgtttcggtcactggacgccagcgaaagaagaggaaagaagagctcaggctgcacgcagcacaggcccgcgcggctgtctcggttgctcagctcgccgcagcaatcgcaggcattcgtgtcggtgtgcgaactgaggccggacaacctgaagtatgtcgaggctgctga

SEQ ID NO: 523 - DNA, 378 bp, Oryza sativa
atgaggagagctgagaacgtgagagaagagaaagaatgcgaagcggcgctcggtgatgcgggatacggcgtgatgcgagagagagaggagccgatggatcgtgtcgtcgcctcaggcttgccgatgggctgcgccacgcacgcatggaccctgatcgatcgccgatcgatggatcgcaacgtggccgtggacatcaatcgcgatcgagcgacggcgcccgtggacgtcgatcgaatcgctgccgtcgacgccgagttgtcgaaggatctcgccgtcagctccgacttgctgatggactacaccgtggatgccgagtcgccgattggtctcgccatcgccgctgccaccgaatcatccgtagatcgcgttctcacctag

SEQ ID NO: 524 - DNA, 303 bp, Oryza sativa
atgagaaaaataccaacaaggaggtgcaataataaaggacaacaacgatcaagtgaggcagctctcgaggacgacaaatgcaagcctcacctgaaaggaaacaaactacggagagaattaagcggagtcaggatgttcctcggcgcgatcccgcggcggccgagcaaggaggtggcgtacaagcagctgcgctcccacctcatcgtcatggcctcctgcgttgccgccatccgcgccgccccctacatcctccacttcctcaaccgcgacgcggaccgcctcgagctcaccctggagctctag

SEQ ID NO: 525 - DNA, 4269 bp, Oryza sativa
atggggggatttcggggcgtgacacagaccgacatcctcgtaatcgtatgccggaaccaagcgacccatcgtcatcgtcagacagacatccacgaaggacacacgatcgccgacaacccaccgcccccaacgctgggtgtagggctttcagtcgctccctacgtgatgtccgatggcctgagagattccgaccctggagcaatagaaaagtacgatgggagcaccgacccagaggagttccttcaagtctactccacagtgctctacgctgccggagcaaacgataatgcgttggcgaattatttgccaactgcgttaaaaggttctgcacgttcatggctgatgcatcttccgctctactcaatctcttcgtgggcagacctgtggcaacagttcgtcgctaatttccaaggaacatacaagcgccacgcgatcgaagacgacctacacgcgttgacacagaactcgggtgaatcattgagagatcgctatactacccaggagttggcgacaagacgcatcacaaccactcggagattgtttgagattgttgagcgatgcgtccacgcagatgatgcgctaagacgcaagaacgataagccgaagaccgagggagagaagaaactagccacgaagcatcagagtcaagcaagaagaaaaaacgcaaaagtgggaaaaggaaagctcaagcggaagtcatcgcagcagaatacgcgaaccctcccaagcgcccaaacccacaaaaagcacattgcatttgaaaaaggcaagcgagtacgcgtggtcgagaaagacaaggaggtggttcctcacgaatcagattcaggatatccagactccgacctccacgtttcacacatcttcggaggttccacaacgtactcctcaaagcgagaatacaagaaggtggagcgcgaagtctgttcgacatggcagggggctgcacccaagatgaagtggtctgagcagaagatagagttctcagaagaagaccaccccaagacagccgccatcccaggacgatatccgatcgtggttgaacccaccattcggaacatcaaggtagccactttggacgcgatgggaattccgcaaagcgagttgacaccaaccgaccaacctttccatggaattactccccaatcatcgtccagactattgggcaagattacgttgcccgtgactttcggccaagccaacaacttccgaacagagcagatcacctttgatgtcgctgaattcgatacagcttacaacgctatcatcggaagaactgcacttgcaaagttcatggccgcatctcactacgcgtatcaagtgcttaagatgccgggaccgaagggaacaatcactattcaagggaacgcaaagctggcggtgcagtgcgacaaatggagccttgacatggtcgagcaaacgcccagcccacccgccacgactgagccacccaagaaagtgagcaagacaaacaagacgccgaaaccagacgtcgccatcaagatcgttccactctccagtgccaaccccgacaagaccgtcaagatcggggaactcgcgctcatcaccttcctccgcgataatgctgacgtgttcgcttggcaactgtccgacatgccgggggtcccttgggaggtgattgagcacaaactaatggtgcaacccgatgccaagccagtaaagcaaagactgcggagatttgcaccagaccgaaaacaagccatacgagaagagctcgacaaacttctcaaagctggcttcatcagagaagtgcttcatctagagtggctagccaatccagtcatggtgcggaaggccaacggaaaatggagaatatcaactggtggactcaacagccggctgcgagctattgagcttcctcgacgcttactctggctaccaccaaatcagcatggcaaaagagaacgagagagaagacagcattcatcacgccggaataccttccagcgcacggtccagggcgcagttagcgaccagctcggcaacaatgtcgaggcatacgtcgacgacatcgttctcaagaccaagacaaagaagtgcacgttcggagtactgtcgggcaagcttcttggattccttgtttctggcagaggaatagaagcaaatcccgagaagatcaaggcaatcgagaacatgaagtcgcccacaagactcaaggaggtacaaaagctaaccggatgcatggcggcactgagcaggttcgtcgctaggatgggagaacgagaacaacctttcttcgctctgctgaaaaaacaagacaaattagtatggacacaggaagccgaagaggcattcgttgcactcaagcattacctatcaaacccccctgtacttgttgttccccaacctaatgaagaattattcctctatatcgccgccacgccgtattccgttagcaccgtcattgttgtcgagagagagaaaacaagatacccacagatccaaaagctgctttacgcggtcatcatgacatcaaggaagctacgccactactttcaagcccacagagtcatagttgtctcctctttccctctcggcgaagttgtgagaaacaaagacgttgtcggccgcattgcgaaatgggtagtcgagctgagccagtttgatgtccactttgtgccacgaacagccatcaagtcccaggtactcaccgatttcgttgccgattggactatgcctgataacaaatcagacaaccaagtcgacaataaaacatggacaatggcgttcgatggcgcactcaaaagccaaggagcaggggcaggatttatcttgacgtctccctccggagatcaattcaagcacgcaatccacctcaactttagggtgactaataacacagcagaatacgagggactactcgccaggataagagctgcagccgcacttggggtcaagcgactaatcgtcaaaggggactccgagctagtcgcgaaccaggtgcacaaagattataaatgctctagccccgagttatccaaatatctcgcagaagtcaggaagctagagaaaaggttcgatgggatcgaggtccgacacatctactgcaaggacaatatcgagccagacgacctagcacgacgtgcgtccagacgagaaccgctcgagcccggcactttactcgacatcctgacgaagccatcagtaaaagaggttagcggcgaagtcagcccagccacccccgacattagctcggaggccacaaaggcagaacacgccgttgccgacatcgagactacagacgactggcacaccccactaatcaaattcatcaacagcgaggagttgcccgaggacgatacagaggccgagaaaataaaccgtaaagcaaaaatctactgtatggtcggcaacgatctatacaagaaagcgccaaagggggtacttctcaaatgcgtcttgtccgatgacggcagacacctcctccttgatatacatgaaggcatctgtgggtcacacgctgccggtcgaacattggtcgggaaagcttttcgacaaggatttttctggccaaccgccctcaaagatgcatgcgacatggtccagcgatgtgaagcctgtcaattccccagtaaacacacaaagctactcgcgcaagcacttcatactatccctcttacttggccgttctcgtgctgggggctagacatattcgggccattcccacgaggacaaggcggctacagattcctattcgtggcgatcgacaaattcactaaatggatcgaagcagtacccacgggggaaatcaaggccgacaacgccatcgaattcatcaaagggatattttgcagatatggactaccgcaccgcatcataaccgactacggctcccagttcatcagcgccgatttccagtattactgcatcgggctgggggaaacacccttcttcctcgtgtacggctccgaggccatgctccccagcgagctacgacatcagagtacacgagtacagaagtactccgacgaggaccaggtggaacagcgagacatcgatgtaaatcttctcgaggaacatcatgaaacgagttgcccgttcgagcagctagctatcaacaggccctccgccgttatcacgagaagcgaatccgagcatgcatactttcgatcggcgactatgtcctccgacgggttcaaagccaagcagggcggaacaagctctcacgcaaatgagaaggaccttacacgatcacacaagtcttgcggccagccgcattcaaaattgcagacggcgaaggtcgcgagttag

SEQ ID NO: 526 - DNA, 3993 bp, Oryza sativa
  N_region (195)..(195): n = any nucleotide
  N_region (215)..(215): n = any nucleotide
  N_region (225)..(225): n = any nucleotide
  N_region (237)..(237): n = any nucleotide
atgccgccccagcctccgccggcggcgtcggcgtcggccagtgccccggatcccgccgtcccggcttggctcagggggctcccccgcgcgcccgagtaccgcccgacggagtccgagttcgccgaccccatcgccttcctctcccgcgtggagcgcgaggccgccgcctacggcatctgcaaggagctcggcaanccgcggcgtggacgcccgangccgcaggtncttaagcaggtntggcagagtggggagcggtacacgctcgaccagtttgagtccaagtcccgcgccttctcaaagacgcacctcgctggactccacgaaccgactgcgctcgcggtggaatcactcttctggaaggcgtcggcggaccgtcctatctatattgagtacgccaatgatgtccctggctctgggtttgctgcacccgtgcagttgcaacgcaagaagaagcagaaaagagagactgccccgatggacgaatgggagaagagttcaggctggaggctgtcaaatagcccatggaacctgcaagcaattgcgcgggctcctggttcgctcacacggtttatgcctgacgatgttcctggggtgacttctccaatggtttacattggcatgctgttcagctggtttgcgtggcatgtggaggatcatgatctgcatagtctcaacttcctccacactggcgcacctaagacgtggtatgcggttcctggtgatagggctgttgagcttgaggaagttatccgtgtacatggctatggaggcaacactgatcggatcgcgtcactagcagtgcttggtgagaaaacaacactaatgtccccagaggtccttatagacaatggtgtgccctgctgtagattggtgcaatatcctggtgagtttgtggtgacattcccaagggcttaccatgtcgggtttagccatgaaggattacgcataaccgcaaaggtgaagttgtcatggtgctcctgggagacgccgcattacaggatcaccacaatgctaggtaagaagccaaaaggtccaaaatatatgctttatcgaaacaaaagaaatggaagaaccctagagaactactgtctggaatcccgaacttctcgtctaagagatcgtaaaaaagaagaccgagaactgttggtcaaacaggaattcttgcaggatatgattagtgaaaatgaacttatatgttcatttcttggaaaaaaatcggttgataatgttgttctatgggagcctgacttgctgccatcgcttaccgctctacacccctgctcgtcttgctcaaaagctcctgaaaagaagggtgaagatggtcccagaattggatctacccaatccagctcaaaagatgacagctcatctgatggtactgcatgtatgactgggacacaatctaaaggcttgtctatggatagcaaacaagctcctgagggagaaaagcttgataccgatgacggagatgacctgccttttgatttgagcattgattctggttcattgacatgtgttgcatgtgggattcttggctatccatttatggcgattttgcaaccttccagaaaagcactggaagaaatttcccttgttgataaggaaagatataaactgagttgtgaaaaagagatttgttcaaatgtgcttccgtgctctcctaatgatggtagctccggatgcccactcatcgccaatagatcgtccagccctgtggaaaatgctaacctcagtcatcaggatgtgaagccaattagaagtgacatttctttgatgggaaaggagtttaatggaaccctagggaaacatattggcacttcctgttcttgtagcagtgaaaataccattcatccttacggtgacacagaaacccctgagaagaaaataccaagtgattgccctggctcagagttgagtaaacaatcaggcagaggtgatgttaatgtaccagatgtcgaaggtagtgaggaaactatcagctggaatacaggctgtgcatttgcacggcctcggatcttttgcttacaacatgcccttgagattgaggagttgcttgcgagcaaaggtggagttcatgccctcatcatatgccatgcagattatgtcaaactaaaagcacttgcaatatcaatagctgaggaaattgagtttcagtttgactataaagatgttgcactagcaaatgcgtccaagtctaatttgcatctaattaatatttcaattgatgatgagggatatgaggaagagggaacagattggacatcacggatgggtctaaacctcaaacatagttccaagattaggaaagaaacaccagagagtcaagaacagcctcctttatcattttggggattattttccaagccatcacctatttcagttgtttcaaacttgaaatggctttgcaggaaagcacggactccatataaggtcattggttatgcttccagccctgatgttgtggcaactccagacaaagttaagcccgcagttacaaaaactcagatagacacttctggaaatgctcatgaaaacattggaagtgaacaaactctgcaacaagattgtgtcctgcaagaatccaatgatgtagctgatatgtgcaagcgtcccaaggattcacccacaactgttgcagtgtcagctggcaaacctaccagagaacaatgtggtgctgaatcaactgagttgagtactgtaaaacagttcctggacaatgggcttatcgctgagggaggcagcatgaacttcataagtaatcatgagcacttagaatctgacaatgcaacttcagtgtgcaaagatgaacaattgcaagttcaacagaacagcgaacctgatacagatgatcaacctgaaacatgtgatcgtagtgttgttcttgtaacaccaaagtcgagctgtgaccagatgatttctagcagtgacagaagttgcagtctgaccttggactgccctgtctccactgatgctgccttttcaagcgaaaagctgtctatggctcatgatttgatgggcagtgagttgcaggcagtccataattcaaaggctgaggttgtggccagtttgactgatgtcaagggtgctaagctcaatagcattcataccacacaattacctcatgaatctccaagcagtgatttcatcatttcagaaggtgcgcaatctgcttcaacaactgcaattcccagaaaaaatggaacatccatgcacacagagtcaaattcaattgatattttacttggagttctagccgatgaatctaaggtctcttctggaaaggatgaggttggcaaagcttccttgacattgatgacactggctggcaatgaccaatctgcagatgatgtaactcaggatgaagttgcagagatcactgatccgtcgcatggcttctgctcatcagacatagtgtctagaagcattggaagttcaaacagaacaaatatcatatgttatgccagacgcaaacacaaaagaaagagcggatctgagttcaatattaatagtccccaaagcttggggagctttgtccgctctccatgtgaaagcttgagaccaaggactagacctgcgattgttgaagacatgacaaacgaaacaaaaactgcagaagcttcaactgcaaataagaggaagaaggcaaaggtggaagcatttcagtgtgacatagaattttgtgacatgacatttgagactaaagctgaacttcgtgctcaccaacgcaatatctgcaccgacgagtcttgtggcaagcgcttcagctctcacaaatacctgaagcgtcatcagtgtgtacacagagatgagaggccattcaaatgcccctgggatggttgtccaatgactttcaagtggttgtgggcgcaaactgagcatatcagagtccatacaggcgagcgaccgtacaagtgctcggctcctgactgtggccagagtttcagatatgtctcagattatagtcgccatagaaagaagtttaatcattattga

SEQ ID NO: 527 - DNA, 2883 bp, Oryza sativa
atggcggagccggacctactcgcgcccttcgccgacctccccttcccccccggcgacgatttccccgacttcccgaccctcggggatgacgccttcgcgctggaggatttcgatctcgacgatctggacttcgacttcgatgtggatctcttcccgccggatgcgccgccgccggtgacgacgtcgtcgtcgtcctcggccgccggatcgccggaagcggggacgtcgtcggccggcgacgggggttccaagaacgaggagtccgcggattcgtcgtcgccgtcgaggagcgggagtgacggcggcggcggcaaggatgggaaggatgatgaggcgaagcggcgcgcgcggctggtgcgcaaccgggagagcgcgcaccagtcgcggcagaggaagaagcagtacgtggaggagctggaggggaaggtgaaggtgatgcaggccaccatcgccgacctcaccgccaggatctcctgcgtcacggccgagaacgccgccctcaagcagcaattgggtggcgccgccggtgctggtgccgccgcgccaccgccgccaatgcccatgtaccctgcggtttacccattgccgatgccatggatccacccagcctacgcaatgcgtggctcgcaggtgccgcttgtgccgataccccggctcaagacgcagcagcctgcgtccacaccggagccaccggccaagaaggcccggaagaccaagaaggttgcaggtgttagcctgcttggattgctgttcttgatgatggtctgcgggtgtttggttcctgcggtaaatcggatgtatggtgcagcgtacactggggaaggcgctgcgattgttccgtcacatcatgggagaattctggctgttgaagggccacaaaatagtgtctcaaatggtgttgatccgaaggtacctcagaatggaagcgaaacgctgccagctttgttatatttgccgaggaatgggaagcatgtgaagatcaatggaaatctggttattaagtccattgttgcgagtgagaaagcctcttcccgtttgtctaactatggcgagaagggttctggaaaccaaggaaaggaggagactagcttagcaatccctggctatgtagctccgttagaagctggagaagtcatggattctgctaaaggaatgaatgaactgatggctctggctcctggagatggaagcatatacagggaggatgatgggatgctgccgcagtggtttagtgaagcaatgtcaggtcccatgttgaactccgggatgtgcactgaagtattccaatttgatttatctccaacaacagctgatgcaaatggcattgtgcctgtctactctgggtcagtgactaacacgtcacaaaattatactgaaaatcttccttctggccctgttcagaaggtgaagaacagaaggatttcgtactcagaagccatccctttacgaggttcgacatccaatgacacggatcatttcaaagcaccccccaagaaccatagtcagagccatgctggtcgtaagccagtttcgtccgttgtagtctctgtcctggctgatccaagggaagcgagcgatagggatggtgaggggaggatctcctcaaattctctgtcccgcatcttcgttgtcgttcttatagatagtgtaaatgtttttgctggatggaacactctgttgtcggtcagattattggaagaaatagcagcgctcctggttcaggctgctgtcatagtgctgcctgaacttgcaacatttaggcccggatgcaaatcgtctgctggaccgcacctgcaaaatgaaacccatgcaaaaataatagaaggccccttaaatgccataggaaaaatgaagaaaaataataaagaaaagcatccatattcacttaaaagttccaagggagcaccgtttccaccgcgaccgattcttgtcttcctcattgcaatatttggattctatgtatgctacatctcctttaaccagataacactagagaatagatctgaggagaacagtggagaagtgcaggcagaaattcattgccgaaagcctcatcttcctcatgaggagctgcgttatgtgcactttccgaaacctgagagttatagcaggggagagtgttcctgcaatctggttcgatcctttgtgcttgtatctatgcaacggtcgggaagtggatggtttgagactttgctgaacagccaccctaacatcagctcaaatggtgaaatatttaacagggtggatagaagagagaatatctcatctatcttacagacccttgacaaattgtataatttggattggttcaccagtgcagcaaagaatgagtgcacggctgcatttggattgaagtggatgctaaatcaggggtttatggaccatcatgatgatatagctagttatttaaacaagaagggtgtttccgtgatatttctcttcaggagaaatacattgcgcaggcttatctctgttttggctaatgattacgacagagatgcgaagcagctgaatggaacccacaaatcccatgtacactcaaaagaagaggctgagatattagcgaaattcaagccggtgctggatgtgtcaaatctgattccaaacatcagaaatgccgagaaatacatcagagattgcttggaccacttcaacaccacacggcacatgatcctctactacgaggatattgtccgcaacagaaatgcattgttccaggtacaagaattcctcggagttccggtgagaaagctggtcagcaggcaggtgaaaattcacactagtcctcttccaggccttgtcaggaactgggatgatgtgagcaacaaactgaatgggacacagtatgctcattttcttgacggtgcagattatgtcaggtga

SEQ ID NO: 528 - DNA, 2451 bp, Oryza sativa
atggaggcattgggagatatggagggggaaggaggggcagcggcggcagcagcagatacgggtggtgcggtgccccaagtgcgagaagttcttgccggagctccccaactactccgtctacgtctgcggcggatgcggcgccactctccaagactatctccagcaaagaagaactcagcatctgagaattcctcagagaaatctgatggtggacatgtgaagtaccttgaagtgctggagagttcaccagataacaaaggagctgcatctaaagacacttgtgaggctgcccaagaaggagaagccaaaaatggagaagctaaagcagaagagagacagatgacagcagggaaattcggggaggccaagtaccggcgcatccgcagtgaggacaaaggagaagcaaaacacacagtgagagccagagacagatcgccaagatcagttgttgatgccatccctccgaatgcatatcctgcagaaggcccgtctgactaccatattaagtcaagattcagacataccaatggtgagcaagctgatatgagaaatttggagggcctaaacagagtcaatggtcttgaaaaagaccgtgctgatctgttacggatgcttgatgagctgagggatcaggtgcagagatcctgtgagatcaccaacaagccaagtggaagtacttctacagataaagcggtggatgcctcagggttatataatcctcgtgagcggttgagtcggttacgacatggttcacctcagttgcagcggagtggttctcagcagtcaccatccttgaatgggcaagctccttgcattccgcaagcttatgctccaggaactgctcagcaagatcttcatggatacggggagccaatggcacacatgggggctccaagctatcctgttggcacatatccatggagaaattttgataattatttttatggacagtatgatcctgaccctctgatctcttaccaccatgatggcttctaccatcagcctgcctgttcttgtctacattgctaccaccgtgagttcttacctgttcaggggcctcctctgggtttcaaccatcgcagggtaccaccgtatgttatgaataatcctagagtttacccggttgatggtcctgcaatgtttggcacacagaattacaattcaagagtcaacgcttcaatgcagcgcaatcacatgagggccgctatgagtaaaaaacctgcacagacttgtgaaccgattgcatgtggtgccccattcactatatgctacaactgctatgaagtactgcaacttccgaagaaatcccccgtgccagggaaggatgagtacaaattacgttgcgggtcatgctcacatgcgcttgtggtcaagcttgatggaagcaggcttgatgtttcagcaccttcacctatttcacacatatctggcggcagcaaaattagttccaatgatggccaaggaagcaatgcgaattctgctccacatgagagggtgcttccactttatagtttttctgcagcaagtcatggttctcaagacctaccctcgaactcaagtgaagctgaaaaaatgcaagggatatcgtcttcttgcagcatttctgaagatgagaacagccctgcgagatctaattcccagagggacacccctgggtctagggatcttcatcctgaagctgaggtgtctacccgtgttccaagtttacatcttcgtgatcattttggatactcgccatctgagaaggtagttgatggatcagggaaaggaagcagaagtactcgatctgaacatgagaaggctgtgttgacagaaagtttcaagcagaacactgtaaaagatgtatcagtagtgaacataatggacttgtcggatgatgagtatgatgatcctgactacatgcaagatcgaggtgatgtggcacaacctgtagatcaccctcgggccgtgaaaacgggtgattcatttttcaccaatctcataaagaagagcttcaaaattaacaacggaatgggcaatggcagagcaaaggttttcattaatggctatcccatctctgatcgggcggtcaggaaggctgagaagatagctggaccaatctatcctggtgaatactggtatgattaccgtgctggtttctggggtgtaatgggacagtcttgcctcggcatgataccgccatatattccagaactcaattatcctatgcccaagaaatgcgctgctggaaatacaggtgtatttgttaatgggagagaacttcaccagaaggatttggatttacttgtgggtcgaggactcccagattctcccggtagatcatacagagttgagatgtccggtaaagtgtcggatgaagtctctggtgaggagctgtattgtctcggcaaacttgcaccaacagctgctgtcagaaaattcatttcttctgagtatttgcttggctggtga

SEQ ID NO: 529 - DNA, 2238 bp, Oryza sativa
atggtagctccaagaaaggccctccaggtcgtcgcactagaaaggccaaacctggaacagtcaaagccaattgatgaagaattgatgaagagactgaaggtcaacttgatcacctggaaaaatacccaatgtctttttgacagacacatgactttgtttgtctattttctatggaggaagaagaagccattccacatcacaagagcggttcctcttgatgctattccaggatttttatacgacgatgaggatgatgatgacgacgacgacgatgagggcgataacaatgttgaattagaggagattcgaccaagttcaactgaatgtgaatcttccatccatccagcagaagagctgaatttactcttgccaaaatctcttccgttgccaagaatatccgctgcagttgaaaggaatggaaaagccagggacaaggaggtgaaagaaggatccaacttgaaagaattgccacaaggatatttgggcaaaatggtggtgtacaagagcggcaagatcaagatgaagttgggggatgtcatgtttgatgtgaacccaggagaagagtgtaggatggcacaacatgtggctgctatcaacaccaaagagaagcattgttgtttacttggcgagatcgagagccggcatgtcgttgtgactccagatgtggactcgctgctgttgaatgacaatagagcatataatgctctacaccaggggatcagattcctagggatgaaaatggtaggaattgatagcatatttgaaacgattaccgtagatttaaaaatggtcaaaatcgatagcatctatcgttggaatgattatcgggcggcacgcattattgcccatgccgcaattcctgcgagagagaatgcatatggacgcgcggagcgaatccgcatcggagatcgagcacagatcgagcaaaaccctagttcgatcccacttgcttctcctgctcgatcgatcatggtggaggatcaggagaagtccagcagcagccctcccgttcctccgccaccggaggaggaggagatggaggagggggagattcatccgggtggtggtggtggtggtgggtactacgattcgggctccgagaccgaggacgacgacgatcggtacgtgttccagtctcgccgcgacgacgaggaggaggaggagggcgtgaacccggcgagcaagcgccgccgcctcgaggacatcctcgcggagacacggggagcgctcccgctgccttcgccgacgccgtcgtcgtccggttcggaggggacgatcagcgacgaccacggcgacgggatcgccggcgccgccgccgccgccgatgcacccgtggcgcgcgtggcgttcccgtgccacgtctgcagcaaggagttcggcagcaggaaggcggtgcacgggcacatgagggtccatcaggcggacaaggacaaggagaaggagccgtcgctgcacctcgccctcggctggacctcgacggggaagcgcgggcgccaacggcaacgcccgtgctgtcaccgtcgccttcgcccccatggaacaagcggtggcgacgacgacggcgaacgcccgcgccatcgtgctcgcaccggcggcgcagccgcagccgcagcccatgaagctgccaatcctcctaaccaggtcgccgacgacaaccaccgcctgccagtgccagctgccgtgccgtacgtcggcgccgccgccgcccccgcccgccgccgcgctcggccgaagcgtaacgccggacagggtggaccgtacaggtgcagttacccgggttgcaagggggagtacaggacgcaccaggggctaggcggccacgtggctggccacatcaacagggagaagcaggcggccgccgccgcccagggcggcagcggcgccaggccggagggcaatcacccatgcaaaacgtgcgggaaagagttctcgacgggagtggcgctcggcggccacatgaggaagcactacgaccccaagaagaagaagaagcatgctggccttgtccttaccctctccgtcgcgccgcctacgcctgcacctgctccgtccatcgccggagcggcattgccaccggcggaggtaaaagcggacgtggatgaacatgaagcagagcaagtgccaatggcgccggtgtctccgccagctgaagcgaggggaaatatcgtgcggatttttggcgtggatatagagaagccggcagacgaagaggagcaagaaggtggcagcgatgtctag

SEQ ID NO: 530 - DNA, 2007 bp, Oryza sativa
atggaggtggaggcggcgacggcggcggccatggacttccacgcgctctcccgccgcgagctgcaggcgctgtgcaagcgcaacggcgtccgcgccaacatgaccaacgccgccatggccgatgccctccagtcgctccccacggtggatggggtcgacgagatcggcacggcggcgctctgcctcccgacgccgagcaggtcgacgatgaagtcggctttgaaggccgccgcggcgatcggcgaggagcagcagcacgggagcccgctcccccgcggccgccgcgtgtcggtgatgtcgccggaggccatccggttggacgtcgaggagggcgaggacgagatgaagcgggatctcgtcaaggagatcgtgaggaccccgggcgtggcgctgcgcagcaccagccgccgcgcgagggccacgccagcgccgatcccgacccctgcgaccactaggcggaccgccgctgcgcgcaaggtggaggaggctgcgcctaccccagctactctgcggaggagccagaggacggctgctcggaaggccgctgctccggtggtggaggaggtcacggcaactaagacaacaactaggaggtctgcgagatcgaaggtgatggttgatttggagcaggaggtggaggacatggcggtggcgttgcaggaggtgaaggttcaggaagaggatccaaaagatgttgcttccgatgagaaatgtgatgaggaagaggaagctacgaaaattctgggaggaaacagtaaagaggtggaatcagaggagggtgaggaagttgtttcttctgctgcaccaactgaacttgcagtaatttcagttatgagctgtgatgaccctaaggaggaggaaatagttgcaactggggaggaaccagctaaaacccaagaagtcatggaggattcaccaatcctaggagtcctgtcaaagccagaacctgtggaaccactcagcgagaagatagaagatgcctctgttggtgatggtctgggctttggtaaactgtccgcattgaaggagataactggtgagatgaatgataaggaagttgatgccgatgaggttccagaagagaagcttccagctgatgtgaccgatgacaagaccagcgaggaagatgacctcaacgaagttgagaaattatctgccgttgagataccacaggctgatctaacaggtgataaaaccagtgaggaagaggatctgaatgaagtgaaggaagggtcggcctatgagaatccgcaggctgatcggatagacgctgagagcagtgaggaagatgatcttgatggggattacagtgaagaatctgatattgatgaggagtccaatgaggaaggtatgcttgatgaggaattcgccgctgaggaatatgcctccagtgaggagactgatgatgagagtgacccctctgaagtggccactgattctgatgaagtggaagtagaaaagctgcaggtcgcaatggaggatggattgactgccgaggccaatcaggttgatgatgaagaggatgatttcagcggtgacctaccatcggatttcgacaatgccgacaacttcagtgatgatgaaactgagagcgatgccactgttgtgatctcatctgcttccaaggccgctgttgtgaagaccctggatgactcctccgtcactgaagcatccagtgaggaggaggtttctcaacaggaggtggaagcctcagttaactccatcgtgaagtccctggatgagtttactttcacggtggagggcacccagaaggatgagctgactgaagagatgaagagcacagatgatgctgaggatgtgggagcaaaggagttgaagaaagagaagaagaaaaagaagccgactgtccaggaacttaacgccacgagcatgaggaagctcaaaaccatgctcaaggaagagctaattgccaaggctgccgctggggaagggaagaggctggcgcttgcagagctggacgacaacgccggtggcgtcgactgctga

SEQ ID NO: 531 - DNA, 1770 bp, Oryza sativa
atgcttgatatcaacctcttccgcaccggtcgttgcgtgcagttcgatctggataatatccgaaaggagctcaacgccaccagccgaaatacgggcaagctgaagatggtcactgctgctcaacatcctatgcaattaaggcagttagaagtctcgggcagtggtaaccaggtcttgcccagcctcacctcccaagctttgagattcgggcaggggcagtggaggccgagggtgccgccgtccacaactgacatcgtctcaagcagtcaagcatccccagcagcgcaaagaaagtgctggccagatcgagaaggactactgaggggtagccgggaggggaagaagctctcgggagggaagtggagcaataaatctgttcccatgaccaagccagaagccctgcaacttcaccatctgcccgatgatgtcctgcaccgcatactgtctcgattaacattcagagagtcctcacggatgggccttctttctcgcaagtggcagaaactgtggagaagctgctgcccgaaattgatcttcaccagggccaccatgttcaagcctgggaataaaaccataagacgtacaaggaccaactttgccaggagagtcaacagtcttttgcggcagctatgtgcacctcctaccctgaataagtttgttgttaagtttgggctgcgcaggaaacatacctgccatgtcaacagatgggttggcttctgctccaagttgagagcaaggcacatcacttttgatttcactcctggagtgaagggtattttcaggggcttagctgatgaaaagtacatcttccacctgcatgttttcagtgtccctgaccgctcccctgctcatatcaaatcccttcatctgagctacgtctggttgaacacagcaaccactggtttcactggctttgcaaacctcaagaagctcaccctgcacaaagtttcctttttaaatgacttccaacatctgatgctgtcggagtgcactgctcttgagtggctgagcatcagctgctcttccttcactgagctaaccttgtgcaagccactgcgccgtctgcgttatctttctttgcactactgctacatggaaaaggttgagctggaagctccaaacctcacatcggtcgatttgaccaatcggccaattccgttggcactaagtgaatctctgaaggtgatggaggcaaacattaaactgctacataagagcgtgctttatggtgataatctggactacatctgcaccgagcttcctgccgctcttccgcatgtgcagaaactctccattacctcgacactctgcatctacgatgagttgcaaagttttgccaaaacctcagtgagattcatcaatttgaggcatctgagcttgtatttgcctctttatggggacggcaggtcagttggtgggattcttcgtttggcctacctcttggagctcgctccagttctagaggaactggaactgcactttcgcttctctgatttcgtcatcagacaggcgatcagagtggatatgctaccgtatcggcatgacaagctcaagagggtggtcatgtctggagcctgtcattggcaggggctgatcgagctagcacaccacattcgtcgttgtgctagtagacttgactgtatgatcatggatccgatggttagaattaagggtctcccgacggttgattggttggaggaaagaggccgcaggattgccaaagagcttcttaagaggcaggagtttcagggtgtcctcactgttttgtga

SEQ ID NO: 532 - DNA, 1296 bp, Oryza sativa
  N_region (151)..(151): n = any nucleotide
atggcgctccgccgcatcaacctccggaagaagccgctcctcctcttcccgcggcccttctcctcgtcctcctcacccaaccctcccttccctcctcccccgccaccgcccaacgaccgcgacgacgcctcaccaaagcccagcgaggggnaggggcgcaacccggcggcctcgctcttccaggacttgcgcgaccggctcatgtccaccccctcgcatctgccgtcgcgccggatcccgaccgctccgccgccccgcccctcggggaacgccgagccggtggcctctatcgacgacatccgccgccagctcgagtcctaccgcggatccctcgccgcgaaggggcgcccctcctggctcctcccccgacggcgccgccccctccttgctcgacctgacttgcgcaatctcccctctggacggcagccgcaacagcggaggcagcctcgttcgacaaccccgtttttgtcccccactgcgcatcccatcttcgggagggagctcggggagaacgcgagaaaggcggaggggaaagaggagaattctgccattgagcttaagaaggaatacagctacgcagagctcgggaagaagctcggccaactgcgaccgtccggcgcagggaacgatggaaaggagtggttctcgcttgaggagctgcagggacggatcgccaagctcgcaaatttggacattgctgatgacatgcggttaggcgggcatgcagggattgtcatttttggcgaacattggtgggccggcaacgccgcaatacttgcagcatcctccacaggaggagttgctagagaggaatttgctcctaaggttttgattggttactgcttttctcagtatttccatccagaccacatgtcgtcggaagagaagatgaagttagagctccagagggaaatgaacgttaccattgttttggagatactgaaagatgatctttgctcaagtagaatagtcatgaaaacaagtcaggctgatggaatattttgtctcgaattgaatcatttagttgcccaattgaccgtgaaaatcaagcatctgtcaactgttctacacaaaaaggataaacattcgagaaaggggcttcaggatatggtccaaaggaggaagaagtacctcaagtacctgcgtagaactgactgggattcatattgtcttgtcctgtcgaagctgggtcttcgtgatgtaccggagtacaaagctcctgattacaagaacaaatccaccagtaaagccaaatctaagaagagcaagagcaagaaaagaaagatgaaagcataa

SEQ ID NO: 533 - DNA, 612 bp, Oryza sativa
atggcggggaaatccggcgcacgcacgaggaagcgcgtggaggcgacggattccgccgtcctgaagcgcgcgcgcgacggcagcgccttcacccgctgcgaggcttgcggcaagagcgtctccgtggtcctcatcgacatgcacaactgcagcctcgacgacaagatccgcatcagcctagaggctcaggtggtggagcaggccgtggaggtggcaagcgagcaagaagaagagcggcaagacaccaacaacaatggcgagggggccaaaaagggcaagcgcccacccactgcctttttcctcttcatgagtgacttcaggaaggagtacaaggcggagcaccctgacaacaagagcgtctccgctgtcgccaaggaaggaggggagaggtggaaatccatgtctgacgaggacaagaagccttacttggacaaggctgcagagctcaaggccgagtaccacaatggcgagcgcagcgacgagaacaatgttggtggcaacgcaggcgagcaggaggtagatcagccacccaagaaaggcactgatgaagacgaccaagaagatgaagatggtgcagaggaagagaagaacgagctagacgacgacatctag

SEQ ID NO: 534 - DNA, 585 bp, Oryza sativa
atgggcacagtgcttgcttccgctgctgcgctggtggccaccgtctgcgcagaggctgcagagctcgctgggaccaacaggtccggcgtgacttccgccgtgaaaactggagtcgagagctgctcctctgctgaactgctcaccctcacggccactgctgctacatgtctgagaggagctgcagcactgaaactgagggcagacgtcaggggaatcggtagcaacaacaactcagttggcaccagcactactagcatccacaaagacacaactctcagggttaggctgccttgtgggagcgtgcgactgaggaaggtggctgtctttccacagtgcgacagagtagtactgaggctggggaagaaacatctgcacggggcattctcaacctacaaaaattatgaggtgcttgacgtctccagcaacggcggcgattttgttggtggacggcatggtgttgttcccgctggtgctcagaacggccgctggtgtggtacagctgctgttggacagtcagatgcactgcaaggtctggaagaatgccatcgagggcattctgtccgaccaaaacgtcaaacacgctaa

SEQ ID NO: 535 - DNA, 354 bp, Oryza sativa
atggcctcgttgtcctccttccggctcgccgtggcagtggcggcattgttggtcgtcggctcatgcgccactgaggtcaccttcaaggtcggtgagggctctagcggaaaaagtctagagctcgtcaccaacgtcgccatctctgaggtggagatcaaggagaagggcggcaaggactgggtggcgctcaaggagtcgtcgactaacacctggtcgctcaagagtgaggcggcgctcaagggccccttctccgtccgcttccttgtcaagaacggtggctaccgtgtcgtcgacgacgtcatccccgaaagctttacggccggctctgaatacaagagtggtatcaacgtctaa

SEQ ID NO: 536 - DNA, 5508 bp, Oryza sativa
atggcttccccggcggcggcgccgccgcctaccccgccggagtccgacccgcggctcgtggaggccttcgtgcccttcctcgagaagctcatcaaaaacgcctcgtggcgcaacaaggcgcactccaagctctcccacactgccaagtccatcctcgaccgcctccagaacccgccgccgccgtcgtcgtcctcgcagccgggcccgctccgcagcctctcgctcgcggactcggagctgctgctcggcccgatcaactccgcgctcggctccggcagcgccaagctcgccgaggccgggctcgagctgctccacaggctgatcgcgcactcctacatccatggcgaggccgacccgtccgccgacccctcggcccagctcgtcgcgtccctcctcgatgccgcctgcaacgcgctttacctcgacgacgagcacatcgagctcctcctactcaagacgctcctctcggcggtcacctccacgtcggtgcgcctccatggagattgcctgcttcgcgccgtgcgcgcttgctatgatatgtacctgggaagccgcagcgtggtgaaccaggccactgccaaggcgtcactcgtgcaaatgttggtgatcgttttccgccgcatggaggcagactcctccacagtgcccgtgcaacccatcgttgtggctgatgtgatcgagctgcctgaagctgcttctggtgcttcgcctgccgctgatgccaactttgtacagggattcatctcgaagatcattggagacattgatggtgcaatcacacctctggcacggacaacttcttcagcagctgcaggcgcaggtggagcagcggctcatgatggtgcatttgagacaagagcagcagaggaaggggcacatccagcagatttgcttgattcaacagacaaggacatgctagacgccaagtactgggagatcaacatgtacaaatctgctcttgagggtcgtaaggatgagattggtgtggagggggcagtggtgggcgctttggatgatgatgctgatgtgaggattgggaataaactgcgaagagacgctttcttggttttccgggcattgtgcaagctctccatgaagacaccacccaaggatgctccagctgatcccattgtgatgcgtgggaagatccttgctcttgaacttctcaagatattgcttgaaaatgctggggctgttttccggaccagcgagagatcaagcagtatctatgcctctcgcttttgaagaactgtgcctcggcacatatgatagtctttcagctatcttgttcaatttttattagcttggtttcaagattcagaccaggattgaaggcagaaattggagtattctttcccatgattattctgagagttttggaaaatattgctcaaccaaattatcaagcaaagttgattgttcttcgtttcctggaaaaactctgtgctgattctcaaatcttggtagacatttttctcaattatgattgtgatgtacactcatcaaacatatttgagagatggttaatggtctactaaaaacagcacaagggcctccagcaggcgtgtctaccacattggttccgcctcaggacaccacaatgaaaagtgaagccatgaaatgcttggttgctattctgagatccatgggagattggatgaataagcagctacgcattccagatcctgactctcctaaagtagagtcggagcaaaatgataatgatggaggacacgagatttcccacacagaggataatggagacgaatgtagtgaagcatctgattctcattcagaaatgtcaaatggggtttcagaggctgcatctttggagcagcgccgagcttacaagatggaacttcaggtggatgagggtatctctctatttaatcgaaagcccaggaagggaattgagttcctaataaatgccaacaaggtgggggaatcacctgaggaaattgctgctttcttaaaaagttcttctggtttgaacaagactatgattggagattatttaggggagagggaagatttatccctcaaagtcatgcattcatatgtggattcatttgattttcaaggcatggagtttgatgaagccattagagcctttcttcaaggtttcagattgcctggagaagctcaaaagattgatcggattatggaaaaatttgctgagcgttactgcaaatgcaacccaaaggccttttccagtgcagatacagcttatgtccttgcttattcagtcataatgctcaacaccgatgcacataatccaatggtaaaaaataagatgtcaccagaagatttcattagaaacaatcgaggtattgacgatgggaaagacctgcctgaagaatttatgaggtccttatatgaaaggatttggaaaaaagagattaagatgaaagaagaagaatttgttccccagcagcaaaaatcaacaagctcgaacaaaattcttggattggataacattcttaatattgtcgtacgcaaacgagattcacgtatggaaacaagcgatgatctcattaagcatatgcaggagcaattcaaagaaaaggctcgtatgtccgatatccagcaacagatgtagtagttttgaaattcatggtcgaggtttgctgggctcctatgcttgctgccttcagtgttccacttgaccagagtgatgatgagattgtcatatcccagtgccttgaaggatttcgcagtgcaatccatgttactgcagctatgtcgatgaagactcaaagggatgcatttgtcacttcacttgctaagtttacatcacttcactcggctgcggatattaagcagaaaaatattgaagccattaaggcaattctattaattgcagatgaagatggaaattacttgcaagaagcatgggagcatatattgacctgtgtttctcgttttgaaaatctacatctcgtaggagaaggtgctcctccagatgctactttctttgcactgcaacagccggacctcgataaatcaaaacaggctaagtcatccattcttcctgttttgaaaaagaagtctccaaatactgttccagcttctaaacgaggttcctatgatagtgctggtgtgggtggcaaagcttctggggttgatcaaatgaacaatgtggtgacaagcctcttagaacaagttgacatggctgaaatgaatcgtgtatttgtaagaagtcaaaaactcaacagtgagggcataattgattttgtaaaggctctctgtaaagtttccatggaggaattgcgatctgcttctgatccacgggtttttagtctgacaaagattgttgagattgccactacaatatgaatcgcatcaggcttgtctggtcaagcatatggcatgtcttgtctgatttttttgttacaattggctgctcagagaatctctcaattgcaatatttgctatggattcattgaggcagctggcaatgaagttcctggaacgagaagagctggctaactacaatttccagaatgaatttatgaagccttttgttgttgtaatgaggaagagccgagctgttgagataagagaactaatcatcagatgtgtctctcaaatggtcttggcacgtgttagtcatgtgaaatcagggtggaagagtatgtttatgtttcaggtctttgcaacagcttcatatgatgaccataaaaatattgtactcctggcgtttgaaattatcgagaagattttgcgggagtactttccctacattactgagaccgagtcgacaactttcactgattgtgtgaactgtcttattgcatttactaacagtaggtttaacaaggatataagcctcaatgcaattggttttcttcgattctgtgcggcaaagctagcggaaggtgacattggatcctcttcaaggttgaaggagaatcctccttctcctcgcttgaccaaggatggaaagcaggaaagtgcagttcttgttgataaggatgatactatacacttttggtttcctttattagcagcttgcaggattatctgaacttaccttcgacctacgacctgaaatcaggaaaagtgccttgcaggtgttatttgacacattaagaaaccatggtcatctcttctccttgcctttgtgggagaagcttttcccaatatttgattacgtacggcatgccattgatccatcaagtggttctccacaaggacagaatgtggaaagtgatccttcagaacttgatcaagatgcatggatgtacgagacatgcactttggccctgcagctagttgtggacctctttgttaagttctatgacacagtaaaccctcttcttagaaaaattctgttgctcttgacaagtttcataaagcgtccccaccagagccttgccggtataggtattgccgcatttgttcgtttgatgagcagtgccggatctgtcttcgttgatgaaaaatggttagaggtggttttatcgttgaaagaagctgccactgagacccttcctgatttttcttatattgcatccggagcttaccttgagaatgtaccaatagaaaatgggggctcttcagaaaagacagaagacgagtctcgaccattggaggatggcactggagaagcttctagatcaaggaacttgtattttgcaattggtgatgccaagtgccgggctgctgtccaactcctattgattcaggctgtgatggagatatataacatgtacagagctcggttatcatcacagaacactgtgatcctctttgaggcattgcacactgttgctactcatgctcataaaataaacagtgataatgacctgcgatccaagttgcaggagttgggctcgatgacccaaatgcaggacccacctttgttacgcctggagaacgagtcgtatcagttgtgcttgactatcctgcagaacatttgcttggacagatctcccaatgagaggagtgtagaggtggaaagccaccttgttggcttatgtaaggaggtccttgaggtgtacctgagcactgcaaacccatctcagctttctggtgctccgcagccacttggtcattggcttattccggtcggttcttcaaagcggagagagcttgcagcccgggcacctcttgttgtctcaaccttgcaagctatcagtggccttggtgactcatctttcgagaagaaccttggccagttcttcccccttcttgctggtctgataagttgcgaacatggttcaagcgaagtgcaggtggcattgagtgatatgtttagcacttgggttggcccggttgttcttcaaacctgctgatgctgagccccatatctgttatatagtatatctccacatgtaagttattatttgctttattgccatttcttgatgttttgccattccccattttgttctgtttatcattctagttactgggggaggttgtctcttgcagagctgagcactgtagttctttttacattaatttcttttagctttggggagtgtatgttacaagatgactga

SEQ ID NO: 537 - DNA, 4405 bp, Oryza sativa
  N_region (101)..(101): n = any nucleotide
  N_region (124)..(124): n = any nucleotide
  N_region (3395)..(3395): n = any nucleotide
atggatgcgccgcggaaggaaccggaggcaccaacaccaccaccggaaggcggcggctcaggttcaggctgcacctgctattgccgctgtgggggtgggancgggagggaatggggcggcggcncgggcggcgtacggggacgtgtcgggggcccgccgaggttcgccgcgccgttcgggggcgcgccggcggactacgccgaggtgttcgggggcgtggcggccacctgctccatcccgttcctcgacctgccccccgtgcccgccgtgggcgccgactacggcttcttcggccgcgccggggccggggactacggggagatcttcggccgcttcgacttcggggacttcgcgctgccgtacgaggagctgttcgccgaggcggaggcggaggcggtgggggagattggggcggaggagatcgcctcgtcgactgggagctcctccagcagttttgtgacagccagcctcacggccatgttggctcaaagatggtacaaattggcaaggtattggcagacgagaggtcatcgatgataaaagagtctagccaaccagatgcgcagtcatttatgcttcctcaacatttcaaggagcatgagtcttctgtaatttccttccctccagacaatcagcagtttgtcatgtcatataacaagactacccagagatctgacgatctagttgagatgactactgatccttcaatggattatgtggttgattcttgcgaatttcctcacgtgccaacaactaatcatgttgcaacaatggatagtggtatagaagctaatggagaaaaaaggaagaagtccaccacaacctctgcaagtgtcagtctaaggagctctgagagtgatttcacagttgatcagaagcagcacattccagcatatccacctatttctgaaaaagtttctgcaaatgagaatcacaagaactccaatagtatttcaacatccagtaatggaacaccttctcctgattatgcctttctaagggtttctgatgtcaacgtgcaaacacaaacagtaaaaccaccacctcctctgaagcagacatctaaattgcttaagaggagagagattttagcaaaaggagatgtccatcttgaaaatcacagctgccctccagcctcttctgctcatgccccttcaaacaccagcacatctcaggctgaaagaagagacgatactgctttgtttaataatgaggccaatcccagttctgctgcagctgctatgaaggaagcaatggaatatgcagaagctaggttaagagctgcgaaagaactgatggagagaaaaggggacagttttaaacttcgtaagaaaccaagccatcatagaagcacaagatctacagaaataaaggttcctacagagtcagacacattcgatgagaacctctccgtgaagaagtcaacaaaggaggaaatgaactctgaggattcgttgctggacaagcaccagaaggctagtgcagttagaacagatcattgtgatgacagtggaaaaagggcattgtcgctggagaaacctcagcatatgcaaagctgcactgcacccaatcaaacttccagtaaactaggtaagttaggcaactggacatcaggtgatgaattttatgagctgactggagaagatcagaaacagaaaacagatgcagctgtaggggaggaagataagtgtgaggtaacaaatcctgtcaccaagctcagcaaggaacaaaaatgcgaagttactgcagcggactctgatttggaaaggtatgaaaagctgtgggaggttaatgatggcagggatgcaggagtgaaacatgtcaatccgagagaagataatacatctccaatggggaaagatagggtgtctatgattctggaagcttctacagaaaatatagaccatgaaaaaatttataactctcattttgagggtcctaaagttgtggaaacttctaatgaaagccatgatggtgaggatggggctgttgagattccttgtaagagtggaatcactatttcagaaccaaacttgatgaaggacatgcacggttcattcatggaggcttcttcacctggagagtatgtggccgattttggtaaaggcactacagaggaaagtccagtagcaggaatatcgctggagcctaaaaccactaaagaggaacttgaggcagcatgtgatgctgagatgcaatgcaccacaggggatagtgaaaaattacaagaatcttcagaagtcaccagcattgataactcactggcaagacaaattaaatcattgattctagaagatctcgagggatcttctgaaactcaagctttcccaggggaccccggtactgctgggtcagaagctgaaacttatgggaggaaccttggtacaactgggttggaaactgaaagttatgggagggaaaagttcagttttgttgaagaatcattcatgcataatgcaaacaggaatgtaactgaatcacccgtagaaactccaatccctgaacaagtagagaatgttgagattgaagatagagttggttcatgtgcacattctgaagaatcaaccgtggataaagattccgagtgtcctgaagagggaagtgatattacttcacaaaacaacaatctgccagatcatgaagattcaactatgctaaatgtatttgaggtggccagcaaattgattaaaagagacctagatcaagaaaagcaagatacactacagcctggtgaagtagaaactagaactgtcttggatagtaatgacaaagatacaaaagaaaacccttcagaaaatagtaacacgataggtagtgaagaagtcttgagtcacggtaaccaggaggaccagaaggtgcctgaaatggataaaaccaaaggacgaagtgatgcaaatgcacaagttaaattaagtggtgtaaacttttatgaagatggagatgttacaagtgctgctaataatgttacaactagattgactacaaattcaaaaggccaggcgtcttcctcttcagaaatgctaactggcagacagcacttgcctcaagatgctggacctgctatttctcagacatctaacggaactttccctagtcttgaaaagaccgaagaagtttgcaaagaagctgggagagaattaccaacagataaatctgctgcatttgaagatgagaatagcagggcatgcaaatcaaaggcagagctaaagcagcaacaatttcattctgagaagagtagcagtttacctaaatctgcagaaggtcatatcccatcttctgctgatatatcaagaaaagaaacacctggggttcagagactcaaagagcagggaagtctaagaacagaaagggaaagagagaaggacaaagaggcttctcggagactggaagaaacnaaagaaagggataaaaaatttgagaaggaaagggaaattgctgaagagagggaaagaaaaaaactagaagaacaggaaagggagagggaacgggaaaaggatagacttgctgttgaaagagctacaagagaagcacatgagagagcatttgctgaggctcgtgaaagggcagaaaaaatagcattggaaagggttactgcagcacggcaacgggcttctgctgaggcccgagaaaaagaagagagagcgagtactgaagcagctgctgagagggctgctaggataaaagcagaacgtgcagcggttgaacgagcaactgcagaagctcgagagagggcaattgaaaaggctaaggctgaaaaggctgccgcagaggcaagagaacggagagaacggtacagatcctctttcaaggagagttttaagtccagcaatctgaggataatcgacaggacacacagtttcagagagcggtttccagtaacttaatgagaaacccagattcatatagcaaagagggcttgaggttgaatcagctttaaggcataaagcaagattagagaggcatcaacgcacagctgagcgtgtggacaaaagcactagctgagaagaacatgcgtgacctgctggcgcaaagagagcaagcagagaaacatgaggttgtctgagtacctagatcctgagatcaagagatggtcaaacggaaaggaaggaaatctgcgagccttgttatccacattgcaatatattcttggagctgacagtggttggcagccagtgccacttacagagctaattacagctgctgctgtgaagaaagcctacaggaaggcaaccctttgtgtccatccagataaattacagcaaaggggtgctacaatcagacagaaatacatatgcgagaaggtttttgatcttcttaagaggatgcttggaacaagttcacttcggaggagcgctaggatggatgctgaaacagccgatttattttcgagacaggaaattcgtta

SEQ ID NO: 538 - DNA, 4069 bp, Oryza sativa
atgccgaaggtctacggcaccggcgtcttcgagttccgccacccgcgcgccgccgagtacccgctctccaccatcacgctcctcgacatccagcgcgaccgcctcaccgtcagggagatctacgcgaccgagctccgggtcggccgcaagaccgtcccgctccaccgcgtcatgatcctcgaggtcagccagtacctcgagaactacctctggccaaacttcgacccggccggcgcctccttcgagcacgtcatgtccatgatcctcatggtcaacgagaagttccgggagaatgtggcggcgtggacctgcttccatgaccggaaggatgctttcaagggatttttatggcgggttctcaagctaaaggaagaggccgagaaaacaaactacctgttgttcatgataaatgcgtttcagcagagtttggaggatgaactagttcgagaaaccatacttcagttagtaagcctaaagttgtggcatactctttcttttggacggcttcagcagatggagctttgccttaaccctgaattgattaagaagtggaccaaaatcaaaagaaaagaagctaaagaagcaaaaaaggcaggtcaaacctgtgatgcttcagaaatgctcgagaatagattccttaggaacttaatagaagaattcctggaggttgatgattattgtgtcttgtactgtgagagattcatggagtttttgattgatatgttgagccagcttcctactagacgagatttttaaggccccttgttgccgatgtagctgttgttgctaagtgtcacttaagtgcactgtatacccatgaaaaggggcgtctttttgcgcagttggttgatttgctgcagttttatgaaggctttgagattaatgatcattctggaacacagctcagtgatgatgatgtcttgcaagctcattattcccgtttccaagcctttcagctgctggccttcaaacaagtgcctaagttgagagatttttccttgtgtaatattggttcaatccataagcgtgcggacttagcaaagaagctgcttgtcttgacagatgtagaactgcaagatctggtttgtaataagctcaagttaatttcagaggaggacccatgcagtggaagacgtgattttcttattgaggtcctggttgccttttttgagaagcgtcagtcacagaaagatgcagtaaatgcacttcctctttatccaaatgaacagatcatgtgggatgaaagccttgttcctagcattaattattctggagagggctgccttgctctcccaaaactcaatctccagtttttaacacttcatgattatttattgaggaatttcaatcttttccgccttgaatcaacatatgaaattcgtgaagacatccaggaagctgttcctcatctgcatgcctatattaacaatgagggagacactgcctttcgtggttggtccaggatggctgttccaatcaaggaatttaggattactgaagtgaagcagccaaacattggagaagttaagccatctgctgtaactgctgatgtcactttcagcatctcaagctacaagccacagatcaaatctgaatgggatgctttgaaggaacatgatgttttatttttgttgtcgatccgtccatcttttgaaccccttagccctgaggaggctgcaaaatcaactgtgccagaaaggcttggattacaatgtgtacgtggatgtgaggttattgaaattcgtgatgaggaaggatctcttatgaatgattttacagggaggataaagagagaggaatggaaacctcccaagggtgagattcgtactgttaaaattgctttggatacagctcagtatcatattgatgttactgaggtagcagagaagggtgcagagaatgtgtatgggacatttaacattctaatgagaaggaaacccaaggagaataatttcaaagcgatattggaatctatacgtgatctaatgaatgaaacatgtgtagttcctgaatggttgcataacatattcttgggttatgggaacccttctgccgcacagtggataaatatgcctgatcttctggaaaatatagattttaaggacacttttcttgatgcggaccatgttgtacaaagctttccagattaccaggtcacatttatcaattcagatggaacagaaaacctgaatccgagccctccttttaagattaagttgtccaagaaaatgaggaaagaaaaaataatggttgagacttatattcctgctgatccagggccgtatcctcaagataaacctaaacagaactcagtgaggtttacacctactcagggtgctataatatctggtattcaacctgggttgacaatggttgttggtcctcctggtacgggaaaaacagatacagctgtgcagatattgaatgttttatatcacaactgtccttcccaaagaactctaattataactcattccaatcaagctttgaatgatttgtttgagaagataatgcaggtactagagatgtgcctgctaggtaccttcttcgtcttggtcagggtgaacaagagttggcaactgatctcgattttagccgtcaaggtcgtgtcaatgctatgctggttcggcgattagagctgctaggtgaagttgcaaaattggcaagttcccttcatcttcctgaagatgtgagctacacatgtgaaacggctgcatacttttggttattacatgtttatgctcgctgggaacaatttttagctgcctgtgcgcaaaaccaagacaagccctcatttgttaaagaccgcttccctttctcagagttcttctcagatactccacaacctaccttcactggtgagtcctttgagaaagatatgcatgcagccaaaggttgtttcaaacatcttttgacaatatttcaagagctggaagaatgtagggcttttgagctacttaagtcaacagcagagagggcaaattatctaatgaccaaacaagccaagattgttgccatgacttgtactcatgcggcattgaagaggagagactttcttcagttagggttcaaatacgataatttgctgatggaagaaagtgcacagatattagagatagagactttcataccgatgctgctgcaacggcaggaagatggctatgctcgtctgaaacgttgcattttaattggtgatcaccatcagttaccccctgtcgtgaagaacatggcttttcagaagtacagccacatggaccaaagtctctttacaagatttgttcgtcttggtgtcccttacattgagctcaatgctcaggggcgtgccagacctagcatcgccgaactatataactggagatacagagaacttggagatctaccttacgtccgtgaggaggctatcttccacaaagctaattctggcttctcttatgactatcagttggttgatgttcctgatttccgtggcagaggtgagtctgccccttctccttggttctaccagaatgaaggggaggctgagtttatagttagtgtctacatctacatgcgcctgattggataccctgccaataagatttcgatattgaccacttacaatggtcagaagcttcttattcgcgatgttattaacagaagatgcaagccatggaatatcgaaccacctagcaaggttaccacagtggacaagttccagggtcaacaaaatgatttcattttattatctcttgtccgcacccgttttgtggggcatcttcgtgatgtcagaagacttattgtggcaatgtcccgtgctcgtctgggcctgtatgtgttctgccgtcgttcactttttgaacagtgctacgaattgcagccaacattccagcttctcctccagaggcctgataagcttggcttgaatcttgaagagtgcacaccatttacagagcgacctttagaggaaactggaaatattcattatgttgctggtattgaagatattggtcatctagtgaatttcagattagaacatcttcgtcaggtacatacagcactgttccagtaccaagtctcttgcaaaacttaa

SEQ ID NO: 539 - DNA, 3723 bp, Oryza sativa
atggcgccgacggcggcggcggcggggcccagcgacgacgggctccggaagctggagtacctctcgctggtctccaaggtgtgctcggagctggagacccacattggcgtcggcgacaaggtgctcgccgagttcatcaccgagctcggccgcgactccgcctccgtcgccgacttcgacaccaagctcaaggccaacggcgccgacctcccggactacttcgtccgcaccctcctcaccatcatccacgccatcctcccgccgccctccgactcccgcaaccctagctccgcgtcgcagcccgccgcggggggctccaagttccccggcctctcccgccccgacgaccccgaccgcgcccgcaacctccgcctcgagctcgagcgggacgccgaagaggccgccgcgacggcagcccccgcccccgccagggacgaccgcggccgccgccgtgatgagcgaggacgggaccggggtcgagatgaccgcggccgcgacgacggtgggcgtgaccgcgactatgaacgcggcggccgtgaccatgaccgcagccatggccgggatcgtgaccatggccgtgacagagaccgagatcgagcctgtgatggggatcgacaacgtggccgtgactatggccgtgatagagaccaagacagagatcacgacagggatcgtgaaggtgaacggcggagggaccgagataaggataggggtagagacattgacagagatatggacagggaccataggcgaggcaggaggtatgatgatgaggaagaaccagaacagtttggtggaaggaaagaaggcgctcttgtgaattccagtggcgagccagagttgtaccaggtgtaccggggtagggtgacacgggtaatggacaccggttgctttgtcaggcttgaggatgttcgtggaggacgtgagggtcttgttcacatctcacaaatggcaaccaggcgagtggccaatgcgaaagagatggtgaagcgtgatcaggaggtgtatgttaaggtggtttccgtgaagggccagaaattgagtttatcaatgagggacgtagatcaggatacagggagagatctcctgccaatacaacgtggtggggatgatgcaccaagggcgaacccatctggtggtagtgctagtggtgttggtgtgggctctggcaagaggctgggtctctctgggattatgattgcagaggaggatgaggttgcacctccttcacgtcggccacttaagcggatgagctctccagagaggtgggaggcgaagcagctgattgcttcaggtgttctggatgtgagggattacccaatgtttgatgaggatggggatggtatgttgtaccaggaggaaggggcagaagaggagcaggagattgagcttaatgaagatgaacctgctttcttgcagggacagagtagattttcgattgacatgtcacctgttaagattttcaagaatccagagggctcattgagccgagcagctgctctccaaactgctctcataaaggagcggcgtgaggttcgggaacaggaacagagagcaatgttggattcaatccccaaggatctgaatcggccatgggaggaccctatgcctgatactggggaacggcaccttgcgcaggagctgaggggtgttggactttcagcttatgacatgcctgaatggaagaaagaagcctatggaaaggctctgacatttgggcaaaggtctaagctttcaatacaagaccagaggcaaagtcttccaatatacaagttgaagaaagagctgatacaagctgtgcatgataaccaagtcttggttgttattggagagactggttctggtaaaacaacacaggtgacacaatatttggccgaagcaggctacacgaccagaggtaagattggttgcactcaacctcgtcgtgtggctgcaatgtctgttgctaagagagtagcagaagaatttggttgtcgacttggagaggaagttggttatgccatccgctttgaggattgcactgggcctgacacggtaatcaaatacatgactgatggcatgcttttgcgtgagattcttgtcgatgagaacctttcccagtattctgtaattatgcttgatgaagcgcatgaaaggaccatacacacagatgttctctttggcttgctgaaacagcttattaagcgcagatctgacatgaggcttattgttacttctgctaccctggacgcagagaagttctcagggtattttttcaattgcaacatcttcacaattcctggaaggacgttcccggtagagatactctacaccaaacaaccagaaagtgactatttggatgcagcattgatcaccgtgcttcaaatacacttgactgagccagaaggtgatatcctcctttttttgactggtcaagaggagattgatcatgcttgtcaatgtctttatgagaggatgaaagggctagggaaggatgttcctgagctcataatattgcctgtttatagtgctcttccgagtgaaatgcagtcgaagatctttgacccagctcctccagggaagaggaaggttgttgtggccaccaatatcgctgaagcttctctaaccattgacggcatatattatgtcgtcgatcctggttttgccaaaattaatgtttataattcaaaacaaggactcgattcattggtcatcactccaatctctcaagcatcagcgaagcagagggcagggcgtgctgggcgtactggccctggcaaatgctatcgtctatacactgaaagtgcataccgcaatgaaatgtctcccacaacaatcccagaaattcaaaggattaacttggggtctacagttctcaacatgaaggcgatgggaatcaatgacctattatcctttgatttcatggaccctcctgcacctcaagcacttatatctgcaatggagcaattgtacagcctaggtgctcttgatgaagaagggctccttaccaaactggggaggaaaatggctgaatttccactggatccaccactttcgaagatgcttctagccagcgttgaccttggatgcagtgatgagatactaactattatagctatgatacaaactgggaacattttctataggccaagagaaaaacaggctcaggctgatcaaaagagggccaagtttttccagccagagggggatcatctaactctgcttgctgtatatgaggcgtggaaggcaaaaaacttttcagggccctggtgttttgagaactttgttcaatcaagatccttaaggagagctcaagatgtgaggaagcagcttctcactatcatggacagatataaattggatgttgtctcagctgggaggaacttcacaaaaataaggaaagcaatcactgccggcttctttttccacgctgccaggaaggatccccaggagggatacagaaccttggtagagaaccagccggtgtacatacacccgagcagcgcattgttccagcggcagccagactgggtcatctaccacgaacttgtaatgacgacgaaggagtacatgcgggaggttaccgtgatcgacccgaagtggcttactgagctagccccgagattctacaagtcagcagacccaaccaagatgagcaagaggaagaggcaggagaggattgaacccctgtacgacaggtaccatgagcccaactcctggcgtctcagcaagcgccgagcttga

SEQ ID NO: 540 - DNA, 3514 bp, Oryza sativa
  N_region (186)..(186): n = any nucleotide
  N_region (201)..(201): n = any nucleotide
  N_region (203)..(203): n = any nucleotide
  N_region (214)..(214): n = any nucleotide
atgccgctggactacaggtactcggcggcgggtggtaggaaggcggcgaacggcgtcggggcacgggcggcggtggcgccggaggaggaggaggaggagggggtggaggtgggggtggtggggtttgagggggacgcggactcgccgtacagctcacaggcggcgacgacggaggaggtggaggangagggggatgggganangggtggaggtnacgcggaggtggattcggcggctgctgctactccacggaggcagtctccggcgggagctgggagcccctcgcagcgcgacgcgcggtggggtgacacgagctcctacggtgctagaaagaagcacagggttttttgccagcttccaaatagtgattgggccttatgcactgtaattacaacctccggtgacgattccgtactaaagcttcctgaaggaaaaaaggtactgaggttgaaaacagagagccttgaagctgcaaatcctgaaattcttgacggggtggatgatcttatgcagctaagttatctaagtgagccatccgttctgtacaatttgcagtacagatactctcaagacttgatatatactaaagcaggtccagttttggtggcggtcaatccttttaagaaagttcctctatatggtaatgagtacattgatgcatatagaaataaaacaaaggatagcccacacgtttatgcaatagcagattcagccctccgtgaaatgaaaagaggatgaagttaaccagtctatcatcataagatatatagtggtgagagtggagcaggaaagacagaaactgcaaagattgctatgcagtatttggcttctcttggaggtgggggtggcatagaatatgagatcctacaaaccaacccaatactcgaggcttttggcaacgcaaagacactaagaaatgacaactcaagtcgctttgtaaggaaagctcattgaaattcattttagtacaactggaaggatttgtggtgccatgattcaaacattcaagggttgtacaatgtgcagttggcgagcgctcctaccatattttttatcaactatgtgccggtgctcctgcgtccctcagagaagttgaatatgaagaaagcggatgaatacaaatatttgaagcagagttgctgctattcaattgccggtgtggatgatgctcaaatgttccgtactgtaacgaagctatgaacatcgttcatatcagcaaagaggaccaagataatgttttcacgatggtttctgcaattctatggctaggagatgtctctttcacggtcattgacaacgaaaaccatgttgagattgttgtagatgaagacggtcgcaagacttcttggctgcagtattgaagatctcaatttagctttgtcgaagaggcacatgaaagttaataatgaaaatattgtacagaaactcaccctttcacagcaggcaatcgacacaagagatgcgttggccaagtcactctatgccagtttgtttgagtggcttgttgaacaaattaacaagtctctttcagttggcaagcgtcgaactgggagatcaatcagcattcttgatatctatggctttgaatcattcgatgtaatgaacagttttgaacagttctgtattaactatgctaatgaaaggctccaacaacatttcaatcgccatttgtttaagcttgaacaagagaggaatacgttgaagatggcattgactgggcaaaggttgagtttgaggacaatcagaactgtttgaatctctttgagaaaaagccactggggttgttgtctctgctagatgaagaatctaccttccccaatgccacagatcttacttttgcgaacaagcttaagcaacatctgaacaataattcttgcttccgaggagaaagaggcaaggcttttgcagtccgtcactatgcaggagagaggtggcttatgacacgtcaggttttctagagaagaatagagatttattgcacatggactcaattcagttccttgccaaatgcaaatcctcactaccacaaatgtttgcatccaaaatgctttctcaatctgataatccgttacctgttccatatagaaatagtgctgctgactcacagaagttaagtgttgcgatgaagtttaagaagggacaattgttccaacttatgcaaagactcgaaagtacaacaccacactttatacgttgtattaagccaaacaatttgcaactccctgcaatttatgaacaaggacttgtgcttcaacaactcaaatgttgtggggttcttgaggttgtccgaatttcaagatctggatatccaacaagaatgactcatcagaaatttgctcgacgaggtatggctttcttcttcttgaggatgtcgcatctcaagacccacttagtgtttcggttgcaattcttcaccagtttaacattttgcctgagatgtatcaagttgggtacacaaaattgttctttcgaactggccagagattggcaaacttgaagacactcggaaccgtactctgcatggtattttaagggttcaaagctgtttcagagggcatcaagcccgtcgccatgcaagggaacgaataagaggagttttggctcttcaatcatattcgaggtgagaatgcaagaaaaatgtattcgtctctggcaaggaaacacagggcagccattattttacagagaaatctaaaatgctggcttgcaagaagatatttcgttaacatacggaaggcttcagtagtaatacaatctgggcattcgtggttgtcttgttcgaagatgtgctggcaatgttgatctattgaatgtgctaagagaattcgaatcaaagaagcaggaggcagagggtgaccaaattttgattaaggcatcattcctggctgagctacaaaggcgaatattaaaggccgaggcgacagtccgagaaaaggatgaagagaacgagatgcttcagcagcgacttcagcaatatgaaaaccgatggtcagaatacgagcagaaaatgaaagcgatggaggaaatgtggcagaagcaaatgcggtcattacaatcaagcctatccgtagcaaagaagagccttgctcttgatgagacgcctaggatgtccgactcatcggtcgaccagagctgggagagcaatggggttcacattggcagcgcgtcgcagctggttccacgcaccgttggacgggagatgaatgccagcatcagcgtcatcagccgcttggccgaagagttcgagcagcgcagccaggtcttcgctgatgatgccaagttcttggttgaggtcaagtccggacaggccgatgccagcctgaaccctgacatggagctccgcaggctgaagcagaacttcgactcatggaagaaggacttcggctcgcgcataagggagacgaaggtgatcctcaacaagctggggagcggcaacgaatcgtcgcccaactcggtgaagcgaaaatggtgggggaggctgaacacatccaagttttcatgagctaccatgtaa

SEQ ID NO: 541 - DNA, 3463 bp, Oryza sativa
  N_region (69)..(69): n = any nucleotide
  N_region (79)..(79): n = any nucleotide
  N_region (107)..(107): n = any nucleotide
  N_region (173)..(173): n = any nucleotide
  N_region (185)..(185): n = any nucleotide
  N_region (187)..(187): n = any nucleotide
  N_region (227)..(227): n = any nucleotide
  N_region (235)..(235): n = any nucleotide
atgagctcaggcggacgcggcggcaagcggcgaggggcgccgcccccggggccatccggggcggcggcnaagcgggccnaccccggtggcaccccgcagccgcttcngcgccgcgacggcggcggcgcccgtgcgaggaggaggacatgatggacgaggacgtcttcctcgangagaccatcctngncgaggacgagaggcgttgctgctgctcgacgggcacgagncctagttnacgcctttcccgctggaggcgccccgggctccccgccgacctagcgtccggctgctcgcgcaatgttggcttttcagcagctggagatagattatgttattggtgagagccacaaagtactgctccccaactcatctggtcctgcagctatactcaggatatttggcgtaactagagaagaggtcacagtgtatgctgccaagtgcatggatttgagccatatttctacatcagttgtccaatggggatgggccctgatgatatttcacgcttccaccaaacactagagttacaggggaggatgaaggattcaaataggaacagcaacgtgccaaggtttgtgaagagaatcgaacttgtgcagaagcagacaatcatgcattaccaaccacagcaatctcagcctttcctcaagatagtggttgctttgccaacaatggttgctagttgtcgcgggcatcctggaaaggggcataacaattgaaggccttggttcgaagagttttctgacatatgaaagcaacattctttttgcacttcgcttcatgattgactgcaatattgttggtggtaattggattgaagttcctgccggaaagtatatgaaggcagctcgtatcatgtcctattgtcagctagagttggattgcctgtatccttttatactaaatattcggatttggtaagccatgctgctgaaggagaacattctaagatggctccatttcgcatattaagttttgatattgaatgtgccggtcgcaaaggtcacttcccagaaccaactcatgatcccgttattcagagatagctaacttggtcacccttcaaggagaaggacaaccttttgtacgcaatgttatgacgcttaaatcatgttctcccattgttggagttgatgttatgtcatttgacacagagagggatgttctacttgcttggaggggatttcatacgtgaaagtggaccctgatattattattggatacaatatctgcaaatttgacttaccctatcttattgaggtacaggattttagagagctgaagttcttaagatagtagagtttccaatacttggacgaatcagaaatagtcgtgttcgtgtccgtgacacaactttctcttcaagtccaggcaatatggtatgcgtgaaagtaaagatgtagcagtggaaggaagagtacaatttgatcttctgcagtgcaggctatgcaacgggattacaagcttagttcttattcattaaactctgtatctgcacatttcctcggggagcaacagaaagaggatgttcatcactcaattatatctgatcttcaaaatgggaattcagagacacgaagacggcttgcggtttattgtttgaagaggatgcctatcttccacaacgactgctagataagttgatgtatatctacaactatgtggaaatggcaagagtcactggagttcccatttcatttcttctttcaaggggacagagcattaagaggtcctctcacagctactcaggaaagcaaaacagaaaaaccttgttataccaaatataaagggtcaagcgtctggacaggatacctttgaaggtgcaactgttttggaggcaagggctggattttatgagaaacccattgcgactttggactttgcttcgttgtatccatccatcatgatggcatataacctatgctactgtactttgtactgtttgaaggtcccccctgaggatgcccgcaaactcaacctgcctccagaaagtgtcaacaaaaccccatctggtgaaacatttgtgaaaccagatgtgcaaaagagggtatacttcctgaaatccttgaagaattgttggctgctcggaaaagggcgaaagcagatttgaagaggaagcaaaggatccatttgaaagggccgttcttgatggtcgtcagcttgccctaaaaataagcgcaaactctgtctatggttttactggagcgactgttggtcaattaccttgtttagaaatttcttcaagtgtgaccagctatgggtcgacagatgattgaacatacaaaaaagcttgttgaagataaattcacgacacttggaggctatgagcacaatgcagagaggtcatctatggagatactgattctgtaatggtacagttcggtgtttctactgttgaggacgcaatgaagctaggaagagaagctgcagactacattagtggaacatttattaagagcccatcaagcttgagtttgagaagatctatttcccttatctactgattagcaagaagagatatgctggtttgtactggacaaatcctgagaaatttgacaaaatggacacgaaagaggtattgaaacagtgagaagggacaactgtttattagtaaagaacctggttactgagtgccttcataaaatactagtggacagagatgttcctggtgcagttcaatatgtcaagaacaccatttctgatctactaatgaaccgtgtagacttatctcttctagttataacaaagagggtttgactaaaacaggagaggattatgctgtcaaagctgcccatgtggagcttgctgagagaatgcgaaagagagggacgctgctactgctcctactgttggtgaccgggttccttatgttataatcaaagcagcaaaaggggcaaagaggcatatgagaggtcagaagatcctatttatgttttggataataacataccaatagatccccaatactaccttgagaaccaaatcagcaaaccacttttgaggatctttgagccgattctgaagaatgccagtagagagctgcttcatggaagtcacaccagggctgtttcaatctcaactccttcaaatagtggaataatgaaatttgcaaagaaacaattgacatgcctcggatgcaaagcagttataagagtggttccaatcaaacgctttgctttcattgcaagggaagagaagcagagttatactgcaaaactgtaggaaacggtttctgagctggagatgctctttgggaggctctggacgcagtgccaggagtgccaaggctcccttcatcaggacgttctctgcacaagccgggattgtcctattttctaccgccgaagaaaggcgcagaaggatatggctgaagctagagtacagcttcaacgttgggacttctgagtcctctcatactgacggagtactactttccccaaatattgcgaaaccattactgtga

SEQ ID NO: 542 - DNA, 3258 bp, Oryza sativa
atgggcgacctcaccacctcgtcgccggcgagcgaggtgccgttccgcgtcagcttctccggccatggcggccacctccgcctcgaccccacgcccaatccgcccagccctatacccgagttcgtcctgtgggatttggattggttcgagttggctaggccgccgctggagccctccgccccgcgcaccatgctcgtgcccgcctgggagccgcccttccgccgctgggatcctgagtccgtgcagatggatatgagcgacgtgtttgattcgggcaccggtgggataacgccgcggatgcctggccctgcgaaggatttcgtgagggggagcgtgaacagccgcccgttccgcccagggggcctgcatgatgatgcggctgcggctgctgctttggagaaggcatttccagagggtgcacgcaatggggattgggtgcgcgagcttatgagcggagggccagctcaggttaatcctccaggattccgcaagggattggacctgggcaatttgaagttctataaacttgttccagatatggcaattgagtatccatttgaactagacaaattccagaaggagcttcagaagggtgaatcagtctttgtggcagctcatacatcagcaggaaagacggttgttgcagagtatgcattcgctttagcaacaaaacattgcacccgggctgtctatactgctcccattaaaactatcagcaatcaaaaataccgagatttctgtgggaagtttgacgtgggacttctcacaggagatgtcagtatcagaccagaggcaacttgcttaattatgaccacagaaatattacgttcaatgctctacagaggtgctgacatcatacgtgatattgaatgggtaatttttgatgaagtgcattatgtaaatgatgcagagagaggtgtagtttgggaggaagttattataatgctcccgaagcacatcaacattgtccttctttcggcaacgggttccaaacacagttgaatttgctgactggattggtcgaacaaagcagaagaaaattcatgtcacatcaccaacaaaaggcctgttcccctggagcactgtttgttctactccggagaagtgttcaaaatatgtgagaaggatgcatttcttactcaaggatatagagaagccaaggagcggagatcagagtcttcattctggatgcccctcataaataaccttctgaagaaatccctcgtgcctgtatgtggtaattttttgcttctcaaaaaatcgatgtgatagatcagcagagagcatgtttggtgcagatctcaccagtaactcagagaaaagtgaaatccgcctcttctgtgacaaggccttttcacgccttaaaggatctgataggaaccttccacagcaaagccttctacgtagagggattggagtacaccatgctggacttcttcctatcgtcaaagaagttgttgaaatgctgttttgtcgtggcgtcatcaaggtgttattttccactgagacatttgcgatgggcgttaatgctccagcaaggacggtcgtgtttgattccttaagaaagtttgatggaaaagaacatcggaagttacttccaggggagtatattcaaatggccgggcgagctggtaggagagggcttgataacattggtacagtgatcgttatgtgtcgtgatgaaattcccgaagaaagtgatttgaagaatttgattgttggaaaaccaactcgactagaatctcaatttcggttaacatacactatgatactgcatcttctacgtgtggaggaactcaaggtggaggacatgctaaagagaagttttgcagaattccatgcacaaaagaatttgcctgagaaggaaaagttgcttctgcagatgcttcgtcaacccacgaagacaattgagtgagacaggtgcataaaaggagagccggctattgaagaatactacgagatggtcttagaagctgaggcacacagggagtctattacggaagcaattatgcagttgcctgcttctcaacagtcccttacacctggccgtctggttgttgttaaatcccaatcagatcacttgctcggtgtaattgtgaaaactccatctgctgcactaaagcaatatgttgttcttgtactgaccgcaaggatactttgttatcccgaaaggaaaacgtagcatggaagatgaatatttctcttctgtcagtacacggaaaggttcaggtgtcatcaatatcaagctaccatacaagggagatgcatctggaatgggttttgaagttagagcaatagagaataaagagattatgaatatatgcgccagcaaaataaagattgatcaagtcagactccttgaggatccaagcaaaacagtttactctaaaactgtccagatgcttataaaagagcaaccagacggaaacaagtatcctgctgctttagatgcaataaaaggatctaaaaatgaaagacatgcttctcgttgagaactactatgcttaccagagattactgcaaaaaatgtctgaaaataagtgccatggttgtataaaattaaaggagcatattgcattgatgaaggagcaaaaggtgtacaaggatcagctgaatgatttgaaatatgaaatgtcagatgaggcacttcaacagatgccggagtttcaaggcagaatcgatgtactaaaagaaatccattacattgattctgatctagtggtgcaacttaagggccgagtggcctgcgaaatgaattccggcgaggagttgatatcaaccgaatgtctgtttgagaatcagttggatgacctagaacctgaagaagccgtagctattatgtctgcattggtcttccaacaaaggaatacatcagaaccatctcttaccccgaaactagcagatgccagaaagagaggatttatgatacagcaatcagattaggaaagctccagagagagttcaaggtgcctgtagatcccgaggaatatgcccgtgataatctcaagttcggtcttgttgaagtcgtctacgaatgggcaaagggggaccccatttgcagacatctgtgagctgacagatgtatctgaaggtctcattgtaagaacaatcgtgcggttggatgaaacttgcagggagttcaggaatgcagcttccataatggggaactccgcgttgcataagaaaatggagactgcgtccaatgccattaagcgtgacatcgtctttgcagcaagcttgtatgtcacagggatatga

SEQ ID NO: 543 - DNA, 3078 bp, Oryza sativa
atgcacatcaaggagatatgcctggaggggttcaagtcgtacgccgggcggacggtggtgtcggggttcgacccgctgttcaacgccatcaccgggctcaacggctccggcaagtccaacatcctcgactccatctgcttcgtgctcggcatcaccgacctccgccaggtgcgcgccgcctcgctccaggagctcgtctacaagcagggccaggccggcgtcaccaaggccaccgtctccatcgtcttcgacaactccgaccgctcccgctcgccgctcggctatgaggattcacccgagattaccgtcacgcgccagcagattgtagttggtgggcgaaacaagtatcttatcaatggccatcttgcacaaccttcccgagtgcagactcttttccattctgtgcagctaaatgtgaacaatccccattttctaattatgcaaggacgcataacaaaagtgctgaacatgaagcctccagaaattctctccatgttggaagaggcagcaggtacaaggatgtatgaaatgaagaaggaagctgctctgaaaacactcgagaagaagcagaataaagtggatgagattaataaactccttgatgaagaaatccttcctgcattagagaagcttaggaaagagcggtgtcagtacatgaaatgggccaatggcaatgctgacttagatcggctcaaaagattctgcatcgcttatgagtttgttcaagctgagcgagtgagagatggtgcactcaatgatgtcaaacaaatcagggcaaagattgttgagctggatgaaagcacagagaaggaagctaaactaggtggtgagatgaaaactttgtcagagaaagtggataagctctcacatgcacttatcaaggaaacttctgtgatgaataatcaagaggaaacaataaagtcagaggaaaagggtgctgaaaagcagggtgtactagcaggaaaaagcaatgcaaatgaaaagaaatgcctagaagatcaactaagagatgcaaaagctgctgtcggagaggcagaatctggactaaagcagctgacgacaaaaataagccattctgagaaggagctaaaagataagaaagcccagttggtatctaagcgtgatgaagctactgcggctgagaatgagctgaaagctagggaaaaggacttggaaactgtcaaggcatccatgcaatctgtaaattatgaagaaggacagatggaagctttgcaaaaggatcgatctattgagttagacgccgtccagaaactgaaggacaaaattcgtgctctctctggtgaactagcaaatgttcacttcaattatcgagaccctgttaagaattttgacagatcaaaagtgaaaggagtagttgcacggcttatcaaaataaaggatagctcaactgcaacagcgctggagctgcaggttgctgctggtggaaggctatacaatgtggttgttgatactgaaaccactggaaagcaactcctacaaaatggagatctcaaaagaagggtaaccatcataccattgaataagatccagacaggtaccatacctgagagagttcggcaggcagctcgtagactgttgcagaatgctatgacttatgtctttggttcaacatttgtgtgtcgaaatatggaatccgcgaaagaggtaatactgcattcaggaaatttttttgcttcagtttttactgagggctgtcaattgaagttgcatttaacagagaagttggcagtacaagtgtgacccttgaaggtgacatttttcagcccagtggccttttgactggaggtagtcgcagggtggtggggacttgctaaggcaactacatgaattagctaaagctgaggctgatcttgccaatcatgagaaaagactttctgttattgaacaaaagcttttgcctctgcagaagaagttcacagagttgaaatcacagtttgaactcaaatcatatgacctgtcattatttcagaaccgtgttgagcaaaatgaacatcacaagcatgaaagtgagagggagaggcttattatggagaaagatgctgttgccaatgagcttgccatgcttgaagagcaactgacagatcaagctgaatctgagctcaacattgggcgttctaaactgaaggaatgtgactcacagataaatagcatggccaaggagcagcaaaaactgcagcagcaactaagtgattcaaatgttgaaaggaagaaaatggaaaacgaggttaagaggatggagattgagcagaaggattgctcttcaaaggttgataagttagtagagaagtacagttggattgcaactgaaaaacagttgtttggaaaaagtggcactgattatgactttgtatcatgtgaacctcataaagcacgagaagaacttgaaaatctccaagctcaacaatccagcagtcttgagaagagggtcaataagaaagttatggcaatgtttgagaaggcagaggatgagtataatgatttgatgtcaaagaaaaacatcattgaggacaagtcaaaaatcaagacagtgatagaagagttggatgagaagaagaaagagaccttgaaagtcacatggcttaaagtaaacaagattttggatctatattcagtacacttttacctggcacaatggccaaacttgatcctcctgaaggtggtacttttttggatggtcttgaagttcgggtggcatttggaacagtttggaaacaatctttatctgaacttagtggagggcaacggtccctcctcgctcttagtcttatcctggcgctacttcttttcaaacctgcaccactttatatattagatgaggttgatgctgccctagatctgagccatacacaaaacattggtagaatgatcaaggcgcattttccgcactcccagcattttcagttcatagttgtctcactaaaagagggcatgttcaacaacgcaaatgtgatattccgaacgaaatttgttgatggggtgtccactgtgacacgaacggtcccttcaaagcaaagatgattggattcattcatcacttcgtctgaaggtattctctga

SEQ ID NO: 544 - DNA, 2756 bp, Oryza sativa
  N_region (264)..(264): n = any nucleotide
atgcgggctctggtggtgctggttggcttggcctgcctcgccttcgtggcggaggccaagggcggcggcgcggcctcggcggcggcgctggacgacgacgtgctggggctgatcgtgttcaaggccgacgtggtggacccggaggggcggctcgcgacgtggagcgaggacgacgagcggccgtgcgcttgggccggtgtcacctgcgacccgctctccctcgccggcttcggcctctccggcaagctcggccgcggcctcctncgcctcgagtcgctccagtccctctcgctctccggcaacaacttctccggcgacctccccgccgacctcgcccgcctcccggacctccagtcgctggacctcagcgccaacgctttctcgggcgccatcccggacggcttcttcggccactgccgcaacctccgcgacgtctccctggccaacaacgccttctccggcgacgtcccgcgcgacgtcggcgcgtgcgccacgctcgcgtcgctgaacctgtcctccaaccgcctcgccggcgcgctgccgagcgatatctggtcactgaacgccctgcgcacgctggacctctccggcaacgccatcaccggcgacttgccggtcggcgttagcaggatgttcaacctgcggtcgctgaacctgcggagcaaccgcctcgcaggcagcctccccgacgacattggggattgcccgctgctgaggtcagtggacctcggctccaacaacatctctggcaacctgccggagtcgctgcggaggctctccacttgcacataccttgacctgagctcaaacgcgctcaccggcaatgttccaacttgggttggagaaatggcaagcttggagacgcttgatttgtccgggaacaagttttccggggagatcccggggtcgattggcgggttgatgtcattgaaggagctgaggctgtcggggaatgggttcaccggtggcttgccggagtcaattggtggatgcaagagcctagtgcatgttgatgatttgtcgagcaatgcgttttcaggaatgatcccatctgaaatctcccaggtgatcaccttgcagtcactgaacatgtcctggaactcgctgtctgggagtattccgccgagcattgtgcagatgaagtcacttgaggtgcttgatttgactgcgaacaggctcaatggaagcattccagctactgttggaggagagtcattgagagagttgaggctggcgaagaactcccttactggagaaatcccagcacagattggcaatctctctgcccttgcatcactgatctctcacacaacaacctgacaggcgcaattccggcaacaatagccaacatcaccaacctgcagactgttgatctttctcggaacaagctcactggtggtctaccaaagcagctctctgacctgcctcaccttgtacgcttcaatatttcacataatcagctctctggggatctccctcctgggagcttttttgacactatccccctctcatcagtgtctgacaatcctggcctttgtggtgcaaagctaaattcttcttgtcctggtgtgttaccaaagccaattgtgctgaacccagactcttcttcggatccactatcacaacccgagcctacaccaaatggcctacgtcacaagaaaactatactaagcatctcagcccttgtcgcaattggtgctgctgttctcattactgttggtgtcataaccattacagttctcaaccttcgagtgcgcactccaggctctcattctgctgctgagctagaactctctgatggatatctcagccagtcccccacaactgatgtgaattcaggcaagcttgtcatgtttggaggcggtaatccagaattcagtgctagtacccacgctctcctgaacaaggactgtgagcttggtcgtggtgggtttggcactgtctataagactactctgcgagatggccaacctgttgccatcaagaaactgactgtgtctagcttggttaaatctcaagatgagtttgagagagaagtgaagatgctaggcaagctacgccaccgcaaccttgttgcgctcaagggatattattggacaccatcacttcagcttcttatatatgagtttgtttctgggggtaacttacataaacaactgcatgaatcatccactgcaaattgtctctcatggaaagagaggtttgatatagttcttggcattgcaagaagcctggcccatctccaccgccatgacattatccactacaatctgaagtcaagcaacattctgcttgatggatcaggcgatgccaaggtgggggactacggattggcaaagcttctgccgatgttggatcggtatgttctaagcagtaaggtccagagtgcacttggttacatggcaccagagtttgcgtgcaggactgtgaagatcactgaaaagtgtgacgtgtatggatttggagttcttgcccttgagatattgacagggaggacaccggtgcagtacatggaagatgatgttattgtgctttgcgatgtggtaagggctgctttggatgaagggaaggtggaagagtgtgttgatgagaggctctgcggaaaatttccgctagaggaggctgttccaatcatgaaacttggtctagtgtgcacttctcaggttccttccaataggccagacatgagtgaggtggtgaacatactggagttgatcagatgcccccaggatagccctgaaactgaattaggttaa

SEQ ID NO: 545 - DNA, 2687 bp, Oryza sativa
atggggatcttcgagccgttccgcgccatcgggtacatcacggccggcggcgtgcccttctccgtgcagcgcctcggcaccgagaccttcgtcgccgtcagcgtcggcaaggccttccacgtctacaaccctcaattgcccaagaagatccgtgctcttgcatcgtacaaggattatacatttgctgcgtatggaagtgatatcgctgttttcaaacgaactgatcagcaggtggttacttggagcaaacatgaagaaaagatcaatatattatacccatttggagaatacattctaagtgcagatattaaggggaatgtatttatatggtccttcagaggatcagagccaaatagtgagcctgttgggaacatatcattgggagacaagtttacaccaacttgcattatgcatcctgatacttatctaaataagggaagcgaagagggtcccttgcagctttggaatatcagcactaagaagaaactttatgagtttaagggttggaactcatcagtatgttgttgtgtttcttcacctgcccttgatgttgttgcagtcggatgttctgatggaacaattcatgttcataatatacgatatgatgaagagttgatgtctttcaatcatcaaattcgtggtgctgtgactgcattgtcatttcgaacaggatgggcaacctcttctggcctctggaggatcgtcaggtgttattagtatatggaatcttgagaaaaggcgccttcattctgttatccgggaggcccatgatgcttctatagtttcacttcattttttcgcgaatgagcctattttgatgagctcggcttctgataattcaataaagatgtggatatttgatactaatgatggagatgctcgtttgttacgatttcgaagtggccatagtgctccaccacggtgcattagagattctacggcaatggaaaatgcatcttatctgctggtcaagatcgtgcctttcgccttttttcagttgtccagcaggatcaacaaagcagagaactttctcaaagacatgtgtcaaaaagggcaaaaaagcttggattaaaggaggaagagatcaagctgaaaccagttattgcatttgattgtgctgagatacgctcacgtgattggtgtaacgttgttacctgccatacggatactccacaagcgtatgtatggcgtctacagaactttgtcattggggagcatattctgacaccgtcatcaggcagcaagtcaccaattaaggcttgtgcaataagtgcatgtggaaattttactttcttgggcactgaaggtggctggatcgaaaaatttaacctgcaatcggggattagtcgtggcagttatattgatacatcgttggcaattaagcgtgcacatgacggagaagttgttggattagcgtgtgatgctacaaatggctctcttattagtgctggatacggtggtgatattaaggttccatgctctcttgctttttaattctattgtaaatcctgtggcatgctaattgcaggtttgggattttaaaagttgcaagctaaaatccagactggatattgggtcttcttgctactgtagcagatgatatggtgcttatattgtttgatacagtagcaatgaaaatggtccgtagattcgaaggccatacggaccgtgttactgatttgtgtttcagtgaggatggaaaatggctcatctcatcgagtatggatgggactcttagaatatgggatatcagtttagcaaggcagattgatgcaatgcatgtcgatgtatctataacatctctctctatgtctcctaatatggatgtgttggcaaccacccatgttgatcaaaatggtgtctatctttggttaatcaagctttgttctcaccatcaacaaatgttgataattattcaagtggtaaacatgtcagaaataccctctctttgcttcccaagagtcaatggcaaagtctggcgaatcttgacattataaagcggaataaaccaattgagccaccaaagaaacctgagaaggcgccttttttcttgcccacagttccatccctttcgggggagatattatttgagcctgcggcgaacagtaaagaaacagacagcagtactgaggacacaagtcacaaaaaaatggctgacctctcctctcactttagtcggctgttacaatcctgtggagatacaaagaatttttactgactacctaaaaggcttatcaccatcatctttagatatggaactacgagtgctacagttaatcgatgatgagccacaaaatttggagcagagacctgaacttcaatccatttcattgctgttggactacttcatacatgagctttcctgcaggaataactttgagtttgttcaggctgttctcaaattgtttttgaagatacatggtgaaacgatacggcgtcactcaatgcttcaggacaaagtgaagaagcttctagatgtccagagcttagtttggcagaagatagacaaagtgtttcagagtgcacgatgcatggttacattcctcagcaactcacagttttagtagcaggtgatttctttttcatttgatatgccaaatggtttcgtctctttcaccgatactgcttgttttgatctttgcttttgccaaaagatttactattttgtattaattagttggtgctaa

SEQ ID NO: 546 - DNA, 2676 bp, Oryza sativa
atgaggcagacgcgctcgctggcggcggcggcggccgttctggtggtgggtgtggtgctgcattgggtgggggtggtggacgcggcgacggcggcggagagggggatactgctggagttcaaggccgccgtgaccgacccgaacggcgcgctcgcgtcgtggacggcgggaggggacccctgcgtggacttcgccggggtgacgtgcgacccgtcgtcccgcgccgtgcagcgcctgcgcgtccacggcgcgggcatcgccgggaagctcaccccgtcgctggcgcggctggcgtcgctcgagtccgtctcgctcttcggcaacggcctctccggcggcatcccctccagcttcagcgcgctcggccccacgctccacaagctcaacctcagccgcaacgcgctctccggcgagatcccgccgttcctcggcgcgttcccgtggctccgcctgctcgacctctcctacaatgcgttctccggcgagatccccgcctcgctgttcgacccatgcctccgcctccggtacgtctccctcgcgcacaacgccctcacggggccagtcccgaccgccattaccaactgctcgcgcctcgccgggtttgacttctcctacaaccgcctctccggcgagctcccggatcagctctgcgcgccgccggaaattagctacatctccgtccgaagcaactcgctctccggcgccattgccggaaagctcaacgcttgccggagcattgacctgctcgacgtcgggagcaaccatttcgccggaccggcacctttcggccttcttggcctggtaaacatcacctacttcaacgtctcgtccaacgccttcgatggtgaaatccccaacattgcaacgtgcggcaccaagttctcctacttcgacgcctcagggaaccggctcactgggccggtgccggagagtgtggccaattgccgcagcctgagggttctggatttggggacgaatgctcttgctggagacataccaccaagcattgggaaattgaggtcgctttcagtgctcaggctcgcaggaaatgcaggcattgccggttcaatccctgccgagctcggaggaattgagatgcttgtcacactagatcttgctggtcttgctctcatcggagacatcccggtgtccctgagccaatgccagttcttgcttgagctgaatttgtctggcaaccaattgcaaggagtgatcccggacacgcttaacaacttgacttacctcaagttgctcgatcttcatcggaaccatcttgtaggggggattccagtgacacttgcacagctcacaaaccttgatcttctagacctctcagagaaccaactgactggaccaatcccctcagagcttgggaacctgtctaacctgacccatttcaatgtgtcctacaatggactctcgggcatgatccctgccttgccagttctacagagtttcggtagctccgccttcatgggtaacccattactatgtggacctccactgaacaatctgtgtggggctagccggagggcgaaacaattggctgtgtctgtcataattgtcatagtcgcagcagcgcttatacttattggagtttgcattgtttgtgctatgaacataaaggcttacatgaggaggagtaaagaggagcaagaggggaaggaggaggatgaggtgctggagtccgagagcacaccgatgcttgcatctcctggcagacaaggctcaaatgccattattggaaagttggtgcttttcagcaagagcttgccttcaaggtatgaagattgggaggcaggaactaaggcactgcttgacaaagactgccttgttggtggtgggtcagttggtacagtttacaaggccacctttgagaatggtttatccattgctgtgaagaagttggaaacactgggaagggtgagaagtcaggatgagtttgagcaggagatgggccagcttggtaaccttagccaccccaatctggttgcttttcagggttactactggtcatcatcaacgcaattgattctgtcagagttcatggttaacgggagcttgtacgaccaccttcacgggagtcctcatacattttccggaagcagcagcagagttggtctctcctgggagcagaggttcaaggttgcactcggtacagcacgggcacttgcataccttcaccatgactgccgaccacaagtcctgcatctcaacatcaagtcctccaacataatgttagataaagactttgaggctaaattatctgattatggatttggaaagcttttgcctattctaggtagctatgaattgagtagattgcatgctgccattgggtacattgccccggagttagcatctccaagcttgagatatagtgataagagtgatgtatttagctttggtgtggtgttgcttgagattgtgacagggaggaaaccagtggagagccctggggtggcgacagcagtggttctgcgtgattatgttagggcgatattggaggatgggactgtgtcagactgctttgatcggagcatgaagggatttgttgaggctgaattagtccaagtgctcaaattaggtctggtatgcacttcgaacacaccatctgcccgaccaaacatggcagaggtggtacagtacctggagtctgttagaactaattcatga

SEQ ID NO: 547 - DNA, 2658 bp, Oryza sativa
  N_region (33)..(33): n = any nucleotide
atggcgacgcgcggggaggcggcggcggcggcngcggcggaccgggacatggagctcttccggagcgggtccgcgccgccgacggtggagggcgcgatggccagcgccgccgcggccgccggcgacgtgttcctggacgatgagctccgggccgacccggtgtaccagagctactactactccaatgcgcacctcaacccgcgcctcccgccgccgctgctctccaaggaggactggcgctcggcgcagcaccgcctccgctcctccgccctcggcgggatcggcgacggcaggaggcagccggccgcggcggcgcagggggatgggctcgtggggttgcccgggatcgacctcgatcggcaggggagcttctccagtatcttccagtttcatcttatccaatccaaggagagctcgtatcagctggacatgggtaagcagggcgccgaccgcaacattagtgactttctggattcttctcggccacagtatgctctgcatcgtgagactagtagagctatgggtggtctgcagagtgacagcaatatacaaagcttggctgaagttcagaacaatgattcatcagcacatacatatgcctctcttttaggatcatctctttctagaagcgcatctccagatcctgagcttgttaggagggtccccagtccttgcctccctccaattggtgtgaaagtcagtgctgatgataagaagaacaatggtggttcatcttccttccgtcgaagttcgtctgctattggtgaatctgataatctgatagctgctttatctgggatgaatttatcatcatctggagcagctagtggacagcaaactgtgacccagtctgagctctaccaggatgttgataatgtccgtaagtttctatttgatcgtcagggtgatcaatcaaatggcaaccagcaacactcctatatgaaacatcccgaacaaggacattttaaggcacctgatggttactctgcaaactcgcctaattcttctatgataagaaatcaaattaatgctgctagtttcacatcgtttgacaatctgtctgctggatcaggctttgcttctcctaggatcggttctaggtccccaggtgggactttatcttcaaggcagaatttggttggtggatctaactttctgaattacaatggaattggaagtccaaatgcagcaacttctcttcaaacagccattgatccgtcatatattcagtaccttcaggcagctgagattgctgcccaactcgcagctagctgtgatgatcctctcatggccagtggccatctgggaagttcttatatggatttacttggtcctcagaaagcttatgctagtccattgcttcagtcacagaagaactgtggctactatggaaaccttggatttggccttggttattctggaagtcctttgatgagtcctgttcttccctcttcccctgctgcacctggtagtccacttaggcatggtgaacgcagcatgcgcatgcaatcaggtataagaaactttggtggttcctttggttcatggaatcctgacctaggtggaaagatgaacatcaatatgatgccttcactcctggaggaattcaagagcaacaaaagcaaatcttatgagctctcagaaattgctggtcatgttgttgagttcagtgctgatcaatatggaagccgattcatacagcaaaagctagaaacggccagtactgaagagaaggacatggtcttttcagaaatcatgcctcaagctctcacgttgatgaccgatgtatttggaaattatgttgttcagaagttctttgagcacggaagccctacccagataaaggaattggccgaccagcttattggacgtgttcttgctctcagtcttcagatgtatggatgccgggttatacagaaggctatagaggttgttggtttagatcagcagactaaaatggttgctgagctggatggacacgtcatgcgctgtgtacgtgatcaaaatgggaaccatgtaatacagaaatgcatagaatgcatccctcaacatgctatccagttcattgtctcaacattctatggtcaagttgtgatgttatccactcatccatatggttgtcgggttatacagagggtgctggagcattgtgatgatcctacaacacagcaaataatgatggatgagattctccagtccgtttgcttgctggctcaagatcaatacggcaactacgttgttcagcatgtactggagcacggaaaaccacatgagagatctgctattatcgagaagttaattggacaaatagttcaaatgagccagcaaaagtttgcctcaaatgtcattgagaagtgcttagcctttgggaatcctgtagaacgacagattttgatcagtgaaatgcttggatccactaatgagagtgaacaccttgaggtaatgatgaaagatcagtttgcaaactatgtggtgcagaaggtgctagagacttgtgatgatcagcagagggaggcgatccttacaaggataaaagcacatctgaacacgctgaagaagtatacctatgggaagcacatagtagcacgcgtagagaagcttgttgctgctggagagaagcgactagggcttcaaccagcatgcaccagtgccgcctga

SEQ ID NO: 548 - DNA, 2521 bp, Oryza sativa
  N_region (141)..(141): n = any nucleotide
atgaagcgcgccgccgacgggatggagaagcccaagttcctcacgcgggaggagcgggagaagctggcgctcgagcgccgccaggccgccgtcaccgaccagcgccgctccgccctcgacctgctccagtcgctcccccgnccccctccgccgccgccgcctcccctttccaacccccctcgcgactcctcctcctcccaccaccgcgactcctccgaccgtgaccgtgaccgtgaccgggaccgggatcgggacagggaccgggaccgtgaccgggagcgccgccgcgacgacgactcccgccgcgaccgagatcgggatcgggaccgcgaccgaggcgactcctcccgccgcgaccgcgacagggagcgcggtgaccgcgaccgcgaccgtgaccgggagcgcggggacagggacagggagcgaggggacagggagaaagatcggctggagaagatggcggagagggagcgggagaaggagctggacgcgatcaaggagcagtacctgggttccaagaagcccaagaagcgggtcatcaagccgtctgagaagttccgcttctcgttcgactgggagaacacggaggacaccagccgcgacatgaactcgctctaccagtcgccccacgaggcccgcctgctctacggccggggattcctggctggcattgatcgccgcgagcagaagaaggtggccgccgcgcatgagaaggagacccgtgccgagcagcggcgcaaggccggtctggatgaccgccctgaggacgacgcagttgataagaaggaggctgatgctgcagcgaagtatgatgccttcgacatgcgcgtggacaggcactggactcagaagtctcttgatgagatgacggagcgggattggcgtatattccgtgaggacttcaatatatcctataagggttctaaggtaccccgtcccatgcggaagtggtctgagagcaagcttggtactgagctgcttcgtgctgtcgagaaagctgggtacaaggaaccttcgccgattcagatggcttccattccacttggtctccagcagcgtgatgttattggtattgctgaaacaggctctggcaagactgctgcttttgtgctccctatgctttcgtacattacccgcctcccacccataagtgaggaaaatgaggctgagggtccttatgctgttgttatggcacctactcgtgagcttgctcaacagattgaggaagagactgtgaaatttgcgacctatcttggcattaaggttgtgtctatcgttggtggtcaatccattgaagagcagggttttaagattaggcagggctgtgaggttgttattgcaactcctggtcggcttcttgattgcttggagaggaggtatgctgtgctcaaccagtgcaactatgtggttctggatgaggctgataggatgattgatatgggcttcgagccgcaggttgttggagtccttgatgctatgccatcgagtaacttgaaacctgagaatgaggatgaggagcttgatgcaaaaacgatctataggactacctatatgttcagcgccactatgccacctgctgtggagcggcttgctaggaagtacctgcggaacccagtcgttgtcacaattggtacagctggcaaggccacagatctcatcacacagaacgtgatcatgacgaaggagtcagagaagatgtcaaggctccagaagatactcacagatcttggggataagccagccattgtgttctgcaacacaaagaaatcagcagatgctcgtgcgaaggatctagacaaggcaggcttccgcgtcacaacactacatggtgggaagtcacaggagcagagagagacgagccttgatggatttagaaaccggcggttcactgttcttgtggcaactgatgttgccgggcgtggtattgatattcccgatgttgctcatgtcatcaactatgagatgcctagttcaatcgatacatacacacatcgtattggaagaactggacgtgcaggaaagaagggattggcaacttcgtttttaactctggagaacactgacattttctttgatctgaaacagatgcttatacagagcaacagtcctgtgccacctgaacttgcaaggcatgaagcatccaaatttaagccaggctcagttcctgatagacctccaagacgaaatgacacagtctatgcaactcactgaagcatctactgcagaatgggccaaagatcctccagtattacaagggaacttttggaaacagaaggatctaattctagattagtacttcgaggtacaaacattatgatgattactcgttttttattatatgtctgaaaactatgccctatattgtcatgaatttaggatatgtttatgatggtttagttctggacttatgtatcttttcttattgttggtgatcaatgcaaactctactatggcccatgtagtgcattattttaccgcctaaatatatatcatattttgttatgtttgttgtttacagtag

SEQ ID NO: 549 - DNA, 2511 bp, Oryza sativa
atggaggcggaggacgacgagcgagccgaggcggaggcggaggcgcggcgggagaaggaggccggcaacgccgcctaccgcaagctctacctcgagacggccgtgcgccactacacccgcggcgccctcctcgacccccgcgacatctccttcctcaccaaccgcgccgccgcctacctcctcatgtccaaggtcaggctctcagtctcagccatgcccccaaacccctcctctctctccgattgtttaacctcgcggcgatggcgattggtttctccgttgcagtacaaggagtgcgtgagggattgcgacgaggcggtggagaaggggcgggagctacgcgccgacaacaagctggtcgcgcgggcgctggcgaggaaggcgtcggcgctgctcaagctcgccgcctgcgccgcggactacgacccggcgatcagggcgctgcagcagtcgctggccgagcactacagcgaggagacgctcgccaagctgggcgaggcggaggaagccaggaaggagattgaggagcgggagcggcttgatcaggaagctgccgatcaccaccgagacagaggcaacgatttcttcaagcagaaaaggtaccaggaagcagcaatgcactatactgaagccatgaaaaagaacccaaaagatcccagggtttttagcaacagagcccaatgccacatctacctaggagcattgcctgaaggtcttgaagatgcagataaatgcatagcgttggatcctacttttctgaaaggctatctgcgtaaagctaaagttcagttacttatgggcaattatgaaattgctctggcaacttatgtagagggtttgaagtgtgacccaaacaacctcgaagttcttgatggcttaaggagatgtgcagcatgcattaaaagagctaatggcggtgattctagagcagaggacttgagagagatactgggagatttgcatttgaatgatgatctgtgtaataaacttcaaaaaagcatggatgaagctgcggtgttgaagaaggaagcatccgacgagcgcttaaagcggattgaatctgaacgattggccaggacattggaagatttgtatttaagccaggtccaacaaaggaaagaaacagaggaatctctttcaagggtacaacaagagtttgaacaacttaaaatacagcaagatgaggtcaccgtggaacttcagagagtcaatgagcagaatgagaatctactaggtcaactctcagactccagagagcattttgaatggcttctatctgagcatgaccaattgctacgtgaacgagataatgcagttcgagaggttgaagaactacgtcagaaaagaggacagatgctttcagttttggttacagcgatgcactgtgaattttcatcatctgaagtggaatctgcaacagaaaattttagtaattcattgaagattggagaaggtgggtttggctgcgtatacaaaggtatcctccggaacatgacagttgcaataaaggtgctgagacctgatagtttacagggacaatcacagttcgaacaagaggtttctatcctcagtagagtgagacaccctcaccttgtgactctcttaggagcttgctcagagtcttcaacactcgtatacgagttcctgccaaatggaagcctagaagattttcttatgtgttcagataagaggcaaactctgacgtggcaggctcggattcgaattattgctgagatatgttcagcactaatctttctgcataagaataaacctcacccagttgttcatggagatctcaagcctgctaacattctccttggtgttaacttagtcagtaagcttagtgactttggtatttctcgcctcctaatccagtccagcaccaataacaccaccctgtaccgcaccatgcatcctgtgggcacccctctgtacatggacccagaatttctttccactggagagttgacacctcagtctgatgtttattcatttggtattgtagtcttgcgtcttttaacaggaaagcctcctgttggtataaagaatatcgtggaggatgcaatggagaaaggtgacttgaactcagtaattgatacctcagtgggagagtggcctcatctgcacatcgagcagctggcataccttgctctcagatgcactgagttaagcaggaggtgccgccctgatctttcaggtgaggtgtgggcaatagttgaggctataagggatgctgcattatcttcaccttcatcctctagatcagcacaggatcaaaacagtccaccgtcatatttcatctgtcctatatctcaggatatcatggatgatcctcacattgcagcagatggattcacctatgaagctgaggcaatcaggagttggctctgcaatggccatgacacgtctccaatgaccaacttgctacttgaacatgaggagctcattccgaatcgcgcactgcgttctgctattcaggagtggctccagcagcacagcatgtcgctgtag

SEQ ID NO: 550 - DNA, 2506 bp, Oryza sativa
gcttgtccaaagttaatcgaacggtttagggaaagagaggaaaatgtaaagatggacatctttaacacatttattgagttgttacgccaaactggtaacatgacaaaaggataaggtgacattgatgagtctagagccctagatggttgctgaaacaagaagtacctaaggttgtcaaatccatcaataggcagttgcgtgaaaaatcaatcaagacaaaggttggagcattctctgtattgaaggagcttgttgttgtactgccagactgtcttgctgatcatattgggtcacttgttcctgggattgagaaggctttgaatgttggataagtcatctacctccaacctgaagattgaagcccttgtatttacaagacttgttatggcttcacattccccagctgtgtttcatccatacatacaggccctttctggcccaatattgtctgctattggagacagatattacaaagtcaccgctgaggctttaagagtctgcggagagctagttcgtgtacttcgtccaaattttgagccaatctataaggctatcttggcccgcttggcaaatcaggatcaggatcagcaggaagttaaagagtgtgccatatcttgcatgagccttgtggtattcacgtttggtgatggtctccaaagggaactgccggcatgccttcccattcttgttgatagaatgggtaatgaaataactagacttacagcagttaaggcaaacagagctctaaggcaggctacattgggaacactaaattctcttgttgttgcgtatggtggtcaaattggatcctcttatgaaactattattgctgaactttctacgctcattaggatttgcacatgactgctcttgcgctggaactttgttgcacgatcatggtcgatagaaaatccatccaaaatgttggtcttgcagtgaggtacaaggttttgccccaggcccttattttgatcaggagtgctctcttgcaagggcaggcactactgcagagattttttgcttcactggtccagtctgcaaatacaagctttgacactttgttggattctcttatttctactgctaaaccatcgcagtcaggtggacttgccaaacaggcattgtcttccattgcacagtgtgttgctgtgttgtgcttagcagctggggatcagaagtgtgcctcaactattgaaatgcttaaaggcattttaaaagatgacagcactactaattctgctaaacagcacatggccttgttatgtttgggagaaattggaagaaggaaggacctcagcaatcatgctcaaattgagaatattgtcattgagtcatttcagtcaccttttgaggagatcaaatctgcagcgtcatatgctctcggaaacattgctgttggaaatttatcgaagtatttgccttttatcttgaatcagattgacaaccaacagaagaaacagtatctattgcttcattcactgaaagaggtaattgcacggcagtctgttgaccatactggccagagtgagctccaggattcaaacattgagaagattttggcattgctctttaatcactgtgaaagtgaggaggaaggagttcggaatgtagttgcagaatgcttaggcaaaattgctctgattgaacctaggaaattaatccctgctctaaagcgcacatctagtcctgctgcaaacacaagagctacagttgccattgctataaaatattcaattgttgaacggcctggaaaaatagatgaaattatgtactccgagatttctaccttcctgatgttgattaaagacagtgacaggcacgtgaggcgtgcagctgtgctggccttgagtacagctgcccacaacaagccaaatttgattaagggtcttcttcctgaattattgcctcttttgtatgaccaaactgttgttaaggaattgatcagaacagttgaccttgggcctttcaagcatgttgtggacgatggtcttgaactcaggaaagctgcctttgaatgtgtggatacattgctggatagctgtcttgatcaagtgaacccatcatcatttatcgttcctttcctcttatctggtttaggtgtcttgtttatgcttagtatacacacgctgtaataactgcttttttgttgtcttatggaaccactttgtagatcattatgatgtaaaaatgccttgccatctgattctctcaaagctagcagacaagtgcccttctgctgttctggcaggttttggactcattagttgaccccattgagaaaactataaatcacaaacccaagggcgatgcagtgaagcaagaggttgatcgcaatgaagacatgattcgaagtgctcttcgagcaatcgctgctctaagccgcataaggtcaggcatcattctgtcctgccccgaacactttttttctggtttaaccacacttttaactgtgctgtcatctttctcgttattagtgaatcgccacatctttattctttgcccttga

SEQ ID NO: 551 - DNA, 2472 bp, Oryza sativa
atgtacgtggtgaagcgggacgggcggcaggagacggtgcacttcgacaagatcacggcgcggctgaagaagctcagctacggcctcagccaggagcactgcgacccggtgctcgtcgcgcagaaggtatgcgcgggtgtgtacaagggcgtcaccaccagccagctcgacgagctcgctgccgagactgccgccgccatgaccgcgtcccaccccgactacgcctcggtaacagccactgaacttcaccgttgttggtttttttgttccccattcggtagtaccttgtctcctcctgacatgtggattgctgttgtgaagctcgcggcgaggattgcggtttccaacctgcacaagaacaccaagaagtccttctcggagacaaggacatgtatggacatttcaacgagagatctgggctgaatgctcctttggttgcccacgatgtatatgaagtcatcatgaagagaatgcttctcgcttggacagcgagataatttatgatagggactcgattcgattatgattatttgggtttcaagactctggagaggtcttacctcctgaaacttggcgggaaggttgttgaaaggccgcaacacatgttaatgagagtttcagtaggtatacacaaggatgacattgagtctgctatcaagacctaccatctgatgtctcagcgctggtttactcatgcttcaccgacccttttcaatgctggcactccaaggccccaattaagcagctgtttccttatctgcatgaaagatgacagcattgagggaatctatgatactttgaaggaatgtgctgtcataagcaaatctgctggaggaattggtgtatcagttcacaatattcgagctactgggagctatatccgtggaacaaatggaacctccaatgggattgttcctatgctacgtgttttcaatgatactgcccgttatgttgatcaaggtggaggcaagagaaaggagttccttgatctgagaaagaatcatgggaagaggaggagcatcgtgcaagggatcttttctatgcactctgggttcctgatctattcatgcaaagagtccaaaataaccaagaatggtcattgttttgtcccaatgaagctccagggttagctgattgctggggtgatgagtttgagaaactgtacacaaaatatgagagagagagtttattgaagttggaaaagattacaataacatagctttgtactttcagggcaaggcaaagaaaattgtcccagctcagaccctctggtttgacattttaaaggcacagatagaaactggtacaccatatatgctttacaagaggatacatgcaataggaaaagtaaccagcagaatttgggcacaattaaatcttcaaacttatgcactgagataattgagtacacaagccctactgaaactgctgtctgcaatctggcatctattgctttaccacgttttgtaagggaaaagaggttacttcaactgtcacatacaatctcaacaaaataattgatattaattattaccctgttgaaaccgcaaaaagatcaaatatgcggcacaggccaattggcattggtgttcaagggttggcagatactttcatattacttggcatgccatttgattcaccagagaggctcagcaattgaataaggatatcttcgaaactatttactttcattctctgaaagcttccgctgagcttgctggtaaagaaggtccctatgaaacatatgaagggagccctgtcagcaagagggcattctccaacctgatatgtggaatgtagttccatctgacagatggaactggccatctctacggagtactatttctaaagttggattaagaaactctcttcttgttgctccaatgcctactgcttccactagtcagattcttggcaacaatgaatgctttgaaccttatacatctaacatatacagccggcgggttctaagagtggggagtttgttgtggttaacaagcatcttctccatgatttgactgaaatgggtgtttggactccagctctgaaaaataagataatttatgaagatggttctgttcaaaagatgacagtgatcccagatgatctaaaagcaatttacaaaacggtttgggagataaagcagaaaacgcttgttgacatggctgttgatcgtggatgctacattgatcagagccagagtcttaatgttcacatggaacaaccaaactttgggaagctgacttctctgcatttccatgcttggtccaagagggcctgaaaactgggatgtattatctacgaacacgagcagctgctgacgcaatcaagttcacagttgatactgcccttttgaaggccaatggagaaaacggcaccaaggctgcagaggaagaggacgtggaagctaaaatggctcaaatggtttgttccttgaacaaccgggaggagtgcttggcgtgtggaagttag

SEQ ID NO: 552 - DNA, 2394 bp, Oryza sativa
  N_region (223)..(223): n = any nucleotide
  N_region (824)..(825): n = any nucleotide
  N_region (828)..(828): n = any nucleotide
atgacaagcgataacggaaaggctccagataaggatggagagccttctggacctccgtcggctcctcaagaaggagaaatcagcaatgaaccaaaaaggcgacgacctctcaatggggaggaccaccggtccgacacggcgttccaccaaaggaaattggacccctgaagagaggatgccatattgtccagagctgttcagacatacaacgggaagaactggnaaaaaatagagcggaatgctttccggatagaaccgatgtacaatgcttgcacaggtggcaaaaggttctaaaccctgaattagtcaaagggccatggtccaaagaagaagatgaaatcattgttcagatggtaaacaaacttggaccaaagaaatggtcaaccattgctcaagctttgcctggacgtataggaaagcaatgtcgagaacgggtggtacaaccatcttaaccctggcataaacaaggaggcatggacacaagaagaggaaattaccctcatacatgctcatcgaatgtatggaaataaatgggccgagctgacaaaatttttaccaggaagaggacggacaattcaattaaaaatcactggaacagttcagtaaagaagaaagtcaattcatacatgtcatcaggtttacttacccaagtttcgtgtctccctctaaatgaatattctgcaaattgtaattcctcaccagcgatgacccaacaaaacagtgaagatagtggttgttttgctgtccgagaggttgaaaattcatcagggtgtagtcatcatcacttgccaaggttcttgctcccaagtgcatgatactattgnnccnttgggctgtgatttgcaagtaaacgcgaattttgacaagaatgaagcacatgattctcaatcttccatgggtccccaagcatgctatacttctgcggaggctgttgcatctgctttgcctgctgtgcattgccatgtttcttcctctaacttggatccagatcaacacttgcaagaggactttgctcaaggactgaatttggacatgactatagatgaaatgccaactgttcctagttttgcagacaaccagactgtttgtagtatagaaaatcatgaaagatctctggagccatatgatgtagcaatggaggtgcctctctctatgttatcaagtgattctggagctgagcaaaaactacatttcatgtctgaggctgacttcaacagtcctaactgtctgaaatctgaactctggcaggatatttccttacagggccttctttctggacctgatgcagttgaagctgattcaatttcaagatcaaatcaccaatcggatgtatattcctctgaagcagatacccattttttagcaccaccctacatgccacagacatcaaattcttcaagtgtgatggggcttgctgatgaccagagtccacagatgtcagtacctccatctcttatttgttcaaatgctatgactgatgatgcacctttcgataatagaccagggcggaaggaaatgccactttctcaggcagaagtggttacccaatcttccagttcttctggtgatgctgaaatgtttgctaaccctggttgtagcaatgacagacatgttccttcttcaacgatggaaagcatacctgaatgtggggaccaacaggttactaatgcggaagaacctgaagccagtctagagaaagaaccatcgcttacacagagtgtgactgcaccagatgaacaggacaagggagccctcttctacgaacctcctcgttttccaagcctggatgttccatttgtcagttgcgatcttgtaacctctggtgatctccaagagtttagtccccttggcattcggcagttaatgcattcaaccatgaatgtctgcacgccaatgagattgtggggctcccctactcatgatgaaagcacgggcgttttgctgaagagtgctgccaaaagcttcatatgcacgccatcaatactgaagaaacgtcacagagatctcttgtctcctattccagataaaagaatcgagaagaaatatgggactgaaaaggatcgtggggtatcagacacatcctccaccggcattcaaacaagttgtatcaatgccactaaagatgatgcacttataactacagttttgcgtattgagcgatctgcttcttctaaatctctggaaaagaaacttgttttctctgatgaaaacaaggaaaatttgggctacacaactgaacagacaaaagatggacagagtgctggaaatgacgaacacatggacgagcagacaacaggggaacgcagttctgcaacaaatgtagctactaatgatgacctgtcaggcaatttagtaagtacttccagtttctgatgatatttagcttgtcagtag

SEQ ID NO: 553 - DNA, 2332 bp, Oryza sativa
  N_region (171)..(171): n = any nucleotide
atggcgccaagggaccagtcatgtggggacggcggcgaggtggatccggagggtggcatcgaggcgccactcctctcctccggctcctcgttcttccaggacccggcgcacgaggacggcgatggcgacgaggaggcgcgacggcggcggcggaggttcctcctcgccggncgctcccagtccaacaccacctcccaggtggccctcgtcggcgtcggcgtgtgccccatcgagagcctcgactacgagaacgaagtgttcaagcaggactggagggcgcgggggcggggtcacatcctgcgctacgtggcgctcaagtgggccctctgcttcctcgtcggcgtcctctccgccgccgccggattcgtcgccaacctcggcgtcgagaacgtcgccggcgccaagttcgtcgtcacctccaatctcatgctcgccggcaggcgtttgcggtgttcctggtttcgaatttcgcccttacgatgttagcaacggtgctgacggtgtatgtggcgccggcggcggccgggtcgggcatccctgaggtgaaggcttacttgaacggggttgatgcccccgacatattttctctaaagaccctggtggtgaaggtgggaaaagctggtcctctagtacacacaggtgcatgcattgcatctatacttggacaaggtgggtcaagtaaatatcacctgacatgtaaatggctaaggtacttcaagaatgatagggaccgaagggaccttgttacttgtggtgctggtgctggtattgctgctgctttccgggcaccagttggtggagtcctgtttgctcttgaagcagtgtcttcatgtggaggagtgccctactctggcgagcatttttcacaacagcaatggttgctgttgtgcttagggcattgatagacttctgcaaaagtgacaagtgtggcttgtttgggaaaggtggacttataatgtttgatgtgacttcagattacatcacctaccatttggtcgatttaccgccagtaatcactctaggagttcttggtggagtactaggaagcttgcacaactttttcctggacaaggttcttcgtctctacaatttttattaacgagtcaccatttgtacatcctgttgtctcttcggcttgccatggattgcttcttgcaaaccttgtccaagtgacaccgaagaagcctgtccatccataggaagatctggtaattttaagaagtatcagtgtgcaatgaatgagtacaatgacttagctagcctgttcttcaacaccaacgatgacaccattagaaacctttacagtgctggcactgatgatgaattccatatctcttcaatacttgtcttcttcttcacatcgtatttcctgggcattttcagctatggccttgctttaccatccggcctttttgtgccagttattttgacaggtgcaacttatggccgccttgttggcatgttaattgggtcccaatcaacattagatcatggcctttttgcagttcttggctctgctgcccttctaggaggatcaatgagaatgactgtctcagtttgtgtcgtcatcctagagctgactaataatttacttatgcttcctttggttatgctggtccttctcatatcgaagacagtggcagatgcttttaatgcaaatatttatgatttgcttgttaaattgaaaggatttccttatctcgaaggccatgttgaaccttacatgaggcaattgtctgtcagtgatgttgtaactggtcctctacaggcattcaatggcatagagaaggttggccatatagtgcatgtcttaaggacaactggacataatggttttcctgttgttgatgagccaccattttcagattctcctgtcttatttggtctagttcttagagcccacttgcttgttctgctgagaaagaaagatttcattcctaactgctcagcttcagcactggatgcttccaagcaattcttgcctcatgattttgctaaacctggctcaggaaagcatgacagaatagaggaaatagaattcagtgcagaagaactggaaatgttcgtagatttgcatccgttcacaaacacgtctccttacactgtggtcgagactatgtctttggctaaggcccatgtgcttttccgcgaagttggattgaggcatcttttggttctaccaaaatcgtctaagagagcgcctgttgtaggcatactgacaaggcacgacttcatgcctgagcatatattgggtcttcatcctttcctcttcaagactagatggaagaaggtgcggtttggcaagtcagcattcaccaacctcgtcttctga

SEQ ID NO: 554 - DNA, 2325 bp, Oryza sativa
  N_region (218)..(218): n = any nucleotide
atgatgcagaggccgttccgtccggaggagtactccttgaaggagacttctcctcaccttggtggtggagctgctggtgacaagctcaccaccacctatgacttggttgagcagatgcagtatctttatgtccgggtagtaaaagctaaggaccttccaagcaaggacatcactggaagctgtgacccatatgttgaggtgaagcttgggaattatangggtacaactcggcatttcgagaagaagactaatcctgagtggaaccaggtctttgccttttctaaggagcgcattcagtcatcagtggttgagatcattgtcaaggataaggactttgtcaaggatgacttcatcgggcgggtgttgtttgacctgaatgaggtcccaaaacgagtgccacctgacagcccattggctccacagtggtatcggttggaagagcggaatggacacaaggtgaagggagagttgatgttggccgtttggatgggtactcaagcagatgaagcattccctgaagcttggcactctgatgcagcgtcgatcccaggagatggacttgcaagtattagatcaaaagtttaccttactccaaagctttggtatctgagagtcaatgtcattgaggcacaagatcttataccaaatgacaggaccaggttccctgatgtttatgtcaaagccatgctaggtaaccaagctcttagaacccgggtatcaccaagccggacgctgaatccaatgtggaatgaggatttaatgtttgttgctgctgaaccattcgaggaacacctgattctgagtgtagaagataggattgccccagggaaggatgatgtacttggaaggacaatcatttctctgcagcacgtacctcggaggctggatcacaagttgctgaacagccagtggtacaatcttgagaagcatgtaattgtggatggcgagcagaagaaagagaccaaattttcaagccggattcacttgagaatatgcctcgaaggtggatatcatgtcttggatgagtcaacacattacagcagtgatttgaggccaactgctaaacagttatggaagcacagcattggcattcttgagttgggtatcttgacagcacagggcctgttgccgatgaagaccaaggatgggcgtggaacaactgatgcttattgtgttgctaagtatgggcagaagtgggtgcggacaaggactattattgatagtttcacacccaagtggaatgaacaatacacttgggaggtgtatgatccctgcactgtgatcactattggtgtatttgacaattgccacttgaatggtggggaaaaagccaacggtgcccgggataccagaattgggaaggtccgcatccgcctctctacgctagaaactgatcgagtatatactcatgcttaccctctgattgttctgacacctgctggtgttaagaaaatgggggaggtgcagcttgctgtcaggttcacatgctcatcactgctgaacatgatgcatctgtattcacaaccattgctgcccaagatgcactatgtacacccattgtccgtgatgcaggtagacaatctaaggcgccaagccaccaacattgtatcaacaaggctgagccgtgcagaaccaccactgcggaaggaaattgtggagtacatgctggatgttgactctcatatgtggagcatgcggaagagcaaggcaaactttttccgtatcatgggtgtcctaagccctctgattgcggtggccaagtggtttgatcagatctgccattggagaaatccgctgaccaccatactgatccacattctctttgtgattttagtcttgtatcctgagctgatactgccaacaatcttcctctacctgttcctgattggagtgtggtactaccgctggcggccaaggcagccacctcacatggacactcgcctctcacatgcggagagtgctcatcctgatgagcttgatgaagagtttgacacattccctacttctcgtccgcctgacattgtgaggatgcgttatgaccggctacggagtgttgctgggaggatacagaccgtagtcggcgatctcgcgacacaaggagaaaggctgcagtccctgctaagctggagagacccaagagccacggcgctctttgtgaccttctgctttgttgctgccattgtcctctacgtgactccattccgtgttgtggtcttccttgcaggcctgtacaccttgagacacccaaggttccgccacaagatgccctctgttcctctgaacttcttcaggaggctccctgcaagaactgatagcatgttgtaa

SEQ ID NO: 555 - DNA, 2314 bp, Oryza sativa
atggacgtcaacgaggaggcaatggcggcgcacaagcgcgcgttcctcgacttcctcgaccaggatgtcgggaagggggtgtacatgcaggccgtgcgcgacatggtgcagaacaagcgcaaccggctcatcatcggcatggacgacctccggaaccacagcctcgatctcgcccgcagagggtgatacggagccccgcggagtacatgcagccggcgtcggacgcggtgacggaggtggcgaggaacctggaccccaagttcttgaaggaagggcagcgcgtgctggtgggattctcggggccttcggcttccacagggtcacgcccagggacctcatgtcgtccttcatcgggactatggtctgcgtcgagggcatcgtcacgaaattcactagtaaggccgaaagttgttaagagtgttcactattgccctgctactggaggtactctctcacgtgaatacagggacatcacatctttcgtaggcctacctactggttcggtttatccaacaaggacttaggatgaaaatggtaacttgttggtcactgagtacgggatgtgtgaatacaaggatcaccaaacactctccatgcaagaagtgcctgaaaattctgcccctggacagctcccaagaacagtggacattattgtagaagatgacctagtagattcttgcaagccaggtgaccgagtatcaattgttggtgtttacaaggctcttccagggaaaagcaagggcagtgttagtggtgtgttcagaggactgtccttattgcaaacaatgtttcacttatgaacaaagaagcaaatgcacctgtctatactcgggaggatttgaagaggatgaaagaaatatcaaggagaaatgacacatttgacttactaggaaattcacttgctccatctatatatggccatctgtggataaagaaagcagtagttctattaatgcttggtggtgtagagaagaatctgaagaatggaactcacttgagagggagatataaacatgatgatgttaggagatccttcagttgccaagtcccagctcctaagagcggttatgaacattgccccttgggctatttcaactactggaaggggttcatctggtgttggtttgaccgctgctgtcacttctgatcaagagactgggtgagagaaggctggaggctggtgccatggttcttgctgatcgtggtgttgtctgcattgatgagtttgataagatgaatgatcaggaccgagtggctattcatgaagttatggaacagcaaactgtgacgattgcaaaggcaggaattcatgcgtcactaaatgcgagatgtagtgtgattgctgcagcaaatccaatatatggaacttatgaccgttcattgacaccaaccaagaacattgggcttccagattcattactctcacgttttgatttgctttttattgttcttgatcaaatggatcctgagattgatcgtcaaatttctgaacatgttgcacggatgcatagatattgcactgatgatggagaggagcaagatctcttgataaaacaggatatgctgaagaagatgatggtgatgttaatgcagccatatttgttaaatatgatagaatgctccatgggcaggacagaaggagaggcaagaaatccaaacaggacagactgactgtcaaattcctgaagaaatatattcattatgcaaagaaccttattcagccaagactaactgatgagaggcatctgatcatattgcaacttcatatgctgagctcagggatggtggtgcaaatgcaaagagtctggtggaggtacacttccgatcacagcgaggacactggaaaccataattcgtctatctactgctcatgccaagatgaaattgagacatgagaggttctaaaaactgacgttgaagctgcactgcaagttctgaattttgcaatataccacaaagagttaactgagatggaagagcgtgaacagagagagatggaaatgaaacaacaagctgatcatgatgcaggtgcaagtggtgagttctggaaacgacccaatggatgtggatgtaggaaatgcatcgaatgatcaggatgttcctgcggagagagaattgaagcatttgaggcgattcttggtcagcatgtgttggcaaatcatctcgatcaaatatcaattgacgaaattgagcaaactgttaatagagaggcagctgcaccttacaatagacgtcaagtagaattcattttggagagaggatgcaagatgcaaacaggataatgatacgagatggcatcgttcggataatctaa

SEQ ID NO: 556 - DNA, 2239 bp, Oryza sativa
gatccgaagttgttgaaagctttagttgaaaaccacaaaagatctttcccatatgctggggcctttcttgtcaagaatgaggaagatactgacagtaacactgtcacacgttcagatccaaagaaaagcattcatggtctgaaagggaaagaattattgaagcatcttcatgaaattggcactcttgctaagataacaagcattcaaggagatcaggtgttgctacttggtcactgccgtttacggataactgaaatggttgaggaggacccacttacagttaaagttgaccatctaaagaaggcaatatatttcgaacttctatcgactttaagggatgttctaaaaacaagttccctttggaaggatcatgctcaaatctacacccagcagcatatggttgatttcaactaccaaagactagcagattttggcgctgctatttcagtcaccaacaagttgctatgccagggagttcttgaggaactagatgtgtctaagcgtttgatgttgacccttgaattagtaaagagggaattggagattactaagttgcagatagcaaaagcaattgaagaaaaagtaactggcgagcagcgccgctacttattgaatgagcaacttaaagcaatcaagaagaaatttaggaaaaggattgaatcgagaaaagagaaatgcccatctcatatcttacaagtcattgaagaagagctcactaaacttcaattactggaagctagttctagcgagttcagtgttaccagcaattatttagactggctaacagtattgccatggggggattacagagtgatgaaaactttgatgttcttcgtgctcaacgcattcttgatgaagatcactatggtctaactgatgtaaaagaaagaatattggagtttatagcagttggaaaattaagaggaagctcacaaggttccataattctatcctgtttttattttctgtgtattttctatgtattatttatggtaaaattatatgtctctgtggaccacctggcgttggtaaaactagtattggacgatcagttgcacgtgcattaaaccggaagttctacagattttctgttggggggtcatcgacggacctatgttggggcaatgccagggaagatggttcagtgtctgaaatcagtcggaacttcaaatcctctggttttgatagatgagatcgacaaggtattcatctagggagagggtattctggtgatccagccagtgcactgttggaacttcttgatcctgaacagaatgctaactttcttgatcattatcttgatgttcctattgacctctccaaggttctgtttgtttgcactgcaaatgtcatagagatgataccaggccctctactggacaggatggagatcattactattgccggttatataaccgatgagaagatgcatattgcacgggattacctagaaaagaacacaagggaggcttgtggcatcatgcctgaacagcaggttgaggttacggatagtgctcttcttgctcttattgaaaactattgccgggaagccggtgtgcgtaaccttcaaaaacagattgaaaaagtttaccggaaggatgcatcaaatctggataactttgttgggaaggctgtattccaaccagagcgtatatacgatcaaactcctgttggggtagtcatgggtttagcttggaatgctatgggtggttctaccttgtatattgagacagcaaaagttgaggacggcgaaaaaaaaggtgcacttgtggtgacaggccagcttggagatgtcatgaaagagagtgctcaaattgcacatacaatttgcagatctatattacatgagaaagaaccaaataacaccttttttacaaagtcaaagcttcacttacatgttcctgcaggggctactccaaaggatggccccagtgctggatgcacgatggttacatcgatgctgtctttagccatgggaaagctggtaaagaaagacctcgcaatgactggggaagtaacattgactggacgaattctcccaattggtggggtgaaggagaaaaccatcgctgccaggagaagtgggataaagacgatcatattcccagcagcgaacagaagagatttcgacgagcttgctcctaatgtaaaagaaggtcttgaagtccactttgttgacaaatacagtgaaatatatgatttagcttttccaagtgatagtcaggcattagcaagctag

SEQ ID NO: 557 - DNA, 2185 bp, Oryza sativa
ctgagaggagagcgctatataaagctctacagctaccgctatctgattaatggttttgctgttgtcatcactcctcagcagaaggcagagaggctatctatgacgaaagaagtggcaaatgtaatgttggacttctcagttaggacggcaacaactcatacccctgaattccttggtttgccacaaggagcatgggttcaagagggtggcccacaatgtgctggtcagggtgttgttgttggcctcatcgacacaggaatcgatccaactcatcccagcttcgcagacgacttgataactgacagttatcctgttcctgctcattactctggcatttgcgaggttacaaatgattttccatctggatcctgcaacagaaaacttgtgggagctaggcattttgcagcctctgcaataaccaggggagtgttcaatgcctctcaagatcatgcttcaccttctgatagtgatggtcatgggaccatacagcatccatagcagctggtaatcatggaattcctgttgttgtggctgggcatcattttgggaatgcaagtggaatggctcctcgtgcacaattgctgtctataaagctctgtacaaaagctttggagggtttgctgctgatgtagtagctgcaatagatcagatattgcaggcagctgaagataatgttgatataatcagcttatccattaccccaaatagaaggcctcctggactagccaccttctttaatccaattgacatggctcttctttcagctgtaaaagctggcatatttgtcgtgcaagctgcaggaaatacaggtccttcccccaagagcatgtcatcatacagtccatggatttttactgtaggagcatctgcccatgacagggaatacaacaactatgttgtacttggcaacaatctgaccattacaggagttggccttgctcctagttgctgcacctcatgcactgaaaaacaatgtagccagtcctactgaaatgtccctaggggagtgccaagattcaagccaccttgatgaagatctgataaggggaaagatactggtctgcagctattccatacgatttgtacttggcctgtcgtctgtgaagcaagctttagatactgcaaagaatgtcagtgctgcaggagttatattctatctggatccatttgtcattggattccagctgaatccaactccaatggatatgcctggacttataataccatcatctgatgactctaagctaaattattacaatgagtcccttgtgagagatgagacctcaaacaaaatcgtcagctttggtgcaattgcaaaaatactaggaggccaaaatccaaattatggtatttctgccccaaaagtaatgttttattctgccaggggtcctgatcctgaggacaactcactggccaatgctgatatcctgaagccaaatctgatagcacctggcagttccatttggggtgcttggagttctcttggattggactctgctgaatttgctgggtgaaagttttgcaataatttccggtacaagtatggctgcaccacacgttgctgggcttgctgctctagtcaagcagaagttcccttattttagccctgcagctataggttctgcattatcgactactacaagtctcagtgacagggaggggaatccaatcatggcacagagaacatacggcaatccaaattcaactcaatctccagctacaccttttgacatgggaaatggatttgtcaatgctactgctgctttggatcctgggctcatatttgattccatttctatgtggcataaacggctctgctccagtagtgatgaattacaccggcaacagctgcagctcctccgccatgacaggggctgatctgaaccttccctccatcaccattgcagtgctcaaccagtcaagaacgataacaagaactgtaaccaacgtggcgagcgacgagcgctacacggtcagttacagcgccccttacggggtcgccgtctccgcgtcgccggcccagttcttcatccccagcgggcagaggcagcaggtgaccttcgtcgtcaacgccaccatgaacggcacctccgcgagcttcggcagcgtcggcttctacggcgacaagggccaccgggtgatgatcccgttctcagttatctccaaggttgtgcaccgttcatga

SEQ ID NO: 558 - DNA, 2180 bp, Oryza sativa
gcaagactcttgccgtgttgagactgcagaaacgagagctagctagccagaggctgcaagaagattctgcacccatagatcgtctaccatggccacaaacccaggactcttcacggagtggccatggaagaagcttggcagcttcaagagtacgtgttgctggcgccgtgggtagcgcacgggtggtatgaggtggcgaccaaggggtggcgggaggtggatctcgggtacatcgccatcctcccgtcgttgctgctgcggatgctgcacaaccaagcctggatcaccatctcccgcctccaaaacgcccgtggccgccgccagattgttcgccgcggcatcgagttcgaccaggttgaccgcgagaggaactggggacgaccagatcatcctgagcggtatcctactatacctcggcgcactgtacgtaccgggcgggcaacacttaccgctgtggaggacggatggcgcggggctgatcgccttgctgcatgcggggccagtggagttcctctactactggttccatcgtgcgttgcaccaccactttctctacacccactaccactcgcaccaccactcttcaatcgtcactgagcccatcacatgtacccgtcatccatccgtttgctgagctcgttgcctacgaattgctcttctcgatcccactgatcgcctgtgccttgactggaactgcttccataattgcattcgagatgtatttgatttacattgatttcatgaacaacatggggcactgcaacttcgagttggtacccagctggctcttcacatggttccctcctctcaagtatctcatgtacacgccatcgtttcattctctgcaccacactcagtttcggacaaactactcccttttcatgccgttctacgattatatctacaacaccatggacaagtcatcagacactctgtatgagaactcactgaaaaacaatgaggaagaagaagcagtggatgtggttcaccttacacacctgaccaccctgcattccatctaccacatgaggcccggtttcgccgaatttgcgtccaggccctacgtttccaggtggtacatgaggatgatgtggcctctgtcatggctctccatggtgctgacatggacgtacggttcttcattcactgttgagaggaatgtcatgaagaagatcaggatgcagtcatgggccataccaagatacagtttccattatggattggattgggagaaggaagctatcaatgatcttatcgaaaaggcggtatgtgaagctgacaagaatggggctaaagttgtaagccttggactcctgaatcagaggcacataccctgaataaaagtggagaacaatatctgctgaaatacccaaagttgggagcaagaattgtcgatggaaccagcttagctgctgcagtggttgtcaacagtatcccccaaggcacagaccaagtaattcttgcaggaaatgtttccaaggtggcgcgtgctgtagcgcaagcattatgcaagaaaaatatcaaagtcacgatgacaaacaagcaagattatcatttactcaagccagaaataccagaaactgtagctgacaatctttcgttttcgaaaacaggcaccgcaaagaggtttggttaattggtgatggtctagattctgctgaacaattcagagcacagaaaggaactctgtttatcccatactcacaatttcctccaaagatggtacgcaaggacagctgcagctactcgacaactcctgcaatggctgtaccaaaaacgctgcagaatgtgcattcatgcgagagaattggctgccaaggagggttatgagcgcatggcgaatcgcgggaattcttcatgcgttggagggatggaatgagcatgaatgtggtgacaaggtgcttgatatggacaaagtttggtctgctgcaattatgcatgggttctgcccagttgctcaaggttgatgattcagttgcaaagtatcagaataagttttagctggattatgctatgtggtcaccgtatcagaaagagagatgttctgttggcaagaagagatatagtatctgagtaatttcatctgccatggtttttaaaacattgttcatcatctcctttgatcaaagactggccatggctactttctgtataagtatctgtcctttttagtccatagt

SEQ ID NO: 559 - DNA, 2176 bp, Oryza sativa
atgggttctgttgccggcgacgccgcccgcctttcttatccacccactcgccgtgacaattccgtcgtcgacatgtaccatggcgtccctgtcgccgacccttaccgttgcgtaggctggaggacccagagtcggaagataccaaagaatttgtggcaagtcaggtggagctagcagagtctgtgcttgcgggctgcttcgacagggagaaccttcgccgtgaggtcactcgcctcttcgaccacccgcgccacggggcgccgttccgtcgcggcaacaagtacttctactttcacaactccggactccaagcccagagcgtgctctacgtgcaggaggcggaggttcttctggatccaaatgcactaagcaaggatgggacagttgctctttcgacgtattctgttagcaaggatggcaaatacatagcttatggcctaagtgaaagtggcagtgattgggtcactattcgtgtgatgaacattgctgataagcagactttgtctgacaaattgtcttgggtgagcagatgcagcttgtgaaattctcatctatcagttggacccatgatggaaaaggttttttctatggtcgataccctgcaccccggatgctggaactgaaacaaacattaatcttaatcatgagatatattaccatgtcgtgggatctgatcagtccgaagatatattatgctggaaagatcctgaacaccctaagtattcctttggtgcatcggtcacagaggatggaaaggaaggttgcgatcctgtcaataagctatactactgtgaaatttgtactcttcctcaagggatagaggggttcaaagagacaaaggggatgcttccatttgtcaagcttatagataactttgatgcccaatatcatgttgtggcaaatgatggtgatgaatttacatttttgaccaatagaaatgctcctaagaacaagcttgtaagagtagatatcaagaagccagaattgtggactgatattcttcctgaacatgaaagagatgtgctcgaatcagctgacgcggttaatggtaaccagttattggtatgttatatgtcagatgttaagcatattctgcagataagagaccttgtaactgggaacttgcttcataagttgcctctagaaattggttctgtttcagagatctcctgtagacgggaagacatggacgtctttattggcttcacaagctttctttcccctggtattatttacaggtgtaacctcacatctgcgatcccagaaatgaagatatttcgtgaaatttcagttcctggatttgatcgaacaaattttgaggttaagcagagtaaggatggaaccaaaattcctatgttcataatgtcaaagagagatattgaacttgatggatcacatccaactttgctatatggttatggtggattcaacataagtcttactccttctttcagtgttagtcgtgttgttttatgcaagaacatgggttttgttgtctgtgttgcaaatattcggggtggtggggaatatggggaagagtggcacaaagctggagcacgtgcaatgaaacaaaattgttttgacgacttcattgcttgtgctgaactcctcatttctgctggttatacgagttacaggcagttatgtattgaaggtggaagcaatggtggtcttctgattgctgcttgcgttaatcagcagcggcctgatctctttgggtgtgctcttgctcatgttggtgttatggacatgctccgttttcacaagttcaccattgaggtcatgcctggactaccgactatggttgttcagacaatgaagaggaattccactggcttatcaatattccccccttcataatgtgaggagaccttgggagcaaagttttgttaactgttgtcagtacccagcaatcatgctgttgactgctgatcatgatgatcgtgttgtgccattgcactcattgaagttgttagcaacactgcagtatgtcttgtgcactagcattgaggatacaccacaggtcaatccaataattggtcgcattgacgtcaagtcagggcatggagctggcagaccaactaaaaaaatggtttgcaatctattgcagattgatgaggttgctgatcggtatagcttcatggcgaacatgttagatgcgtcatggacggagtga

SEQ ID NO: 560 - DNA, 2141 bp, Oryza sativa
  N_region (355)..(355): n = any nucleotide
  N_region (576)..(576): n = any nucleotide
  N_region (893)..(893): n = any nucleotide
  N_region (899)..(899): n = any nucleotide
  N_region (956)..(956): n = any nucleotide
  N_region (1474)..(1474): n = any nucleotide
  N_region (1488)..(1488): n = any nucleotide
  N_region (1497)..(1497): n = any nucleotide
  N_region (1499)..(1499): n = any nucleotide
  N_region (1507)..(1508): n = any nucleotide
  N_region (1599)..(1599): n = any nucleotide
atgccattctcctacgccgccgcggcctctggctccgcgtcctcttctcgcaagccggttcccgtcgccgcggccgccgcccgccgacccgcgccctcgccggcagcggcggcggcacccgcgccctcgccgtcaaaccctagcgcggtctccgattccgacccctcctcgtactcctcctccggggaggagaccgacctcaccgcctccgatccggcggccgcctccgtcatctcctcctacctctccgttgcgggggatggcgccgacctctccaaggtcgggatcttcctctagctccgcggcgcgccgccgatcgccgccgtgcctgatatgcttcgatcccatccgcccntccgaccccgtctggtcctgctccgcctcctgcttcgccctcctccacctccactgcatccagtcatgggcacatcagtcatcctctgccgcgccttctcccacctggggttgccccaaatgccgcttcccctatcccaaatcccagactcccacctcctacctctgcttctgctccaagacggtagacccagctccggacccctggatcctcccccactnctgcggcgacgtctgtggccgacgtctcaatgcagaccgtgactctggctgtgagcacaactgcctcctgctttgccaccctgggccatgtccaccgtgcccggcaattgttccaaatgctatgtgcttttgcggctcacatcgtgagacgcgtcgatgctcacatcagcgttattcttgctcggggaaatgcaataaacgcctcggctgtggaatccaccggtgtcctgtggattgccatgatgggccttgcccgccttgtgcggtgcgaggaaagcacaaatgtgagtgtggagaaacaatggaggagaggctantgctcntgaaagggtgttccagtgcaagagggagtgtggtgggatgttgcagtgtgggaagcnatagttgtgagaggggttgccatgctggaaagtgtggaggatgcccactccaagggcgacgaacttgcccatgtgggaagaaagattatccaagtttggactgtgatgcagaggctgccacatgtggatcaacttgcgagaaggtgcttgggtgcgggcggcacaaatgcccagagcggtgtcatcgtggttcatgcgttgagacatgtcggcttgtgatcacaaaatcgtgccgctgtgggggtctcaagaaggagaggtgccttgctaccaagaattgacatgcgaaaggaagtgtcagcgtttgcgaaactgtggccgccatgcttgtagacgacgttgctgcgagggtgattgtgcaccctgcccagagagccccacaagtgccactatggagcttgcccaccttgcaaactaatctgcggagaagaactttcttgtggccacaggtgtaagctgagaggtgtcatggccccattgctcctccaaatcctgagttcacacgaaaccaataaaanggaaaaggggaaangcatatggnantctacacnnggaacaccatgcccgccatgccaagaagttgttttggtgccatgctttggacatcatcttggccaagaacgtgcaatacttggctccaaanggaggcagtttccatgtcagaatttatgtggaaaattaccgaattgtccccatctgtgctcagaaatatgtcaccctgggtcaatgtccgttgtgcatgcaacaaccttaaaaaagagtggatatgtcaagatgttctgaaggaataccgtcagtctggtcgtgacccaaaacaaatacctaaaaatcaatatgcagttggcctacttgcctgtggtgaagattgtgttaaaaaggttaaagctgcagattctgagttgcatctccggaaaattcaggagatcaagagacccctgctgtggaagttgaaaatgtgcccaagcgcaggaagaggcgtaaccgtggccaagaaagtgttgaaagctcaaaattccagcaggaaatcaaagctgttgcgttgaaatttctcctggttatttttctgtgcataatcgttgtagctggattgtaccttttgtggaaaggtgtttaccggctttctgattggatgaatgacatggaggagcagagggccaggcagaggcatttgaagcctggaagatt

SEQ ID NO: 561 - DNA, 2138 bp, Oryza sativa
  N_region (358)..(358): n = any nucleotide
  N_region (1545)..(1545): n = any nucleotide
tcggacatcaggaaatggttcatgaaggcgagaaggaagactagcaagtactttgcatccaaaacagaaaaggaggaagacaccagtgcaggaaaaggtaccgggagaggtttgcctaaaagaaaacttcagaaagtcagtgatgagcttgaggatgacatgaagcctttgccagcaaaggaagtccataaagaagaagaagatgatgatgacgacgactttgtggcaccttcaaaaaggaaaactccggtgaagccaccaccatcaaagaagttgaaggaagatgccaagaccccttccaaagcagctggaaggggaaggggaggagcctctgggggaagagggagaggagggggtnggagaggcttcatgaactttggtgaaaggaaggatcctcctcacaaaggggagaaggaagtcccggagggtgcccctgactgtttaactggtttgacatttgtcataagtggcactcttgacagagtcttgaacgtgaggaggcaactgatctaatcaagcgttatggaggccgtgtgaccggctctattagcaaaaagacgtacctattggctgatgaagacgttggtggagtgaaatcaaataaagcgaaagaactggggttcctaactgaagatggtttatttgatatgattcggaaatcaaagcctgcaaaggctactgtggcaaaacatcaaagcgacaaaaattcagaaaagcagcaaaaatcaccaatgaagagttctccagttaaagttgaaagaagagtctttgcaatggactgaaaagtatcggcccaaagttccaaatgacatagttgggaaccaatcaatggttaaacagcttcatgattggttgagaagttgggaggaccaattccttcattctggccagaagggtaagggaaagaagcaggctgatagtggagctaaaaaggctgtgttgttgagtggacctccaggtattggtaagaccacaactgctaaagttgtcagtcagatgcttggattgcaggctattgagaatgcaagtgatagccgtggtaaggcagactctaagattgagaaaggtgttgggggcagtacatcaaattctatcaaagagcttattagtaatgcaactctgaattatagtaacaaccgaattttgacagattaaaacgacccaaggctgtactagtcatggatgaagttgatggtatgtctgctggagatcgtggtggtgttgctgatcttattgctagcattaagatgtccaagattcctataatttgcatttgcaatgaccgttatagccagaaattgaagagccttgtaaattactgcttgctactcaacttcagaaaaccaaccaagcaacagcagatgggtaagaggttgatggaaattgccaagaaggaaggtcttcaagctcaagaggaacttgcagaaagagtacacggggatattcgcatggctcttaaccatttgcaatatatgagcctctcccagtccgtggtcaaatatgatgatataagacagcgacttaatagtaacacaaaaaatgaanatatttcccccttcacggctgttgacaactgtttggttttaatggtgggagactacggatggatgagagaattgatttgagcatgagcgatcctgatttagtccctctgattatccaggaaaactatatcaattatcggcctatcactgttgggaaggatgacagtggagttaaaagaatgaattttcttgctcgtgctgctgaatctatagcggacgctgatattgttaatgtacaaataagaagatatcgacagtggcaattgtcccaagctgcttgtttgtcttcatctatagttccggtgagcgaaacttcaataggtttggtggatggttgggaaagtactcgaccacaaataaaaacataaggctactggaagatgcccatagtcatattcttgcctcccagcaagcaaatttggacagagggagtcattgaggctggattacctcactcttctcttgagacaattgactgatccactgaagacaatgcccaaggatgaagctgtgcaaaaagtggtggagtttatggatacctactctttaagccaggaagactttgacacaattgttgaattatcaaaatttaag

SEQ ID NO: 562 - DNA, 2133 bp, Oryza sativa
atgcggcaccgcctccgcctcctcctcgtcgtgctcgtcgccgccgcctatgccgccggcgacgtcgcctcgtcgtactcgcagcctacgctgcccgctgttcccccggtgcaggccgtacggccgccgcccgcggcggtaggcggcgggtcgcactcgcagcccacgttccctcctcgcgcgccggtgcgggccgtgccaccgcccgccacgctggtctcgacggcgaccccgggggcgctgcttgcggcattcctcgccaaggcggatccctccgcgcatctgcggttccctctggcggtgtcgccgtgttcgcacccggccgtctcctgcagcgccgacggccagatcacccgcctggtgctcgagtcgtccgggctgaacgggacgttcgcgcccgccacgctctcccgcctcgtcgagctccgggtgctcagcctcaagagcaacgcgctccacggccccatcccggacctctccccgctcgagaacctcaaggcgctcttcctcgccggcaaccgcttctccgggccgttccccgcctcggtcgcgtcgctccgccggctccgctccatcgacctcgccgggaacaggctctccggcgcgctccctcccggcattgaggtcgcgttcccgcatctgacgttcctacggctcgacgccaaccactttaatggctccctcccggcgtggaaccagtcttcgctcaagctgctgaacgtgtcgtacaacaacttctccgggcccgtgccggtcacccccgtcatggcgcagatgggcgccgccgcgttcgcgggcaatccagagctctgcggcgaggttctccgccgtgagtgccggggctcccacctcctcttctttcacggtcctggcaacaacggctccgctgctcccccggtgcagagcgccgcggccaccggcgacggaccgcaacgcgacgacatcagcttgcccgattcatccacgccgcgttcgcggaaactgaggaggcgggccgccatcgccgttgcggctaccgccgcagcgttcgtggccgtgcttctactttgtgccatgattgcaatgaaaaggggcaagaagcgtcggcggccgagctccgcggcatacccgagccccaagaagagcgcggccatgtcggaggtgagcagggacaacaccgatctcggctatgtggagtgcgtgccggacgaggagacggcggcgatgatgatgccggaggagaaggcgcggcggctggagcggagcggctgcctaacgttctgcgcgggcgagggcgcgagctacagcctcgagcagctgatgcgcgcgtcggcggaggtgctcggccgcgggagcgtggggacgacgtacaaggcggtgctcgacggccgcctcgtggtcatcgtgaagaggctggacgcggccaagatcggcgccgcggcgctggaggcagaggcgttcgagcagaacatggacgccgttggccggctgcggcatcccaacctcgtctcgctccgggcgttcttccaggcgaaggaggagcggctgctcgtctatgactaccagcccaatggcagcctctactctctcatccatggttcaaggtcatctcgagcaaaaccacttcactggacttcctgcctaaagatagctgaagacatcgggcagggccttgcttacattcaccaagcatcccgacttgttcatggaaacatcaagtcttccaatgtcctgcttggttctgactttgaggcttgtcttacggacaattgcttggcattccttttggaatcatcagaagtcaaagacgatgctgcttatagagcaccagaaaacatgaagtccaacagaaggctaactccaaagtcagacatatatgctttcggcatcctcctccttgaacttatcagtgggaagcctccgcttcagcactcagtattggttgcaactaatcttcagacctatgtccagtctgcgagggacgatggagtggacgtcgaacgtctctctatgattgttgacatagcatctgcctgtgttcgatcctcgcctgaaagtcggccaactgcctggcaagtcctcaagatgattcaggaagtgaaggaagcagatactgccggagacaatgacagcgatcttactagcaattcctag

SEQ ID NO: 563 - DNA, 2041 bp, Oryza sativa
  N_region (326)..(326): n = any nucleotide
  N_region (328)..(328): n = any nucleotide
  N_region (1854)..(1854): n = any nucleotide
atggttctcgaacccctccccgccgcgaaccttcgcggagggaggatcccactcgttcgggtggttcggctctctctccgccccctggcggagggagaccgcgacgcgtcagggcacgccgccgactcgactatggagacggcggttcaccccaaggcgcgcttcaggcagcaggcacccttctacggcatcccccggtaaacccggagccggagactcctgttcagcgctggctggacgacgtggccaacttggtcactgctgcccagcggtagttggctacgggtggccgatccactgccactggtacatcacgtacctcggtnancctctcctcgtcggcgaggagaagggctcgtcgatcggccacgatctcgaggcggtccacggttccaacatcgtcgggggcctcgggaagccgaaggcatcatgacggcctctacgggacgcaggacgctcgagtaaacatcgagcgacgccgggacgagcgccgagctgcccgtatgggggaaggcgcctcctcatctggagcgccacgctcctcttcacgaggcggccctcctcccaaacttacccctggggggacgggttgtagggccttcgtggcgagtctccggaatgtccggtggcccccgaagtttcgccccaaccttacggagaagtatgatggtagcatcaatccctccgagttcctccagatctacaccacggttatcatggcggcagggggtgacgaccgggtcatggcgaattactttcccatggccctcaagggtcagtgtcaggtccgcaacactattccgtgcattccagcccacgcggttgtatatgcattctggaacagcgtgcgacataatcgtatgctggagaagatcgcctccaaggagcccgagaccactgccgagcttttcgggctggcagacaaggtggcccggaaggaggaggcgtgggcctggaactctcccagcaccggtgcggcggccgcggctacccccgagtctgccccccgctctaagcggcgagataggagaggcaaaaggaaaccagcccgctccgatgacgagggccatgtccttgcagcagacgggctcacgcaggccccgcgcaaaggaaaggccaccggcgataagccgagcctcaccgttccctatggcgagggccggttggcggacaagtggtgttcggtacacaacacctaccgccacagtctcgccgactgccgctcggtcaggaatttggccgagtggtttcgaaaggctgatgaggagaagcggcagggtcgacgggaggcaaagccccccgcgacctcgaccggcgaccggcttcaaggccatgagacgagagcttctggccactgttcccacgcatgaggtggtccggaaggcgcgctggtcagaggtgaagctcacattcgaccagagcgaccatccgacgatgctcgctcgggggggaaagttggccctggtggtctccccgaccatctacaacgtcaagatgaagcgtgtgctggtggatggcggggccagtctgagcatcatctccccggctgcctttgacgtgctcaaagccccggggatgaagctccagccgtcgctcctaatcattggcgttactccggggcacacatggccgcttggccacgtagagcttccggtgaccttcggtgactccaccaacttccgcaccgagcggattgacttcgatgtggcggatctcaatctgccctacaacgcggttctaggcagacccgcgttggtgaagttcatggccgccacccattacgcctacctccagatgaagatgccgggtcctgctggtcccatcaccatttttggtgatgtcaaggttgccctngcctgcgcggagcagcgtgcagacaacctggcggtggccacggagccacaggcccccgaggcctctggcgtcccgcgcttccaagaagcacctcacctcggctgacgaggtgcccgtcaaggaaatgccccttggcgacgatccgtccaagaccgccaagattggcggaaccttggacgccaaatag

SEQ ID NO: 564 - DNA, 1930 bp, Oryza sativa
  N_region (1177)..(1177): n = any nucleotide
  N_region (1690)..(1690): n = any nucleotide
atgcagggagcggcgtcgaatcttctggacgccggagctcaggcgttctaccctgccgtcggcgcgccgttcccgttccagcagcttccgcaccagctgtactgcccgcagccgccgccgccgccgtaccaggtcatgccggtgccgccgccgccgccgccggtgggcttgcctgtaccgccgctgccggcgacgatggcgccgcagccgggctactgcgtgccggcggccgcgacggtggtggacggtccggccagccgcgccgtcgtgctgagcctggtgccgccgcacgcgccggaggacgagatcgcccgcgcgatggctccgttcggtgcggtgcgcgccgtggacgcgtcggcggtggcgtccgagggcgtcgcgaccgtctacttcttcgatctccgctccgccgagcacgccgtcacgggggtccgcgagcagcacatccggcagcagtgccggctcggccagctctacgccgccgccgccgccgccgccgcctcgtccccgacctggcccccgccggcgtgggactggccccacgacgacaaccgcgggctcgtcctcggccaggccgtctgggcccacttcgccgccgcctccaccgtccccgacgacggcgccagccgcggctccctcgtcgtgctcaattccctccccgccatgtccgtgttcgaactccgcgaaatcttccaagcatacgaggtgacgtgaaggacgtgagggagtcggcgctgcggccgagcaacaagttcgtcgagttcttcgacacgcgcgacgccgaccgcgcgctccacgagctcaacggcaaggagctcttcggccgccgcctcgtcgtcgagtacacgcgcccttccctccccggcccacgcagcccttggccccgacgccgccgaggctgcaggcggcttggcggccggcgccggcgccgtcgcagtctgcgcagccgtcgtcgtctggctccggcaaggcgagggaaggcgtggtgcttctgcgcaggagctccgggaaaggtagctcgggtagccagtccaagggcggtggcaatgctggccacgagcggaagagcaagggcggcaagagcgccgcggcggcgtgttcgacggcggcttcagcatcgtcgtctaccgcaacggcgcccagcaagcaaagccagaaaggcggcggctggcggganctggagaggccagaagagcgggttggaggctcgcttcctgttcaaagaacccgaggcggacacgagaaccaccgtgatgatcaggaacatcccaaacaagtacagagccagaagctgctgctcaacatgctggacaaccactgcatcctctccaaccagcagatcgaggcgagctgcgaagacgaagcccagccattctcctcctacgatttcctctacctccccatagatttcaaaacaagtgcaacgtgggctatggcttcgtcaacctcacctcgccggaggctgccgtgcggctgtacaaggcgttccacaagcaaccgtgggaggtgttcaactcgcgcaagatttgccaagtgacatacgcacgcgtgcaagcagggcctggacgcgctcaaggagcacttcaagaactccaagttcccgtgcgacagcgacgagtacctgcccgtggtgttctcgccgccgcgggacggcaagctgctcacggagccggtgccgctggtcggccgntcgccggcaccgtcgtcggcgtccggggcgtcgtcgccgcccaagagctgcgccgcgagcgtcgacccactcgcgcaggagctcatgacagcgccgtcttcctccggcgacggcgcctcctccgcctcctcgtccaatgcccacgccgacgaggatgacgtccatggcgaaaccggtggtgaccgtggcgacgacgcggggctcgatctggagctacagcgcctaggctacactgactag

SEQ ID NO: 565 - DNA, 1926 bp, Oryza sativa
  N_region (261)..(261): n = any nucleotide
  N_region (291)..(291): n = any nucleotide
  N_region (486)..(486): n = any nucleotide
atgatcacggtggtggacctgtaccacgtcctgacggcggtggtgccgctgtacgtggcgatgacgctggcgtacgcctccgtccggtggtggcgcatcttctccccggaccagtgctccggcatcaaccgcttcgtcgcgctcttcgccgtcccgctcctctccttccacttcatctccaccaacaaccccttcgccatgaacctccgcttcctcgccgccgacacgctccagaagctcatcgtcctcgccctcctcgcnctctggtgccgcctctccgcgcgcgggtcnctcgactggctcatcaccctcttctccctctccaccctccccaacaccctcgtcatgggcatcccgctgctcaaggggatgtacgccgccgccggcgccgcagccggcgccgactccggcagcctcatggtgcagatcgtcgtgctccagtgcatcatctggtacacgctcatgctgttcctcttcgagtaccgnggcgcgcggcttcttgtcatggagcagttcccggacaccgccgcctccatcgtctccttccgggtggattccgacgtcgtctcgctcgccggcggcggtggtggagccgcggagctgcaggcggaggcggaggtcggggacgatggcaggatgcgggtcaccgtgcgcaagtcgacgagctcgcgctccgaggcggcgtgctcgcacgggacgcagtcacactcgcagtccatgcagccgcgcgtctccaacctctccggcgtcgagatttactcgctgcagtcgtcgcggaacccgacgccgcgtggctccagcttcaaccacgccgagttcttcaacatcgtcggcaacggcaagcagggcgacgaggagaagggcgccgccggtggcgggggccactcgccgcagccggtggtggggaagaggaaggacctgcacatgttcgtgtggagctcaagcgcctcgccggtgtcggagcgcgccgccgcagcagcagctggcgcggtgcacgtcttcggcggtggtggcgccgaccacggcgacgccaaaggagctcaggcctatgatgagtacagtttcgggaacaagaacgagaaggacgggccgacgctgtccaagctggggtccaactcgacggcgcagctccggccaaaggacgacggcgaggggatggcggcggcgatgccgccggcgagcgtgatgacgaggctcatcctgatcatggtttggaggaagctgatcaggaaccccaacacttactccagcctccttggtgtcatctggtccctcgtctcctacaggtgggggattgagatgccagccatcatcgcccggtcgatttcgatcctgtcagatgcagggcttggaatggccatgttcagcctaggattgttcatggcattgcagccacggatcattgcctgtgggaactcccttgcttcgtatgccatggccgtcaggttcctcgtgggtccggccgtcatggctgccgcctccatcgccgtcggacttcgcggggtgcttctgcacattgccattgttcaggtaagctgcaagttcaggcttctgcaccaaaatgcatccttaactgcaaaagaatctatcgtaactcaacaattgtcattgaattctcaggccgctcttcctcaaggaatcgtgccctttgtgtttgccaaggagtacaatgttcatcctaacattctgagcacagcgtatgatctctttaccatcttttctttttcagtattggaaaaatgtccccattttgagcgtgatattcgggatgctgattgctctccccatcacattggtctactacatactgctggggctctgaagagctctccaagtctcaactcaactgtgcaagaacttgatgttactgacagtttgattaggatttatggttctgttttagttgctcagattttgtttggatga

SEQ ID NO: 566 - DNA, 1926 bp, Oryza sativa
  N_region (1835)..(1835): n = any nucleotide
atgtggaagctcaagattgccgagggaggaccatggctaaagagtggaaacagtcatgttggaagagaaacatgggaatttgacccaaattttggaacaagtgaagagcgggaggcggttgaggctgcacggatagagttccagaagaataggttcagaacaagacacacctccgatgttttggctcgcatgcaggtataatgaaaacgatgggcactggccaggggatttcccaggcccactgtttaccactgcaaccatggaacatcacaaggagatctgtcgatatctgtacaatcgtcagaccagaacatcgatggaggatggggactacatgcagaaggtgaaagttccatgcttagcacagctctcaattatactgctctgagactacttggggagaatgttgatgatggaccagatatatccatgcataaagcaagaaaatggatacatgaccatggaggtgcaacaatgataccgatcttgggaaaagtgtggctctcgcttggagtttttgactggtcaggtgtaaatcctattcccccagaattatttcttcttccatctttcgttcctatccaaccagcccatgtcttatttgtatggaaaaaagtttgtcggtcctataacaagattggttatatcattaagggaagagctacatattcatccctataaaaagattgactggaaggaggcacgcaaattatgtgcaaaggaagatgcctataatccacatatgtggctacaagagtgcctatctgactgcctttatagttttggtgagccgtttcttacacgttggccaatttcctacatgagaaaaagagctctataccaaattgctgagttcttgaagtatgaagatgaaaattctcagtatatctgcattggtgctgcacagaagttatccatgttgtgctgttggattgaaaatcccaattcagatgcattcaagcgtcatttggctagagtagctgattttctatgggttggcgaagatggcatgaaagttcggtgggatgttgctttcgcagtccaagcgatattagcgtgtagcatcgcagaagaatttggaagtacccttaagaaagcacatggtttcataaaaacttcccagaatccttctggtgacttcagcagaaagtaccgtcacatatctaaaggaggatgggccttccaggttgcagatcaggggtggcaggtttcagattgcacagcagaagctcttaagacagagatatatgcagacatcattgtggagcattacgtagagtgtacctcatcagtcatccaagcattggcattgttccgggagaagtaccctgggcatcggaaagatgaaatagatcaatgcatcaggaaagcaacagaattcatcgagaagttacagaatgatgatggatcatgggatcatggggtatttgcttcacgtatggaacatggtttgcaatagagggtctgtcagccgtggggcagtgttatgatgacagcacctgcattcggaaagcctgtaagtttctgttatcaaagcaactaacaaatggtggatggggggagagtcatctttcatccagaaccaaggtcaatactgcatgggcaatgttggcactcatgaaagctggacaggtattacttctctcacaggtagagagagaccccgctcctctgcacaaagcagcaagacttatcatgagcatgcagctcagtgatggtgactttccacaagagggaagtttcttgaaaaatggccccttgtgttatatggcttatcgcaatatattcccaatatgggctcttggagagtatcagaaattagtatttcagaactntcagacctctagcatcaagcaaacaaatatagctccatctgctggcaatgctgctctgaagaattcagcaagtacaacagcgccaacttga

SEQ ID NO: 567 - DNA, 1920 bp, Oryza sativa
  N_region (22)..(22): n = any nucleotide
  N_region (107)..(107): n = any nucleotide
  N_region (125)..(125): n = any nucleotide
  N_region (153)..(153): n = any nucleotide
  N_region (156)..(156): n = any nucleotide
atggcggcgagcagcgccgatntcgccgacgacggcttcccgggccgggcctcttctcgcagggcgtttcctaaacctacgacgacgtcatcttcctcccgggctanatcgggttcccggccgangccgtggacctttccacccgcctttccngcngcatccccctttccatcccctgcgtggcctcccccatggacaccgtctccgaggccgccatggccgccgccatggcatccctcggcgccgccgccgtcgtccactgcaacaccgagccccacctccaggcctccatcgtccgcgccgccaagtcccgccgcctcccgttcgtctcctccgtccccttattctcccccgcctccaccccatccctctccgacttcgctggccacgactacggcctggtcacggagcgcggcgattcgctctccaagctcgtcggcgtcgctgttgcagccgagacctcctctcgtcaggctcccctccctgtctccgagtacatgcgccccgccccgcgctcggtgtccgcctcttttgatttcgagcaggcggccgcctttctagcggacgagggtttggattatgcccctcttgtatccgatgatagcgaggtaatcgacctcatcactgtcaatgatgtggagcgcatccggagctatccgaagctaggcaagccgtctcttggagcggacgggaagtttgttgttgcggcttccattgggacccgtgaggatgacaagcgaaggctggagcagctagttaaggcaggggcaaatgcgattgttgtagatagctcgcaggggaactctatctaccagattgatatgatcaagtatgcaaagaagatgtacccggaagtggacttgattggaggtaatgtggtgacgattgcgcaggcacagaatttagttgcttctggggtggatggattgcgtgttgggatgggctctggctcaatttgcactacccaggaggtttgtgccgtgggccgaggacaggacaggctacagcagtgtataaggttgcatcttatgccaaagatcacaatgtgccagtcattgcggatggtggaatttcaaactctggacatattgtgaaggctttgtctctgggggcatccactgttatgatgggtagcttcttggctggcagccatgaagctcctggtacttacgagtacaagaggatggccaccgtgttaaaaaataccgaggcatgggctctctcgaagcaatgacaaaggggagtgacgccaggtacctaggcgataccctcaagcttaaagtcgcccagggagttgttggagcagttgctgataaaggttctgtgctgaggttcattccttatacaatgcaagctgttaagcaagggttccaagatcttggtgcgtcatctttgcagtcagctcatgagctgctgcgatcggagactatcaaattagagaggtgaggactggcgccgcgcaagttgaaggggggatacatgggctagtgtcgtacgagaagaaggcattctagttccagatttaatcaagcatcaggacaaagcggctattgcatcctaaggaaacaactgttccctatctttacctgatcaatgattttcaagaacagctcgtctgcttgatgaacctggcatgctgtttcatcggtcggtagcatcaccatccgtttaccatcgcaacgacatgatcgattgtgctttaacttcagttttgctagaggggaagctatcccatgatttgcctcaaccggttgatgctgatgtactttgcctttttgtgcaaacttccaaccgcaaactcatcctgttgtagcgaattcggcttatgtttttttttcatgaataagaataaataagtttggtttgtactttcggccaattcggccccagatgttatcgttgcttgcttttgtttcctga

SEQ ID NO: 568 - DNA, 1912 bp, Oryza sativa
atggccgcctcctccgcgcagctcatcttcctcctcctcctcgccgttcttgccgccgcctcatcgcgcaacgacgaggaggcccgcgcgctgatggcgctcaaggagagcctggacccggcggggcgggtgctgggctcgtgggcccgctccggcgagccctgcgggggctcgttcgtcggcgtgacgtgcgacagcggcggccgcgtgacggccatctcgctgcagggccgcgggctctccgggaccctccctccggcgatcgccgggctccggcggctcaccgggctgtacctccactacaacggcatcaagggggctatacccagggagattgggagcctctcggagctcaccgacctttacctcgacgtcaaccacctgaccgggccactgcccgtggagattgccgccatggagaatctccaaggttttgcagctgggttacaatcagttgacaggcagcataccaccccagttaggcaagctcaacaagcttgctgttcttgcacttcagtccaaccagctgactggggccattccagcaacactcggcgacctaacacagcttgcacggcttgatttgagcttcaacagtctttttggttccatcccttcaaagattgctgaggttccattgctcgaggtctttgatgttcgcaataattccctttctgggagtgtcccagcagttgagaagactgaatggtgggttccagtatgtgaacaacaaagcctcaatcagcgaatacggacaatcactgtgagggatctggttgctcgaaatcttcgaatgcatctgtgggagtgcttgttgttggtgtggttgcagtggtgattggcgccgcattctgcggaatatttgcattctcatattaccgccggcaaaagcagaagattggcagctcactggaggtttctgatagcaggctcagcactgaccattaccaacagaaggaagtttgccgaagaagtgcttccccacttatcagtgttgagtactcgaatggatgggaccctttgtctggtggaggcgttgggtcatccggcgaggttggtgatagctttaggttcaaccttgaggaggttgaatgtgcaactcagtacttttctgaggttaatttgctgggtaaaagtggctttgctgcgacatacaagggaattctacgagatggatctgttgtcgctgttaagagtctcaacaagacaagctgcaagcaagaagagtcagatttcttgcgtggcctcaagatgctcaccgtgctgcgacatgagaaccttgttggcttgaggggtttctgctgctccagggggaggggagagtgcttccttgtctatgattacatggttaatggttgcttgtcacagtatctggatgttaaggagggttctggtgctaatgtccttgattggccaacaagagtttccataatcagaggcattgcaaaagtacatgcacagtaagaaagctaacaagccatcagtagtgcaccagaacatatcggccgagaagatccttctcgaccaccacttaacgccacgcttgtcggtcccagggctgcacaagctccttgctgatgatgttgtcttctcgaccctgaaggccagcgcagcaatgggataccttgcccctgagtacgccactacgggccgattcactgagaagagtgatgttttcgcatttggtatcgtcgttctccaagtcatcacaggcaggagggctgtctcacagctgaaggtcagcacagttgccaatgaccttgatagcctgatcgatgagaacctcaatggtgtcttctcaagaactgaggcagctaagcttgctgccattgctgcactttgcacaagcgagacggcgagccagcgtccaacaatggaagctgtggttcagcaactcagcaactgccactga

SEQ ID NO: 569 - DNA, 1875 bp, Oryza sativa
  N_region (14)..(14): n = any nucleotide
atggagaaaatgcnaaagacgcaatcaaggaaatccagctcatggtggtgggatagccatattagtccaaaaagttctaagtggctctccgataacttagaagtgatggagacacagataaaagaaacgctggagcttattgaggaaggagaaccctctgcagaaaaggctggggttcttattactcacgtacagaactttcagcagatgtatcgtgttcttgccaagcgatatggcaatgtgactggagaattgcgcaaaaatatcccatcatctctgcaatcatctgtctcctttggcatctcagaatcagattctgaggcacagtctccttcatcaccagagcgtgacttgcaagagaagatgtcacaaaagcaaaaaccgcgatcagattgctttgatgtttctattggctctggtatgagttctgacgtatccaagaaggggagtgatgggtcttcatcatcttcagaatctgatttagagcttgatgaggctaaagaagaaaatggcaatagcattttttatgccctaagtcaaaaaattattgagcttgaggatgagcttcatgaagtaaggggtaaacttgatgcttccgaggaaaagaacatgcgttgccattgtaattttggtgctaactcagaactgtctgaacatgaggaaaagcaacaggtttcagatgtggaaaccagtagccttcagaaggatcttgatgaagtcaaaagtgaaaaggaagcattggaagctgttgtattggtgaacaaagatgaaattgataggctgaaggaatcaatggtatcggcagccaagcagtttgaagttgaacttgcgcatcgtgatactgaaattgataagtgcaaacaggagcttgaggtactttcggagaagtatctgcatgatatatctgctcttgaggctgaaattggaaagctccagggagtcatcaaaacctttgaagacgactttgcaaaaatatcacaggagaaattgatgctcgaatctcgggttgaagagcttgagcagtcagttaacagctcaaattattcggtttctgagatggttaatctgcaagaactaatgaaggatacacaagcagaattagaaaaggtttcacaggagaaagaagtgctcagagaacgtgttcttgaatttgagcaacttttgggggactttgagaattcaggcatggaggttgcaaagctaccagaaaccatcaagaacttgggagcccagatagagggaacactacaggagaaatcagtactccaggacaggattaaggagctggagcaggctgtccatgattcattgcagaaccattcactggagaagtcctctctgagtgctgagctttcaaaattatctgaagccaatgcttctcttgaagccaagttggcatccgtggaggcagagctcaaacaagtttacgacgaaaaggctaatgaatccctcaacagcgagaaggaaatctccaggctgaatcaagaactggccaatgtcaaaaccgatctggaattgctgttatccgagaaatccctggtggacaacaaagtaaccactctactaaccgacatcacaactcgcgatgaaaagatgaagcagatggatgatcaactgaatcagcttcagcttgagcattccaagctaatggcacaggccgatcttgcccgcaagtccctgtcagaactgcatgctcgggtatgcgagctcgagaaagaggtagagatgcagaagcttgtgatctctgagagcgccgaggggaagcgcgaggcgatcaggcaactgtgcttctcactcgagcactaccgcagcggctaccaggagctgcggcagctgctgcatgaccagaagagaccactggtgatggcaacatga

SEQ ID NO: 570 - DNA, 1865 bp, Oryza sativa
  N_region (1133)..(1133): n = any nucleotide
  N_region (1196)..(1196): n = any nucleotide
  N_region (1463)..(1463): n = any nucleotide
aggcttacctatgaactagactacaaagggaacatttgtggcagtaggcatggtgacccggatttgcatgagcttgatgttagatattggatgaacccaaaccaggtgtaccaaagtggggtcaaggacaacaagattaaccttgctgatgccaaagccatctgcctgatggagtgccccattccagcagcagacggattaaactttgtttgtgattatccagaaggggacattcgcctctctatcgatgattggatcaacagggactatgattattttgagtttctcgcaccagatatgagaaatagttctcttcagctgcagggtccatgctaccctgtcatatttccaagtgtgaatggtctactggagctgccaatttattgcgcgagcatccaatgtctctttgaagcattggcagcagatgggtggtatcaacatcgacgaaaatattctcatagataaaacaatacacaaggccatcaattctaaatcttcagtcttgaagctgcagagatacgttgctgacattgggaagtcatggcctgtgttaattgtttgcggtggactgctccctcttttcttgtcagttatctggttgcttctgattcgttattttgttgctgccatgccatggataactgtagtgctcttcaatgctctagtaatctccgttactatgtttttttatattaaaggctggctggttaggcaatgatcccttgacagttgtaattggtgaaagtgatccatatgtgcatataactggacgggcatttctgtcctccatagctattatccggcgtatactgatagcaacacctgtcctgaagcttcaggttgctgcgaaggtcattggtgaagttcaggcactaattattttcccagttgtgccatactttatcttcgctatcttttatatgttctggttttctgccacactccatctcttcagctctggtcaagttctccgaaatgactgcaatacagattgttgctcatatgatctgaagttgggcaaagtaaactgtgacaactgctgtgggtacagcatccattacacccctcatattggtattgccattcttttccacttatttggctgttactgggcaacccaattctttattgcntgctcttcaaccgtgattgctggatcagttgcttcatactattgggcacgtggtgaaatatcnataccatttgttacagttgtttcttcaatgaagcggttgttgcgttacagccttggttcagttgctataggttcacttgttgtatctgctgttgagtgggtgcggtttatactagaatgcctcagacgcaagttgaagctagttgattccgctcgcgaaagctgctttgggaaaatgacatcatcctcttctcaatgctgcctgggctgcatagactggaccctcaagtctgtgaatcgaaatgcctatataatgatagccattacngggaaagggttcttcaaagcttctgttctcgcaactggtttgatcatgaataacatactgcgcattggaaaagttaacgtcattggagacgtcatcctctttctggggaagctctgtgtgagcttgttctgtgcgctctttgccttccttatgttagacactcacaagtacaagtctgcacataacaagatatcatctcctcttgttcctgtagtgtgggcacttggttttatagtcgccaagcttttcttccaagtcgtcgagatgtcgatcgacaccataatcctctccttctgtcaagattcagaagagcaccaagggaacgcgcagtacgctccccctctcctagtggagacactggatgaacagagtgaactccatagactaactcaagggccttga

SEQ ID NO: 571 - DNA, 1854 bp, Oryza sativa
atgaacgtgttcgcgggggtgggcgggggcgcggcggggaaggaggcggggacggtgggcggcggggcgctgctggagctgacgccgcacaagctggcgctgtgccacctcgtgcaggtgttcgcgccgccgccgcaggccggggtctcggcccccgcgctgcccttccccttcgagtccgtcgcccaccacaaccgcctcggcctcttcctcttcgccctcacccgcgaacctccactggaagagcttctaaggcagctgaaggcagttgatgctttggttaatggctggctctgtgagcagcttacaagtaccctttcagcgcttacttcaccggatgatctgttcaacttctttgataagctacgagctggatccaaatagtcagcttggagtttttcttcgttgctgtatactttccttcaatacctgtcaggtccaatttttgcagtatttgaatgctcttacccatgatgactacgttgctgcattagataatcttcaccgctattttgattacagtatgagagtgctttgctctgcttaggtaacttgcactgttattttggacatccgaagaaagccttagaggtaatgtaagacagaagcagtgcgtgtttcccaaatggattcatgcctggcctatatattaggagctatttccaatctgttatcaaagataggcatgtcaagcacagttggaacaattggttctccttattcacttggaaataacatcggattaggcacaccgctgtccattcagcaacagctgcttgttcttttaaagagatcacttaagcgagctgataccttgaaacttacaagcttgctgtcctttgatcacctttctcttgcaaaatttgatctgaagatacctgcatcagtattgcaattagctggctcagcttatttgctgagggccactgcttgggaacactacgggagagtgctccgatggttcgaatgaattcgttggtctatgcaacctgctttgctgatgctgcaagtcttgcagttcatcagagctgtcgctagcatatgtcaagctaattcagcatttagcaactttcaaagggtattcaggcattctctgctctcaagcttgctgaagagaagttcccgttgtcagcaaattcacatatccagcttcttaaaatgcaattattgcacgagcgtgctctgcatcgtgtagaggacacctgaaagttgcgcaacagatctgtgatgagtttgctgtgttgtcatcttctgttagtggagtcgacattgagctcaagacagaagctaggttacggcatgctcgcacgcttcttgccgcaaaacaatttagtcaggcagcaaatgtggcaaattctcttttctctacttgctacaagtacaacatgcaggtggagaatgcaagtgttcttttattacttgcagagatacagaaatctgacaatgcagtccttgggcttccttacgcattagctagtcaatcattctgcaaatcatttaacttagatctgcttgaagcctcggctacactaactcttactgaattatggctggctcttggatcaacccatgcaaagagggccttgagtcttgtttgccaaagccttccaatgatccttggtcatggtggacttgagctgcgcgctcgagctcacatagttcttgcaaaatgctatctgtccgatccaaaattctcagtaccacgaaatggcggcagaagcatactacctaaaggcaatggtctacaacaatctaggaaaactggatgagagggaggaagctgcagcttctttcaaggagcacacactcgcccttgaaaacccatataacgaagaggattcacttgcttgctga

SEQ ID NO: 572 - DNA, 1831 bp, Oryza sativa
ccaaatggggacatctacgtggggagcttcgatgggttagtccctcatggaccgggaaagtatatgtggacagatggagctctttatgatggtgagtgggacaagagtaaaatgaccgggagaggactaattcagtggccttctggtgcatcctatgaaggtgacttccgtggaggtttcattgatggagcaggcactttcaagggagttgatggctcagtttacaaaggttcttggaggatgaacaagaagcatggtatggggacaatggtttactctaactccgacacttatgaaggtttctggaatgaaggtttacctgatgaatttggtaaatacacatgggctgatggcaacgtatacattggaagatggaaatcaggcaaaatgaatggcagcggggtaatgcagtggataaatggtgatactcttgactgtaattggctcaatggcctggctcatggcaaaggttactgcaaatatgcatctggggcttgctacattggtacatgggatagaggactaaaggatggccatggtttatgaacgggaatacgtacaaggagtgcttatcatggaatattatctaatgcttaacttgcaacttggcatcagaggtatactgtaggtaaaattacccctgtgcctttgcgtgaagttcgttcaaatgattttggacctcgagcacgaataaaaatgtacttcccttgtgagggatcccagtatacccctccgcactactctgtcgatttcttttggaaagactattgtccgatggtcttccgaggaatcttcgagaaatgtttcatatcgatgctgcagattacatgatgtctatatgtggtggtgatagtctaaaggagctttcttcacctgggaaaagtggcagcattttctatctttctcaagatgaacgttttgttataaaaacattgaggaaaactgagctgaagctgcagatactattgaagatgcttccaaagtattacaatcatgtcaaagcttatgataatacgctcattacaaaattctttggcgtgcacaggattactctgaaacctggaagaaaggtccgttttgttgtcatgggaaatatgttttgtactgaactgcgaattcatcgtaagtatgacttaaagggctctacacaaggccgatcaacaaagaagcaaaatataaatgagaacacaacactaaaggaccttgacctatcatatgtttttcacgtggataaaccatggagggaggcacttttcagttcaggcagatagctcttgattgtatgttcctggaatcccaatctataattgactatagcatgctattgggaatccatttccgagctcccaatcacctgaagcgtatcacatcataagggatttctactagttgctgctgatgagccaggtccagcagtacgtggttcgcacataagaggaagcatggttagggcagcagaaggtggttatgaagaagttgatcttgttttgccaggcactggaagaggttccgtgttcagctaggggtgaatatgccagctcgagctcggaaagtgcaagaggacgtgaacgtagaagtagaaaacagggacaccattgaagagtatgatgttgtcctataccttggtatcatcgacatactacaagagtataatgtgtccaaaagagttgagcatgctgtcaaatcactaaaattcgaccctctttcgatatcagctgttgatccaaatttgtattcgagacgatttataagtttcttggagaaggttttccccgagcaagattgaacagtaaatagatattgcaagtttcttggagaaggctttccctga

SEQ ID NO: 573 - DNA, 1822 bp, Oryza sativa
atggcgccggctccggctccggcgggctcggccgaccagttccgcgggcaggcgaggctgccgcggttcgcggcgccgcggcggtacgagctccgcctccggcccgacctcgacgcatgcgtcttcaccggcgacgcgtccgtggtcgtcgacgtctccgcgcccacccgcttcctcgtcctcaacgccgccgacctcgccgtcgaccgcgcctccatccgcttccaggtgtcgctgttcgaggacgacgagatcctggtgctggagttcgacggggagctgccgctcggcgagggcgtgctcgccatggacttcaacggcacgctcaacgatcagatgaggggattttaccgaagtatgagtataaaggggagacaaaaaacatggcggtgacacagtttgaggctgtggatgctcgacggtgcttcccctgctgggatgagcctgcattcaaggcaaagttcaagttaacacttgaagttccatctgagctagtagcattgtccaacatgccagtagcttgtgagacaattgctggtcctatcaagaccatccactacgaagaatcgccgcttatgtcaacttatttggtggccatagttgttggtttgtttgattatgtagaaggtgtaacatcggaagtactttgatactccatatccactccctaagttggacatggttgctattcctgatttcgctgctggggccatggagaactatggattggtcacttaccgggaagtttctttgctttttgatgagcagtcttcatcagcatctttcaaacagaatgattcttttttccctcaatggaatatctggacacagtttcttgatagtacaacctctgctctcaaattggattcacaagctgagtcccatcctattgaggttgaaatacaccatgccagtgaggtagatgagattttcgatgccattagctatgacaagggtgcttctgttattcgtatgctacaaagttacctaggtgcagagcgttttcaggtttcatttcagaaagcattaacttcatatataaaaaagtatgcctactcaaatgctaaaaccgaggacttgtgggctgttcttgaagaggtatctggtgaacctgtcaaggatttgatgactacgtggacgaagcaacaaggttatcctgttatcagcgtgaagcttaaagggcacgacttggaacttgaacagggtgctggcatctggattgtccctataactttaggatgctgttcatggattaagttgaacattgatgaaacaggattttatagggttaaatatgatgatgagcttacagctgcacttcgaaatgcattgcaggccaagaagctctctctaatggacgaaattgggcattgtggacgatgcacatgccctttctattgcctgcaagcaaacattgtcatcgttgctccacttgctgtatgcgttccgtgacgaggctgattacagtgttctttcacacataaattctaaattaggttgggaccctaaagatggtgaaagccacctgaatgcaatgctcagaccaatgcttttggttgcccttgttcagcttgggcatgataagactataaatgagggattcaggcgtttccaaatcttctttgatgatcgcaacacttcccttcttactccagatactagaaaggttcgcaatcaagatgcatatcgtgtgcttggaggtgtcataatagaggcacgtgaaactgcatggtcctggttgaaggttcttcgcgacccgcactaagcccgggtacgagaggacactgaagcagagcctcgagagggtgctgatcaacgccag

SEQ ID NO: 574 - DNA, 1770 bp, Oryza sativa
atggggaactgctgccgctcgccggccgccgcggcgcgggaggacgtcaagtcgtctcacttccccgcatcggccgggaagaagaagccccaccaggcgcggaacggcggcgtggggggaggcggcggcgggggcggcggcggcggaggaggaggaggagcggggcagaagcggctccccgtgctcggggaggaagggtgcgagctgatcggagggatcgacgacaagtacgcgctggaccgggagctcgggcggggggagttcggggtgacgtacctgtgcatggatcgggacaccaaggagctgctcgcctgcaagtccatctccaagcggaagctgaggacggcggtcgacgtggaggacgtgcgccgggaggtcgccatcatgcgccacctccccaagagcgccagcatcgtgtcgctgcgggaggcgtgcgaggacgagggcgccgtgcacctcgtcatggagctctgcgaaggcggggagctcttcgaccgcatcgtcgcgcggggccactacacggagcgcgccgccgccaatgtcacccgcaccatcgtggaggtcgtccagctctgccaccgccacggcgttatccaccgggacctcaagcccgagaacttcctcttcgccaacaagaaggagaactcgccgctcaaggccatcgatttcggcctctccatcttcttcaagcccggtgagaagttttctgaaattgtgggaagcccatattacatggctccagaggtattgaagagaaactatggtccggaaatagatatttggagtgcaggagttatcttgtatattttgttatgtggagttcctccattttgggctgagactgagcaaggggtggcacaagccattcttcgtggaaatatcgatttcaaacgcgaaccctggccaaatgtttcagaaaatgctaaagatttggttcgacgcatgttggagcctgatccaaaactcaggttaactgcaaagcaagttcttgaacatccatggcttcaaaatgctaagaaagctccaaatgttcctcttggagatattgtgaagtcaaggctcaaacaattttctagaatgaatagattcaaaagaagagcactaagggtcattgccgatcatttatctgctgaggaagttgaggacataaaggagatgttcaaggctatggacactgataacgatggcattgtatcttatgaagaattaaagagcgggatagcaaaatttggttctcatctggcagaatcggaagtgcagatgcttatcgaagcttgttgcttaggtgtaggagctgaacctgcacttgtagattgtaggactaggaaactagctgcaataggagtggttttacttttcaccatatgtgtatcaagaaacttatgtgtagtggatacaaatggtaaggatgctctagattatggtgaatttttggctgtctctcttcatttgcaaaggatggcaaatgatgagcacctccggcgagccttcctattttttgacaaggatggcaatggctacatagagcctgaagagcttcgagaggctctagtggacgatggagcaggtgacagcatggaagtggtgaacgacatattgcaagaagttgacactgataaggatggcaagattagctatgacgaatttgtagcaatgatgaagacgggcacagattggagaaaggcgtcccggcattactctagaggaagattcaacagccttagcatgaagcttataaaggatgggtccgtaaaactggtcaatgagtga

SEQ ID NO: 575 - DNA, 1769 bp, Oryza sativa
atggctgtgaaggcgagttctgcagataacaggaccagaagcaccgtgtcactatgcatagtgattggcatgtgctgcttcttctacatccttggggcatggcagaagagcggatttggaaagggggacagcattgcgctggagatcacgaagcgaacggactgcacaatcttgcctaaccttagcttcgacacgcacctcgctaagcaggcaaggcctcgcgatctcgtttcgccggcgaagaagtttaagccgtgcccggatcgctacacggattataccccttgccaagatcagaacagagcgatgaagttccctcgggagaatatgaattacagggagcggcattgcccaccgcagaaagagaagctgcactgcctgataccgccacctaagggatatgttgctccattcccatggccgaaaagtcgggactatgttcctttcgcgaattgtccctataagagcttgacagtcgagaaagcgatccagaattgggttcagttcgaaggcaacgtcttcagattccctggtggaggaacacaattccctcaaggagctgataagtacatcgatcaacttgcatcagttgttccaatcgccaatggaactgtcaggactgcattggacactggctgtggggtggctagttggggagcttacttattaaagagaaatgtcttggcgatgtcatttgcgccaagagattcacacgaggcacaagtgcagtttgctctggagaggggtgtcccagctgttatcggtgttcttgggacgataaaactcccttacccatcaagagcctttgacatggcccattgttccaggtgtttgattccatggggagcaaatgggaatatacatgatggaagttgatagggttctaagacctggtggatactgggtgctttcagggcctccgattaattggaaagtgaactacaagggttggcagcgtacaaagaaagatcttgaggcggagcagaataaaatagaggaaattgctgaccttctttgttgggaaaaagtcaaagagattggtgagatggcaatatggaggaaaagattaaacactgagtcttgtccctctaggcaagatgaatcaagtgtgcagatgtgtgactcaacaaatgcagatgatgtctgtacaagaagatgaagccttgtgtgacacctattcctgatgtaaatgatccaagtgaagttgctggaggtgcaatcaagcccttcccaagcaggctcaatgcagttcctccaaggattgctaatggcctgattccaggtgtttcatctcaggcctaccagaaagacatcaaaatgtggaagaagcatgtcaaggcttatagcagtgtgaacaagtacctcctcactggaagatacagaaacattatggacatgaatgcaggttttggaggatttgctgctgccattgagtccccaaaatcttgggtgatgaatgccgtgcctacgatttcaaagatgtcaactctaggggctatttacgagcgaggattgattggcatataccacgactgtgcaacatggaagacatcctactggagatggaccgcgtcctgaggccagaaggcgccgtcataatgagggacgatgtcgatatcctgacgaaggtgaacaggctcgccctcggcatgaaatggaacacgaggctggtcgatcacgaggacggccccatggtgcgtgagaaggtgctgtatgctgtgaagcagtactgggtaggcggaaaccagactgcagcagctgcagcatga

SEQ ID NO: 576 - DNA, 1749 bp, Oryza sativa
  N_region (150)..(150): n = any nucleotide
  N_region (643)..(643): n = any nucleotide
atggggtccatggagcagcagcagccggagtcggcggcgccggcgacggaggcgtcgccggagatcatcttccggtcgaagctgcaagacatcgccatcaccaacaccctcccgctccaccgctactgcttcgagcggctcccggaggtngcggcgcgcccatgcctcatcgacggagccaccggcggcgtgctcacctacgccgacgtcgaccgcctgtcccgccgcctcgccgccgcgctccgccgcgcgccgctggggctccggcggggcggcgtcgtgatgagcctgctgcggaactcgccggagttcgtgctgtccttcttcgccgcgtcgcgcgtcggcgccgcggtgaccacggcgaacccaatgtccaccccgcacgagatcgagagccagctcgccgccgccggcgccaccgtcgtcatcaccgagtccatggccgccgacaagctcccctcccactcccacggcgccctcaccgtcgtcctcatcgacgagcgccgcgacggctgcctccacttctgggacgacctcatgtcggaggacgaagcgtcgccgctcgccggcgacgaggacgacgagaaggtgttcgacccggacgacgtggtggcgctgccgtacttcgtcggggacgacgggntctccccaagggggtgatgctaacgcaccggagcctgagcacgagcgtggcgcagcaggtcgacggcgagaacccaaacatcgggctccacgccggcgacgtgatcctgtgcgcgctgcccatgttccacatctactcgctcaacaccatcatgatgtgcggcctccgcgtcggcgccgccatcgtcgtcatgcgccgcttcgacctcgccgccatgatggacctcgtcgagcgccaccgcgtcaccatcgcgccgctcgtgccgcccatcgtcgtggccgtggccaagagcgaggcggcggcggcgcgagacctctcgtcggtgcggatggtgctctccggcgcggcgcccatgggcaaggacatcgaggacgcgttcatggccaagctccccggcgccgtgctcggacagcaggggtatggaatgactgaggcagggccagtgctgtcaatgtgcctagcattcgccaaggagcccttcaaggtgaagtccggtgcgtgcgggacggtggtgcgcaacgccgagctgaagatcatcgaccccgacaccgggaagtcgcttggccggaacctgcccggcgagatctgcatcagggggcaacagatcatgaaaagaggttacctgaacaacccagaggccacgaagaacaccattgatgcagaagggtggctgcacaccggcgacatcggctacgtcgacgacgacgacgagatcttcatcgtggataggctcaaggagatcatcaaatacaggggcttccaggtagcccctgcagagctggaggcccttctcatcacccatccaagcattgctgatgctgctgttgttgggcctgaaatcggagaaataccagtcgccttcgtggcgaaaaccgaagggagtgagctgagtgaagatgatgtcaaacaattcgtagcaaaggagaggtgatctactacaagaagatccgggaggtcttcttcgttgacaaaatccccaaggcgccgtcagggaagatcctgagaaaggaactgaggaagcagctgcaacatcttcaacaagaagcttaatttacaaccggcctcagacatgaaaagaatttagcatgaacaagcaagttccatga

SEQ ID NO: 577 - DNA, 1749 bp, Oryza sativa
  N_region (1082)..(1083): n = any nucleotide
  N_region (1085)..(1085): n = any nucleotide
  N_region (1087)..(1088): n = any nucleotide
  N_region (1096)..(1096): n = any nucleotide
  N_region (1129)..(1129): n = any nucleotide
  N_region (1160)..(1160): n = any nucleotide
  N_region (1184)..(1184): n = any nucleotide
  N_region (1214)..(1214): n = any nucleotide
  N_region (1354)..(1355): n = any nucleotide
caagctttgagtgcccgtggttgtgcaaaccttgaagtaattctaaatgcagatgcaaagaatgtggaagagcatcatgagggggactgtcagaaattggattgctgtcatcaaccaaagccattggggccggtgcaagttctggtgataagcaggatgagttggaggaagggttttctgatctggaggttccaccagaagctcataaaaaggatttagatttgacatccgatgagagttctgatgaggacaccattgatgcaattggcttgtctgaagtggaggctgatgcaaaacctgaggagccgataaagaagtcacaatccactcttcttaaggctttgctggaatctccaagggttgatgtcgctggagcattgaaaaaatggcttaatgatggcaatacattggatagaagtgagctcttttatgtccttcttattcttcggaggcggaagctctacatcaaagccttgcagctgcagcttctggagtatgttgaagaatccaaactaattgatcttggagaacgtgattatgcttcacgcgtggatttggtagctaaaacccacagtatttacaaagctgaaaagtacattgagaatgttcctgcatctcataggggtgagattgtatacaggactcttttggctaactgtgtggctatagccaatgtgaaaaaagcagaacaagtcttcaataagatgaaggaccttggatttccagttagcgtattttcttgcaatcagcttctgctactctacaagagagtggacaagaagaagcttggtgatgttctcacaatgatggaaaaggagaatgtgaagccttccctcttcacttataagctccttgtagataccaagggtgctgctagagatattgaagatatggaaaaggtcattcaggcaatgcaagcggatggaattgaaccagatcttctgtttcaagccacaattgcaaggcactacatatttggtggttatcgtgagaaatctgaggcaattttggagcaaatggtgggggatgatatcaatgaaaaccgttctgcttgcaaatttgttttacccctgtatgctttnntngnnaaaaaagntgatgtggaaaggatctggaaggtttgtgaggncaatgctcgtctagatgagtgcatgtctgcnatagaggcttttggtaagcttggngatgttgaaaaggccgaggagatatttganaatatgttcaagacatggaagacactctcgttcgaatactacaatgctatgctgaaggtgtatgccaacaaaaagctttttgacaaggggaaagagctagcaaagcggatgggtgatgatggttgcagactagggccctnnacattggattcacttgtgaagctctattcggatgcaggagaggtggagaaagctgattccatattgcataagctatcatataagaacaagattaagcctatgtacaccacatacttgatgctgcttgatagttattccaagaaaggagacgtccataatgcagagaaattgttcagcaaggtgcggcagatgggttatactgggaggattagacagtatcagctgcttcttgaggcatatctgaatgcaaagaccccaccttatggattcaaggagaggatgaaggctgatgacattttccccaatagggctgtggcatctttgcttgctgctaccgatccgttcaacaggaagaacgcaatgtctgaattgctcgattaggttcttctgttag

SEQ ID NO: 578 - DNA, 1746 bp, Oryza sativa
atgccgctggggcaacgcgcgggggacaagagcgagtcccgctactgcggggtggaggtgctcgacttcgttgatcccgactaccggccgacgcccgggtccgtcctccccgtggcggcgtcggacctcgtcctcggcccggcccagtggagcagccacatcgtcgggaagatcagtgagtggattgatttggatgcggaggacgagcaactccggttggactccgagatcactctgaagcaggagattgcgtgggcgtctcatctctcgttgcagagagttgtgaatcatattttgcaaggcctgaccaatttgcagttgttctgtctctttcttaagttgtggcttaggatacctctggagaagtctgaacctatggatgaagaccatgatggagcaaaagataatagcgacatggactcttgggaatggtggaattcatttagactattatgtgagcatagcagtcaactgtgtgtggcgcttgatgttttagcacactgccatctatgaattcactagggcggtggtttggggagcctgtaagagctgcaattcttcaaacaaatgcttttctgacaaatgccagaggttatccttgcctgtcaaagcgccaccagaagctgcttactggattttttaaccattcggttcagtaccttgactacattgcttacatatatcagaggatggacccacttcctgaacaggaacgctttgagtatagggattttctgcaatctcctctccagttgcagcctctaatggacaatttggaagctcagacatacgagacttttgagaaagataccgtgaaatatacccagtatgaacagtatcaaagagcaattgctaaggcattggttgatagagtttccgatgatgatgtctcaacacaaaaacagtgctgatggttgttggagcaggccgggggccactagtgagagcgtcgttacagtcaatgcaggctgctgaggaaactggccgcaagctaaaagtatacgccgtcgagaaaaatcctaatgctgttatcacccttcacttgatcaaattggaaggatgggaaagcttggttactataatttcaagtgacatgcggtgctgggaagcccctgagaaagcagatattttggtcagtgagttgcttggttcctttggtgataatgaactttctcccgagtgtctagatggtgctcagagattcttgaagccagatgggatttctattccttcatcgtactacactagctttattgaacctataacagcatcaaaactacacaacgataaagcacataaagatattgcacattttgaaactgcatatgttgtcaaactacaccgaatagcaagacttgcaccaacacaatcggtttttacttttgatcatccaaatccctcaccaaatgctagtaaccaaaggtataccaagttgaaatttgagataccacaagagacgggatcatgcctcgtgcacgggatttgctggatattttgatgccgtattgtataaagatgttcatcttggaattgaaccaaacacggctacaccaaacatgtttagctggttcccgatcttcttcccattgagaaagcccatctacgtaccgtcgaagacgcctatagaagtgcacttttggcgatgctgcggtgcaacaaagggtgtggtacgagtgggctgtgacggcaccttctccatcaccaatccataacagcaatggtcgatcatattgggtcggcctataa

SEQ ID NO: 579 - DNA, 1742 bp, Oryza sativa
atgtatcgggtgaagagcgagagcgactgcgatatgatccatcaggagcagatggactcgccggtggccgacgacggcagcagcggggggtcgccgcaccgcggcggcgggcccccgctgaagaaggggccatggacgtcggcggaggacgccatcctggtggactacgtgaagaagcacggcgaggggaactggaacgcggtgcagaagaacaccgggctgttccggtgcggcaagagctgccgcctccggtgggcgaaccacctgaggcccaacctcaagaagggggccttcaccgccgaggaggagaggctcatcatccagctccactccaagatggggaacaagtgggctcggatggccgctcatctcagttgccagggcgcactgataatgaaataaagaattactggaatactcgaataaagagatgccagcgagctggcctacccatctatcctaccagcgtatgcaatcaatcctcaaatgaagatcagcagtgctccagtgattttgactgtggcgagaatttgtcaaacgatcttctgaatgcaaatggtctttacctaccagattttacctgtgacaatttcattgctaattcagaggctttaccttatgcaccacatctttcagccgtttctataagcaatctccttggccagagctttgcatcaaaaagctgtagcttcatggatcagtaaaccagacagggatgctaaaacagtctgatggtgtgcttcctggattgagcgataccatcaacggtgtgatttcctcggtggatcaattctcaaatgactctgagaagctcaagcaggctgtgggttttgactatctccatgaagccaactctaccagcaagattattgcacctttcgggggtgcacttaatggcagccatgcctttttaaatggcaatttctctgcttctaggcccacaagtggtcctttgaagatggagctcccttcactccaagatactgaatctgatccaaacagctggctcaagtacactgtagctcctgcgttgcagcctactgagttagttgatccctacctgcagtctccagcagcaaccccttcagtgaaatcagagtgcgcgtcgccaaggaatagtggccttttggaagagttgattcatgaagctcagaccctaagatccgggaagaaccaacagacatctgtgataagttctagttcttctgtcggtacgccatgtaatactacggttcttagcccagagtttgatatgtgtcaggaatactgggaagaacaacatcctggtccattcctcaatgactgtgctcctttcagtggcaattcattcactgaatccacccctcctgttagcgctgcatcgcctgacatctttcagctctccaaagtttccccagcagcacaaagcacttcaatgggatctggagagcaagtaatggggcctaaatatgaacctggggacacttcacctcatcctgaaaacttcaggccagatgcattgttttctgggaatacagctgatccatcagttttcaacaatgccatagcaatgcttctgggcaatgacttgagtatcgattgcagacctgttcttggcgacggtatcatgttcaattcttcctcgtggagcaacatgccacacgcctgtgaaatgtcagaattcaaatgaattctgtatttggtatttgccagacgctacagcagattcttggtatcgttcttgctcattgtttggatcataa

SEQ ID NO: 580 - DNA, 1723 bp, Oryza sativa
  N_region (95)..(95): n = any nucleotide
atgtccaccgacgacgcccggttctcctcggaggccggggacgaggacacccccgagaccgacggcggcggcggcggcggcgcgggcgccgacgncacgccggtgttcgtctggggcaccaacatcagcgtgcaggacgtcaacgccgccatcctccggttcctccgccacttccggacccgcgcgacgccggccgcgtcgacccggtcatggacgagggcaagatatcgagaagatggtgtccatcaagggtatgataattcggtgcagctcggtgattccagagctcaaggaggctgtgttccgctgcttggtttgcgggttctactctgagcctgtaatggttgatcgagaactctatgactcttgtgcataaccgatgcagaggtttgcagataagcagatcataaagttgcaggaaacaccagatgagataccagaaggtggcactccacatactgttagtgtcttgatgcacgataagcttgtagatgctggaaagcctggagacagggttgagactgggatatacagagccatgagtattagagttggcccaactcagaggacagtgaagtcgattttcaagacgtacattgattgccttcacataaagaaggagttgtcaaagttgccagatatatatgacagattaactaggtcattggctccaaacatatgggagctggacgacgttaaaaggggcctcctttgccagcagctttttggtggaaatgctttgaggcttccttctggagctagtttccgaggcgacatcaatattttgcttgttggtgatcctggaacaagtaaatcccagcttctccaatacatgcacaaactgtctcctcgtggcatttatacaagtggcagaggaagttcagctgttggccttactgcatacgttaccaaggatcctgaaactggtgaaactgttcttgagagtggagcgcttgttttgagtgacaaaggtgtttgttgtattgatgaatttgataagatgtctgataatgctcgaagcatgttacatgaggtgatggaacaacagactgtctccattgccaaggctggaataattgcatctttaaatgccagaacatcagttctagcatgtgcaaatcctactgaatcacgttataatccaaggctctctgtgattgacaatatccatcttcctccaacactgctttctagaggtttgacctcatttatctgatattggacaaggcagatgagcaaactgatagacgcctggctaagcatattgtttcgttgcattttgagaatccaaactacataagttatgcaaggaagcatatacaaccacagttatctgatgaagctgcagaagaattgactcgcggctatgttgagatgaggaaaagaggaaacagccctggtagcagaaagaagataactgcgacagctcgacaaattgagagcttgattcggctcagtgaagcactggcccgaatgcgattctctgaaatggttgaagtacaagatgttgtagaggccttcaggcttctcgaagttgccatgcagcaatcggcaactgatcatgccactgggtacaatcgatatggatcttatcatgactggaatatctgcgagcgaaaggcagaggcgggaccagttgctggaagaaattaggaagcagagctctatggaagttcatctgcatgatgtaagttggagatctagtctgcattgcttgcattga

SEQ ID NO: 581 - DNA, 1711 bp, Oryza sativa
atgctagcatgtgtacaggcggcaggagacgagagctacacgttcatgaaggacgcggtgcagtccccgcaggtgtcgtactacgactacatcatcgtgggcggcggcacggccgggtgcccgctcgcggcgacgctgtcgcagcgcttccgcgtgctcctgcttgagcgcggcggctcgccgtacgacgacgagcggatcgggaacatgacacgcttcgcggacacgctgtccgacacgtccccctcgtcgcccgcgcagcggttcgtgtccgaggacggcgtgatcaactcgcgcccgcgggtgctgggcggcggcagctgcatcaacgccgggttctacacgcgcgccagcgacgagtacgtgcgtggactcgggtgggacctcgaggcgaccacggcggcgtaccggtgggtggaggacgtggtggcgttccagccggagctgggtccctggcagtcggcgctggagagagggttgctggaggccgggatcgcgccgcagaacggcttcacgttcgaccacctcggcgggacgaaggtcggcggctcgatcttcgacgccgaggggcggcgccacacggccgccgacctgctccggtacgcccgcaccgacggcatcgacgtgctgctccgagccagagtggccaagatcctgttcaacgtcagagccagtggcgcacggggtggtgttccacgattccgaggggcagatgcacagggcttacctcagcaacggccgtggcaacgagatcatcctctcggcgggcgccatgggcagcccgcagttgctgatgctcagcggcgtcggccccgccgaccacctccgctcgttcggcatcacgctcgtcctcaaccagccggccgtcggccagggcatgtccgacaaccccatgaacgccatctacgtgccgtcgccttccccggtcgaggtgtcgctcatccaggtggtcggcatcactgaggtcgggagctacatcgagggcgccagcggcgcaaactggggcgtccggcgctccggctccggcggcgacagaccgcaccgcaacttcggcatgttctctccacagttccgcggcggcttcatcctggagaagatcctcggcccgctgtccacgggccacctcgagctgcgcaaccgcaaccccgacgacaacccgtcggtgacgttcaactacttcgcgcacccggaggacctccggcgctgcgtggccggcgtgtcggtgatcgagcgcgtcatcaggtccgaggccttcgccaacttcacgtacccgtacttctccgtcgagacgctgctcaatatgacggcggggttccccgtcaacctccggccacggcacgacaacgactccacgtcgctggagcaattctgcaaggacaccgtcatgaccatctggcactaccacggcggctgccaggtgaacagggtcgtcgacgccgagtaccgcgtgatcggcgtcgacgcgctgcgcgtcatcgacggctccacgttcaacgcctcgccgggaaccaatccgcaggccactgtcatgatgctcggcaggtatgcttcctcccttttgcttctttggcatctttacacgcacagtatcaatgtatcgtcagtatatttaattagtcgtcctaaccgtatttattctttctccaagattgcagagatctttaggtcgaatcctatctgtcctattaaaacgattgatcatgtctgttaa

SEQ ID NO: 582 - DNA, 1708 bp, Oryza sativa
atgtatgagcgccgcctcctcgccgccgcctccctcctcctctccgccgatgcgcagggccaaccaccccacgccgccgcccaactcggagtcggagtcacggccgagctcaagccgcaccaggtcgatggcgtcgcgtggctcatccgccgctaccaactcggcgtcaacgtcctgctcgcagatgggacttggcaagaccctccaagcaatctctttgttgagctacctcaagatccactccatctcacctggaccatttgtcttatgtcctctaagtgtcaccgatggctggctctcggaattcaataaattttgtccttctttgagggttatccagtatgttggtgttaccgtttgatgtcatgatgacaacctatgacatagccttaatggaccaagaatttctttcacaaattccttggcactatgttgtcattgatgaggcccaacgtcttaaaaacccatccagcgtatgtactgtataatgtccttgagcaacgctttatcatgccaagacgtctgctactaacgggcacccctatccagaataacctttctgaactatgggcattgatgcacttttgcatgccctcgatttttggtaccctggatcaatttctttctactttcaagcaatcagctgagagcatttatgctgagacgaactaaagctttactaattcaaagcggaattttggcattgccttcattaactgagttaacagtgatggtacctctgacacccttacagaagaaactatacttgtcagtattgagaaaagagctgcaaacactacttacatttactggaggattgtcccgccaccagtctctgcaaaacatcgtagttatacaactgcgaaaagcttctagtcatccatatctattcagtggcattgaacttgagccttatgtggaaggggagcatttggtttagcaggctagtggaaagcttgtcatgctagatctcattcttaagaagctccatgaagtaggccatcgagttctgctatttgctcagatgactcaaacactggacattcttcaggacttcttagaattgcgtcagtacacctatgaacgtctggatggttcagtgcgtgctgaggaacggtttgcagcaataaaaagtttcagctctcaacctaccaagggtgttgtcagagatgataatcagagtggagcttttgttttcatgatatcaactagagcagggggtgttggccttaatctcattggtgctgatactgttattttttatgagcaagattggaatcctcaagctgacaaacaggccttgcagcgtgcacaccgcattggacagttaaataatgtattatcaataaatttggtatcacaacgcacaattgaagaggtcatcatgcgaagagcagaaagaaaacttaagcttagccacagcgttattggacgctcgattatatttggcttacacctatttgatgaaaaagtagtgttgatgcgtagtcatgaaccttcagaaaaggatgaacgggcattcgaaatcaatccaaatatgacagacaacagtggggctgttgttacgaggagttgtgttgataattcaggaacctggggacatggaggaatgttcgatgctttggccaatctctcaacatgcattccagatgcttataatcgtgcttctgaatttgatgatctccacctggcagatcttcacttgatt

SEQ ID NO: 583 - DNA, 1696 bp, Oryza sativa
atggagaagatacaatctgattgcccttatcctggatgtttcttctgtgttatgaaagaggcaaaccctagtaaacgaagagcaagtgtactgaagttctttagggaacttccttctcaagatgatgatggtcaagttctccctattagtggtctttggaatactgcgatggcacatccaaatgaccctgaattcatcaacttggggatatttgaatgcatgtcagctcttatatggaagggactgaaaaacaggcgttggctttctcatgatcagaatatttacatcccatattatgcagcacatataattggatcctacacaatgaatatggaggagtttgcggaacgtgctgttcgtgctggtgtaatacctccattggttgaactcttacgaggcaggctaacttgggtagagcaaagggttgctgttagagctttggggcatttggctacatatcccagtacatttcctgcagttgctgaccatggagaagtacttgaacttgctattcaacttgcttcaagttctctagagattgtgtattctcatttttaccagtttgtggaccgaaggattggctaccactgtgaccttctcacacgaggcatgggtggtgtggaaatggaatctcgcaaagctgaggaatgggcaagccaacttcagtgctggtctttgcaactcattaactgcttcgcatttaagtctgaatttctccatgatatttgcaaggctgattttctagtcaagttacctggaatgtggggtggactcgtaaatgagaactcacctgctggtgttggtttgctaagaactatctgccagagcaagcttggccgaggccatgttgctaatattcctagtgttgttgaagctctctgcaacattgcccgttcttcagatgactggcaatacatggctgttgattgtttactttggttggtgcaggattcaaatacatgtcataagacactgatagatttagcaaatatctcaatgctcggtgattataaaaaacttggtgacaccattgtcacagtgctccaagaataaattggagaagaatatgccaaaggaggatcttcatataaaacaagcagcagcattggttgttaagttggaaggcaattcacttttctcttcagggaacatagcaggagctgcagcaaagtactctgaagcacttgcgctgtgtccaatgaagtctaagaaagaaagagtggtgctttatagtaatcgagctcagtgttatctactcctgcagcagccattggctgccataagtgatgctacccgtgcattgtgccttcatagtcctttgaatcgccacgcaaaaagcttgtggagaagggctcaagcatacgatatgcttggtttagcgaaagagagcctgttggatgcaattctctttataaatgaatgctctcagtcgaatgatcctgacctgtcattaaagcaaaataaagttcctgattatgctgagcgtttggtgaagaagcagatgcgcacagcttggttattcagggaagcagctttgaaacatgggggaatccattgcgagggagaagctagtgatgcttttggtcaagaggcagatgactctgagtgggaaacagccagtgaaagtgatgctgagaatgatgcaacaggagaggcagatgatgaaactgaatggaagaacgataaccaagtatga

SEQ ID NO: 584 - DNA, 1676 bp, Oryza sativa
  N_region (11)..(11): n = any nucleotide
atggccgccancgccgccgccgccgccgcggcgcctcccgccgacccgccggactcctccccggccgcttcctcccctccgaggcccagcccggaggagctggtcgcccgtgcagtggcccccgtcaagcccgccttcctccgcccgccccctgtcgcggagaagaagtccaagcgccagctcaagcgcgagcgcaagcaggtgagctcttgcaaatatggtgattcttgccgtttcagccatgacatagatgcctatttggctcagttctgtgcacagaaaccagctgaccttgagggcacgtgcccatttaccaatctggaccagttgtgtccatatggactaacttgtcgatttttgggtacacataaggacatccatgcagcttctggaaatctttcagagaaacatgagataaatgctttaaacaaagacattcaaaagctcttatggaagaacaaatataagttccccaaggccagtgcacagatcaagcttcttggtcttaagcatttacgtgaaaagaagataatagattttcgggagaagttgtaccttgctcccttgactactgtcgggaatctgccttttcggagactctgcaaaaccttgggagctgatattacttgtggagaaatggccatgtgcacaaatcttttacagggacaagcttcagagtgggctttgctgcgacggcattcatcagaggatttgtttggggtgcaaatttgtggagcctatccagatacagtagcacgaaccgttgaacttgtggataacgaatgttcagttgatttcatagacataaatatggggtgcccaattgatattgttgtcaacaaaggtgctggatcatcattgctaacaaaacctatgaggatcaaaagtattgtacaagcagcatccactgttactgaaaaacctttaactgttaaggtaagaactgctttctttgagggaaggaaccgtgctgattctatagtttccgacatctatgactggggtgcgtcagccataacagtacatggtcgatcccggcaacagcgctacagcaaacttgctgattgggattatatttaccagtgtgcccagaaagcccctgaccagttgcatgtcgttggaaatggtgatgtattctcttttactgactggaacaaacatgtttcaggctgctctaaaatatcgacaagcatgattgctcgaggtgcactcataaagccttggatatttactgaggttaaagaacaaaggcactgggatattacatctggcgagagattcaatattcttaaagattttgtgagttttggtctggaacactggggttccgattccaaagggtgttgaaacaacacgctattttttactagaatggctaagctacacctgccgctacataccggttggcctgttggatgtgatcccgcaacgtttgaactggaggcccccaagctactgtggccgtgatgatcttgaaaccctaatgatctctgattcagcagctgactggaggatctcagagatgttgcttggcaaagttccagaagggtttacgtttacacccaagcacaaatccaatgcttatgatcgagctgaaaacggctaacaccattcatctctcttcaaagcttgtgcccagccttggagctccatgctgcctgataatgtttacttga

SEQ ID NO: 585 - DNA, 1665 bp, Oryza sativa
gttgagaatagtggaccggaggctgtttctcaatttctactggcgtttcccaatgtccaagcaaagaacttagcagctataagagcatttggtactgaggaaaaggtgaaaggtccaagtatggtccttccgattgaagttgttcagccttctggagtgcccccagaacttacattcttttcggcatctttatccaaacctttggagaaggggaagactcttcacttagatgtcctgaccgtatttacgcactctgtccagccattccccgaagaaatcacacaagctgaatcgcagcttgttgtctatcaggacagtgctcagtatctgtcaccttaccctgttaaggtacagacacttagtatcagattgcctggtggaagagttgagtcctacacaaagtacccaaacacaaaacttgcagagtcagaactaaaatatggaccatatgaagatcttccaccgttttcctactcccctatggttgtgcactatgagaacaataacccttttgcagttgcaaaggaagttataagggagatagagatatctcactgggggaatgtacagattacagaacattacaacattgctcatggtggtgccaaactcaagggtgaattttccaggattaccaatctagaccgtacataagaggggtctcatcttttaggcatcttattgctagactgcctccaagggcacattctatatactacagagatgagattggtaacatttcaacatcacatttatggagtgattccaagaaggagccaaggtttcctttgtttggtggttggcaaacgacctttaccattggttatggtttacctcttcaagactttgttttcaattctgatggaaagagattcctcaatatcacatttggttctccagtggaggagattctcatagaaaagcttattgtgaagacaggttgttctgcctgaaggttcaaaggatattgatatttcagttccatttccaacaaagcaagagcaagagaagtattcacaccttgatatttctggaaggccagtggttgtcttggagaagcttgatgttattccagagcataatctatatttccagcaggtttactacaggttcaacaacatctctctactcagagaaccgatgatgttgataactggcttctttctcctcttcatggcctgtattgtttacatgcgcactgacatgtcaatctctaagaattctccttcttatctggcaaaggtgcagtgggatgagtgtctagcagctcatgataaactggagacctcattacacgagttatctaggtcaggagatgttaaatcatgcaaagtggctcgtaagacagctgatgcacagtttaaggaattagcaaaagagttgaagccattgttgacatccctgcagtcatcctctcagtcttaccagatatggccaaaggtagaggaattggttgccaaggagagagagttgcaggataagctcatgacaaggcattccactgtggttgacagctttgaaaagaagttgcgagggcaagatgtggagaacaggattgctgcccagcagcagaaagttgctgccctgaggcaagaggtcgaatctcttttagagtacatcagtgagatctgagcgaatccggcgctgcatggtatgtcaatttag

SEQ ID NO: 586 - DNA, 1649 bp, Oryza sativa
atgcagagggaagtggggccgcaggtggcccctccgatgttcctacaccagtggaaccccaggatgtgggactgggatagccgctgttaggccgagcaagagggttcggtctggatcgcctggatcaggcggtggtggcggaagctacccgatgtgccaggtggatgactgcagggcggatctgaccaacgccaaggattatcaccggagacacaaagtctgcgagatccacggcaagaccacgaaggcgctggttggcaaccagatgcagcgcttctgtcagcagtgcagtagagatttcacccgctctctgagtttgatgagggtaagaggagctgcagacgtaggctcgccggtcacaacaggcggcgaagaaaaacccagccaacagatgttgcttcgcagctgctgctacctggaaaccaggctgtgccatcaaccatggacttgctagcagttttatcaactgccctcgaccgtactggtagaatcatatttaaactatttggcaaggagccaagcacaatccctgggaaccttcgtggagagattgtaaattggctcaaacacagccccaacgaaatggagggatacattcggccaggttgccttgtactatcaatcagcttgaagaaaatcttctccagcgagtaaacacattagtccaaggttccgatttggacttctggagaaaaggaaggtttttagttcgaactgatgcccagttggtgtcatacaaagatggtatagcgcttatcaaaatcatggagaacatggaataccccagagttgacctttgtctcaccaattgctgttgttggtgggagaaagacctccctcattcttaagggccgtaatctgacaattcctggcacccacttggacgttacttcattgagggtcgagaataggttcagagggaacagctttcctgttatcattgccaattcaagtgtttgtcaggagttgagaagccttgaagctgagcttgagggttcacagtttgttgacggctcttcagatgatcaggctcatgatgctaggcggctaaagcccaaggatgaagttttgcactttctaaacgaacttggatggctcttccagaaggcagctgccagtacatctgctgaaaaatctgattcttctggtttggatttgatttctcaactgcacgcttcagataccttctgctgttttcaagtgagcgggactggtgctctcttactaaaactcttctggaaatccttgccaagaggagtttggccagtgatgaactatcacaggaaactctggaaatgctctcagagatccatctcctgaacagggcagtgaaaaggaaaagtagccacatggcgcgcttgcttgtacagtttgttgtcgtgtgccctgatgattccaaattgtaccccttccttccaaatgtagctggcccaggtggtttgactccattgcacctggctgcatccattgaggatgcagtggatattgttgatgctttgacagatgatcctcaacagattggtttgagctgttggcactcagcgctagatgatgatggtcagtcccctgaaacttatgccaagttgaggaacaacaatgcgtacaatgagcttgtagcacagaaattggtggacaggaagaacaaccaa

SEQ ID NO: 587 - DNA, 1622 bp, Oryza sativa
  N_region (248)..(248): n = any nucleotide
atgcggcgggggaggggaagaagagggcggaccaggcggtggcgttccacgagctgttcacgttcgccgacaagtgggacctggtgctcatggcggcggggagccttggcgcgctcgcccacggcgccgccatgccgctcttcttcctcctgttcggtgacctcatcaacggcttcggcaagaaccagaccgacctccgcaccatgaccgacgaggtctccaaggcgtgctggatgtacaccggggancggcaggtgatcgcgctgaggaaggcgtacctggacgccgtgctgcgccaggacgtggggttcttcgacacggacgcgcgcacgggggacatcgtgttcggggtctccaccgacacgctgctcgtgcaggacgccatcggcgagaagagtcttggccaggcattctcaaatcttggagccttcagcaaagggaagattgctggttacaaactgttggaggtcattcgccagaaaccctctatagttcatgatcataaggatgggaagttgctggcagaggtccatggaaacatagaattcaaagatgttacttttagttatccgtcaaggcctgatgtcatgatctttcgggatttctcccttttcttccctgctgcgaaaactgttgcggttgttggaggaagtgggtcgggcaagagtactgttgtggctttgatagaaaggttttatgatcctaatgaagggccaggttttgcttgacaatgttgatattaagacacttcagttgaggtggctgagagatcagattggtcttgtaaaccaagaacctgctctttttgcaacaactatacatgagaacatattgtatggaaagcctgatgctacaatggctgaagtcgaggctgcagcaactgcatccaatgctcatagttttatatctactcttccgaatggctacaacacgatggtaggggaacgaggaatacagctgtctggtggtcagaaacagcgtattgcaatagctcgtgctatgctgaagaaccctaagatactgctccttgatgaagctacaagtgctctagatgcaggctcagaaaacattgtccaagaagctctagaccggctgatgactggaagaacaacggtagttgttgcccaccgtctctccactataagaaatgttaacatgatcgcagtcatccagcagggccaagttgttgagactggcacacatgatgaacttctaaaagggagctctggagcgtatgcctccctgattcgttttcaagaaatggcacaaaacagagaccttggtggtgcatctacccgcaggcaacggaggaggaggtgatccaggcggcaaaaacagcaaatgtgcacggcttcgtcagtcagctacccaacggctacaagacggcggtcggcgagcgaggcgtgcagttgtccggtggccagaagcagcggatcgccattgccagggcggtgctcaaggacccggccatcctgctgctggacgaggcgacgagcgcgctggacgccgagtcggagtgcgtgctgcaggaggcgctggagcggctgatgaaggggcggaccaccgtgctggtggcgcaccgcctgtcgacgatccgaggcgtggaccgcatcgccgtcgtg

SEQ ID NO: 588 - DNA, 1612 bp, Oryza sativa
tatgactacatcattgttggaggtggcacagctggatgcccattggcagcaacgttgtcccagaagtacaaggtgctcttgctggaaagaggagggtctccttacggcaaccggaacatctcacatcttgagaacttccacatttgcttggcagatgactcgccaaattcaccatctcagggatttatctccactgatggtgtcatcaatgcccgggcaaaggttctaggtggtggaactagtgtcaatgctggtttctacagccgagctgacccaagtttgttcaagacgcaggctgggatgcagagttggtaaaccaatcatacccttggatcgaagagaggattgtttattggcccaatattacaccgtggcaagctgcactgcgggacgggctgcttgaagcaggggtctcaccttacaatggatacagctatgatcatctctttggaacaaagaggctggggtacaggcacactgctgctgacctccttgctgctggaaatcataacaacctcagggttctccttcatgctagtgtgaccagaataattttcaacacagaacaagccaaggaccattggtgttgaattcaaggatgagaatggggggcagcagcatgccttccttacccgaaacagagacagcgagattatcatctctgctggtgcaattggcagtccccagctattgttgcttagtggaattggacccagaaaggaacttaaaaagcataacatttctgtagtccttcgcaacgaacatgtgggtaaagggatgtcagataatccaatgaattccatctttatacctaccaaggatgcccctaagcaatcactgattcagactgttggaataaccgacggcggggcgttcatagaagccagcagtggtttcagccagtcaccagatagtatccagtgccaccatggaatcatgtccgctgagtcaacgattcccccaaagcaaagaaatctagatgcagtcaagaagtatgtacataaaaaatataacctacccaaagaagtattcagtgggggttttatactttcgaagattgatggtccattgtctactggtaatctagttcttgtggatactgacatcaatagcaaccccacggttaccttcaactacttccagcacccaaaggatctcagtcggtgtgtctatgggatcaagaccatagagagaatactgaagacaaaccatttcactaattttaccctcaatggtggtggatatccaatggaagtggtgctcaacatgagtgtaacagcaaacataaacttgatacccaagcacacaaatgacagcacatccatggagcagttttgcagagacacagtggtcaccatctggcattaccatggcggatgccatgtgggcaaggtggttgaccaacaataccgtgtgattggtgtctcaggccttcgtgtgatcgatgggtcgaccttatttaggtcaccaggaaccaacccgcaagccacagtcatgatgatgggcagtggtcagatacatgggagtgaagattctaagaagaagattaggacgagctgctggagtataactgattcttggaccttattgattatgtaagaatgtgacttag

SEQ ID NO: 589 - DNA, 1575 bp, Oryza sativa
  N_region (250)..(250): n = any nucleotide
atgtatcaaataaaaattaaaaaaaaaaaacgagatgaggtgttggttgcgacaaggtttggggaaaaagttagagattttgcaggccttgcggatgacggacgagtctccggcgacgacgatgccggcgagcggcgcctttccggcgatgtcggcgtgcggtgcggcaatgtgggcccaaatcaaaagttgggctggattggttgggcctcccatggatcatcacctcgctgacgcatccgcctcctgnctcgcctccactcccatcggacgcgccgccgccgccgccgccgtcgccaccgccgggttggtctcctcaccggcgcatccggggaagctacgggttagcaagcgctcatggacgggagccgccggaagcggcagcggcgaagaccacggccgccgtcgccgcaggccgagccctcgccaacggagctcaccgctctcggccaaagaggtctcatggacagcatgcttcaccaaatcattgctttgcttagctcattccaggacttgcttgcttttagtggcacttgccgctcttggcgagctgcattatcttccttcccatccatatatactttcaccttcccacctcttcacctgaaaccagatatacctaattcccatccccattgcagcagttttaggtacactcttttatataaatgcagatggcagcttggtgatccatcccaagagaactttatcccttcgctgttcagctccacaaaatactccaaatcgcatgcgctatttgggttgttcatagggtatctcatcttctcatattatgagaattgcctccttgttgatatgtacactggcgctaaggtgaagcctcccaaactacaatccgcaggcaacaaggaaacatactatggcatccttactgctccacttaatttgccaatatcgcatctcctactttgttcgagatcgtccatattctattggcaggttggaacgaattcttggtcagagcacccttttggcggtgagcgcattcttcagattgtgctcttcaaaggtgagttttttgcgatggactttcatcacaggctccataccatgcgctttgcacctcagctcagcatgcaggaagtaggggttgtgtggggagaagaaatgtttgtgggtgtacattttaagccgtggctggtgatcagcggtgacatgcttctcatgcttgacctctcagtaggcattcaccattcgtatggtttccctggcacctttcaagtctttcgtcttgacttttctgctcaaacagccaagtggatgaagatggaaaagttggaaaatagtgctctatttgtcagccttgataggaggaatcctacgttctcttgcacgaaccctgaaagatggggcggaaagagtaactgcatttatgttgcgaaaccatctgaagattctgatgaaccttggactgcagtcgagcttggtcagccaattcctggtgcaacacattgtgttccatacagtcatccactcctgcgaactgaaggccattgcagtcaactagagtacctctgggtgctccccagttttattaatggtgttgaccagtga

SEQ ID NO: 590 - DNA, 1569 bp, Oryza sativa
atgacagagttcaaggttgggagccttgatgcccgagcaacaaagatcagaaatgtccccattgctgtaacaccagaaggattctggtgctgcccgtcgcaggccgtgctccaaaagacaatgaagaaccaaaatcagcaggcaaagcctaaagggggtgcatctcctcttgcatcaaaggcctcttcggttcagagggcgcctaccatttcatcagagagaagagcgcattcaactccgacaaggtctagaatcaattcggatgaacagaagtgcgcgccagcggaaaattcaacacccaatccaccgaaggtagcgaatgatagaccacagaagcagcataagatatctgttggatttggtcaacttgagatgagtgatctcaaggttgtgttgtatggcaaggatggtgttgctgtaaagatgagtgttcacaggaacatccttgcagaaaatagtacctggtttgctgataagctctcaagacaatccccaatgtcaagcatggaggtgcctgattgtgaggatgtggagatctatgttgagacagttggattgatgtactgcaatgatgccaagcagaggcttatcaagcaaagtgttccacgcgttcttcggatcttgaaggttgcagaattattaggtttccaagcatgtgttttgtcttgcttagagtacttggaagccgtcccttgggtcggggaagaagaggagaatgtggtatcatctgttcagcatctgcaaagtgggaattatggtgttagcccaatactgaagagggtatgctctgacctaacaagcccaccaaatgacacatttgtgcatatcatagaattagtcttgaagagcggcgaggatagagggcgccgcgaaatgaaatccctggtgctgaagcttctgaaggagaatagcagctgtaccagtacatctgtggatatctatgctgagactctctacagctcttgccagaattgcctggaatccttgttgaccttgtttcgacaagcgactgccgacgattttgctgagcaatccttagaccttaaagagccagtttttcgacaaattgctctagaagcagataatctcctttggttaactgagattttggccgacaggaatgctgctggtgagtttgcagtcatgtggtctaaccagggtgagttggctgagcttcactccaagttaccaaccaagtcgcgccatcttgtcagctgcgtcacagcaaggctctttgtggcaattgggaaaggagacatgctcccttcaaaggacacaaggaagcttctcttggatgtctggctgcagcctctcatggatgactacaactggttacagcatggctgcaggtcatttgaccgcaaagttgtcgaggaagggatcgggcgtactatcttgacactcccgctcgaggatcagcagacgatattgctttcatggctcgggagcttcttgaaggttggggatagctgccccaatctgcagaaggcctttgaggtgtggtggaagaggactttcgtgcggccttatgttgaacaagggaatcaatctcagccgggtcggagttga

SEQ ID NO: 591 - DNA, 1560 bp, Oryza sativa
atgctttcccggattctgcatggctatggaggacacggcgggagaggcttcgagcagacgtaccggtgctactcggcggcggccttcaacaagccgcagctcgaaggcggagacaaggtgatcatgccggcgtcggcgctccaccgcctcgcctccctccacatcgactacccgatgctgttcgagctctcccaccacggcgacgccgccgcccaccgggtcacccactgcggcgtgctggagttcgtcgccgacgagggcacggtgatcatgccgcggtggatgatgcgcggcatgcgcctcgacgacggcggcctcgtcgtcgtcaggagcgccagcctccccaagggcagctacgccaagctgcagcctcacaccggcgacttcctcgacacggcgaaccccaaggccgtcctggagaagacgctgcgcagcttcacctgcctcaccaccggcgacaccatcatggtggcctacaacaacaaggagttcctcatcgacatcgtcgagacgaagcccgcctcggccgtctgcatcatcgagacggattgcgaggtcgatttcgcacctccactcgattacaaagaacctgaaaaggttcagcagaaaccatctgttccttcaagcaaggcggcttccgaagatcaagatcaaatcaaagatgagccagaattcagagcattcactggttcagggaatcgtttggatggtaaggcctcaaaaccgctagcagcagggatctcttctaatcctgctgctgcaagttctgcaatttcagactcgaacaagaaggtgaatcaggagacagcagcatcaggagttagcaactctacacgtcagaaaaaggggaagcttgtttttggttcaaacaaaagcagcagcagcagcaaagaaccagagaaggctcctcctgttaaagttgatgaacttgcaaagaaggaagagcccaagttccaagcattttctgggacgagctactcgttgaaacgcaatcgcgataaagtgtcacaccttttggagattaccaagtgccaaaggagaaggctgcaacttgaagaaatgcttgttcctgcgataaatggtactctgaatgtgctgaaatcttgcaagaagaatccatttctgaaaagggttgttcttacatcctcatcatccacggtaagaatcagggatgagagtaaacatccagaaatctcactggatgaaacaatatggagctctgtggcactctgtgaaaagctacagctatggtatgccctggcaaagatatctgcagagaaagcggcatgggagtttgccaaggagaacaacattgaccttgtaactgttcttccatcatttgtgattgggcccagtttatcacatggaactgtctgtcactgcttcagacatccttggcttacttcaagcttgaggaacccatatgagaaacagtcatatgagctaaacacatccaagatccagcagctgggtttcaagttcaaaggggtgcaagagatgtttggtgattgtgtcgagtcgctgaaagatcagggacacttgctggagtgcccgttgtaa

SEQ ID NO: 592 - DNA, 1555 bp, Oryza sativa
  N_region (1390)..(1390): n = any nucleotide
  N_region (1435)..(1435): n = any nucleotide
  N_region (1447)..(1447): n = any nucleotide
  N_region (1451)..(1451): n = any nucleotide
atgctggcggcgtcgttgagagtcgaggcggtggcggtggttgctgcggctgtgctggtgctgctgctctcgccggctgcggtggtggtggtggccgggcagcatgattacggcgacgcgctccataagagcatactgttctttgagggacagcgctccggcaggcttcctcccgaccagcgtctccgctggcgccgcgactccggcctccacgacggcgccgccgccagcgacttgaccggagggtactacgacgccggcgacaacgtgaagttcgggttcccgatggcgttcacggcgacgctgatgtcgtgggggctgatcgacttcgggcggagcttcgggccgcacaaggaggaggcgaggaaggcggtgcggtgggcgacggactacctgatgaaggcgacggcgaagcccaacaccgtgtacgtgcaggtcggcgacgccttccgcgaccactcgtgctgggagcgccccgaggacatggacacgccccgcaccgtctacaaggtcgacccctcccaccccggctccgacgtcgccgccgagaccgccgccgccctcgccgccggctccatcgtcttccgcgacgccgaccccgcctactccaagcgcctcctcgaccgcgccatcgccgtgttcgagttcgcggacaagtaccggggcccctacagcagcagcctccacgacgcggtgtgcccctgctactgcgacttctccgggtacaaggacgagctgctctggggcgcggcgtggctgcacaaggcgtcgcgccgccgcgagtaccgcgagtacatcaagaagaacgaggtggtgctcggcgccagcgagtccatcaacgagttcggctgggacaacaagcacgccggcatcaacgtcctcatctccaaggttctgatggggaaggacgagtacttccagtcgttccgtgtcaacgccgacaacttcatgtgcagcctcctcccgggcatctctaatcacccccagatccagtactccccaggggctgctgttcaaggttgggggcagcaacatgcagcacgtgacatcgctgtcgttcctgctgctcgcctactccaactacctgagccacgccggcgcgcgggtgtcgtgcggcgcgggcggctcggcgtcgccgacgcagctccgccgcgtggccaagcgccaggtggactacatcctcggcgacaacccgctgcggatgtcgtacatggtgggctacggcgccaggttcccgcggcggatccaccaccgcgggagctccctcccgtccgtcgccgggaaaccggggcggatcggtccaaaccccaacctgctggtgggcgccgtcgtgggcgggcccagcgacgccacggacgcgttccccgacgcgcgcgccgtgttccagcantcggagcccaccacgtacatcaacgcgccgctcatgggcctcttngcctacttctcngccnacccaaacccagccgagtgggccgacgactagaacaacccgccaaagtatatcagctatacgggcctgggctattgtttgttttgtcagggccgaatcgggtga

SEQ ID NO: 593 - DNA, 1485 bp, Oryza sativa
  N_region (1435)..(1435): n = any nucleotide
  N_region (1442)..(1442): n = any nucleotide
  N_region (1449)..(1449): n = any nucleotide
  N_region (1471)..(1471): n = any nucleotide
  N_region (1473)..(1473): n = any nucleotide
  N_region (1480)..(1480): n = any nucleotide
atgcagtcgccagagaatgcggcaccgcgcgtgtacttcatcccgttcccgacgccggggcacgcgctgccgatgtgcgacctcgcgcgcctcttcgcgtcccgcggcgccgacgcgacgctcgtcctcacgcgcgccaacgccgccaggctcggcggcgccgtcgcccgcgccgccgccgcgggatcacggatccgcgtccacgcgctcgccctgcccgccgaggccgcggggctcacgggcggccacgagagcgccgacgacctccccagccgcgagctcgcggggcccttcgccgtcgccgtcgacctcctcgcgccgctcttcgccgacctcctgcggcgcagacccgccgacgccgtggtgttcgacggcgtcctcccgtgggctgccaccgcggcggccgagctccgcgtcccgcggtacgcgttcacggggacggggtgcttcgcgctctcggtgcagcgagcactgctgctccaggccccgcaggacggcgtcgcgtcggacgacgagccgttcctcgtgccgggcctccccgacgcggtgcggctcaccaagtcgaggctcgccgaggcgaccctccccggcgcgcactcgcgggagttcttgaaccgaatgttcgacggcgagcgcgccacgacggggtgggtggtcaactccttcgccgacctagagcagaggtacatcgagcactacgagaaggagacggggaagcccgtgttcgccgtcgggccggtctgcctcgtcaacggcgacggcgacgacgtcatggagcgcgggcgcggcggggaacccgtgcgccgccacgacgccgcgcgcgcgctggcgtggctcgacgcgaagcccgcgcggtcggtggtgtacgtctgcttcggcagcctcacccggttcccggacgagcaggtcgcggagctcggcgcggggctcgcgggctccggcgtgaacttcgtgtgggtcgtcgggggcaagaacgcgtcggcggcgccgctgctcccggacgtcgtgcacgccgccgtgtcgtccggccgcggccacgtgatcgcggggtgggcgccgcaggtggcggtgctgaggcacgcggcggtgggcgcgttcgtgacgcactgcgggtggggcgcggtgacggaggcggcggcggccggggtgccggtgctggcgtggccggtgttcgcggagcagttctacaacgaggcgctggtggtcgggctcgccggcacgggcgccggcgtcggcgcggagagggggtacgtgtggggaggcgaggagtccggcggggtggtggtgtgcagggagaaggtggcggagagggtgcgcgccgccatggctgacgaggcgatgcggcggcgggcggaggaggtcggcgagcgcgcgcgccgcgccgtcgaggtgggcgggtcgtcgtacgacgccgtcggcgcgctgctggaggatntgcggcnccggganatggcggcggatccacggaacntnaaggaantatga

SEQ ID NO: 594 - DNA, 1479 bp, Oryza sativa
atgggttcttcttggtggtggcatggaagggcggcggcggcggtggcgtgttgggtgtggctggcggcggcggcggcggtgggggtggaggcgataggggcgaactgggggacgcaggcgagccacccgctggcgccggacacggtggtgcagatgctcaaggacaacgggttcgacaaggtgaagctgttcgacgccggggaggacaccatgagcgccctgaggaagagcgggctggaggtgatggtcggcatccccaacgacatgctcgccgccatggccagcagcatggcggccgccaacaagtgggtcgaccagaacgtctccaactacctcaacgacggcgtcaagatcaggaatatcaggtatgttgctgttggtaacgagcctttcctggagacatacaatggaagctttctgcaaactacttttcctgccatcagaaacatacaaagtgcgcttgtgaaggctggcttgggtagtcaagttagagtgacatgccctctcaatgctgatgtttatcaatcatcgactagcaagccttctgatggggacttccgcacagatattcatgatctgatgctcaccatcgtaaaattcctgagcgatactggtggagctttcactgtcaacatctaccctttcataagcctctattctgattcaaacttccctgtcgactacgccttctttgatggtgccgcatcacccattgttgatggctctgcgacatacacaaacatgtttgatgcaaactatgacacacttatatgggctttgaagaagaatggctttggaaatctcccagtcattgttggggagattggatggccaactgacggggacatgaatgcaaatattcagatggcgcagcacttcaaccaaggcttcctaacacatattgccacagggcgaggaacgccgatgaggcctggaccagttgatgcttacttgttcagtctaatcgatgaggatgagaagagcatacagccaggtaattttgagcgtcactgggggatattcacctatgatggcttgccaaagtatcaactgaatcttgggcaatcacatggccttctcaaagcgaagaacgtgaagtaccttgagaggaagtggtgcgtgctgaagccttctataggccttactgatccaaggctttcagatagcatcagctatgcctgctccctggcagattgcaccagccttggttacaagacatcttgtgggggactggacaccagaagcaacatctcgtacgcgttcaacagctactaccagaagaacgatcaagacgatgtcgcctgtgggttctcgaacctcgcaacgatcactggccaagaccccagcaccggaacatgcagattcggtatcatgatcgaggttgactcggccttctcgtggaagctgcagcatgttagaagcagcaacctcttgatgcttctgctagtgcttctccagctttgcctgtcattctcatag

SEQ ID NO: 595 - DNA, 1456 bp, Oryza sativa
  N_region (492)..(495): n = any nucleotide
atggcggcgggagggaaggggtgggtggagagggcgcggcgcggggtgaagacggcgtggttcatggtggccatggtggcgtcgctgctgatggcgtcggcgccggcgctggtggccgccggcgacgtggccgtcgcgctgtggctcgaggtgcggctcgggtgcctccgctgccacggcctgcgcggccacctcgagcgttacggcttccggagctcgctcgtggacataccgcttgtctccatcgctcgatccgtcgtcattacctgtatacctcatgtctgatgcttctgggctctcccatggcccgtaccttggaacagcaacttgctgttccctggcttctctgctcatcttgttgattaaggccagcgtttacagtccggcgcaggagattgggcctgagctctcgccgtcattggcggatcacaagctcagtctcaagaagctatcgggaatgccggtgcttttcctgtcctccttggtctttgnnnntggccatgttgttgtcgcttacaggacaagctgcagggctcggcggaagctgcttatccatggcattgaccctgaatctgtaggatcactgtgcattacaaactttgggaaatttgctgttgttttggtgcatgggtttggaggtggggtgttctcatggagacacgttacaaatttgctttctcgtcaagtgggttgcactgtgctggccttcgatcgccctggatgggggttaacatctcgacctcgcagaaaggattgggaagacaaaaatctaccaaatccatatgagcttggatctcagcaggttgatcttcttatttcattttgctcggacatgggcttacgctctgtggttttagttggtcatgatgatgggggcctgcttgccctaaaagctgcagaaaagttgcgagcatctggagattcaagaaaggtgaagggagttgtgcttataggtgtaagcttatcaagagaagtcattcctgcatttgctcgtatactcctgcatacccctctaaggaaaaagcacatggtacggccactgttacgtactgaaatcactcaggtgatcaatagacgtgcatggtttgatgctaccaagttaacaacagatgttctgaacctctacaaggctccactatttgttgaaggctgggatgaagctctccatgaagtaggacgtctttctttctcgactgtcctatcatcaaaaagagcagcagatttactaagatcagtggaagacctccctgttctggttgtagcaggctctgaggatgctcttgtttcttcgaagtcaacgcaagtaatggcttcaaggcttgtaaattctaggctggtaacgatatcaaattgtgggcatttgccacatgaggagtgtcccaaggcattgctttcggctctttctccattcatatcaggactggtgtcatcagatgattcattgcaaagattgtag

SEQ ID NO: 596 - DNA, 1439 bp, Oryza sativa
  N_region (278)..(278): n = any nucleotide
atggatcgcgacccctccgtctccgacgaggacgacgacctcgagaccctcgtcccgcagaacgaccccgcggcgtcccggatgcgcgacgccgagctccgcgcgctctacctcctccgctcgcagcgctcgggcctcctcgccctcttcaaccgtacggcagcacccaccaacggcagcagctcgggctcgaacgctgtctcgtacgccgatctccacgacgcgctcctcggccagatcaagatcaaccgcgagatccaggcggcgctcctctccgngcaccgcactggcgctgcgggcaatgcgacggaggatgggttggatcttgatctgccggctgacgggtgcaggaggagggaattgccgtccaaccggcggaccatagagtggaaccccaagaaagatcgattcctgttcgccatctgcgtctccgggcaaatgtccaaccacttgatttgcttggagaagcacatgttcttcgcggcgctgcttggccggatcttggtggtgcctagccagaagctggattatcagtacgaccgggtgcttgatatcaaccacattaatgattgcattggaaggaaggttgtaattacctatgaggaattcacagagaagaggaagaaagtgagcattgatcagttcatatgttacgcggcatcacccccttgtttcattgatgaggatcatgttaagaagttgaagggattggggatttcactgggaaagatccaggcagcttggccagaggatgcgaagctgaaggagccaaagaagagatttgtggaggatatcatgccaaagtttaccacggatgctgaggtgctcgcgatcggtgacatgttctatgctgatgttgaggaagagtgggtgatgcagcctggtggcccattggctcacaagtgcaatactttgatccagccaagtaggcttattatgctcactgcgcaacgctttgttcagaccttcttggggggcaactacattgctttgcattttcggcgacatggcttcctgaagttctgagctgcttcttccctatccctcaggcagcagaatgcattcttcgaatcgttgagaaagctaacgccccagtcatatatctgtctactgatgctgccgagagtgagacaagtctcctgcaatccttggttgtgttcaatgacaggcaagtccctcttgtgaaaaggccagagcaccacaactctgagaaatgggatgccttgttatacagaaatcacatgggtggagacaatcagcaggttgaggccatgctcgacaagacgatctgtgcgctgtcgaacgttttcataggtgcatcaggctcaaccttcacagaggacatcctgcgtctacggagaggctggggttctgcgtcccactgcgacgaatacctctgccagggtgagctacccaacttcatagcggagctagactga

SEQ ID NO: 597 - DNA, 1437 bp, Oryza sativa
gatttttattcagttttatcaggaggaagtgcaagcgagtctgatccagatactgcaagtcaagtggcagatgttgaaactgatgaagatgaagtgatgtactttgatacaagagacttcttgtctgcagagtctcttcgaagtgcttcatgtcgaaggagagaacttttgacaaatggttgcaatggattagaacatacagaccctgctgcaaatgtcgtcaaaactactcagtatccctctgttaaacgtcgagataagttacctgagccaaaagaaaaagaaaacccagtagggttgtggtcaataattaaagaaaatattggaaaagatctctcgggtgtttgtctgcctgtttatttcaatgagccactgtcttctttgcaaaaatgttttgaagatctcgagtactcttacttggttgaccatgcactacagtggggaaaacagcagggcgatagcttgatgaggacacttcatgttgcggcatttgcagtatcaggctatgcttcaactgaaggtcggcaatgcaaaccgttcaatcctttactgggtgaaacatatgaagctgattatccagataaaggacttcgatttttctctgaaaaggttgtcagtcatcacccaatggttgttgcatgtcactgtgaaggaagaggttggaagttttggggggattcaaatctgaaagggaagttctggggtcgatcaattcaacttgatcctattggtgttctaactctccagtttgatgatggggaaacgtttcaatggagtaaagtaactacttccatatacaatatcataataggcaaaatttattgtgaccactatggtacaatgcgcatcaaaggaagtggcgactactcttgcaagcttaaattcaaagagcagtcaataattgatcgaaacccacaccagcaggtgcatggatttgtgcaagataatagaacagggcagaaagttgctatgttaatcggaaaatgggatgaagctatgtattatgttcttggggatccaagtgcaaaacccaaggggtatgacccaatgtcagaagcagttcttttgtgggagagagacaagtctctgaaccaaacacgatacaacctttccccttttgcaatttcactaaatgaattgacagctaacctggcgaagaagttgcctcctactgattctcgtctgaggcctgatcaaaggcatcttgaaaatggtgaatatgagatggctaatgcagagaaacttaggcttgaacaactgcagcgacagcaggcccgaaggttacaagagaaaggatggcaacccaggtggtttagcaaggatgacgacgacagctaccgctacattggcggttactgggaagcaagggagaaggggaactgggatgggattccagacatcttcggtcagcgcagcgcttcacctgggtggtcatag

SEQ ID NO: 598 - DNA, 1426 bp, Oryza sativa
  N_region (125)..(125): n = any nucleotide
  N_region (168)..(168): n = any nucleotide
  N_region (1253)..(1253): n = any nucleotide
atggagagccccgcgaaggaggaggcgggaggggagctggcgatggagatcgagtccaccgtcacggcggaggactggcgccgggcgctggcactcgtggtgccctccgtcgtcgtcctccgcancaccgcgccgcgggccttcgacaccgaggtcgccggcgccagntacgccaccggcttcgtcgtcgacaagtccaggggcatcatcctcaccaaccgacacgtcgtcaagccaggggcctgtcgtcgcggaggcgatgttcgtgaacagggaggagatccccgtgtatcccctgtacagagatcctgtacatgattttggtttttttcgctatgatccaggtgctatcaagttccttaagtatgatgagatcccgctagcacctgaagcagcatctgttggtctggaaatccgggttgtcggcaatgacagcggcgaaaaggttacgtgtcaattttggcgggaacacttgctcgacttgatagagaagcaccttactacaagaagatgggtacaacgatttcaacacattctacatgcaggctgcatctggtaccaaaggtggctctagtggttcccctgttgttgattgtcaaggaagagctgtcgccctgaatgctggaagtaaatcttccagtgcttctgcgtttttccttccattagaacgtacctttcaacacaaaggatttgaagaaactcggcgtcttggactcaggaatgaaacagaacaggtacgccttgtttctccatcaggcgagactggaatgctggttgttgattccgtggttccagaaggacctgcacataaacatttggaacctggtgatgtgcttgttcgcatgaatgatgaggttgtaacacagtttctcgcaatggagaccttgcttgatgacagtgttggcaaggagatagatttgcagatcgaaagaggtggtacacctttaacagtaaagttggaggttgaggatttgcactctataactccaaatcatttcttggaagttagtggtgctgtgatccatccactttcgtaccagcaggcaaggaattttaggttcaaatgcggtctcgtatatgttgctgaggcaggtacatgctctctcgggcatctgttccacgccatgctattattaaaaagctcgcaggagaggatattgaaaatttaggggaccttattgcatgtatttcaaaactatctagaggagcaagagttcctcttgaatatgtaaagtacaccgaccgttataggnataagtctgtactggtgaccattgatcggcatgaatggtatgcgcctcctcagttatatactcgaaatgatgcaactggcttgtggactgcaaaatcagctataccgccggaatcttcaagtaatgcatcattggcagaacaagtaattgaaccagcccttgtaatgtttgag

SEQ ID NO: 599 - DNA, 1424 bp, Oryza sativa
atggccgcgcccccggcggaggcggcggtcggggtgaactggggcaccctgtcgtcccaccgcgtcccgccgccggtggtggtggacctgctccgcgccaaccggatcgggaaggtcaagctcttcgacgccgacccggccgtgctgcgcgcgctcgccggcagcggcctccaggtcatggtcggcgtcaccaacgccgagctcgccgccgtcgcgggatcccccgccgccgccgacgcctgggtcgcgcagaacgtctcgcgctacgtcggccgcggcggcgtcgacatccgagatacattgccgtgggaaatgagccgttcttgacgagctaccagggtcaattccagtcatatgttattccagcaatgacaaacattcagcaatcgctggtgaaggctaatcttgctagctatgtgaagcttgttgtcccatgcaatgctgatgcttatcagagtgcttctctcccatcacaaggagtttttaggactgaactgactcagataatgacccagctcgccgcttttctcagttctagtggagcgccatttgtggtcaatatatacccttttctcagtctttatcagagctctgactttccacaagattatgccttcttcgagggatctactcacccggttgtagatggtcctaacacatactacaatgcttttgatggcaactttgacacattagttgctgcgctgggtaaaattggatatggacagctaccgattgcaattggtgaagttggctggccaactgaaggagcaccgagtgcaaacttaactgcagcaagggcattcaaccaaggtcttatgaatcgtgttatgaacaacaaaggaactccgcttcgtcctggtgtacctccagctgatgtctatcttttcagcctttttgatgaagagcaaaagagcatactacctggaaactttgagagacactgggggatcttctcatttgatggacaagccaagtacccattgaatcttggtttagggaatccggtacttaagaatgctagagaggtgccatatcttccatcacggtggtgcatcgcaaaccctgcccagaatcttgataatgttgcaaatcacttaaagcttgcttgctctatggctgattgtaccacactcgactatggaggttcctgctatggcattggagagaaggccaacgtttcttatgctttcaacagctactatcagcaacagaagcaggatgctaagagttgcgatttcgatgggaatgggatgataacttaccttgatccatccatgggcgagtgtcgctttcttgttggaattgatgatagtaaaagctctgcagtttcctcctgtggctgcggttgtggggtttgttgtggggtgtgggttctatttttctgggtgttcatgtaccttagaatgatgggttctgtctga

SEQ ID NO: 600 - DNA, 1423 bp, Oryza sativa
gcagagatggagatgatgaaggagaggttcgcgaagctgctgctcggcgaggacatgtccggcggcggcaagggcgtctgcaccgcgctcgccatctccaacgccatcaccaacctctgcgtgcgttgctgcagcgacgatatttgggcagctgtggaggctggagccgctgctgccggagaaaaagacgatgtggcggcgcgagatggactggctgctctgcgtcagcgaccacatcgtcgagctagtccccacatggcagacattccccgacgggagtaagcttgagctgcccgcactccgaaagctagaccacatgctcctcgaaattctggagagcttcagggacccggaattctggtacgtcgaccaggggatttgcccgccggaccgcgacggcagcgcccccttcatgctaacgttccaccgccgcgacgagaagtggtggctgcccgtgccccgcgtccctcccggcggcgtcggcgagaccacgaggaggcagctcgagcacaagcgcgactgcgccagccagatcctcaaggccgccatggccatcaacagcaacgccctcgccgaaatggacgtccccgactcttacctcgactcgttacccaagggcgacatcatatacaggtacatcacgtcggaccagttctcgccggactgcctgctcgactgcctcgacctgtcgtcggagtaccaggcgctggagatcgccaaccgcgtcgaggcctccatctacgtgtggcgccggaggggcacgtcgggcgccgcgagccgcgccggaaacaagtcgtcatggggcatcgtcaaggacatgatcatggacacggagaagagagacgacctcctcgccgaccgcgccgagggcctcctcatgtgcctcaagcagaggttccccggactgacgcagaccagcctggacacgagcaagattcagtacaacaagaaatctcgctatccgtgttgatggtgatcgggtttggatgaactgatcgtgagatgactctctcttcaggatgtggggaaatcgattctggagagctactcgagggttctggagagcctggcgtcgaacatcatcgcgcggatcgacgacctgctgtacgtcgacgagcggagcaggcaggcggagctgcttccaaccgcgggcgccgggagcggcaagatctcttgcatgccggccatgtcggcgtcgtcggtgccggcgtacccggtggtgtccacctcgggcaccccgccgccgtacgcgacggcgtacgccacgccgagcttctcgccggcgcagctgtcgagcccatccaacatcgggagggcactgctggtcgaccggcggtcgcacgacggccgagcgttcgacggcagcatggagttcatggggatggcggtcagcaacgccgtgttcgacctaccgggcctgtga

SEQ ID NO: 601 - DNA, 1415 bp, Oryza sativa
tttgttggtggtatggcaatcagtgatttggtcaagacaacgttggggccaaaaggaatggacaagatcctacaatcaactggcaggggacgcagtgtgactgttacaaatgatggtgctacaattctgaagtctcttcatatcgacaacccagctgctaagatctcaaaagtgcaagatgacgaagtaggtgatggaactacttctgttgttgttttggctggtgagcttttgagggaagctgaaaagttggtaaatatgaagatacatccaatgacaatcattgcagtttagatcagatctgatgaacattgctatgacaacgttgagttcaaaaatactttcccaggacaaggaatactttgctggtcttgcagttgatgctgttctaagacttaagttgcagggcagtaccaacttggaagcaattcaaattcttaagaaaactggagggtctctaaaggactcctttttggatgaaggttcattctagacaagaaaatcggtcttggccaaccgaagaggattgaaaacgccaagattttggttgcaaatactgctatggacaccgacaaagttaagatatatggagcacgtgtacgggttgattcaatggctaaggttgctgaaattgaagctgctgaaaagcaaaaaatgagagaaaaagtgcaaaagatcataggtcatggaatcaactgtttcgttaacaggcagttgatctacaacttccctgaggaactctttgcagatgctggcatactggcaatcgagcatgctgattttgagggcattgagcggcttgctcttgtcactggtggtgacatcgcctccacttttgataacccggagtctgtcaaacttggtcattgcaaggtcattgaagagattatgattggggaggacaggctgattcatttctctggggttgaaatggggcaagcctgtactattgtcctcagaggagcaagcttgatgaagcagagaggtccctgcacgatgccttatgtgtgctttcacaaacagtgaacgacacccgtgtgttatatggtggtggatggcctgagatggttatggccaaagaagtagatggactggcgagaaagacacctgggaagaagtcccatgctatcgaagccttctcgcgcgctcttcagtccattccaaccatcatcgctgacaatgctggtctggatagcgctgatctgatctctcagctcagagcagagcatcacaaagagcagagcactgctggaattgatgtcatttctggcggcgacatggaaaagctggggatatcagagtcgtttaaggcgaagcaagctgttcttatgtctgctaccgaggcagcggagatgattctcagggtcgatgagatcgtcacttgtgctccacggagaagggaggacaggatgtga

SEQ ID NO: 602 - DNA, 1380 bp, Oryza sativa
  N_region (784)..(784): n = any nucleotide
atgtcggtgggtgcagatccggaggcggaggtgatcgcgctgtcgccgaggacgctgatggcgacgaacaggttcgtgtgcgagatatgcgggaaggggttccagcgagaccagaacctgcagctgcaccggcgagggcacaacctgccgtggaagctgcggcagcggagcgggaaggagccgaggaagcgggtgtacgtgtgcccggagaagagctgcgtccaccacaacccgtcgcgcgcgctcggcgacctcaccgggatcaagaagcacttctgccgcaagcacggcgagaagaagtggaagtgcgacaagtgctccaagcgctatgccgtccagtccgactggaaggcccactccaagacctgcggcacccgcgagtatcgctgcgactgcggcaccctcttctccaggagggacagcttcatcacgcaccgcgcgttctgcgacgcgctggcggaggagacggcgaggctgaacgcggcgtccggggccgccgcggcggcggcggcggccacggccacgtcgctgtgcgggcagagctacctgttcgccgggtcgggtgggccggggatggcgggcatgcggccaaacatgatgatgccgccggcggcggcggcggctggagggcagctcagggcgggtcaaatgctcggtccggcggcggggggcttcggtggggacctgtgcgacggcggcttggcgcggcacggcgggctgtcgctgtggggttgccaagcgttgccgtccatgggccacattggcgtcctggccagcggttgcncggcgacagtgccgccgcagctgtacgtggatctcttcgcgccgagctccggggcgccgccgccgcagttcgacgcggcgcagctgagctggctgtacgggaacggcaagctctcgtcgtcgaatgccagcgagctgacgagcgccacggcggcggcgaaggaggcggagagcgtgccgtccgtgttcagcaaccagcagcacgcgaagcccgcggcgcccaccgacatgtccgcgacggctctgctgcagaaggccgcgcagatcggcgccgtgacatccaccgccgcgatgcccctagtgtccccgttcgagccgaccaagcccggcggcgccaccgcctcaccggccgacgagtgcggcaagttcgacggtgcagccctattcgccgccgcgagccatcacaatgccaacctcggcggcgcaatgagcgagctcacgggggccgccggcaacgtgccttacgacgtcttgtcggcggtgcgccaccatgccggcctgaaggacgccggcggcgtcgggagagaggaaactagggatttcttgggcgttggcgtgcaagcactgtgctcgtcgtcgatacatgggtggatttaa

SEQ ID NO: 603 - DNA, 1372 bp, Oryza sativa
atggcggacgccgtgcagtaccgcctcgagcggatgtccgacgagctcgacgacctcgagcgccggggcctcttcacccgcgccgagctcgccgaggtcgtccgccgccgccgcgacttcgagttccgcctccgacgccgctccccgctccgctccgacttcctcgactacatcgcctacgagctccgcctcgacgccctccgcgacctccgcaagaagtccgtctccgacatcgccggagtcctccgcgtcctcgacatctacaggatggccaccgtcaggtacaagggggacctcgacctctggttccgttacctcgagttctgtcgcgacaagcgccatggtcggatgaagcaggctctggcacaagctattcgttaccaccccaaggttcctgggctctggatctatgcagcagcatgggaatttgatcagaacttaaatgttgctgcagcacgtgctcttatgcagactggtcttagatcttgtccagaatcagaggatatgtggattgagtatcttcgcatggagcttacctatcttaacaagcttaaggctcgaaaggttgctcttggagaggatgtgaagacactgcaaaagaagaataatgatgcaagcacttggaaagaggaaaataaagaactgttcatgtcactgaatgaacaagatgaaggtcccaaggagtctggctcacagggagttgctttggaggggaaggaagacctattctggcagcaagggctgctaatcattcaaaccatataccatggtgctacaaaagctcttccttcaagcttaaccttgcggaagaaattcttagagatattgagtagtgttgacctagcacattctgacgaactgaaggtagaggtcatggatgacctgaagaaagagttctctgacagtgaggactactgggattggcttgctaggcttcagcttagtgactcaactagttccagtaatttgaatagaatggaagctttatcaaataaactgaataaatcaatacaggtctatcaaaatgccgaatcaagcggttgtcttactgaagatcttgcttgccaatatgtgtctctttatttgagacttggagagatttctggctttaccacgtccaagcttcaagttcttccagtactgcatagagttggaaacaaaccttgcatcaatcggaaaccaagacagccttgtgaatgctcgtaagctgtatgatgcagcgctcgatctctatccccaggaaagagaactttggaggaactactacaacatggagctgaagttgggaacatcagaaacagcaaatgctatatactggcgcgctcgtaaggtgctcggtgattccagtgccctggacattccccacagctag

SEQ ID NO: 604 - DNA, 1360 bp, Oryza sativa
  N_region (687)..(687): n = any nucleotide
  N_region (724)..(724): n = any nucleotide
cgcaacacgtacaacctcgtcccccgctccatcggcgggtgccgcgggagcgtcaggtcgctcaagttcttcggcaacgacgtggaggtgctcccgccggaggctggcgagctggaccagctcgagagcctgcaggtgaaggtgtccgcgcccagggtctccggggcgccgctccgccggatgcgggcgctcaaggagctcgagctctccattgtcccgcccaggccgtccgcgtgctccatactggtcgaggtcgccgcgctcaagtgcctcaccaagctaacaatctgccatttctccattagaggtacctccctcctgaaattggctccctaaggaagctgcaagaacttgatctttcgttcaacaagttgaagaacttgcctaactgtataactgagttgggtgccctaaagttcctcaaagtgactaataataagttggtggatctaccatcaggaatctcttctttgagatgtcttgaaagccttgatttatcaaacaacagattgacttcccttggatcagttaaactcatttctatgcttacactacagtatttaaatcttcagtacttgtgcgatcgagcagaccctccaattccttgtgagcttgtgcgggggcatcttgactacacacctcatgcttggaatgttgttcctgttagaaaagggaatacatgggtanggatgatagtggatgcatgctacccaaccaatataanggaagagacagatccagagtacttttgcagtttgaatacaagcttctcgcggaagtaagaatgctgggtgccctaaggaagcaccaatccatagtggaaatatatggtcatcagctttattctaaatgggttcaagctgatgatgataaggaatacaagatattacagtccacaattatgatggagcatgtgaaaggagggtctctgaagggcaagaagcatgcacctattgacctggcattctacattgtacgagaagttgcttgtgcattgttggagctgcacaaaaagctagttattcatcgggacataaaaagtgagaatgttttggttgatctggatttagagagaagtgatggcacaccagtagtcaaactctctgatttcgacaacgcaattcctttgcattctctctcccacacatgctgtatagctcaccttgggacatatccacccaatgtttgtgttggtacaccatgctggatggctccagaggttcttcgtgccatgcgagacaaaaaccaatatggactggaagttgatatctggtcatttggctgttttttattggagatgcttacacttcggataccctaccagggcctacctgattcagaaatatatgatctcataatg

SEQ ID NO: 605 - DNA, 1354 bp, Oryza sativa
atgggttcacggtttccatcccaccaactaagcaatggcctttatgtctcgggccgaccagagcaacctaaggagaaggctccagtcatttgctccacagcaatgccatacactgggggtgacataaagaaatctggagaactagggaaaatgtttgacctccatgttgaaaagtcgcggaagtctggtcctttgggtaatcaaccttcaagaaatacttcatttggtggtgctggttccaactctggaccagtttctaatgctcttgaaatcaaattctggacctctcaataagcatggagaaccaggaaagaagtcatctggtccccagtcaggcggagtgaccccaatggcacgtcagaattctggtcctttacctcctgttcttcctacaactgggctgatcacatcagggcctatctcctctggacctctgaattcatctggtgctccacgaaaagtatcaggccctcttgatcctagtcacaacccagctgttacaaacctgaatgccgatgatggttactctattaagggcagcattcctaagacaatactctggatggttattctgctctttttgatggggttcatagcaggtggtttcattcttggagctgttcataaccctattctgctggtagttgtggtggtcatattttgctttgttgctgctcttgtgatttggaacatttgctggggaacaagaggtgtgactgggttcgtcagtcgctatcctgatgctgatctcagaacagcaaaagatggacagtatgtgaaagttactggggttgttacatgtggaaattttcctctcgagtcctcatttcaaagggtcccaagatgtgtgtacacttcaacttgcttgtatgagtacaggggctgggattcgaaagctgctaacactgagcaccgccaatttacttggggtcttaggtcaatggagagacatgctgttgatttctacatctctgatttccaatctggactacgagcattggtcaaaacaggatatggagcacgggtaaccccttatgttgatgaatctgttgttattgacataaacccagataacaaggacatgtctcccgagttcttgagatggctgcgtgaaaggaatctatcaagtgatgatcggataatgcgcctgaaagaagggtactacattaaggagggcagcacggtgagtgttatgggggttgttcaaaggaacgacaacgtgttgatgattgttcctccatcggaacccatctccactggctgccagtgggccaagtgcatcctccctactagccttgatgggctagtcttaagatgcgaagatacatcgaacatcgatgtaataccagtctga

SEQ ID NO: 606 - DNA, 1344 bp, Oryza sativa
attctggcatacaagaatgcatatcctggatgctacaagactcctcgatctcccacaccatacagtggaaaattttattctaggagtgacagtgagacgaagagaaaatctgttgctcacgacgatagggatattccaatcagtttccttgcagacggtgatagcatgttcattgcttgccaggggatcactgtgcattacaaactttccgatccatcgagttgcatatcttcagctacagacacttttccagaaatccatcatgatgttatttcagcaagcatttctcctagaagacagagacatgatagcccaccatcagcctccactaatacccgtcgtcttttgaataggagcttcagccatcaataccatcagacatcgctatatgcaccattgttggtagagccagtgacctctccaactttgtcggatgacacccctgttcttagtgttgatgatggcagtgctgatgtatgtttgaaacctatgggatttgatcttgaggctggagaacaggggaaatttgctgttgttttggtgcatgggtttggaggtggggtgttctcatggagacacgttacaaatttgctttctcgtcaagtgggttgcactgtgctggccttcgatcgccctggatgggggttaacatctcgacctcgcagaaaggattgggaagacaaaaatctaccaaatccatatgagcttggatctcaggttgatcttcttatttcattttgctcggacatgggcttacgctctgtggttttagttggtcatgatgatgggggcctgcttgccctaaaagctgcagaaaagttgcgagcatctggagattcaagaaaggttgaagtgaagggagttgtgcttataggtgtaagcttatcaagagaagtcattcctgcatttgctcgtatactcctgcatacccctctaaggaaaaagcacatggtgatcaatagacgtgcatggtttgatgctaccaagttaacaacagatgttctgaacctctacaaggctccactatttgttgaaggctgggatgaagctctccatgaagtaggacgtctttctttctcgactgtcctatcatcaaaaagagcagcagatttactaagatcagtggaagacctccctgttctggttgtagcaggctctgaggatgctcttgtttcttcgaagtcaacgcaagtaatggcttcaaggcttgtaaattctaggctggtaacgatatcaaattgtgggcatttgccacatgaggagtgtcccaaggcattgctttcggctctttctccattcatatcaggactggtgtcatcagatgattcattgcaaagattgtag

SEQ ID NO: 607 - DNA, 1342 bp, Oryza sativa
gaggacgagatcgagcgcatccgccgcgagttcgaggacgccaagcggaactacctcagcatccccgtcgccatcaaggacatggccaagatgaacccgcaaggtatttatgtgaacaagaacgtcaaactggatgacctgcaagtctatggttttgactatgactacacgctgtcccactactccgagcacctgcagtgcttgatctacgatctcgccaagaagcacttggtcaatgaggagtatgaccacggctttcccatcagggggctctattatgacagattaaaaggttgccttttgaagcttgattttttcgggtctatcgaaccagatggttgcttctttgggcggcataagctgagtttgagtgagataaaagaactctatggcacacggcatattggcagagatcaagctcgccagcttgttgggctaatggatgtcttctgttttagtgagtcacaggcatgccttcttgctgatatagttcagcactttgtagatgccaggctggagtttgatgcatcctatgtatatgaagacgtaaaccaatcgattcagcatgtccacagaagtggtctgattcacagcgtttcttaaagatgctaagagagaaggggaaaaacctatttcttctcaccaactcacctttctactttgtggatggaggaatgagctacttgcttgaggggaattcctggagggagctctttgacgttgtcattgcgcaggcaaataaaccgactttctataattcagaccacccattcaggatacactagcttttactgcagttgacaagtttctgccaaatgaagtttattatcacggttgcttaaaatcatttctgcagattacaaagtggagaggcccagaggttatatactttggtgatcatcttctcagtgacttgagagggcctgcaaaagctggctggcgaacagctgctgtaattcgtgaacttgagcaggcaaaattaagtataatacatgatctacttgggaaagttcatgcaactgtggttagcactgagaaaggacaagtttaccgagcattgcttgatgagttgaatgcagaaaggcgtcaatgtcgatctgcgatgcgagatcttttcaatagctcttttggtgcaaccttccttacagatactggaagggaatcatcgtttgcttatcacatccatcaatatgcagatatttacaccagcaagcttgagaattttttgtcatatgcccctgaatcatggctccatccacctcatgacataaagataatgccacataatgcgaaggtagcttatatttcctcccatatgtggtatttatatccacctgattag

SEQ ID NO: 608 - DNA, 1340 bp, Oryza sativa
ggtttttctgctgatgatgacgagcttgacctagacagcccaactgagggtttctcatccattcctgaagctattgaggatattcgccaaggaaaagtgattgttgtggacgatgaagatagagagaatgaaggagatcttataatggcagcatcaaaggtgacacctgaggctatggctttcatagtgaggcatgggacaggcattgtatgtgtcagcatgaaagaagatgacctggaaagactagaacttcctcttatggtgacaacaaaggaaaatgaagagaagctgcggactgccttcactgtttcagtggatgctaaagaaggcacaacaacaggggtttcagctaaggatcgggcaaatacagtcttagcacttgcatctcctaattctaagcctgaagacttcaacaggccaggacatatttttcctcttaaatatagagaaggaggtgtgctgaaaagggctgggcatactgaagcatcagttgaccttgccatgttggctgggttacctcctgctgctgttctttgtgaaattgttgatgatgacgatggatccatggctttattgccaaaactccaagattttgcaagaagggagaacctgaagataatttcaattgcggacttgattagttatgcaggtataggaggaagagagacagattggtagaacgtgtttgtgttacacctttacaattacaatggggatcatttcaatcttattgctaccgatctcttattgatgggatggagcacattgctatggtcaagggtgatggccaggatatcttagtgcgagtgcattcggagtgcctaactggagatatatttggatcagccaggtgtgattgtgggaatcaacttgccctggcaatgaccatgattgagaagactggcaggggtgtagtagtttaccttcgtggacatgaaggtaggggcattggtttgggtcacaagcttcgtgcatacaatttgcaggacgatgggcgggatactgttgaggctaatgaggatctaggtctgccggttgattcacgagagtacggtattggtgcacagcagatactacgagatcttggtgtccgaaccatgaggcttatgactaacaatcctgcgaaatatactggactgaagggctatggtttgagtgtcttgggcagagtgccactgttgacaccaataaccaatgagaatcggcgttacatggaaacaaagagattaaagatggggcatgtttatggaacccggcctagtggtaatacaagcaccttggctgatggcggcataaaaaaggagcaagatcagattgacagtgctagcgagcaagagtaa

SEQ ID NO: 609 - DNA, 1312 bp, Oryza sativa
atggcgggcgcggtgtcggcgctgttccttctggacatcaagggccgcgtcctcgtctggcgcgactaccgcggcgacgtctccgccctccaggctgagcgcttcttcaccaagctcctcgacaaggagggcgactcggaggcgcactcgccggtggtctacgacgatgccggggtcacctacatgttcatccagcacaacaacgtgttcctactaaccgcctcccgccagaactgcaacgccgccagcatcctcctcttcctccaccgcgtcgttgatgtgcaggtgttcaagcactatttcgaagagttggaggaagagtcgctgagggataactttgtcgttgtggtatgagttgcttgatgaaatgatggattttgggtacccacaatacacggaggcgaaaatcttaagtgaattcattaagacggatgcgtacaggatggaggtatcacagaggccacctatggcagtgacaaatgccgtgtcatggcggagtgagggtattcggtacaagaagaatgaaggtgttcttggatgttgtggagagtgttaacattcttgttaacagcaatgggcagattgtgagatcagatgttgttggggcactgaagatgcggacatatttgagagtggaatgcctgagtgcaaacttggattgaacgatagggttcttttggaggctcaaggccgagctactaaaggaaaagcaatagatcttgatgatattaaatttcaccagtgcgtgaggttggctagatttgagaatgatagaactatatccttcatacctcctgacggatctttcgatctaatgacatacagacttagcacccaggttgtaaaaccacttatctgggtggaagcacaaattgagaaacattcaagaagccgaatagaacttatggtgaaagcaagaagtcagtttaaggaaaggagcagcacagcaacaaatgttgaaattgaagtgcctgttccttcagatgctacgaaccctaatataagaacttcaatgggctctgctgcatatgcacctgagagagatgcaatggtctggaaagtaaaatcatttcctggtggcaagtaggattacatgtgcagagctgaatttagtcttccaagtataactgcagaagaagcagctcctgaaaagaaggcaccaatacgagtgaaatttgagataccatatttcactgtgtcgggtattcagcaggttcgctatctgaagatcattgaaaagagtgggtaccaggcgcttccttgggttagatacattacaatggctggtgaatacgaactgagacttatatga

SEQ ID NO: 610 - DNA, 1300 bp, Oryza sativa
  N_region (151)..(151): n = any nucleotide
  N_region (233)..(233): n = any nucleotide
  N_region (300)..(300): n = any nucleotide
atggccgcgttgcatgggcatggcttcgcggtcaccgtgctactggtggtgttgttggtgcaatgtgacgcggcggaggcgacgacgtgcgccggtgcggtgccggcgaggccacggccggagacggtgtccatcgccgagttcggcggcntgggcgacggccggacggtgaacacgtgggcgttccacaaggcagtgtaccgcatccagcaccagcgccgccgcggcggcancacgctgctcgtgccggccggaacgtggctcaccggcagcttcaacctcaccagccacatgaccctnttcctcgccaggggcgccgtctggccgctggcggagccgctgccgtcgtacggaagggggagggagctgccgggggcgaggtacaccagcttcatccacggcgacggcctccgcgacatcgtgattacagggaatcatcgatggacaaggtgatgtatggtggaacatgtggaggcaaaggacacttcagcataccaggcccaaccttctggaattcatgcattccagtggcattcacatctccaacattgttctcaagaattcacccttctggaacatccatcctgtttattgcgaagcaatgtggtcataaccaacatgatgatcatcgcaccacatgactcgcccaacaccgatggagttgatccaggattctagcaccaacgtatgcatcgaggactcctacatctcaaccggcgacgatctcgtggccatcaagagcggctgggacgagtacggcatcgcctacgggcggccgagctcgggcatcaccatcaggcgcgtcaggggctcgtcccccttcagcggcatcgccatcggcagcgaggcatcgggaggcgtcagcaacgtgctggtggaggactgcagcatcttcaacagcggctacggcatccacatcaagaccaacattgggaggggcggcttcatcaggaacatcaccgttgacaacgtccgcatgaacagcgtccgcaacgggctgcgcatcgccggcgatgtcggtgaccacccagatgagcacttcagccagctcgcgctgcccaccgtggatgctgtcagcatcaagaacgtgtggggtgtcaatgtgcagcagcccgggtcgatcgaggggatcaggaactcgccgttcacgaggatatgcctcgccaacgtgaagctgtttgggtggaggaataatgcagcttggaagtgcagggacgtccatggcgcggcgctgggtgtgcagccggggccgtgtgcagagctcacgaccagcctttcttcagggttctgcagctattag

SEQ ID NO: 611 - DNA, 1224 bp, Oryza sativa
atggagtacttcgatgctaggcggaagcctcataatgttgggaaagttattgcagctctggtcctcacaacactatgtatatttattttgaagcaatctcctggttttggtggcagtagtgtgttttctcgccatgaacctggtgttactcatgtcttagtaacaggaggagctggctatattgggtcacatgcttcattacgcctgttaaaggacaattatcgagttaccattgtggacaatctttctagaggaaacatgggagcagtaaaggttctccaagagttgttcccccagccaggaagacttcagtttatctatgctgatcttggagatcaaaaaactgtatcctcattttgtacttctaaattacctcctcgtcaacaagatctttgccgaaaatgcgtttgatgctgttatgcactttgctgctgttgcctatgtgggtgagagtacattggaaccccttagtactatcacaatattacatcgaacaccttattgattttggaggctatggcgtctcatggagtcaagacccttatttactctagtacatgtgccacctatggagaaccagagaagatgcctattgtagaaaccacacgtcagcagttaccaattaatccctatggaaaagctaagaaaatggcggaggacatcatactagatttcacgaaggggagaaaggacatggctgtgatgattttaagagatatttcaatgttattggatcagacccagagggaagactaggtgaagctcctagacctgaactacgagagcatggaaggatatccggggcatgctttgatgctgcgttaggaatcattccagggctgaagttgcaggttaaaggaacagattatcctacaactgatggaacctgcataagagactacattgatgtcacagatcttgttgatgctcatgtgaaagcactcaacaaggcagagccaagtaaagttggcatttacaatgttggcactggaagagggtcgttcagtcaaggagtttgtggatgcctgcaaaaaggcaactggagtcaacattaaaattgagtacctcagcaggaggccaggggactatgctgaagtatacagtgacccaacaaagatcaacacggagctcaactggactgctcaatataccgacctcaaggagagcctgtcagtcgcttggagatggcaaaagtcacatccacgcggatatgggtcaaactaa

SEQ ID NO: 612 - DNA, 1211 bp, Oryza sativa
atgtcgtcgtcgtcgtcgccgcccgccgcctccgccgccgcgaggctggatctggacggcaaccccatcgcgcccctcaccatctgcatgatcggcgccggcggcttcatcggctcccacctctgcgagaagctcatggccgagaccgcccacgtcgtctacgccgtcgacgtctactgcgacaagatccgccacctcgtcgaccccgcccctccccacctccatggccgcatctccttccaccgcctcaacatcaagaacgactccaggctcgagggcctcatcaagatggccgatctgacgatcaacctggcggcgatctgcacgccggccgactacaacacgcgccccctcgacaccatctacagcaacttcatcgacgcgctccctgtggtcaagtactgctctgagaacaacaagcgtctcatccacttctccacgtgcgaggtctacggcaagaccatcggcagcttcctccccaccgaccaccctctccgcaagttgaaacaggaacctgaattttatgtactgaaagaagatgaatccccctgcatttttggtccaattgtgaaacagcgatggtcttatgcatgtgcgaagcagcttattgagaggcttatttttggctgaaggagcagaaaatggccttgagttcacaattgtgagacctttcaattggattggaccaagaatggactttattcctggtgttgatggtcctagtgagggtgttcctcgggttttggcatgtttcagtaacaatctcctgcgtcgggagcccctgaaacttgttgatggtggccagtcccagagaacttttgtttacattaaggatgccattgaagctgttcacttgatgattgaaaatcctgctcgtgccaatggtcaaatcttcaatgtcgggaatcctaacaatgaagtcactgttaggcaattggctgaaatgatgacagaggtctatgcaaatgtctcaggagagccaccactggatgaacctatgattgacgtgagttcgaagcagttctatggtgaaggatatgatgatagtgataagaggattcctgacatgaccataatcaacaagcagcttgctaggttggaatccgaagacccctctcaaggatttgctggagacaacattgacctaccagcacaagacttacaaagaagctatcaaaaggcaaatgtcacaggcttcagcgtcgagttag

SEQ ID NO: 613 - DNA, 1199 bp, Oryza sativa
cagaaacctgcatcaatggctgatgcacaagacttctttaagccgctgaatgatgttattgcgaaagcaattgcgatgactgaaggaaggaggcctgactatttcaaccatatcaagagtgttgccgacagtctcactgctttggcgtgggttggcttcctaggaaaggattgtgggcatgagtttccctacagcacatgttgaagaaagttggcagatggctgagttctacaataacaagaggttcttgtggagtacaggaacaaagatgctgaccatgttgagtgggctaaagctttgaaggagctatacatgcctggtttacgggattttgttaagaaacattaccctcttggtccttcctggcctaaagcaccaggggctaaggctccccctccacctgctctaccttcggcacccctttttaccacagagaaatctcctaaatctgcacagcctaaagaaggaatgtcagctgtctttcaggaggcaggattgcgaaaggttactgatgacatgaagactaaaaaccggtctgatagaagtggtgttgttagctgggtggtcgaaaatcaagttggtaaaaagaaccttgcaatcgatgattgtgatgctagacaatctgtatatgtgtatggatgcaaggattctgtccttcaaggtaaagtgaacaatatcactgttgacaaatgcaccaaagttggaatcgttttcaagatgttgtagcagcttttgaagttgtcaattgcaatggtgttgaggtgcaatgccagcagggtacagcaccaacaatatcaatcgacaacacatctggatgtcaattgtacttaagcaatgattcacttggagcctccatcacttcagctaaatctagtgaaatcaatgtgatggttccaagtggtgctactgatggtgattgggaacatgctttgccccaacagtacatccacagcttcaaagacgggcaattcatcacctcaccggtgtctcattccggagcatagctacaatcataccggcctttctgggtttgtctgtgcattggttgtgtgttgagagttgtaacagtatttgatgtttgttggagatgctgtttggagtgttggatggtgcctacgattgctgtttcttctgccctactcactgtgttggttggtgtatttgcatgccaacaaactactgttgtatgtttgagctga

SEQ ID NO: 614 - DNA, 1196 bp, Oryza sativa
  N_region (515)..(515): n = any nucleotide
  N_region (548)..(548): n = any nucleotide
agcaagcgagttagtggatttgatatggcgcctccagctcaagctgtggttccacaatttcctgctattccaaccccaagcaggtcagtttccgggcactgctattcctggaatgtttccaaacatgctcccgatgggtgttggacagcaggctactcgacacgcgagacgtgtttatgttggtggacttcctccaactgctaatgaacagcagtcagttgcaatatactttaatcaagtcatggctgctattggaggaaatactgctggtccaggtgacgctgttcttaatgtctacataaaccatgacaagaaatttgcttttgtggaaatgaggtctgtggaggaagcaagcaatgcaatggcactggatggcattttgtttgaaggggctccagtgaaggttaggagaccaacagactataacccttctctggcagctgccttgggccccagccagccaagccccaatctgaatcttgctgcagttggcttaacacctggttcagctgganggctagaaggcccagatcgtattttcgtgggtngccttccatattacttcactgaggctcaagtccgggagttgcttgaatcctttgggcctcttcgaggatttgaccttgtgaaggatagggaaactggtaactcaaagggctatgcattctgtgtctaccaagatctcaatgtcactgacatagcctgtgctgctctgaatggcatcaagatgggagacaaaaccctaactgttagaagggcaaaccagggagcggctcagcctagaccagaacaggaaagtatcctgttgcaggcacagcaacaagtgcaattacagctccctacaaaggttgtgtgcctgacccaggtggtttcggctgatgaattaaaagatgacgaggagtatgaagacattatggaggacatgagattggaagcaggcaaatatggttgtcatccctcgccctgatcctagtggattaccagttgctggagttggaaaggttttcttggagtatgcagatgtggacggcgccaccaaagcaaagacggcaatgcatggaaggaagttcggtggaaatccagttgttgcagtgttctaccctgagaacaagttttctagtgcggaatatgacgcgtagattatcccgctatgtaaaacactagtcttttgtttttcttttgcgccagtttgctaa

SEQ ID NO: 615 - DNA, 1191 bp, Oryza sativa
  N_region (18)..(18): n = any nucleotide
atgcagccgccgccggcntcgagggtctccacggttgtcgacgtcgacctcggcgaccggagctacccgatctacatcggcgcaggccttctcgacgagcctgacctgctgcagagctgcgcaggcatgttcatgggaagagggttttggtggtgaccaacaccaccgtcgcgccgctctacctggagaaggtgacctgggcactcacgcacaacaacccgaatgtttctgtggagagcgtgatcctgcccgacggcgagaagtacaaggacatgacactgatgaaggttttcgacaaggcagtcgagtcccggctggaccggcggtgcacgtttgttgcgttgggaggtggcgttattggggacatgtgcggttttgcagctgctgcgttcctgcgtggtgtcaatttcatacagattcctactactctgatggcccaggtcctaagcttgatttagattttttactacaattggttacatgtagcttgatgctaacggtggattcatctgttggagggaagaccggcattaaccatccattggggaagaacttaattggggcgttctaccagccacagtgtgtactgatagacaccgagacactgaatacattgcctgacagggaactggcttcaggcatagctgaggtggtgaagtatggtctcataagagatgcaccgttctttgaatggcaagagaaaaacatgccagcattattagcaagagagaaccaagtgctctggcctatgctattaagagatcgtgtgaaaacaaagctgaagtggttgctcaggacgagaaggaaagtggtctccgagcaacacttaatctcggccatacatttggccatgctatagaaacaggaactggttatggagcatggctccatggggaggctgttgcagctggaacagttatggcagctgacatgtctcaccgcctgggttggatagacgagtcaatcaagaaacgggcaattgacatactagagaaagcgaagcttccaattacacctccagaggccatgacagtggagaagttcaaaagtattatggccgttgataagaaggttgctgatggattgctgaggctcatcctcctgaaaggacctctgggaagctgtgttttcactggcgattacgacaggaatgccctcgacgaaaccctccgtgcattctgcgactgctga

SEQ ID NO: 616 - DNA, 1189 bp, Oryza sativa
atggctgaccttggattcggcgatgccaggagtggcaatggcagcaggagccaatgctccagggggaaggcgatgctgctcgccctcggcaagggcctccctgagcaagttcttccccaggagaaggtcgtcgagacctacctccaggacaccatctgcgacgatcctgcaacaagggcaaagctggaaagactttgtgagttttgttcatacaggcaagaccaccacagtgaggacaaggtacactgtcatgtcaaaggagctcctagacgagcacccagagctcaggactgagggaactccaacactgacgccacggcttgacatctgcaatgctgcagtgcttgagcttggtgctactgcagcccgtgccgcccttggtgaatgggggcgtccagcagctgacatcacccaccttgtctacatctcgtccagtgagcttcgcctcccagggggtgaccttttcctggcaactcgccttggcctccatccaaacaccgtccgcacttcccttctcttccttggctgctccggtggcgctgccgcgctccgcaccgccaaggacattgctgagaacaacccagggagccgcgtccttgtagtagccgcggagacgacggtgctgggattccggccaccaagtcctgaccgtccttacgatcttgttggtgctgccctgtttggtgacggcgcatcagctgcgatcattggagcaggccccattgctgctgaggagagtcccttcctagagcttcagttctcaacacaggagttcctaccagggacggacaaggtaattgatggcaagatcactgaggaagggattaatttcaaactggggcgtgatttgcccgaaaagattgaaaaccgtatagaagggttctgcaggacactcatggatcgggttgggataaaggagttcaatgatgtattctgggctgtgcatcctggtggtccagcaatactgaacaggctagaggtttgccttgaactccagccagagaagctcaagatcagtagaaaggccctgatgaactatggtaatgtgagcagcaacaccgtcttctatgtgttggagtatttgagggatgagttgaagaaagggatgataagggaagaatggggactgatcttggcttttggcccaggcatcacatttgaaggaatgctagttcgaggcattaactga

SEQ ID NO: 617 - DNA, 1171 bp, Oryza sativa
gttaaatggaggtgggaagaccacacattcggcagagtatccagaacggccggggcaaccagtttgtgagagtactatatgaagaatggaacttgtaagtttggctctaattgcaagtatgatcacccaagggaaggctctgtgcaagcagtcatgttaaattccagtggataccctctacgctcagtgagggtgagaaagattgtacctactatgtcaaaactggccattgcaaatttggatctacatgtaaattccatcacccagaaattggtggagtttcagagacacctaacatgtatccaccagttcagcctcagcctatctcttcctctcatccatatcaacatcttgctggctggcaaatggggaggcctcctgttttgccaggatcatttttatcaggctcatatccaccaatgatgcttccgtccacagtcgtaccaatgcagggatggaacccttacatttcacctgtgaaccaagttgcgtcagctggggggcatcaaactgttcaagcagggccgttttatggcttatcgcaccaagggccttctgctgcagtcacttatggcagtcagtatgcaccgttatcttcttcaaccatgccttcaagtagcagtaaacaagaacctgcctttcctgcgcgacctgggcaacctgaatgccagtattatctgaagacagggagttgtaaatttggatctgcatgcaaatatcatcatcctcagtatttgaatacacctaagtctaactgtatgctgagtcctcttggtcttcctcttcggccggggtagccaaccatgtgcttactatacacagcatggattttgcaaatttggtccgacttgcaagtttgatcacccaatgggtactctaagctatagcccttcagcgtcatcgattactgatttgcctattgctccctatcccctcaattacgctgttgctcctgtggctccaccttcatcttcttctgatttgcggccagaataccttctaaccaaagagttttcagccaaccagtcagcgtcacctggtactacatgcggacctgctggagcaatgttaaaagcttcgacttaccctctcagcatcagttcacttggacccccactcattgtgaataaggcttcaactgactttgacaaaggcatggccaaggtggtaa

SEQ ID NO: 618 - DNA, 1168 bp, Oryza sativa
  N_region (8)..(8): n = any nucleotide
  N_region (46)..(46): n = any nucleotide
  N_region (49)..(49): n = any nucleotide
  N_region (102)..(102): n = any nucleotide
  N_region (190)..(190): n = any nucleotide
cggcggcngcggcggcggcaacaacccaaagcccgtttttagcctnganagttacggggggaacggcgacggcaagcgcgacgacacggcggcgcttgccanggccttgaacgccgcctgggcctcggcggcgccggccgtcgtgctcgtcccggagagcaggagctacctgctccggcaagtcaccctntccggcccctgcgaatccaccatcaagctcatggtgaaggggacgctggtggcgtcgccggacatgtcgaactggaacgagagcaacaggaggtactggatcgtcgtccgcggcgtcgacgggctcgccgtcggcggcggcggcaccatcgacggcaacggcgaggggtggtgggagaactcctgcaagatcaacagggcactcccatgcaagggagctccaacggcgctgagtttccacacgtgcgacaacctgagcgtgaatggtctgaagatggtgaacagccagcagatccacatgtcagtggaggattgcaccggggtggagctggcccacctgtcaatctctgcgcccggcacgagccccaacacagatggcatccacatcacccacagcaagaacgtccaagtcagcgactgcaccattaagacaggggatgactgtgtgtcgatcgaggatgggacccacggtttacacgtcacgagactggtgtgtgggcccgggcatgggattagcattgggagcttaggagatgacaactccagagctgaggtgtctgacatcttcatcgacaccgtgcacctctatggcaccaccaatggagctcggatcaagacatggcagggagggagtggatacgccaaggatatcgtattccagaacatggtcatgaacagtgtcaagaacccaataatcattgaccaaaactactgcgactcagctaagaaatgcgagacacaggagggatcagcagtggagattagcaatgtggtcttcaagaacatcgcagggacaacaatttccaagagtgccatcactctgaactgcagcaagaactacccatgctatgacatttccttacaggacatcaacctggaaatggtggatgacaatggtgccacaggaagtacttgccagaatgcaaaatggaggaaatctggaacagttgttccacaaccatgcaccagcacaaattag

SEQ ID NO: 619 - DNA, 1140 bp, Oryza sativa
atgttatgcgatgaatataattttatttcattatgtgtgcaggggatattcactaaatacaagcaaccctttgcaattacttacctgggggcctcccttatgatcatctatatacctctttcatttttaaaggattttatatgtaatttgttgagaaggtcttcttcaagtagtagagtttcaaaagttaccaacaaatcttctttcggtggttgtgctcctctgaagaatggtgaattccagaagatgttggaaatggaatctcaaaaaactatagtcataaactatactgatgtggatattcctgtaatagaagagacaaaacctcttatatgtggaatcactgaattcgatgacgttttgaaggagcaagaactttccactaaggagattgcaatgtatgggttgtatctttgtcccatatggtttgtgacggagtacttgtcaaatgcggcacttgcaagaactagtgttgctagtactactgtactatcttcaacgtcaggactcttcactcttttcattggtgtgctacttggccaagattctataaatgctgcaaaagttattgctgtttttattagcatggctggtgtggtaatgacaaccatggggcagacttgggcatcagatgaatcagaaatcagcaattctggagaactcttctaggtgacatgtttggtcttctgtcagctatgtcatatggtttattcactggtgcttctaaaaaagtttgctggagaggaaggagaaaaggttgatgtccaaaaactgtttggctacctcggacttttcagtcttgttcttctctggtggcttggtctggccattgaccgcattaggcattgaaccaaagtttacaataccccactcagccaaagtggatgaagtggtgttggcaaatggccttattggaagtgtattgtcagactacttctggctctttctgttgtttggactactcctttggtggccaccttgggcatgtcactcacaattccactagcaatggtggctgatatgatcattcatggtcgtcgttattcagcggtctatatctttggttctgtccagcaggtattttctgggtttgtcattgcaaatcttgcggatcgcttttcacgttttctagggctctag

SEQ ID NO: 620 - DNA, 1131 bp, Oryza sativa
ggtatctggtcagagtctgcaagctttagcgatgatgggcttggtcctgtgcctaaaggcacatgtcaagctgggcaagaattcaaatctaacctgtgcaacaggaagataattggagctcgatggtatgacgggcatctgaagccaaaggatcttgagggtgagtacaggtcggccagggatactaacggtcatgggacacacgtagcgtccaccgcggctggtgccctggtgccgaatgttagctttcacggtctcgctaccggttatgccaggggcgttgcgcctcacgcgcgacttgctatttacaaggcttgctgggggccaggaaggagttgcaacgaggcagccgtgttgcaagcgattgatctttctcttggagggcccagctttgaatattatactagcctccacgctgtgaaccatgggataataacagttgtcttctcggcgggaaatgatggctctgctcctaggactgttacaaatgcatccccctaggtcatgtcagtagcgtcggccacaatagaccgtactttccccacttgccaatagcaccagtaaccttgtgcctgatgttgcggcacctagatctaatatcttggcagctgtcaaagatccatacacgttcaagtcaggaacttcaatggcatgcccacatgtgtcaggtgtagctgcattactcaaagcattgcatccagattggtctcctgctatcatcaaatcagcaatagtgactacaggtgatactatttggcttaccaatattggctgatgggttacctcaaaagccagtagatccatttgactatggtggcggcttcattgatctaaacagagctgttgatcctggcctagcatatgatgttgatccaaaagactatatcccattccatgattgttttttagctggcaactcaagctgtgaatcagaatccagaaatctgaacattccatcaattgcgatcctaaatctaaaggaaccaacaactgtgctaagaacagtgacaaatgtaggccaagctgatgcaatttacaaggctgttgtgcaatctcctccgggcatgcagatattagtagagccatccattctaaaattcagcgcttggcatgaataagcagagcttcaag

SEQ ID NO: 621 - DNA, 1124 bp, Oryza sativa
caggtgtcatttttgcttggtctattccctgttctcattgcatggatctattcagaagtcctggagtacagaaaatcttcgtctatgaaagtcactccgattccaatttggagaatggaactgtcaaagaagatgataaaacggtattgctggaaggaggcctgtcaaagtcaccatctacaaagtttcggatcaattctacaaaagcaaacctcataagtctttccttctggaaaatcgtgctgtactgagagcaatgaatttggcatcgttctggtttatttctacatttgtgatcggacaaacatatttccagaaagcaagaagtacaaccgtgatctgtttctgtttttatacattcttctcatcatagcatcagcattaacatcacttaagaagcaccatgacaaatcagcattctcagggaaatctatactctatcttaatcgccatcaaacagaggaatggaaaggttggatgcagcaggtcctgtttttaatgtaccactattttgccgccactgaaatatacaatgcaattcgtgttttcattgctgcctatgtctggatgactggatttgggaacttctcatactattatattaagaaagactttagtcttgccagatttgctcaggtgccattctgatctttaaccccaatctgttctatatgatactttaatgatgtggagacttaatttttttgtggctttctgctgcattgtccttgacaatgattacatgctctattacatatgcccaatgcacactttgtttactcttatggtatatgggtcccttggtctctttaataagtataatgagataccttcagtgatggcaatgaagattgtcagctgcttcttagcagtgatcttgatatgggaaattcctggtgtatttgaactgctgtggagtccatttacatttctgctagttgaatcgttatatatggattattggaatgatctatgcctacttccatccaaatgttgaaagatggatggaaaagcttgaagaatctgaaactaagggctatttgtggtacgagtatatttacaaactagacaaaattacatacaacaagtaccatccgtacacatcatggattcctatcacgtga

SEQ ID NO: 622 - DNA, 1121 bp, Oryza sativa
  N_region (102)..(102): n = any nucleotide
  N_region (105)..(105): n = any nucleotide
  N_region (933)..(933): n = any nucleotide
gacgaggacttcgtgtgcgcgacgatggactggtggccgccggacaagtgcgactacggcacctgcagctggggcctcgcctccctcctcaacctggccttntcnccgttgaagctgcggctgggcgggtcgctgcaggacaagctggtgtacggcaccggcgacggcggagggccgtgcgcgccgttcgtcaagaacacgtcggaaattttcggcttcacgcagggatgcctgcctttccaccggtgggacgagctcaacgcctttttccaaaaatccggttcgggctgaacgctctcaacggccgggttccgttgccggatgggtcgatgggagggccatgggattacaccaatgctgcatcgctgattcgttacaccgcgagcaagggttacaaaattcatggatgggagcttgggaaatgaactcagtggcagtggagttggaacaaaagttggggctgaccaatatgctgcagatgtgattgcactgaaatcactagttgacactatctaccaaggcaatccatcaaagccacttgttcttgctcctggaggtttctttgatgcaggctggtttactgaagttatagtcaaaaccaggccaaacctactgaatgtggtcacccatcacatctacaacttagggccagggagtggacacacatctgattgagaagatcctgaatccatcttatcttgatggaatggtgagcacattcagcaatcttcaggggatactgaaatctgccgggacttcggctgtcgcatgggtcggagagtccggaggcgcgtacaacagcggccgccatcttgttaccgattcatttgtgttcagtttctgttggatcagcttgggatgtcagcaaagtatgacacgaagagttactgcagacaaagtttgattggtggcaactatggcctgctaaacaangaaacattccaaccaaatcctgactattacagagcgctctactatggcatcgcctcatgggaaccaaagttctatctgcaacattcaatggcaccaacatgattcgcacttatgcgcattgcgcaaaagattcttactccattgtgtttgctcacatacacaatttccctgcccctgcatgtagttag

SEQ ID NO: 623 - DNA, 1118 bp, Oryza sativa
  N_region (126)..(126): n = any nucleotide
atggagcccacctcgtcggcggcgatggcgaggcagacgtgggagctggagaacaacatcccggcggcggcctccgaacccggacgccctggacgcgatctaccgctacgacgaggcggccaggcncggtgcagcaggagaagccctgggcgaacgacccccaccccttccgccgcgccaagatctccgccctcgcgctcctcaagatggtcgtccaagcccgcgccggcggcactatcgaggtcatgggcctcatgcagggcaagtgcgagggcgacgccatcgtcgtcatggacgccttcgcgctccccgtcgagggcaccgagaccagggtcaacgcccaggccgacgcctacgagtatatggtcgagtactccaccatcaacaagcagaggctggaaggttggagaatgtggttggctggtatcactcacaccctggttatggatgctggttatcaggcattgatgtgtctactcagatgcttaatcagcaatttcaagagccattcttggctgttgtgatagaccctacaaggactgtttctgctggtaaagtggaaattggagcttttaggacatatccaaaagattacaagccaccagatgaacctgtgtcagagtatcagacgataccactcaacaagatagaagattttggtgtccactgcaaacagcagtactatgctctggatataacttatttcaaatcatccctggattctcatctccttgatctactttggaataagtactgggtcaatacgttatcttcatcacctctcctgggcaacagggattatgttgctggccagatatttgatttagagctgataaactagagcaagctgagggtcaactggcacacagtcgatatggcatgcttatgccatcgcaacgaaagaaagagagcaagaggagtctccactggctaaggtaactcgggatagctcaaaaattactgctgaacaggtccatggtctcatgtcacagaggtcattaaggatatcctcttcaactctgtgcacccgtcaaacaaggcaagcacaagcgcaccagattcatccgggcctgagcctatggttgaagcatgagtgttctacagaattccttcattag

SEQ ID NO: 624 - DNA, 1104 bp, Oryza sativa
atgggagccagcggctccaagctcgagaaggccctcggcgaccagttcccggaaggcgagcgctacttcggcctcgagaacttcggcaacacctgctactgcaacagtgtcctccaggtgttccaggcactatatttctgcatcccgttcagggagaaattgctggaatattatgcaaataacaaaactcctggagatgcggaggagaaccttttgacttgtttggcggatcttttcatgcagaagaaaaagactggcgttattgctccaaaacgctttgtccaaagagtaaagaaacagaatgaactatttcgcagctacatgcacccaggatgcacatgagttcttaaattttctgttgaatgagcttgttgatattctggaaaaggagtctaatgctgcgaaggactcccctcaatcatcatctcctgaaaaggttccaaacgggccagttcaacctttagccaatggtgttagaaaagaaccaccggttaccttggtgcataagaattttcagggcatactgaccaatgagaccagatgcttaagatgcgagacagtaacagcaagggatgaaacattttttgatctgagtgttgatattgagcagaatagttctatcacaagctgcttgaaaaacttctgctccacggagactttaaatgctgaggacaaattcttctgtgacaaatgctgcagtgttacagcttgcaagaagcacagaagagaatgaagatcaagaaggctccacacatattagttatccacctaaagcgcttcaagtacatagagcagcttggtcggtataagaagctttcataccgggttgtattcccaatggagctgaagctcagtacatctgatgatgtagataccgagtactccctctttgctgtcgttgtccatgttggaagtggccccaaccatggacattatgtaagccttgtcaaaagccacaaccactggttgttcttcgatgatgaaaatgtcgagatggttgaggagtcgaccctgcaaacattcttcggttcttcacatgaatactcaggcaacacggaccatggatacatcttgttttatgagggtcttggtgggaagagttag

SEQ ID NO: 625 - DNA, 1092 bp, Oryza sativa
atgtacgggtgggagatgctctcgttcaacatccacgacggcttcctggaggccatcgtgcgggggaaccggtcgggcctcctcaccgccgccgactacaacaacctctgccagtgcgagaacctcgacgacgtcaagatgcacctcaccgccaccgagtacggcccctacctccagaacggaaccttcacccctgcacacaactacaattgtggagaagtgcactcttaaactggttgatgagtacaaacacatgatgtgccaggcgactgaaccactatccacattcttacagtatataacaggtatggccacatgatcgacaatgttgtacttattgttaccggaacattgcatgagagagatgttaatgaactattggagaaatgccatccattgggaatgtttgacaggtattctgagcattgcatctcttgcagttgctcaaaatatgcgcgagctttacagattggttttggttgacacaccgttagccccatacttctcagaatgcattacatctgaggatttggatgacatgaatatcgagattatgaggaacactctttacaaagcataccttgaggacttttacaaattctgtgaattttgtgttatacagaaacttggtggtgcaactgctgagattatgtgcgatcttctgtcatttgaagcagacagaagagctgtgaacattacaataaacagagtattggtacagagttgactagagatgaccgtcggaagctgtactccaactttggtttattgtagtatccatatggtcatgaagaactggctgtttgtgaagatgttgatcaggtccgtggtgtaatggagaagtaccctccataccaggctatttttgccaaaatttcgtatggggaaagccaaatgttggataaggccttctatgaggaggaagtgcggaggctgtgcttgtcatttgaacagcagcagttccactatgctgttttctttgcttacataaggctacgggagcaggagattaggaacttgatgtggatatcagagtgtgttgcgcagaatcagaagaacagggtccacgacagcgttgtgttcatcttttga

SEQ ID NO: 626 - DNA, 1048 bp, Oryza sativa
  N_region (42)..(42): n = any nucleotide
  N_region (48)..(48): n = any nucleotide
  N_region (54)..(54): n = any nucleotide
  N_region (59)..(59): n = any nucleotide
tgcgacctgttcgacggggaatgggtgtggaacgacagctanccgctntaccantccanggactgccccttcctggacagatttgatgccagaaatatgctggagaagttgagaaacaaaagagtagtatttgttggtgattcaattgggcggaaccagtgggaatctcttctttgtatgctctctgttgctgttcctgataagagctccatcttcgaagttaatgggaatcccatcacaaaacacatgggtttcttaattttcaagtttagagactacaattgcaccgtggaatattacagatctccttttatagtccttcaagggcgtgccccacctggagctcctggggttgttaaatatacaattagggtagatgccatggattggttgtctgaccggggccagtggagggatgctgatgtattgatccttaacactgggcactggtggaactacgagaaaacaatcagaagggcacctattttcaagaaggggatgcagttaaaatggacatgactgtcggagatgcttacaaaagatccatacagacattgtttggttggcttcacaatgaggttaactcaagcaagacccatgtcatcttccgtacatatgctcctgtgcatttcagagaggtggtgactggaagactggaggaaattgtcatttggaaactcatccggatgtgacaccagttaaatcattggagcaatgggctgattttcttaaccccgtaaatgatgtactagggaacagcttcaggcccaagcttctcgggttggatatactgaacgtgactcagatgacggctcaacggaaagatgggcacgtctcagtacacctgagtccttcaggccctgtccctctctacaggcaagattgcagccactggtgcttgcctggagtccctgatacctggaatgagcttgtctacaacctcttgttgaaaagacaatctatgataggtcaaaatgtacctcttgttggcaccaaaacactgaaagctggctggcgaaagctaaataagtacaacttgacaatttga

SEQ ID NO: 627 - DNA, 1041 bp, Oryza sativa
atgtcaacactaattgatggtctccctaatgaagttgctcttcagtgccttgcacgggtgccatttttgtcccatcctgttcttcaaatggtctgccattcttggagagcatctgttcgaaatggtgagctttccaaagttaggaatcagattagtgcgactgaagacctgttatgtgtgttagcatttgaacctgaaaacatgtggcagctttatgaccctcttcgagataagtggataacccttcctgtcatgccatctcagattaggaatattgctcgttttggagtggcctcggttgcaggcaagctctatgtaattggtggtggcagtgatcgagttgacccacttactggagaccatgacaggatctttgcaagcaatgaggtttggtcttatgatcctctctgtcgtttatgggtccagagggctccaatgcttgtagctcgcgcaatgtttgcctgttgtgcactggatgggaacataattgttgctgggggcttcacaaattgccgcaaatcaatatcaaaggctgagatttataaccctgaagctgacacgtgggagcctctccctgacctacgtcaagcacacagctctgcatgctctggacttgtcataaagggtaagatgcatgtattgcacaaaggcctaccaacagtgcagattcttgaagatggcaatgcttgggctgttgaggactactcttggctgcaaggtccgatggcaatggttcgtggggagctttatgtgctgagcaatagttgcattatgaagcagcgtggtgtgaatttccctgataagatggtgtcgtgtgcatctgaattccaaagcaggataggttttgggatgattggtttgggagacaacatatatctggttggtggagtaattggacctgggccaagaaatcagtgcatcaagccactatctgatgttgatatcttgaatgttactagtgagagaccaacctggctaccaggatcaccaatgacacattgtcgagggagcatttctggttgtgctttgctgaggatttag

SEQ ID NO: 628 - DNA, 1039 bp, Oryza sativa
gaggtggtgaccgggttgctgtccagcacggcgtcggcggtggtgaagcagctctggtcgctcaaatcgaccgccacaaggacggaggtcgatggtgaagtacgagggcgggtacgcggtggagacggtgttcgacggcagcaagctggggatcgagccgcacgacgtcgaggtcaccccctccggcgagctcctcgtgctcgactccatgaacagcaacgtctacagggtccagctgcctctgtcgcgatccgaagcttgttgctggttcgccggaaggattatccggccatgtcgacgggaggctgcgggaggcgaagatgaaccatccgaagggatttacagtggacgataggggaaacatttatgttgcagatgctatgaatatggcaataagaaagatcagtgatacagggggttacaaccattgctggggggaaatcaatgagaggtgggcacctagatgggccaagtgatgatgcaaaattttctactgattttgaaattcgctacatcagcagtagctgctccctcttggttattgatagaggaaaccaagcaattcgcgagattgcactccacaatgatgactgtgaatatcagtatgaagctggttttccactagggcattgcattgctttttgctgctggtttctttgggtacatgcttgcattgcttcagcgacaggttttagggatggtatcaacagcagatcggcctccactgatcccaaccgaagatcaagctgggaaacatgaggctgaagaggggttcttcacctcaatcggcaagctcatcggaggagcaaaatcatctgcggtagagatattctcacgaaagaaacgcccaacccatcagtaccatcatcaccttcagcagcaaagagccaacccttggccggtgcaaaacgagatcgtctttggtgctgtccaggaggtggacaccaagcggcgaatggtggagatcaaggccgtgaactatggggacacattctatgagcagtacgggatgcggtatcgcaacaattacatcggctac

SEQ ID NO: 629 - DNA, 1021 bp, Oryza sativa
atggccgccccgccgccttcctccccgtcgccgccgccggcggcggcggctgcggcgacgcagcagacgcagccgcacccgcagacgccgttctacgagctcgtcaagggaaactccggcatcgaaaaggtccttctccgcggcacgcgcggtttctccgctgagtctatctttatggagctcaagtaacctcatggaagaatgaccatgcggaggagttgctttttgtcagcaaggctattttcaaacctccaaaagccattcgtggtgggatacccatttgcttcccccaacagtttggaacacatggaaatcttgaacaacatggatttgcaaggaaccgattatggactattgatgataatccaccacctttaccagtaaaccctgctattaaatcttttgttgatctgattctgaggccttctgacgaggatttaaagatctggcctcacagacagttttgagttccgcttgagagttgctcttggtcctaatggggatttgagtctcacttctcgaattaggaataccaacactgatggaagatctttctcttacacatttgcatatcacacatacttctcggtctctgacatcagatcagtgaagtgcgtgttgaagggctggaaacaatggactaccttgacaatttgaagggaaaggagcgttttacagagcaaggggatgctattgtatttgaatcagagttgataaggtataccttgctgcaccttcaaaaattgcaattattgatcatgaaaagaaaaggacatttgtcttgacaaaagaaggacttccagatgctggttgtttggaacccttgggacaagaaggcaaaagctatgcaagattttggagatggagaatacaaacacatgctttgtgtggagcctgcagctgttgagaagcctattactctgaagccaggtgaagagtggaaaggaagacttgcactctcagctgttccttccagttactgtagtgggcagttagatccatgaaggtccttcaaggttga

SEQ ID NO: 630 - DNA, 1014 bp, Oryza sativa
gagctgaagcggcggttggaaacttactatggggtggacgatgaggcagaactaccatctgtcacagaggctgttcttgagcggaagcttgcggatgtgcacagcgagacggacgatgaacttatcgaggagctgcgcagcaaaccactccctgaggttcgtgacagggattttgagtccgactttgaggagatgcacgatactgatgaggagctggacaacttgtacaacgccagacagtatgtggagaaaaagatcaagagtgacgagttctttaatatggatgacgacaagtggaataagatgatcaagaaggctgtggataatggccacctcggtaatatgaacgaatgtgagaatattttggaggacatgctccactgggacaaactattacctgccagatgaaattaaaaagaaggtggaggccaaatttaatgagttgggggacatgtgtgagaagggagagcttgaacctgagcaggcttatgaattattcaaagagtttgaggataagatggtttcagagtgcacagaactaatggaagctgagaacccaactgacgtggatgaattttctaaaatggaaaataagagtgttaagttggacgatccacctggtgagggacctgttctaaggtgggagtcacgtattgtctttgctcctggaggtgatgcatggcatcccaaaaacaggaaagttaaactcagtgtgactgtcaaagagctgggactttcacgacatgccttccgacgtttacgtgaggttgttgggaataggtacaattctggaaaagatgaactcacaataactagtgaaagaggtttgagcatcgggaagagaacaggaaagattgcttgaggacattgtatgctgtagtagaagatgcaaacaaggccaataagttggctgatgatgctagaaatgcatatgttaaaaacagacttaaggccaatgctcaattcatggaaaggttgaaggtgaagacacagaaattgagggtagctgcataa

SEQ ID NO: 631 - DNA, 1002 bp, Oryza sativa
  N_region (379)..(380): n = any nucleotide
  N_region (479)..(479): n = any nucleotide
  N_region (481)..(481): n = any nucleotide
  N_region (488)..(488): n = any nucleotide
atgacgtcgccggcgacgacgtacgcctcgccgttcgtgctgtcggtgctcctcctcgtctccatcccggtcatcttcctcctcgcgccgcgcctcctcccgcccaagacgcttccggccatcccggacgccgacgagtccgacgacctcgcgctcttccgccgcgccatactctcctcctcccccgcccccaaggtcgccttcctcttcctcaccaactccgacctcgtcttctccccgctctgggagaagttcttccgcggccaccaccacctcttcaacctctacgtccacgccgaccctttctccgccctcacgatgccgccgacgccctcgttccgcggccgattcgtcccggccaaggccacgcagcgcgctnncccaaccctaatctccgccgcccgccgcctcatcgcaaacgccctgctcgacgacccatccaaccagttcttcgctctcctctcgcaatcctgcatccngntccaccngttccccacgctgtacaacacgctcctctccgacagcttcatcgagataatggacgatgcctacatgattcatgataggtactatgcccgaggcgacgatgtgatgctcccggaggtgccgtacgaccagttccggttcgggtcgcagttctttgtgttgacgaggaagcatgccatcatggtcgtcagggacatgaagctatggaggaagtttaagcttccttgcctgatcaagcgcagagactcgtgctatccagaggagcactacttcccgacattgctggatatgcaagaccccgaaggctgcaccgggtatactctgacaagggtgaactggacggatcaagtcgagggccaccctcacacataccggcctggggaggtgtctgcaagcctgatcaaggagctgaggaaatcaaatgggacatactcgtacatgttcgcccgcaagtttgctcccgagtgccttgagccactgatggagattgcagactctgtcatcctacgtgactaa

SEQ ID NO: 632 - DNA, 1001 bp, Oryza sativa
ttgaggttttctgtagaaactgcacagcatgtttcaaaagttgtcacttggaagcgttctgtatcatctttgtcctcatcatctaagagtccacttacagcagcaatgattaccgatgatgtgggtgatagtaacagtgattttgttgagcaatttgccatggtatctggaagccactcgtctaccttggataggctacatgcatgggagagaaaactacatgatgaaatcaaggctagtgaacatgttagaaagacttatgatgagaaatgtaaccttctccggcaccaatttgcacgaggtctaaatgctcaactgattgataagaccagagctattgtgaaggatcttcattccagggtgtctgttgcgatccaggctgtcgatgcaatatcaaaaagaatagagaagttaataagaatgtggaaaacaatgttggaatgccaccacaaacaattcatcacaatatcactggcataccatgtcaagagtgcgaccacggtgcagcaaggtgagcaccaccacagggccgcaacgcatctctggaacgagttggactgcttttcgtccagcttcaagatctgggtcactgctcacaagtcctacgtcgagtccctcaacgcttggctccagaagtgtgtcctgcagccagcccaggaccgatggaggcgcaagcgcaaggtctctttccctccccgccacgcgctctcccctccgatcttcgttctctgcagagactggctcaccatgatggagtcacagtcactccccacagatgagctctgcaagtctatcaaagaggtggtgcagctcctgcgcgctggatcgcctgacaaagttctcagaggcttcactgaagcattacgaggagctcaagcagaattatgagatggctcgtgatgactacaagatgggtcgatcaaatgcacatcttgtttagtctgatgatgcccatcaaatgcccattttcaaccctgttactgtattctccatcatattag

SEQ ID NO: 633 - DNA, 997 bp, Oryza sativa
atggcggcggtggcggggggatcgcgcgcggctccaccggcggattccgctgccgtggcggcggtggcgaaggaggcggaataccagaagggcgtgcagaagctggtggacctgctgtccaagctgaacccggctgccaaggagttcgtcccctcgtcggcggcggtctcgtcgccgtccaggaaggcgctgtcggcggacgcgccggtgttcgactacaactcgatcggaggctggaacgggggcggcaaggaatccggcgccgacgcctaccagcagcgtcgggaggaggaatggatacctcagtcaaggaaggaggaggatgaacgagagagcaaggcatgcagacagggaagacagcattcggcgaactgtttatgtttctgatattgaccatactgtgacggaggagagacttgctgatatatttgctaactgtgggcaaggtcgttgactgcagaatctgtggtgatccacactcagttctaaggtttgcattcattgagtttgctgatgaagaagagggcgcaagaactgcacttaaccttggtggcacaatgcttggtttctaccctgttagagtcttaccttcaaagacagctatattgcctgtgaatccaaagttccttcctaggccatagacggaggatgagaaggaaatggtcataagaactgtttattgtacaaacatagataagaagaggttactcaattagatgtaaagaatttctttgaagaactttgtggtgagaatcccaaacctaacgtatcagatgttgaggaaccatgcacgcacttatatattttgcattattgttcttggattgatcaattatcgaatatacggtccacaactccttgacagaggcatagggtctgctcggctgcctttgctgttgttggcttgttgctgctgtggctgctgctactgccagcatctgtggccctcaacggcagcaggtgccaaggcatagctgttgtgcagccaatgtactga

SEQ ID NO: 634 - DNA, 990 bp, Oryza sativa
  N_region (554)..(554): n = any nucleotide
atgcagcggaacggggtggtggaatgcagcgtgtgccggtcgcggctggtggtgccgagcccgcggagcgtgtccagggcgtacgacaagcaccgcagcaagatatcgtccaagttccgcgcgctcaacgtcctgctcgtcgtcggggactgcatccttgtcggcctccagctgcagcccatcctagtgttcatgtcaaaggttgatgggaagtttcagttcagtcccatcagcgttaactttttgacggaggttacaaaagttgtctttgctatcgtgatgctaataatccagcagtctagaaagcaaaaggttggcgaaaaaccacttctggcacgttcaaccttcatccaggcagcccgtaataatgcactactagcggttccggcccttctgtatgccatcaacaattacctaaaatttatcatgcagtatgcagctgtacttcaatccgtcaactgtgaaaatgctaagcaacctaaagctctaggtgctggtcattgctgttcttctgaaatttataatgaaaaggagattctccgtaattcaggccntgaaaagccaatatgatactagtatatatcttcagttgcagaatttgtttttatatggatatggtgcaatattcaacttccttggcattcttgggactgccttattccaaggggccagagagtttcaatattcttcgaggacattcaagggctacgatgtttctcatatgtaataatgctgcgcaaggcattctttcttcattcttcttcaagtatgcaggcagacacaattttgaagaagtattcgtcaactgttgcaacaatttttactggtctagcttctgctgccttcttggggcataccctgaccattaattttctactgggcatatcagttgtgtttatttcaatgcaccaggttcttctctccactcgctaaagccaaagatgacaaaccagctgaattgttagagttggaagatacacagaatcatcg

SEQ ID NO: 635 - DNA, 984 bp, Oryza sativa
aggtatattctctggattggacccctgaaaagaattggatagtcagtgcctcacaagatggaaggctaattgtatggaatgcattaacaagtcaaaaaacacatgccataaagttacattgcccatgggtgatgacatgtgcatttgcacccaatggccaatctgttgcctgtggtggtcttgacagcgcatgctctatcttcaatcttaactcacaagcagacagagatgggaatataccagtatcaagaatacttaccggacacaaaggctatgtttcatcctgtcagtatgtcccagatcaggaaacccgcctaattactagctctggtgatcaaacatgtgtcctgtgggatgttactactggccaaaggatatcaatatttggcggtgaattcccatcagggcatacggcagatgttttgagagcttgtccataaactcatcaaattcgaatatgtttgtttcgggttcatgtgatgcaactgtaaggctgtgggatatcagaattgcaagccgggcagttagaacatatcatggtcatgagggtgacattaacagtgtcaagtttttccctgatggccagaggtttggtactggttcagatgatggaacgtgtagattatttgacgtgagaacagggcaccaacttcaagtatacagtcgggaacctgatagaaatgataatgaactcccaactgttacatctattgcattttcgatatcaggaaggcttctttttgctggatactccaatggtgactgttatgtgtgggacacacttctcgctgagttctgataggtggtacttaatttgggaaacctccaaaactctcatgaggggcgtataagctgccttggtctttcttctgatgggagtgcattgtgtacaggaagttgggacaagaatttgaagcagatttgggccttcagcggacaccggaaaatagtttgaaggacagttttcttcctgtgttgttgtaa

SEQ ID NO: 636 - DNA, 982 bp, Oryza sativa
  N_region (307)..(307): n = any nucleotide
atgcaggaagctcttctacctccggctcatccaggccgcttctactcggactttggcccgaagccgttcggcagcggagatcaacggctctcctcgcccaacctgctgaccaacggtggagatctcttctacggctgctactcccccttcagccctacccgcgtgctctcgccgccgccgccgcggcgcgccgcctcgttctcccactgctcgtcctcctccgactccgtcgtcgacgacggagatggtgcgggggcagcggcagcgacccagtaccaggagatggccaaccgcttcgagctctgcntctcccacctcgccgatgccgcggacgaggcggccgcgctccgtcaggagaacgccgagctccgcgtcgccaacaacgacctcgcatgccgcatcgccaagttcggcggaaggcagagctccgccatcgccctcgccggtgacctccgccgcctccgcctcccccgagaagcaggctgttcttccgaagagcatctccatccgttcgaccggataccagaagctgaaccagggcggcaagcatcgcgtgtcgaagccggtgaacgtcggctcggggctggagttcgaggtgtacaaccagggcatgttcaagacggagctgtgcaacaagtgggaggagaccggggcttgcccctacggcgaccagtgccagttcgcccacggcgtcgcggagctccgccccgtcatccgccaccctcgctacaagacccaggtctgccgcatggtgctcgccggcggcgtctgcccctacggccaccgctgccacttccgccactccatcacccccgccgaccgcttctccttcggccattgatcatacgtgtcagtccatcaccgatcgccactctctcactccctcctaatctcctctctctttgataatgacatgaaaagagggggaaaaaaagaagaggccgtaaataaggtatactatttagttgcacaaagcaaatga

SEQ ID NO: 637 - DNA, 969 bp, Oryza sativa
  N_region (6)..(6): n = any nucleotide
  N_region (12)..(12): n = any nucleotide
  N_region (16)..(16): n = any nucleotide
atgganatcgcngacntccccatcgcagatttgagcattgaggtacatgaggctgaagaaatctcaagttgccgtgggcgccaacaagtccaagggagcagatgggcctagcaccagcagtgttctcaaagaggtgtgcaaaatgcatgggatatgctatctgatgagcaatcacggaggcacatcaatactggatctgctgacctcaacaacatccttggtggagggattcactgtaaagaggttactgagattgggtggtgtcccaggagtcggtaaaactcaactgggggattcaactagcaatcaatgttcaaattccagtggagtatggtggacttggtgggaaagctgtttatatagagatacagagggaagtttcatggttgaacgtgtctaccaaattgctgaagggtgcatcagtgatatactggagtactttccacactgccatgacaaggctccagccggacaagaaaaactgaagcctgagagtttcctggctgacatctactactttcgaatatgcagctatactgaacaaattgcagtcataaactatctggaaaagtttcttggggagcataaagatggtaagaatagttattattgacagcgttactttccactttcggcaagattttgatgatatggcactaaggactagagtgcttagtggattatcattgaagttgatgaaactttcaaaggcatataacttggcgggttgtcttgttgaaccaagttactactaaattcacagaaggatcatttcagttaactcttgctctagaggtgacagttggtcccactcatgcaccaatcgactaattctgtattggaacggcaatgagcggtatggattcctggacaagtccccttcactaccagtagcatcagcaccatatgcagtgacagttaaaggggtgagagatgctgtgaattcaaacagcaagcgagtccgggtaa

SEQ ID NO: 638 - DNA, 961 bp, Oryza sativa
gacaaagtccgggctggtgttcttgtgggaactggcatgggtggcctcactgtgttttccgatggtgttcaaaaccttattgagaagggatacaagaaaatttcgcctttctttatcccatacgctataactaacatgggctcggcattgctagcaatggatgctggttttatgggtccaaactactcaatttcaacagcttgtgcgacctccaactactgcttctatgctgctgccaaccatatacgtcggggtgaggctgatgttatcgttgctggtggtactgaagctgcaattattccaattggccttggaggttttgtggcctgtagagcactatcgcagaggaacgatgacccagaaactgcatctaggccatgggacaaagagcgagatggttttgttatgggcgaaggtgctggtgtactggtcatggagagcctggagcatgcgatgaagcgggatgcaccaataattgctgaatatttgggaggtgcagtaaactgtgatgcttaccatatgactgatcctaggtcagatggactgggtgtatcgtcctgtattactcagagccttgaagatgcaggtgttgcgccagaggaggtaaattacatcaatgcacatgcaacttcaactcttgctggtgacttggctgaagtaagagccattaagcaagtcttcaagaatccatctgatattaaaatcaattcaacgaagtctatgataggccattgcctaggtgccgctggtgggttagaagctattgccgttgtcaaagccataactactggatgggtgcatcctactattaaccaatttaaccccgagcctgaagttgattttgatacagtagccaacgagaagcagcagcacgaagtgaatgttgcaatgcagctatctctaattcatttggatttggaggtcacaattcagtggtagtatttgcgccattcaagccatg

SEQ ID NO: 639 - DNA, 937 bp, Oryza sativa
tcaaagaaagacttggctctacaccaggctattgatcaaataacatctgcatttgggaagggcgcaataatgtggcttggtcgttctgaaggtcgtagagaagtacctgttgtgtcaactgggtctttctctttggatttggcattgggaactggtggacttccaaagggtcgtgttatagaggtgtatggtccagaagcttcaggcaagacaactcttgcacttcacgttattgcagaagcacaaaagcatggcgggttattgtgccttcgtagatgcagagcatgccttagatccagctctggctgaatcaattggggtcaacaccagtaatttacttctctctcagccagactgtggcgagcaggcactcagtcttgtggacacactgattcgaagcggctctgttgatgttgttgttgttgatagtgtagcagctcttgtccctaagagtgagcttgacggggagatgggtgatgcacatgttgctctccaggctagattgatgagccaagctcttcgcaagctgagccactctctctcactttcccagacaattttgttattcattaaccagaggtctaaagtgaccacatttggaggatttggaggtccaatggaggttacttctggtggaaatgcccttaaattctatgcttccgttagaatgaacatcaagcgtattggtttggtaaagaaaggcgaagagactataggtagtcaagtgcttgtgaagattgtgaaaaacaagcatgccccaccgttcaagacagcacagtttgagctggaatttggtaaagggatatgccgcagttcagagcttattgaacttggattaaagcacaagcttgtcaaaaagttgggtggtgcattttattctttcaacgaagagtcatatcgtggtaaagatgcccttaaatcttacctcaacgaaaat

SEQ ID NO: 640 - DNA, 934 bp, Oryza sativa
  N_region (618)..(618): n = any nucleotide
  N_region (622)..(622): n = any nucleotide
  N_region (816)..(816): n = any nucleotide
atggtgctgctgcaggtggggttcgcggggatgtacatcgtctccgtggcgtcgctgaagcgcggcatgaaccacttcgtcctcgtcgtctaccgcaacctcgtcgccaccgtcctcatggcccccttcgccctcctcctcgagagaggcccaagatgacactgagaatcttcctcaagatcatggggcttgccattcttgagatcagaacctatactacatgggcgcgaagctgacctccgccggcttcgcctcggcgctcgtcaacatcctccccgccgtcaccttcctcctcgccgtcctcctcaggatggagaaggtcaggctccggagcctgcacagccaggccaagatcgccggcacggtgttcacggtggccggcgccttcttcatcctccagaacaacacgctgcagagctacccggccgagctgtcgctgacggcgctcatctgcgtgctcggctcggcgatgagcggcgccgtcgcgctcgtggcggagcgccgcgacatgagcgtctgggtcatcggcttcgacacccgcctcttcaccgccgtctactcggggatagtgtgctccggcgtggcgtactacgtgcaggggctcgtgacgagggcgcntggnccggtgttcgtcacggcgttccagccgctctgcatgatcatcaccgccgtcttgggctccaccattctcaaagaagagatcactcttggaagcagtgtgatcggcgcggtgatcatagtggtggggctctacgcgctcatctggggcaagggcggcgaccacgccgacaacggcaagccgccggccgccgccgnggccgcgccggagaagggcttgccattgaccacgctgcaggccaacggcgacggcgacggcaagcttgctgtgctcgtcgccgacgtcgagatgccggcggtgaaggatgtctactag

SEQ ID NO: 641 - DNA, 926 bp, Oryza sativa
cctgttgtaaggtctggaggttgggctgatattgggtcaaggcacacaatggaggatgtctttatttgttctgataacctcatgaaagagtttggagttgaaagttttgaagatggtccgagcgcattttatggggtttttgatgggcatggtggaaagcacgctgctgactttgtgtgcagcaatttggcaaggtttatcgttgaggatgaggattttccaagggagatagagaaagctctgtcctcagcgttcttacagactgatgctgctttcgcagatgcttgttctgtgaactcctctcttgcttctggcacaactgctcttgctgctcttgtggttgggagatttttcataggtcacttctggtagcaaatgctggtgattgtagagcagtactttgttgtcgtggaaaagccattgaaatgtccagggatcacaagccttcttgcaacagagagaaggttcgcattgaagcctctggtggttatgtttatgatggctacctgaatgggcagcttaatgttgcgcgggcaataggagactggcacatggaaggaatgaaggcatgtgatggtcttggacctcttagtgctgagcctgaggtgatgatcaggaatctcactgaggaggatgaattcctcatcatcggttgtgatgggatctgggacgtattccgcagccaaaatgcggtagactttgcacgccgaaagctccaggagcacaatgatcctgttacctgttgtaaagaacttgttgatgaggccatcaagaggaagagcggcgacaacctttctgttgttgtcatctgcttcaactctcggccgcctcctgtcctaacaactccaaggcctcgtgtacagaggagtatatctgcagaaggcctgagggagttgcaaagctttcttgatagcttggctgattga

SEQ ID NO: 642 - DNA, 920 bp, Oryza sativa
cagcctaaacggcgcacagtgctcaaggatgtaaccaacatcggctgtgccaactcatccaaaaattgcaccaccacgagcaagctgcagttaggttttatagatattgacaatgataatggaaatcctcaaatgtgtgcttcctatgcttcagagatatacacaaatctgatggcctctgagtacatggaggctttgcaacgtgacatcacaaagggcatgcgaggcattctcattgattggcttgttgaggttgatttctcttgatgtttctgaagaatataagcttgtgccagacacactctacctaaccattaatcttattgaccgatttctttctcaacattatattgaaagacagaaactccaacttcttggaataacaagcatgctgattgcctcaaatatgaagagatatgtgctcctcgtgttgaagaattttgtttcataactgacaatacatacacaaaagctgaggtgctgaaaatggagggcctggtgcttaatgatatggggtttcatctatctgttccaacaacaaaaacatttctcagtttatcaggagattccttagagccgcacaggcttctcgtaatgttccttcaattaccttgggatatctggccaattatcttgcagagctgaccctgatcgattacagtttcctcaaatttcttccttcagtggtggcagcatctgcagtctttcttgcaagatggacacttgaccaatctgacattccatggaatcatactcttgagcactacacttcttacaaaagctctgatattcaaatatgtgtctgtgctctacgggaactgcagcataacaccagtaattgccctctcaatgctatacgtgaaaagtataggcaacaaaaggtacatgatcaccacttcaccagcttcttgaggtactag

SEQ ID NO: 643 - DNA, 919 bp, Oryza sativa
atggccgaccacgctgcggcggaggcggcgccgcagtcgtcgcaggaggaggaggaggactggaaggaggccgaggggggagacggggacgtcgaggtggcggacaggggcggcggaggcggcgccgccaatgggggaatcccggaggggaggccgatccgggtctacgcggacggaatctacgatctcttccacttcggccacgccaagtcgctcgagcaggccaagtttcctaacacatatctccttgtcggatgctgcaatgatgagttgacacataagtacaaagggagaactgttatgacagaggatgagcgatatgaatcacttcgtcactgcaatgggtggatgaagtcattcctgatgctccatgggtggtaacggaagaattcttgaataaacataacattgattttgttgcacatgattctctgcctatgctgatgctagtggagctggtaacgatgtctatgaatttgtggtcaaaaaacttggtaaatttaaggaaacccagcgcacagatgggatatcgacgtcagatattataatgcggattgttaaggattataatgagtatgttatgcggaacctggccagggggtacaccagaaaggatcttggtgtcagttacgttaagcaggaaaaaagactgagagttaacatgggattaaaaaacctgcgtgacaaagtgaagcagcaccaagaaaaagtaggggagaaggagtgggtggaaaatgcagatcgatgggttgctggttttctggagaagtttgaagaaggctgccactcaatgggaactgccatcaaagagcggatccaagagaggctcaaggcgcaatccagggatttcagccttctacagtatgatggcgaggatgttgacgaggatgaggacgacgacgaatatgtcagagaataa

SEQ ID NO: 644 - DNA, 853 bp, Oryza sativa
  N_region (635)..(635): n = any nucleotide
atgatgtccttcagccagcccgacgccttctcgccgtcgcagttcacctcctcccagaatgccgccgccgactctaccaccccttccaagtagagccggggcgcatcgagcaccatgccgctcaccgtgaagcagatctctgaagcgcagcaatctggcatcaccggggagaagggcgctcccttcgtcgtcgacggcgtcgagacagccaacgttaggcttgtgggattggtcagtggcaagacggagcggaacaccgatgtgtccttcacgatcgacgatggcaccggccgcctcgatttcatcagatgagggtcaatgatggtgctgattctgctgaaaccgctgctgttcagaatggaatgtatgtttctgtcattggtagcctcaaggggcttcaggagaggaagcgtgctactgctttcgctatcagaactgattataatgaggtcacactgcatttcattcagtgcgtgcgaatgcatttagagaacaccaaatcacagagattggtagccctgcaaaaacatattctgccatgggatcctcatcttccaatggcttcagtgaaatgaccactccgacctctgtgaaatccaacccgggcaccagtgctcagtgtaacaaatggatcnaaaactggatttgaacacagaagtgctgaatgttttccgcgaaccagcaaacgtcgagagcgagcatggtgtgcacattgatgaaatcgtgaagcgcttcaggctaccggaggccaagatcaaggtagctattgattacctcgctgacattgggcacatatactcaacaatcgacgagtctcactacaagtcagcgttcaatgaataaaggggattga

SEQ ID NO: 645 - DNA, 851 bp, Oryza sativa
atggcggagggtggcggcggaggaggagggtcggcggcgtcggcggcgctgaaggatcaggggaacgagcagttcaaggcggggaactacctcaaggccgccgcgctctacacccaggccatcaagctcgaccccgacaaccccaccctctatagagcaatcgggctgctgcatttctccatctagttaagcttaataaggcactcgctgatgctgatacgacaataaaactcaagccacaatgggaaaagggtcatttcaggaaagggtgtgttttagagtcgatggaacactatgaggaggctttgcaacacaatccacaaaatacagaagtttcaagaaaaattaagaggcttactcagttggcaagggaaaagaagcgggctcttgatgtggagaacatgcgttctaatgttgatgttgcaaagaacttggattcactgaaaaccgagctggctataaaggtctggcatgacaccggaaaagtagatgcaagagttaattttcttcttgatgaccagaagactgatactgaaaaacatgccccagtggttaacattgacaaggcctttgactcaccccacactcacagcagttgcttcacatttttgcggcaatattccgaggagtctttctcaaaggctgcttgtatggtagcacctaagagcgccatctcgtaccctcagtatatacaggtctggaaaggacagggatcaagaaaatggaagcttgaccagagtgatggtttctttgtgcaatttgagtcaccaattctgcggaagatatggtttgtccctagcacaactgaaaagggacgagtattatgcaggtacttatccctttcttcatga

SEQ ID NO: 646 - DNA, 840 bp, Oryza sativa
  N_region (270)..(270): n = any nucleotide
atggagaagaagaagcagaagagacagatcaaagatcaagatgttcagagcattgcagatcgtcctcaggggttggctgggaaggtggcggtgatcaccggcgcggcgagcggcatcggcaaggcgaccgcggcggagttcgtcaggaatggcgccaaggtcatcctcgccgacgtccaggacgacgtcggccgcgccgtcgcctcggagctcggcgcggacgcggcgtcgtacacccgctgcgacgtcaccgacgaggcgcaggggcanctcgacgtcatggtcaacaacgccggcatcgtgggctccctgtcgcgccccccgctcggcgccctcgacctcgccgacttcgacgccgtcatggcggtgaacacgcgcggcgtcctcgcgggcgtcaagcacgccgcgcgcgtcatggcgccgcgccgccgcggcagcatcatctgcgtggcgagcgtcgccggggtgctcggcagcgtgacgccgcacccgtacagcgtgtccaaggccgccgtgctcggcgcggtccgcgccgccgccggcgagatggcgcgctccggcgtgcgcgtgaacgccatctcccccaactacatccccacgccgctggtgatgcgcatcatggcggagtggtaccccggggcgagcgccgacgagcaccgccgcgtcgtggagcgggagatcaacgagatggagggcgcgacgctggagcccgaggacatcgcgagggcggcggtgtacctggcctccgacgaggccaagtacgtgaacggccacaacctcgtcgtcgacggcgggtacaccgtcggcaaggcgcccaacctgccggcgccgccgcaataa

SEQ ID NO: 647 - DNA, 826 bp, Oryza sativa
atggcttatgacagttttgcttattgtctgtgcagacgtaggaaagaagaggctggagagcctgaagcagatccagaacgagatcaaaggacagtatttgcctaccagctgaaggcggatgaaagagacgtgtacgaattcttttcaagggctgggaaggtccgggatgttcgcctcatcatggaccgaaactcgcgccgttctaaaggagttggtacatcgaattctatgatgttatgtctgtaccaatggcaatagctctttctggccagctgcttcttggtcaacaggtgatggttaagccatcagaggctgaaaagaatttagttcagtcaaatgcttcttcaagtggagcagcttcaggtggggcaagaaagttgtatgttggaaatcttcactcaaatattactgaagatcaattgagacagttcgaaccgtttggtcaggtggagcttgtccaattgccactagatccacttactgggttatgtaaaggttttggttttgttcaggctcagagtttaaatgggcaacttgatatagctggacgtgtgattaagcccagtgaatgcctattgcttaaaaatatgtttgatccatccgtggagacggaccctgattttgatttggatatcaaagatgatgtccaagaagaatgctccaagtttggccaagtaaaacacatttttgtggacaaggctttgtgtaccttcgatttgacagtataacagctgccatgagtgcacagaaagcacttcatgggaggtggtttgcgggaaagatgattacggcaacatttatggtatggaatacaacatttaattga

SEQ ID NO: 648 - DNA, 808 bp, Oryza sativa
  N_region (543)..(543): n = any nucleotide
atgctgctccggcgacccctccacacccttcccatcctccccctcctcggccgccacctctcctcctcctccgccgccgcggaggcggtcaccgcggaccaccaccaccaccacgacgcggacctcctgtcgccgccgttcgactacctcccgggccacccgcggccggacgcgaagcacgacgagctcatcctcgccgtgccgcgcgcctcctcggggcggcacgtggcggccaaggagcggaaggccgggcgggtgccggccatcgtgttcgagcaggagaacgggcaggagggcggcaacaagcggctggtgtccgtgcagtccaagcagatccgcaagctcgtcgaccacctcggccgctccttcttcctctcccgcctcttccgcctccaggtctggtccgagcacgccggccagggggagctcatcgagagcgtccgcgtccttccccgcaagcacttacatgcaggaactgatgagcctctgaatgtgacattcatgagagccccttcttcagccctactcaagatagatgttccnttgatgttcatcggagaggatgcatcgcctggtctcaggaaagggggcttacttcaacaccataaaacgaactgtcaagtatctgtgccctgctgacatagtgccaccatacattgaggtggatttaagtgagttggatgtcggacagaaactgttgatgcgtgatctcaaagttcacccagctctgaggttgcttcagtcaccggaacaacccatctgtagcattataggatcaagagcacctgatcagaagaagtcaaaataa

SEQ ID NO: 649 - DNA, 805 bp, Oryza sativa
aacctttcttcagaagtgtcagcaatatatcttgccatgcagcagtccaagttggagtgcattgatgaacatagtcaagattcaatctcaacagaaggttatgttgatcctgaggacactgaggaatatgatgattttgatccatatgcttttatcaaggatttgcctgatttatcactagtggtccccaagtttcgccctgtcctactccccaagcaaactcggagttgtcctacaactaccctggtacttgatctggatggaaacacttgtgcattcaactcttgaaccatgcgaggatgctgacttcgcatttccagtttattttaacttcagagaacacacaatatatgtccgatgccgtccctatctcaaagagttcttggagagggttgccaatttgtttgagacaatcattttcactgcaagtcaaagcatttatgcagaacagcttctcaatgttcttgatcctaaaagaaagttgttccgtcatcgtgtttaccgtgattcctgtgtttatgtggagggaaactacttaaaggatctaacagttcttggacgtgacttaactcgtataatgattgttgacaactctccacagcaggcttttggattccagttagacaatggcattcctattgaaagctggtttgatgatcccaatgatcaggagctgttgaaactgctcccattcttggaaagcctggttggcgttgaggatgttcgaccatatatagccaggaagttcaacctccgtgagaaggtagcaaccgcatcgtctctttcaatggacctgcaaatgtga

SEQ ID NO: 650 - DNA, 804 bp, Oryza sativa
gcgcacagcttcaccttcaaggatctgtcagtggcgaccggctacttcaacgaggcgaatttcatcggagaaggtggctttgggaaggtgtacaaaggcaagatcaatgggcaggtggcagtgaagcagctcacccgggacggcgtgcaggggaggaacgagttcttggtggaggtgctgatgctgaccgtgctcaaccatccgcatctcgtcagtttggtcggcttctgcgcgcagggtgacgagaggctgctggtggtgacgagtacatgccattcggcagcttggagagccatctcttcgggcaagcagccactggactggaatacacgcatgaggatagctgttggagtggccgaagggctttcgtatttgcacaatgtggctgatccgcctataatttaccgtgacatgaaagcagctaacattctgttggatgaggactacagaccaaagctctctgatttcggactagcaaaagttggaccagtcggtgacagaactcatgtctccaccagggttatgggaacttatggctactgtgctcctgactatgtggtgagtggtaagcttaccatgaaatctgacatatacagttttggtgttctcctgttggaactgatcaccggcagaaggatctacgatgcttcaaggcctaaaccagagcagagtttactaacatggctcgctgacccagctctgcacgggtgctatccaacatctgcactaaatcagttggttgtgatcagcatcatgtgcctccaagatcagccccacgtccgcccaatcatctctgatgtcgta

SEQ ID NO: 651 - DNA, 754 bp, Oryza sativa
gccttcgtcgccgccgactggtgtcctcgcctatacggttgcgcctatacggctggcctattatgccactgttggggggcatcttcgctttcaccatcgactgccttcgtcgccgccgactggtgtctttcgccgccgactggggtcttcacctatacggttggttggtcgcaacactattgttaggcgtctacatcttcaccacttcgtcgctgctcatggtgtctttactttcatggttggcctattttgtcgccgttcaaggacgtcttcattttcgtcatcattctacttcttccatcgccgacaggttatgccgccaccgactaatgtttttatcttcacaactacgcgtcttcgctaccggtttgcttctgttgccgccgactcgtgttcacttcatcacagctatgcaactttgtcatcatggtggagcgacttcatttttattatcttcagcaccggcaaactctattgccgctacttcacaagttttgctacttcaccaaccacgacgtctacaagagcttcgacatctcagcatgcgtcaccaaatatgatgccgtgttattttactacaacaagtggtgttccaatcttcaatatttctactcggatatcttcaacatgcatcttcactcaagcaatgactactcgacgacaagaagctatagcttttgactctatgttcagttgtttcccaactaaccaaagagtcgggggctacacaaatacacggctcaaaattcgatag

SEQ ID NO: 652 - DNA, 747 bp, Oryza sativa
atggggcgagggaaagtagagctgaaagcggatcgagaacaagataagccggcaggtgacgttcgcgaagaggaggaacgggctgctgaagaaggcgtacgagctgtccgtgctctgcgacgccgaggtcgccctcatcatcttctccacccgcggccgcctcttcgagttctccacctcctcctggtatgtacaagacactggagcgataccgcagttgcaactacaaccttaactcatgtgaagcatctgctgcactggaaactgaactaagcaattaccaagagtacttaaagttaaagacaagagttgagttcctacaaacaactcagagcagaaatcttcttggcgaggacttggttccacttagcttgaaggagctcgagcaacttgagaaccagatcgagatatccctcatgaatatcaggtcatcaaagagaatcaacagttgcttgatcaagtatttgagctcaaacgtaaggaacaacaacttcaagatgctaataaagacttaaaaaggaagttaaaaagggaattgcagttctttcagcttaactaaaaatcttttttattgcaacagatacaagaaactagtggagaaaatatgcttcatatatcttgccaagatgtagggcccagtggccatgctagtgaagctaaccaagagtttctccatcatgcaatttgtgacccttccctgcatataggggtatcaagcttacatggatcacctcaaccaatgaatga

SEQ ID NO: 653 - DNA, 696 bp, Oryza sativa
atgggccaagtataccctcagaaccattcaccaatcaagaggagtcagttcacatctcatgctggttttttcctgtgctgtagaacacaagacatgctaaagagcaagctcattcttgaggatgattttgggtggaatttactgaagtatataggaggtgttgacattagcttctcgaaagaagacccttccacggcgtgtgctgcactggtagttttagatgctggtaccttagaagttgtccacgaagagttcgatgttgttcggctgcaagtgccatatattccaggatttcttgctttcagagaggtactcatggttgatggaaatggattacttcatccacgagggttttggtttagcttgtcatcttggtgtccttgcagacctgccgaccattggagttggaaaaaatgtattaatattactgccattgcaactactcctatctgcaccatgtggatggccttaaccaatctgaattgagaagacaattagaagcaaaagaaaactgcaacaaggagttgtcgaagccgatctacatctcagttgggcatcgcatttcacttgactcagccattgggatagtgaagttctgtagtaattatcgcattcccgagcccattcgccaggtagaattttgctgatataagatcaaaggtgttccttcaaaagcaccaaaaacttgaagagtaa

SEQ ID NO: 654 - DNA, 690 bp, Oryza sativa
atgacgttctctggtacacaggacaagtgcaatgcttgtgacaagaccgtgcatttcattgatctccttaccgcggacagtattccctaccacaagtcttgcttcagatgcagccactgcaaaggcacactttcgagatgtgcagctattcgtccatggatggggttctttactgcaagacccattttgagcagctattcaaggaaacaggcaccttcaagaagaacttcccctcagttcaggtacaaaggcaaacagtgaacagaaacaggctaagattcccagcaagctgtcctctgtgttctgtggaacccaggacaagtgtactgcctgcaagaagactgtgtatccattggagaagagatgaccatggagggtgagtgttaccacaggacctgcttcaagtgcgcccatggcggctgccttctgacgaacgcctcctacgcctcgcacaacgggatcctctactgccagaaccacttctggcagctgttcaagaagtccggcagctacgacaacctgctgaagcccgcctccgccgccgccgagaacaccgtcgaatccgaggtcgccgtcgcggagcccgcgaaggaagacccggagacggaggaggcagccaaggaagaagaagaagaagcgtcaccggagcaggtcgcggaagctgttgtagaggaccaggagcactcatga

SEQ ID NO: 655 - DNA, 681 bp, Oryza sativa
atggacgcgacggcgccgctgctcagccccgcctccgacgaccgcttctgggaccgcctccgcacccgcgtcgacaccatcctcgaggaccgccgcctcgtcgctccccccgccgccacggaatccgagcgggggaagcggctcagggaggactcgctgatgctggtgcgtggcctcgactccgtcgccgcctcgctggcgcagctctccgacaccctcaccgccgcgcagaaggcggtctcgatggccggaagagcggctgctctggcgagggagctgaagaacatcaaatcggagctgcacttcatgcaggagagatgcggtttgcttgaggaggagaacaagaggctcagagaggggtatgacaatggagttccccctgaagaagatgacctggtgaggctgcaattggaggctctgctcgcggaaaaatctcgactggcgcaggagaacgccaacctgtccagggaaaaccagagcctgattcagctggtggagtatcatcagctgacctcccaggacctcgctgaatcttacgaggacgtaatggaggggatgcggctggacttctcgtcgccgctaggcaagatcgacagcgatgaagaaggcgagcgtgagaaccgaagagttgctgtcactccatctgataagttggaagccttggagtcatctgatgagtag

SEQ ID NO: 656 - DNA, 681 bp, Oryza sativa
agtctgctgcggctcaacgacctgagggacaatccgggggcgcggaagcagaagacccggaagggccgagggatcggctccgggaagggcaagacggctggccgcggccacaaggggcagaaggcgcggggcaccgccagattcggcttcgagggcggccagaccccgctccgtcgccgcctcccccgtcgcggcttcaagaaccgcttctctctgacgtttcagcagccatgtggtctggggaaaattgcaaagctcatcaacgctggaaaaattgattcctctgaattgatcacaatgaagacactgaaggatacaggtgctattggaaaacaaataaaggatggaattcgactaatgggccgtggagcagaggaaattaaatggccaatccaccttgaggtatcaaggacaactgctagggcaaaagctgcagttgaagcagctggtggaacggtaagactggtgtactataataaccttggattcagggcacttctcaagcccgagtggtttgcaaagaaaggccgacttttacctaaagcagcaaggcccccacccaagcaacgagacaaggttgatagcattggccgcctgcctgccccaacaaagccgcttcccttcacaccagaagaattggaatttgcagcaaaacgtgaagctgctcgagtgattgcgtag

SEQ ID NO: 657 - DNA, 677 bp, Oryza sativa
atggctcccgctgttgaagccgtggagaagaagacaggctcagcccccgtcaaggcccctgctctgaatgaaaggatactgtcatctatgtcccggagatctattgcagcacatccatggcatgatcttgagattgggacctggtgcaccaactatattcaactgcggtcattgagattcctaggggcagcaaggttaaatatgaacttgacaagaaaactggactgatagtgaaggtggaccgtgtgctctattcatcagttgtgtaccctcacaactatggattcattcctcgcacgctgtgtgaagacagtgatccgttggatgtgctggttataatgcagcaggagcccgttataccaggatgcttcctacgagcaaaggccattggtctcatgcctatgattgaccagcagggagaggcagatgacaagattattgccgtttgtgctgatgatcctgagtacaagcattacaatgatatcaaggagctcccacctcaccgcttggctgaaatcaggcgcttttttgaggactgtatccttttttatcaacaagaagaatgagaacaaggaggttgctgtcaatgacttcctgcctgcaagtgctgcttatgaggccataaagcactccatgatctctatgctacttacatcgtggagggcttgaggaggtag

SEQ ID NO: 658 - DNA, 669 bp, Oryza sativa
  N_region (523)..(523): n = any nucleotide
atggacagtaaggacaaggagaaggagcatgagcagaccgcgtcgggcaggaaccccgacgtgaacgacgtcgaggaggaggaggaggacgaggagggcaacaagcgcgccgtcgtgctcggcccccaggtccccctcaaggagcagctcgagctcgacaagggatgatgagagcctgaggaggtggaaggagcaactcctcgggcaggttgatactgaacagcttggagccggaggtgaaggtgctgaacctgaccatcctgtcgccggataggccggaccttgtactgccgatcccgttcgtccccgacgagaagggctacgccttcgcgctcaaggacgggagcacttacagcttccgcttcagcttcatcgtctccaacaacatcgtgtcaggcctcaagtacaccaacactgtctggaagactggagtaagaggggacattcagtccccagctagagccctacacatatgagggtgaagaggagaccaccccagctggcatgttcgcaagaggttccnattctgctaaactaaagtttgttgatgatgatggcaaatgctacttggagatgagttactactttgagattaggaaggagtggccaaccatccaatgatgtgtggaactaaaaaagggcttcagaaacatgttagctgctagctaa

SEQ ID NO: 659 - DNA, 669 bp, Oryza sativa
atggctaccaccaagcattttgtgttgctaataatccttgtcctccttagcataggaatgaccactagtgctagaactctcttgggttatggcattggaggagaaggtggcggtggtggaggaggaggtggtagcggcggaggaggtggttatggtggatcagggtacggctctggatcggggtatggcgagggaggtggtgctggcgctggtgggtatggccatggtggtggtggaggcggcggcggtggtgaaggtggtggttctggctccgggtatggttctggacaaggttctggatcaggatatggctctggtgcttttggagctggtggttatggaagcggtggaggtggcggaggtggtggtgcaggatctgggtatggctcaggtgagggttatggctctggatatggatcaggtgcaggtggtgctagtggtggtggaggtggacatggtggtggtggcggcggcggtcaaggtggtgggtatggtagcggctcaggctatggatctggcagcggatatggtcaaggtggcggtgcttatggtggaggatatggaagcggtggtggtggtggaggcggcggcggccaaggcggaggatctggctatggttctggctctggctacgggtatggatccggaggaggtggtgggcactactag

SEQ ID NO: 660 - DNA, 647 bp, Oryza sativa
atggaggcccagccgtcgtatcccggtgagattcacgtcatcgtgggccccatgttcgccgggaagaccactgcccttctccgacgcgtgcaggtcgaggccggcactggcaggcaggaacgtggcactcatcaagtctgacaaggacaataggtatggattggattctgtcgtaactcatgatggcacaaagatgccatgctgggctctacctgagctttcaagtttccaagataaattaggaacagaggcttacgataagaggttgatgtcataggtattgatgaagcacagttttttgacgatcttcatgatttctgctgcaaagctgctgaccgtgatggaaaaattgttgtagtcgcagggctagatggtgactacaaaagaggaacaaatttgggtcagttctggacattatacccttggctgactcggtcaccaagctcaccgcacgctgtgagttgtgcggtcgccgtgcattcttcacgctgaggaagacacgggaaactaagaccgagctcattggaggagctgatgtgtacatgcctgtatgtaggcaacactacctggatggtcagattgtcattgaggccacaaggattgtgctggatcttgaaaaatccaaggttatccatgctttcaagtga

SEQ ID NO: 661 - DNA, 643 bp, Oryza sativa
  N_region (15)..(15): n = any nucleotide
  N_region (57)..(57): n = any nucleotide
  N_region (109)..(109): n = any nucleotide
  N_region (111)..(111): n = any nucleotide
atgccactggcgaanggggaattcgcgctgccggacgaggtcctggcggtgatgccncgggacccgtacgagcagctggatcttgcgcggcgcatcacggcgctggccntngcagggcgggtgaccgggctggagcgggaggcggcgcggctgagggagtccgccgcggacaaggaccgcgagaacggggagctgcgggagcgcgtcaagctgagcaaggagcgggactcgttggcgcagacgtccaagaagctggcgcgggacctgcagaagactccagaagctacaccaaaaattatgtcaacttctgcttctccgagaagaatgtctacaacagcaacaccaaaattgatgtctggaactacttcaccatcaaaaactcgaattgaaggatacatgtccatgacaccatggtacccctcaagcaagcaatcgtcagcagaggagccgcctatcatacgaacaatttggagcattcttagccaacatcaaggaactcaatgctcataagcaatcaagagagactctcaagaaggctgaagagatctttggtccagacaacaaagatctttacctctctttccaaggcttgctgaaccgaagcttaccatagagcatatgcttcacattggtcccgcttctg

SEQ ID NO: 662 - DNA, 626 bp, Oryza sativa
tccatctggggcgtgccgctcgacgagcgcgccgacgtcgtgctgctcaagttcctccgcgcgcgggacttccgcgtccgcgacgcgcacgccatgctgctccgctgcgccgcttggcgggccgagttccgcgccgacgccgtgctggacgaggacctcgggttcaaggacctggagggggtcgtcgcctacatgcacggctgggaccgggagggccacccggtctgctacaacgcctacggcgtcttcaaggacagggacatgtacgaccgcgtcttcggcgacggcgagcgcctcgcccgcttcctccgctggcgcgtccagggcggcgtcaacgccatcatccaggtcaccgacctcaaggacatgcccaagcgcgagctccgcgccgcgtccaaccagatcctctccctcttccaggacaactaccctgagatggtcgcgcgcaagtcctcgcaggtgttcatcaacgtgccctggtacttctcggtgctgttctccatgatctcgccgttcctcacggagcgcaccaagagcaagttcgtcatcgcgcgcgagggcaacgtcgccgagacgctcttcaaatccggccggagctggtgccggtgcagtacggcgggctgagc

SEQ ID NO: 663 - DNA, 614 bp, Oryza sativa
aagctgtccgcgtaccgggacaggcggttcaccgggacgcaggaggagtacgaggcggcgctgcaggcgtcggtgacggtgtacgtcgggaacatgtccttctacaccacggaggagcaggcctatgagctcttctcccgcgccggcgagatcaggaagatcatcatgggactcgacaagaactccaagaccccctgcggcttctgcttcatactgtaccctctcctttccttcctcaatccgttttttttttaatacaagagattactccagggaggatgctgaagatgcggtcaaatatattagtggaacaatgcttgatgatcgcccaattcgtgttgattttgattggggctttgaagaaggcagacaatggggtcgtggacggagtggtggacaagtattaccatgatcttattctgcatgaataacaaatgtaagggatgagtaccgcacggactacgatcctagaggtggctatggtaagatggttcagaaagagctagaagcacaacgtgagttagttgactatggaggagaagaatcctaggtttcgtgagaaaggtgattctgatgaagaagacgatgattatgataagagacgccggcgctga

SEQ ID NO: 664 - DNA, 571 bp, Oryza sativa
gaggagaagaaggaggacgcgctagcgtatcagccaccgccggaggaggtggtgatgcgggtcttcatgcactgcgaagggtgcgctcgcaaggtcaagaagatactcaggggatttgatgggagtggaagatgttgtcgcggactcgaaagctcacaaggtgatcgtgaagggaaagaaggctgctgctgacccaatgaaggtggtgcaccgtgtgcagaagaagacaggccgcaaggttgagcttctatcaccgatgccacctccggtggaggagaagaaggaagaggagaaaaaggaagagcccgagccaccaaaacctgaagagaaggaggtggtcctgaaggtgcatatgcattgtgaggcctgtgcgcaagttatcaggaagaaaatcctcaagatgaaagggagtgcaatcagcagagccagacatgaaggcatcacaagtgacggtgaagggtgtgtttgaggagtcaaagctcaccgattacgtgcataaacgcattgtacccgtatgcgccgcagctcttcagtgacgagaatccaaacgcctgtgttgtgatgtgagaag

SEQ ID NO: 665 - DNA, 536 bp, Oryza sativa
atgtcgtcctcgtcctcgtcgtcggctgtcttcccactggaccacctcgcggcgccgtcccccaccgagcagctctgctacgtgcactgcaactgctgcgacaccatcctcgccgtgccgtgcagcagcctgttcaagacggtgacggtgcggtgcggccactgcgccaacctgctctccgtcaacctccgcggcctcctgctccctgcgccggcgccggcgccggccaaccagctccacttcggcccttccttgctctcccccacctccccccatggcctcttgccggagaagcgtcagagagtcccatctgcgtacaaccggttcatcaagagatccagcggatcaaggccggcaacccggacatcagccaccgggaggcgttcagtgcagccgcaaagaattgggcccatttccctcacatccattttggcctcatgccggatcaggggttcaagaagaccttcaagcctcaggtaaccagaatcccgagagaattaacgtatactactatgggagacacaagcataacctag

SEQ ID NO: 666 - DNA, 533 bp, Oryza sativa
gaaaagcttattgaggagaagtcaaagaaaattgctaccctgcagagtgagataacttcacttgagcaggcaggcaaggccaatgcccgggctattgagcttgagaagcagctccaaaagacaagtgatgagcaaaagcgtaggattcagaagactgaacatgctcttaaagttgcagagcatggagcttggttgccaccttgcactggaatgaacatgggaaacctgctgttcaggcaaagaaatgggccgagccacatgtagaagctgccaagacgcaggaagccaagaaagtatccaaaccttacattgatcaagttgctaaggccactaagccacatgtcgagaaaattagaatttatttgaagccttatacaaaaagagcagtccatatatatggaaattttcttgagaaggctacagcttatcatcaacagcaggctcaagcaactgtcttggactacctgcaccaacatgaattgacaaaagaatttgcgactgaagagttggcctggtacctggtagggcactaa

SEQ ID NO: 667 - DNA, 511 bp, Oryza sativa
gagatggagatgttcggcgaggacggccgggacggcgtgtggacggtgatggcgaacgtgacggaccccgagagcctgcaccgggcgttcgacggatgcgccggcgtgtttcacacctcggcgttcgtggatccggggggcatgtccggctacacgaaacatatggcaagcttggaggcgaaagcagcagagcaggtgatcgaggcgtgcgtgaggacagagtccgtcagaaaatgcgtcttcacgtcgtcgttgctagcatgtgtatggaggcaaaattaccctcatgaccgacggtttcctaccatcatcgacgagaactgctggagcgatgagagcttctgccgtgacaacaagctgtggtttgcactgggcaagacggcagcggagaagacggcgtggagggcagccaggggtagggacctgaagctggtcaccgtctgcccggcgctggtcaccggtccgggattccgccgccgcaactccaccgcctccatcgcctacctcaaag

SEQ ID NO: 668 - DNA, 505 bp, Oryza sativa
atggcctctctccgcaccattccggtgatcttcggcatcctcttctatgtccttgccagcactgccactgccaccgacgcaccggactacgtcgtccaaggccgtgtctactgtgacacgtgccgcgccgggttcgagaccaatgtcaccgagtatatcaaggattgcaggtgccaaggtcaggctggagtgcaagcactttggcaccgacaaggtcgagcgtgcgattgacggtgtgactgatgagaccgggacatacaagattgagctcaaggacagccatgaggaggacatctgcgaggttgtcctcgtccacagcccccttgcaaactgctctgaaatcgaggccgaaagggatcgtgcccgtgttttgctcaccaggaatgtcggcatctgtgacaacctgcgcttagccaacccactcggctacctcaaggacatcccactgcccatctgcggcgcgctgctcaagcagttcgacctggctgatgatgataacgagtaa

SEQ ID NO: 669 - DNA, 484 bp, Oryza sativa
ggtggtactttctcttctagctcagagattgggtatggttcatccaagagttccatatccgcgtcgatcgattctccgtcctggcctgaagcttggcaagagaacctattttgaagatgtctgtggagggcagaatgtcaagagttctccatctggtgtgagtgtggctaccccatctcctggtctggccaagaaggtgaaggtggctcagcagaacactcagaacccacactgtcaagttgaaggctgcaatgttgatctctcttctgctaaaccttaccatcgaaagcaccgagtctgtgaacctcacagcaagactcttaaagtcatcgttgcgggtcttgagcgacgcttttgccaacagtgtagtcgtgtaggtttcacggtttagctgagttcgaccagaaaaaacgaagctgtcgcaggcgcctccatgatcacaatgcccgcagacggaagccacaaccagaagcaatttccttaa

SEQ ID NO: 670 - DNA, 444 bp, Oryza sativa
atggcaagcaaagcaggtggtgacggcaaagaagccatcaatgagcaaataattgcaaacacttatgggaacatgcggtctgaaatgactcaactttacaccaagattacagaattagagatggaagtcagtgaacactctcttgtgattggcgcaatcgagccactggatcactcaaggcgctgctacagaatggttggtggcgtcctggttgaaaggaccatcagggaagtcttgcctgcggtgcatcgcaacaaggagggccttgaagaggtaatcgctcgcatgcatgaagcactggagaagaaaaagaaggagatcaccgagtttgagctgaagtacaagatcaggatccggaaggcggacagcaacgctgatgaggaagaaggcagcaagaaggaagggtctgctcagggtgttcttgttggtcctgctggccagtga

SEQ ID NO: 671 - DNA, 434 bp, Oryza sativa
atgctggtggggatggaggtggacgaggagtcggcgccggaggagcagtccttcttcgacgacgtcacccgcaactgcgccctcaccaccacccagcagaggctgtacggcttcgcgatatgcttggctgccggattgacgtgcaccttcttgttgcagtcaatgcttgttttcttcaatcctgtgaaattcggggtaacattcacccttggcaatttgatggcacttggaagggcagtacagcgtttcttataggtcccaaaaggcaatttgacatgatgcttgattctgtgcggatatatgcaactgctgtatacattgcaagcatcataattgctctgttctgtgctctcttttacagtctaagctatataccctttgcacgctcggttgtttcgaaggtgatgacgtcttgcttcgacactgaattctag

SEQ ID NO: 672 - DNA, 328 bp, Oryza sativa
atgattgcaaatgtggcttttgcagggcattgcctcggaggcaaggttggtatctgctacggctgcaagcccgcaacgccgatgacctgccggcgccggacaaggtggtgcagctcatccagcagcagtcgctcaagtacgcgcgcatctacgacaccaacatcgacgtcatcaaggccttcgccaacaccggcgtcgagctcatggtcggcgtccccaactccgacctcctccccttcgcgcttcaatgagaacaagaaaccggaaattgaatctgagaggaactgggggctgttcttccctgaccaaagctctatatacagtatag

SEQ ID NO: 673 - DNA, 304 bp, Oryza sativa
atggttgtcaaagcagcgttcgcagttgccatgtttttgctcacaaccaatatgctcgtttctgttgccacacggtctccggataacctcctaaactcttttcctgaagaaacgggtcacgtctactcagcgtcaactgtgcagaagatgaccgaatacaagcccacgactggctcacgaacctgctaaatcaaccacagcttttgctgcatgcgacgtcgctgagatgatcaaaatatctttctatatctgccattttctctgtattgtcgaactgctgatgaactatggtcggaacgcttaa

SEQ ID NO: 674 - DNA, 2217 bp, Oryza sativa
  N_region (246)..(246): n = any nucleotide
  N_region (1789)..(1789): n = any nucleotide
atgcagggctccaagaccaaatctggccatgccgaggcgaagagcaacggcaaggcggaggcgaagggcacgccgccgacgcccaagagcgccaagattgcgaggaagccggccgtgcccaaggcgccgccgcgcccctccgccgacaagtcccagtcccccggctcggccgaccgcaagaagagcgcctcccggatcaccacccctccagagaagcaagggaaggcgacgaagcccgctcaggantcggtggccccgaagccgtcgcctcaagagccggtggccgttaagccgtcgtcccaggagcaggagcagcaggcgctgctggctgcagttcagcaggagctcgtgaaggccaaggaggagttggtggagaaggagaaggagagggggaaagtcctggatgaactggagcgtgccaagagggcggctgatgaggccaatgcgaagctccaggaggcgctcgctgcgcagagcaaggcggcggaggagtcggcggcggagcagtccggcgatgccgaagcggagcaggcgagcgcgagcatggaggatgagctgcggacgaagctggcgagcatgcagagccagcaggaggctgacatggccgcactgcgttcgacggtggagcagcttgagcaggccaggtatgagctagcggatgcaatcgatgccaagaacgcggcgcttacccaggcagatgatgccatgagggcttcagatgagaatgccgagaagatcaagctcctcgatgcggaggtggcgcatctcaaagggctgcttgattccgaggtagggagctcgtcaaaaggtgctgtggagcacattaggaagcttgaagaagagaactctggattgaagcttgagcttgagaaagcaaatgtcgctgagcagagggcagttgaattggaaggtgtggttgaacagcttgaagttgaaatcgctgatgttaagaaggcgcgcgcgaggtcagaggagttacttggcaaatggaagacaaaagcactggaattggaggtcaggttggaggaagctgatcagtctaacattctcaagggcgagtccttagaatcagcaatgaaagaattggatgcaaaaatgactctgctccaagaaaaagaatctgaaatcgaagcacttcaggataaggtcaggttggagatagaagaccttaggttgaagctcgaagcggcggaagaagaccttaacaatgacaagattgccagttcagaaatggaaaccctgattgaacagaagaacatgctagccaaggaacttgaagctagcaaagctgaagttgagaagattaagaaggccatggagggtcaagcctctgctttgcacgaaatgtcagctcaactgagagtggcgcaggagaagtacctagataaacaagaggagattgatcgtgctcgtgcacaggtagaggagctcaatgtaagtctgcagaatacaaaggagagctatgaggtaatgcttgacgaagcaaactatgaaaaagtttgtctcaagaagtcagttgagagaatggaagcagaaaccaagagtgcgtctgaggaatggcagtccaaagagctaagttttgttaactcaattaaaaaatcagaagaagaaatcatcaacgccagagctcagatggacaagaccttggaggctgtaaaaggcaaagaaagtgaaaatgctgagttacaggagaagttgaagcatcttgaagctcagctaatggaagctaacaaaacatgcgaggaagccaaggccgagaccttccagtggaaggaaaagctactagacnaagaaaatgagttgcagaacattaaaccagagaacgatgatttgcaagcaaaggaacttgttgcttctgagaagataaaggagctctccgtgcttgcaaatgcaaaagatggagctacaaatggtagtcacaaggaagaaagtaatgtcaagggggacagcgaggatgatgaaccggtaatggtagttgcaaagatgtgggagaacagcaaggttactgatgatgcctcatctaaggagaagggaaacgatggtgaatcagaagttgatttagagtccaacacgggagattccattgttgatggcaatggtttgcactccacgacggcgagcaatggcaacgcatcaccgcccaagcagcagccgcaaaagaagaagcccttgctgaagaaatttggtggtctgctgaagaagaaaacccaaccttag

SEQ ID NO: 675 - DNA, 1827 bp, Oryza sativa
atggtgtacccgtcgagatggaatttcttgacttcaatccaaattctcgattacggcaagacaggagacttagtcgcatgctccgtaccttctcggttgacatcggagattaacctagacaaacccaatatagtgcctacaaagactgataagaggaatctagcaggccggcaagagggatctagcaccatctctgatgtcgacgagatcatattcgaggaggaagactaccccctcatcgactgcgagttggtgtttatgccgccaagtcgacgacgatccgttcctccggcgaaaagcgacggcgactttgttgacgctgcggcctcttcccgaccgcgcagcaaagatttgaggtcaccaatggatgattcaacggatgacgattcgtatcatccaagaaaacactatgcttatgatcgtcaggtttcttcaagcagatggcgtaccagccgcgagtatatcagaggtcccggccccgaaactcatactactgagagtgctcaagatggacaggatccacctgctggagtatattcctatggttatttttctggcagtggtaatgatcctcaagttcaaggacactttgttccggagattcaaaagtacaacccttacgtgattttcaaaggtgaacaactcccggttcctatatgggaactgccagaggagaaggtccaagattttcatgataggtactttattgcaaaagacaagagtcgagttgaagccaggaagactctgaataggttgttagaggggaacatcaatacaattgaaaggggacatggatataaattcaatattccaaaatatacagataacatggagtttaatgaggaagtcaaggtttctctagcaaaagcaggcaagaccataagccgttccttttgcaatgcgaatcagcgggaagttgcatctaggactggctataccattgatctaatagaacggacacttggggctggattgaacatctcgaagagaactgtcttatacacaaacaaggatctgtttggggatcaaagtaaatcagatcaagcgatcaatgacatctgcgctttgacaaatatcagaaggggctctttgggtataatagcagctgaaaaaggaattgtagttggaaacattttcctggaattgacaaatggcaaatcgattagttgttctattggagtgcagataccacacaggcttgaccagatcaaagatgtttgtgttgaaataggttcacgcaacatagagtatattcttgttgtggaaaagcatacaatgttgaattatctactagagatggactatcacaccaataacaactgtataattctgacaggatgtggcatgccaaccctccaaacaagggatttcctcagattcttgaaacaacgcactggactacctgtctttggactttgtgatccagatcctgaaggtataagtattcttgctacgtatgctagagggtcttgcaattcagcatatgacaatttcaatatttccgtgccatctatttgttgggttggattgtcatcctcagacatgataaagttgaatttgtctgagaccaactactcacgtttgtctcgcgaggacaaaactatgttgaagaacctttggcaggacgatttgtccgatgtatggaaacgcagaatcgaagaaatgataagttttgacaagaaggcctcttttgaagctattcatagtttggggtttgattattttgcaaccaatttgcttccggatatgattaacaaagtacgagaaggctatgttcaggttcaagagaaaaaagagcctcaagacactgaagccagtgaggactga

SEQ ID NO: 676 - DNA, 1305 bp, Oryza sativa
  N_region (219)..(219): n = any nucleotide
atgcgacgcctcgagcccgggctagggttccccgactccgcctccgccgccgccgcggccgaccgacgccaccatcccgcacgacggaagaagccgccgccgcagcggcgaaggcgaccggcggcggccgcagcaccggcggtggggcctcgcggcgcgaccgatccagatccagcgccctcgccgctgcgcgtgcacggcatcggcatcggcagccangcctcgcgtggcacggcaccgcgaggtgaggaggaagaggaggaggaggagtggagaggcgacggcgacgcgggctcggaggaggaggagggggaagcggtcagtgactccttctcccactcgctgagagagtgccagaagcagcggaagctcagagcggagggggctgcgttgctgctttcaccggccaagcatgagctcaccggcggaggtggtgggagcatagaactgctggtgctctcgccgaggtgcttggttggggagcacgtgcgcaatggtgacttcagcagtggaagaggtagaagtggggatgatggcagtagccgatcttactctgcagagaaggacccatatatcttgagatcagcaagtatacatgcgtggacagagacacttatggaagcatccgcctttgctaatatctcagaagaaactgcacaagatgataaattgcaaggcctgcgaggagaaactcctgccatttccagtccaataataaagaaagatgttgccacacaaatgagtcctgatgacagtatatcgtcttctccaaaagcaagacattcatgttccagtttaccatcaggacatcctattaaagaaccaaatagtaatgcacttaaacctgaagtccgagatgtccaggtagatgatcaagtaactgtgacccggtggtccaagcgacatgtaacacgagggtctgataggcggtcaacaaatattgtcgagtggaggaagaaaacaattgagactcgagctccatcttttgatgaaaaagaaagagaaagctgcgtatcaaagtgcaagagggaggaagcgaagatcactgcttgggaaaatctgcagaaagcaaaagcagaggcagcaattcgaaagttagagatgaagcttgaaaagaagaggtcatcatcgatggatagaatcttgggcaaactacgcactgctcaaaagaaagcgcaagacatgcgtagtgcagtttctgacgttgcagctcatgtcagccaacaaatcagaattaatcaggaagtcagatttttccttgctgtggcagctggagacatccaggatgccaatagttatttgtga

SEQ ID NO: 677 - DNA, 1197 bp, Oryza sativa
atgctctttgacaccttgcagtccatgcttcgtcttaggctgttgcgtcagggatttaaagttaaggatgaagtttggactctaccaaaaccagtcaggccacgccttccaaaacatgagcatgaggcctataccacaagcaagtgcattgctggtaaccaacataagggtggccaggttttggctgagaagtctactggttctgttgagagactagtttcttcggatggtttaggaaatgaacaaaatgatgggcagaacagcaacagtgaaaatcaatgtcaggaaggttgcaaaaacatggtaaaattatgtacccagaatcaggaatattctgagccatcgagtttcgtgaggtatgacgagcatagtaccgttgatgatgtctcgccaagtaccataagcacattgcatgaactttgcactccatcctcaaggggtgataatctaagagaagaagacaaccaaagcctgaatggttcatgggaagagagggcactatggataagtagtcttggttggcctgcaccagtggaagccatgagtccagacagctggaatcaggatgaaattggggatattgagaatcacactcagaatgaatttaatgatcgcccctggatagattcccctaactcatggagatcattgtgtgttgccacacaagcagacagcggatattatgatgagcgcttatactggagacagaatgatgaacaacagaatgctgatcagagggtatctgcacagtgttcattagcacctgtctcccatctccaccaacaagaaggctggcagcattcttcgtttgaacatcaacatcatgaaaaccaaaacttccttgaaatggaggtcagggttagaagtgaaatggcacaggtccatcatgaaatatatgaactacggaagttggtggaaagttgtattgcatcccaagtaaagatccagcactccattaaagaggagatgtgcagtgcacttcgcgaagcagggttgatgccaagccaacccgacacaccagcaaaaaggggaagctgctgcatctgccatcagacgcaagttgactctctactttacaggtgtggacatatgtgcacctgtttcaattgcgccgatcagctgaaatcgagcaacaggagttgcccaatctgccaatctcctattgaggatgttgttcgagcgcatatgaatttttga

SEQ ID NO: 678 - DNA, 999 bp, Oryza sativa
atgaaacaaaaagaaggtatagtggtcaccgttgtgccagtaggtactagaccttttcatgtcgtgattcagcaacgttgttggagactcgagtggagaaggcgttgttggagtgcagcctgtcgccataagattggaggaaacgcgcagtttgtcagtgtgcgaaagcgtcgacagacgttgccggctcacaacggaggtggaggtggaggcagagacggcggcccaatgggacggattcgtcgcaaagaagcgctaggtaaagatataggtatttggtatgcttgtgtaatgtatcgaactgttaatgggcctattggacctgctgggacttttgctgctaacgctaatagcctctctcatctcagtatattcatcagtaaaaagcaatggactgctgcttgtgcagcaccacgagcagcagcagcagcggatggtggagatgcggatggggatggcgatgggcgaggcgtacgtcgggggaggagaggtggtggcgcgggaggcggcggcgcaggcgctgggggcggtggtgcagctgcacttcgacaagacgctggagaagaagcgggcggcggacgcgcagaagcaggagctgtggcgcctcttcctcgccttcttcctcttcctcgccatcctcctctccgccgtcgcccagtccccgccgtcccgcctccagtgccgccacctctgggcccccgccggcctcctctccctcgcccacctcgccttctacgccgccgtcgcacaccacctccgatgcctcaacggattcagcggcgttgccacaagctgaccctggcgctggcggcggacaggctgcggatgctcaagtccggcggcgacgtggtggcggccgccgacgtggaggtgccgtaccaggagccgcccgagagctacctggccaagttcaagcgcagctgggccatccacttcgccttcctcatcaccaccttcgccttctccgtcgccgccgccgtcgccatcctctgcttctag

SEQ ID NO: 679 - DNA, 990 bp, Oryza sativa
  N_region (77)..(77): n = any nucleotide
atggcatactggctgacaacaataagtggtgcctactttgatgttaggatgatgtcctccggggatacttttttcgnacatcttctgaaattttctggtgatcatgtgagagtggtgaacgatgaagtggcggtccttgcaggcatgagatgtggcgatggtgttcgtctttataatgatgagctggttgaaacgttgttgcaattatgttcaaacaacacaggggaaggtgtgtcaaaatttggacacagatatttgcaacaaggatattaccgtgcacatgattatggagtacaatttccacaaacagatgaagcagaatttgtgaaaggtgatagtgctgtcgacaacgaaatgattccaggggcagaggctccagaaaacgaccccagtggtggtcggcctcctccccgttcctctcgggagattagtagtaggttcgcccagagggcagcgtccatgcagcttcgacaaatggccgtcgatgctgccacggccgctgtgccgaccgacagatcaacttcgtgttgcatgcgcgagcagcagcatgcagcggcactgcagggcggcgccagctcgatcttcacgttacatgatcagtcgatctcaaatatcgatcagtgcaaggataagatggatcgatgccttttgagttctctagagggccacctgcacacttacaggttctgtgacaatgtatggacattcatcttgactgaagcatcattcaagaacgaggagactacagaacaagttggcaagggtgtagaactagaagagccaccggtcgaaacgtgtctgagaaagttggaaatatcttgccaactctttgctagtacaactagtaccaaggccagcactgcagggaatcaatcagctcagcacagcactgcacagctgaggctgatcagcattcagcaatggcatgcacaagccaacatggaaaaagacaagcaagcagatggatctgccttcaagaaaggacgatga

SEQ ID NO: 680 - DNA, 924 bp, Oryza sativa
atggaaggggaggagattggcctcgtcctcgcccgcgcctccgacctccgctccaggatctccgcctgcgtcgccgcggccggagccagggagccgccggagggcgagggcgagggcggggaggcggtgaagcggctgtgcgatggggaggagggggaggaggaggaggaggtggagagcctggtcggtatcagcaacgcgctcgagtcgctcgagcggcagctcgcctctctgcaggaacagggtatgactggagtgactgtgcaagacctccaacaccaacaaagatatgaacgagagaccattttgagccagattgatcgcagccgaggatgtcttcttaacaagctcaaagaatacaaggggcaggactgtgaagtaatacatgaggctgcttcttttgctggtgaaaaaattgaacatgatgatggtctcatgctacctccgtactcaaatcatgtcaccaattcgtttgttcttgatgatctgtatcctccaagttacttggccaagttaaagtgtatgcacaacggattgggttctggtgggactaaccaagatgttacaaagacaaacaggctggagaacaggaatggtagcatgccaaacggcaattcacaaggaggaattagatcttttgttggatggcttgctaaaactgcagtaatggttgtaggtgctgtatctatcatgaaggctgctggttacgagccagtgataggaagacacagcataaaattggatatggcaggtttgttcagtaaggaggcaaccagtggaaaagatcaggctactgtccaatgccctcctggtaaagtaatggttctcgaagatggcagggctcactgtgttgtgaaggaaagagtcgagatacctttcgacaccaacctcgcctctccaaatgcaagttatgggttaggctga

SEQ ID NO: 681 - DNA, 741 bp, Oryza sativa
atggccgtgtttaattgtgtacaggaagacagttctggggttaaatttctcatacaagagctgtgcatagagccatacaccatagcaaatgcatgggaagctgctgaaggctggcaaatttgggttgatgctgctccaggttgcagggatggacttgtggcagaactcatgttgggagaggttagcgaagacgtctccaaggaccggtttgcccctgaagctggtccaggtgctgcagttgctggagcaaggtggccagggcaagctgacccttttcctcttgacgtcaggactgatgagctcaatattgttgaagtagatcttctggtgcttcacattggttattgtgattgtctggctcgaatgggctgtgggaactattgttgcgttgggaagcttgatgagcatcctgtcgttgggcatcaggaaggtggtgttgtgtgggatcttctcctgcaccatcctgatgagcatgacgaagtggaggcgatgtcgccattgcccaccaccgccgatggggaaggcgtagcagcgacgttggagcctgacactacgagggcaatgagcaggctagcagcaaggaaggaagccatgggggatggatgggggtgtgctgctgctgctgcttgtgcctgcatgcatgcttattacctgcgtgaactactctgttgcatttcaggctttgagcatggagcgttaactgttcttttcccgtatgcttatactggacctgggcgttaa

SEQ ID NO: 682 - DNA, 692 bp, Oryza sativa
  N_region (391)..(391): n = any nucleotide
cccaacttattactgccgcaagggccccaatctttgtgactggtattggtggtggaggtggtgggtatggcagcggaggaggagaaggcaatggtggatacggccatggttatggctatggttcaggatatggttttggcaatggaggtgttggcggaggtggctatggaggtggaggtgggtatggcagcggaggaggagaaggcaatggtgcatacggccagggttatggctatggttctggcaatggaggtggtggcggtggtggctacggaggtggtggtggcggcagctatggaagcggtggcatgggttcagggtatggtggtggctatggttcaggctatgattatgggggccaaggtggaggtggaggtcatggaggaggggntggtggtggatctggctatggcaacggtggctatggatctggctttggtgaaggttatggctcaggaggaggtgtaaatggaggtggtggcagcggcggtggtggtggaggaggtggtggagcctcaggatacaggtatggtgcaggctatggcaaaggatatggttacggtggtggtcctggtggtggaggtggtggtgcgggtggcggtgggggaggagggagttacaacggtggaacaggcggatatggagaaggtcatggctcaggttacgggggtggtggcggacatggccattaa

SEQ ID NO: 683 - DNA, 555 bp, Oryza sativa
atgagggtagagcggacaaaaggactgcgcgaggctgtgagttggaggcgaggcaagctgatgtcttcgttatgtggccttgggacgcccacctcaactgtgctgctccaaaagcctatacagtttcgcacgaaggtgctgcacctgccgtcgacgaacccctccgtccgacacacgtttgcgcaattatcttccaccatgcaaaacccctcgaatcggaggctcttcgtctcgcacggcctgactgatgattgcgctggcgccaacgcctctgccaacaactcacacataatattagtccttacggtcgcaaaaataatcggtttagacttttcggatcgaagtataaaacataaatcattttttggatcttaccaaaccgagcggcgccaggatgggctcctcgacgtcgacggcaaccgccggccagccggccaccgcgacctcctcagcgtcaacaccgtacaccagcaacgggaggactgctgcgagcctgcagatcagcaggcgtcaggcggcgtcgcgacaagcatcagccaccagcagataagctag

SEQ ID NO: 684 - DNA, 486 bp, Oryza sativa
  N_region (5)..(5): n = any nucleotide
  N_region (31)..(31): n = any nucleotide
  N_region (47)..(47): n = any nucleotide
  N_region (65)..(65): n = any nucleotide
  N_region (78)..(78): n = any nucleotide
  N_region (83)..(83): n = any nucleotide
  N_region (91)..(91): n = any nucleotide
  N_region (100)..(100): n = any nucleotide
  N_region (126)..(126): n = any nucleotide
  N_region (367)..(367): n = any nucleotide
atggngcagatggatcagaagtacaacccanggccttcgacgagatnccagagcacgaacgcgangtttcaacacccngaagnaaggccanggggcgcgngcgccgggatgagcagcagcagcatntgcgcgccgtttgggcaccgcgccgtgtcggcaatgtaccacggcctgaggcgccgcattgccggcgagatcatgtccgccgccgccgcggccggcaggccttgccgcggcggcgagtcgtcgtcggcggtgaccggcggcgagagggagcggagctgggagtcggcgttcatccagaagcactgggcggtgcagcagctgcggcgcggcgagcagcagtgctggcggccgcagcgcggcntcccggagaagtccgtcgccgtcctcaaggcctggatgttcgagaacttcctccgcccgtatccggaagacagcgagaaggagatgctcgcagcaaggagcggcctcagcaggaaccag

SEQ ID NO: 685 - DNA, 414 bp, Oryza sativa
atgaagaagcagaataaggtgttgataatggtgagtgagggtgttgtgctcaatgaatcagccaaccagccatgtttcctgaaccacgagactattgacgaacctgaaagcacgacgacgagcaccacctacacaacacgtcaacacgcagctccccgaaggagagagctcgccggtgaaggaagcagcgacggcgtgggggtagaggacgcttctcggcgaaggaaagggtgcgggcgtgcggcgctgttcaccggaatgcgtcgtgagaactgccgcgcgctggccgcgaatcaatccatgagaagggatgtggatacggatatgggcttttacttctggacgaaattgccccttgctaatggtgattactcggttaatcaacttttaatcctcaccattgacgtgctttaa

SEQ ID NO: 686 - DNA, 315 bp, Oryza sativa
atggcttcagctactgcctcattgctcacatgcttctttgctctcgcactcttcatgctgcacagcaacgcagccagcgaggatgctttgagggctaacctggagttcgcctgctcggagagcgactgcgccgccatccagggcaccggcggatgctccttccccgacgacgatggcagcctgccgacgcgggcgtcggtcaccatgaacgcttactaccaggccagggggaggaactcatggaattgcttcttcaacggcactggcctcatcaccatcactgatcccagttctggcaattgcaagtatgcctga

SEQ ID NO: 687 - DNA, 313 bp, Oryza sativa
tgttgtgcttgaggatcatataaacgactctgatcaatcctccaccatagctggttgttctgcttgctgtgaccatgccatgacatctgaaaacacagaggaccagcatgatgacagcattatttctatacatggggatattgtgtatccggataagaatagcattatttgtaggctggaggctatagaaaaatatttcagccttgaaacagtcaaggacattgtggaagccatggtgagtgatgcttcagttgttttatacttccaaatctctgggcatgatgaattgcaagctacaaatgctttgctgtag

SEQ ID NO: 688 - DNA, 7728 bp, Oryza sativa
atggggggtgagatgggatcttgcattgcttgttgccttgccttgccaccactagccactgcctgcccaccactggtcactgccacactgagagcgtcggccatggaatatcatgaatgggaggtaaactgcccacaattggagggtaaatttggtgtgcttttcaggctcctagcacttcgttttgcatggaagcatgatatattttgctgttgcttgaatgcatactttgaagaagtggaaacttcttttgttgttacatatgatttaccacgctgctgctcaattctgagcaccaaagacattgagacagacagacacatcgtgcctctgtggcagcttacttgctcatttgtgccaatggcttctttggtccggcatgattcaaatcccacccagtactcatggtggtgggttagccatatcagccccaaaaattccaaatggcttcaagagaacgttacagatatggacgtgatggtcaaagcaatgatcaaacttatcaatgaagatgctgactcttttgcaagaagagcggaaatgtactataagaaacggcctgaacttatgaatcttgtggaggagttttacagagcataccgtgccttagcagaaaggtacgatcaagctactggtgcactccggcaggcccaccggacaatctcagaagcatttccaaatcagatgccgtcaatgtctgaagactctccctcctctggccaggatgtggaaccacgtacaccggaagtgttaatgcccacccgtgcaccatttgatctggatgatctgcaggatgcagctggtgtatcaccacaccttttaactgtcaagaggaatggtacacagcctgatgacataggtttttcgtctagtcgcaaaggtcttaagcagttcagtgatttgtttgcaggcagtgacagtagccagcgtgtcaatttttctgatggaaaagtaaggaaaggtctcaactttgaaagcccagatgttaaaggaaagaaagatgatagtaatgatatcatgaatttgcaacatgaagtttccaaattattaacagagcgccaaagtctgaaagagcaaatctcatcagagtctcagagggcaaacaaggctgagagtgaaatccatagccttaaggacaccatttcatgtttgatttctgagaaagacacaacccttctgcaatacaatgaatctacaagaagattgtcagttttagaatgcgagatttctaaggcgcatatggaactcaagaaactctctgacgatatggctatggaagttgacaagctaaaatgtgctgaatcacaaaacagcgcaatgcagtctgagcttgagactctggatcagaaggtcagggtgcaggagcaagaacttgaacaaagtagaaaggagatagaaagcttccacttaagtctacaagatgaaatggccaagcgcaagcaagctgaagatgctctatgctctttagagaaacagtacgctcaatcgcagaaagaaataaataggttgactctagatatggagatggcaaatgatagattgaatgacttcaatctggtgaggctcaatctggagaacacagtctgtgagctgaagaaggaagtcacgagcctagaagtgaagatacaaatactggtgcaggaacttgaacagaagagagaagaggctgatgtcatgcatgctcagttgcaagatgaacactccaatcacatgcataaggaagcagctcttcatgcattggagaacttgcattcccagtctcaagaagacttcaatctggtgaagctcaatctggagaacacagttggcgagctgaagaaggaagtcacgagcctagaactgaagatacagatacaggcgcaagaacttgaacagaagagagaagaagctgataccgtgcatgctcagttgcaagatgaacgctccaatcacatgcaaaaggaagcagctcttcatgcattggagaacttacattcccagtctcaagaagacttcaatctggtgaagctcaatctggagaacacagtctgtgagctgaagaaggaagtcacgagcctagaacgcaagatacagatacaggtgcaagaacttgaacagaagagagaagaggctgatgccatgcatgctcagttgcaagatgaacgctccaatcacatgcaaaaggaagcagctcttcgtgcattggagaacttacattcccagtctcaagaagaggttaaacagatggctcgagatgttgagcactcgaacaagaagttgagtgacctggaaaataataacttgaaattgcatgacctgtcacaaggactcaagaagacggttgcagagctgaattctatgaaagattctgcacttcttcaacagcagaagtcctcggagaaggaacttgaacacaagaacaaagagatcagtgaactccaaaatagtttgcaagagcaagtccagaagtgcattcttgctgaaacatctctgctcagattggaggacctacatactaattcacaaaaagaagctaagacattagcacatgatcttgaaagattaagcgagcagcttactgaggttgaaaatgataggctggatctgcagaacatttcacgagaacttaagaatactatttcagagattaattctgagaaagacttaatgctacttcaacagcagcattccttggagagacagtcttacttagaggctcaacttttagatgcactgtcagaagtggaggaaaacaagaaggaagcccaattgttggaagaaaaccttgcacataagaatgatgagttgaatgacctccaaaataatttggaagaggaaggccataaacggatgcatgctgaagcagcccttagtatggtggaaaatctgcattccaaatcccaggaagaagtgggtaagctagttatggatcttgataaattagaaaatgagctaagtgaattgcaaggcagaaattcgagaatggaagaattatcatatgagcttcagaacaccatctcccttcttaattctgagaaagacgcagcacttctacaacagcagctgtcctctgaaagagcatgtgatctgatgtcacagctctcaaagatacagttggagctggagaaggctgaggagaagatgcagacaatggagcaaaaacttgcagataagaatgaaatggtggattttctgcagttgagtttgcaagatgagggcaagaaacgtgtggaagttgagacagctctcatttcatcgggtaacttgtactctcaatcacaggaagatgtgaataggttaaccctggagattgagaggttgaacgaaatgttgaatgatatggagaacaagtcttctgagtataagagcaccatcttgcttctgaattctgagaaagacatgagtgttattcagtacaagcagtcttcactaagaatatatgagctggagtctaaactctcaggggtgcaggaagaactagataatgctgaacaaaaagtgcaaatgctggataaagaactcaaggagaagagagaggtggttgaaactatgcaggctagtctgcaggatgaagcccaaaagcgtatgaagggtgaagcaactcttctcacgatgactaatctgcatacgcagtctcaggaagaagtgaataggttgaccccagagattgagaggctgaatagaaagttaaatgaagtggaaaatgtctcttgtgagcttaagaacaccatactgctgctgaattctgagagagatactactgttcttcagcacaagcaggccttggtgagagtgtctgatctggaatctgaactctctgatgtgcaggctgaactagtcaatgctgagaaaaatgtgcaaattctggataaagaactcaaacagaaaagagaagaggttgacagcttgcaggcgagcctgaatgaagaagcccagaagcgcattgagggtgaagtagctcttcttgcaatggaaaatctacattctcagtctcaggaagaagtaaggggattggttttgaagattgagacactacatggcaagttgaatgagatggagaacagtaatagggaccttaagaacatgatatgcaagcattcggaggagatacatgtgcttggtgagcaaaatctttctgccgagttaactattaaaggtctccatgatcaattggagaagtttacggaaatgaacataggtcttcagaatgaagtgggaatccacgttggtgagaaggaagcagtaaacataagggtggcaacacaacagcatttaattgaggaattgcagagtaagaacattgaattggaggaggtatgcaatgcatgtgatgttgaaaagacactcctcttggaaaagcttcatggcatggaggagctgtccacagagtattcaatcttgaagaaatcattttcaaatgcaattgttgaaatggaagacctgaaggaaattgtaaaagaactggaagcttcaaaaaactctctgaaatatgatgtctccttgcatgccactgagaaggatgctttggcattagaactagagacccttggtaaaagatgtgctgatgttttagaggaaaaatccattctggaaacttcattctctaatgtgaattatgagcttcaagaattgagagtaaagtataaagattcagaagaatcctctcggtcttatcttgctgacaacactgctcttcttgctgaaaagcacaaactactctcccagctggaaagcactgcagtgtctttgaaattcctggaggataaacatgctgatctgagagataatcatggatctttgttatcagagaaagttcttttatgcaaccaagtaaagaatatgcaagatcagttgggaataaaaaatgaacagcatgaagcgctgcttaagttgcaccaaatgcagatgcttgaacatgagcagcaaaaatgtgcagatgcttctatcagcacattgatattggaaaatagcttggttgatgcaagagacaaaaatcttgcactcttcaatgaatgccagaagttcatacaggccactgattctgcagaggtactaattgcgcagctcaaggaggaagccagaaaggaagaagaggacaaaaaagcattgctgaatcgcaatgagaaactaagggatgggatctcagagcaaattaaggtcctcaatatctgtaaagatttaggacctactgatgtggttcatgatgaaattatgctgcagactatgtctcgtgaaactttcaaccatgtaaaacataaagaggaaaccgaagagagaaatgtcttcatggatgctgagctatctgttcttggagcaattctggcacaaacagtaattggcttcagagctctgcaccagcagaactgtgaacttgtggaagaagtggagtcaggagcagcagaactgctttttctgcaaaaggaaaatcacaagcttattgaattgaatgaacagttggagcaaagattgcagttaggtggcaacagggaggagatgttgaagattgaaatactgggattatgcaaggagctatcaggcttgagacagtcctaccagacttctcaaagtgaaatttgcaacctaactaaaaaatacgattccttgctgcaggagtacaaagttttagttgagaagtacaatgctttggatgatgagaatgctgctgttattgcagaatgcataaagctcgacctcctgtcttcattctttcatgaccttactgttgagtctgcatctgttttggtttctcttgacaatgatatggctatgttgagttcggttaggcatgaacttgatcatgaggttaccatgctgaacagaagagctaagattcttgaaatggactttcagcacctcaagtgcactctagagaacttgttggaggctctggggagtcgcttggttctttcagagtttgattcaaacacaagcaaaatcatctgccaggaattaacaattgaatgtaacagtagcatgacacagttgatgcagaaagatgataaattacgcaaagtagatgagaaagttcaattcttgcaagagagaaaccaggaattgtgcagagttctcagggatcttgaggttgctgtagaagatgcagaaggagtaaaagtagaccttgagaagaaaatcacaacactaactgaacgaggtgctgtacaagacaatgagacccgtcttcttcgcgaagcaaacaacacgctgcaggtagaggttggcattcatgaacaaaaggaagagagtttgatgtctacatttgagacgatgagaaaagaggctgaacagcatgaaagggaaattactttgctggtatgtgatacgataactcgttcagtgaatacaatggtccttgaggaacaagtgcttgaaatgatgatggagcgtgaggtccttgagacaagattttttactgaaaaggacatgctaatgaaggaaatctcctcaagagatgcttatgttgatgacttgcagaaaagggtcgccagcatgaggggagaaaatgcaggactgatggcagagttggccgcatatctgccacttgtagcatctttgtctgatcagataagagcgctggaagagctagaagacggcacacttttactgtcagaacttaataaagaaggcaaattggaatttgtgcaaaaggacagacatgttccagaatcccaagatgattcatcaggagctttgaagttgcgaagcttaattgcaagagttgaagcactccatgttgtaatactggatgccaaaggccgccgagataaggagtttactgaatctgttgctcaactggaagcggcaaatatggaaattcaagagcttaaagcaagaaaaggctcgaatgctaaggaagaatgcaccgaggatgataggcaaaagtatgatgctgataactccaaagggaaacatgtacagatcatgaaagacatcgaacttgatcaagtatctacttgtgcactatatggtactggtgccaccatctaccctcttggtggcgatgcaaatgtggagcttgacgatgagatgcttcaactgtgggagactgctgagagggattgcaagaaccaaacagctaaatcttcatcgtctgagaatgacatacaagcagtggaggaggtgaagagtgagtacccttcgtttgaactagcaaggggaagagatccaggaattgacaggcttgagatatcagcagtgtccctggaacctcagcaattgtggagcaaaaatgtccttgataaactagcttctgatgctcagaggctgtctattgtccaagccagcattgaagaaataaagcagaaaatggtgggtgcttctaagggaaaatctaccgtaagctctgaatacagcagcatcagagctcagctgcaggagattgatggctctgtcttggagcagatagatttcaactgtaatgtgacaaagaaggctgagaattaccctgcatttgaggtgagtgctgaactagaaggctattccagcagaagaaaaatctcagagcaagtgcagaaaggatcagaaaaggtcgcaaagttggaattggaacttcagaagatacagtatgtcttgttgaagcttgaagaggagcatgagtacaaaagagttaaagcccctgagaaacgttcacgcgttcttttgagggattatatgactgcaaggaaggacaaaaatgatgccggacagaagacgaagaagaagaggatacccttctgtggttgtgtccgtattaaatcaagaactgagccttaa

SEQ ID NO: 689 - DNA, 4077 bp, Oryza sativa
atggagatggagatggaggtagggaggcggcggcggcggatcggagtcggagggagaagccagaaggcggcggcggcgggggagatcgatgttgggatcccatcggaaatcggatgggatcagacagactgggccgttcgttcgttcgttgttgccacgtgccacggcccggcccggcccatgaagataccacgacgtggcaggaaacccatggttgggcgggttatcctcttgctcttgcctgccattgcgcgcccagagcacaaggagatgctcgaggaaatgcgaacctattacatgctcacccacaaccatcaccaacacaccgctgccgctgatgacgatgacgatgaccaatccgtgctcaacggcaacgccaacaccactgctggtttttttggcattacagacaacggaaccttgcttcttaccagaagcttgggtctcagaacactcctgggattgtcaccagaccctgattcacacaacagaattgcttttgcaactcatttccagcgctccttcatgaaccttctgcgcaatgctcaatttgaagagctctctgcgcaagacctgctcttgacatacgccctaaacaccgattacctcttgactttgcccatttatgtcgattggaaaaaggcagctgagtccaatgctatcatattcaggcgtgggtatgcaacggagaggcagaagggcctactgttggttgaaaagcttgattacctacagtctaaactcttgcaaaatatcttctttggcttctccaagcccttgaggaagctggggaaatggctcaatgaggcattgaaaagatcaacagggaatgagggatttcagatctggattgaaaaacttaaagtctggcttaaagagcaaacctatgcggagaattcgctttcgttgattgagaactcttcatgggataaacttagatctgatcaattaccggatgctgatcttcctatttggattgctgctcaaagggcagtctctcgttacgaaggaatcctgtcaccagttggtcctcgtggcagacttctaagaagattgcttgcttggactggtttaatcccttctctgccagaagcaacaataaagtcagatatcgatacaaaagatcttgaaggctatgtgaggccaaattttctgccaagaataacacttgcaaatatatgggcgccagcaagcagagaatcttgtaacaacaatctctgggagataacaaaagcttcttttggtgttttatttgggaagtctactcttcaggaaccagcattccaagaactgatcctactttatactgatgaggctgatcaaagcaaagagagagaaaaatcagacatgatgccattgcaactgaaaatttttgaaaggatccccatccctgatctgccagtggtttttcctcacaagaagttgtccttccgcatcctagatacagtaaggttggatattgctaccgtaataggtttgttggcttatgtcgtgaactacaaatttgagagtttagcctcatctccatcggcttttcttcttgatatagttgcctttactgcactagcaatacttgtgttccgtgtggcgctgggttacaaacaaactagggatagataccagcttctggtcaataaaacgctctatgagaagacattagcaagtggatttggttcagtttattttctccttgacgcttctgagcaacaacagctttttcagaaagggttctcccttaatgagtgttttgttcagtataaagaagcgcttttggcatatggtatgttactgtgcaggaaaaagtatcaggtgtcatctcgtgtaagcatcagagatacatgtgagcagtttatgtacgagaaatttaaggcgaagatcgaaatgcctattgacaaagctatggagacactattgcgtctggggctggtgattgagctgccaactgacggcggctcccgtgtaatcgcacttccatgttcagacgcatacgagatcctgaaaagccgctgggacagcttgttggaacacaagacggaacaagatattgttatatctcgatattgttacgagggagctgatgaagaagactgtattattgagatggacggacgttgtctgtattcatctatagagctcttgatcgaaagtgctggctgcagcagcgtagctgcagtcggtgtaatggcaaaagagcagagtggatcccctaagcccaggcagccagtgttccaaaggatgcgagtaacgttaaccataggtgttattggcctctgtgttgcatcatacattcttggtgcttggcaaggcacttcaactactagtatacacccatccataatctacactaaaagccaatgtggtgaatccattttgcgcacctccagcaattcgtctggacggtcatcatcagacgctcgtcttgatttccaagcccaccatcaggtgagcttcaatgaatcttcacttgtcgccgaaaaattcccaccttgtcagctgaaatacagcgagtataccccttgccaagatccaaggagagccaggaaattcccaaagacaatgatgcagtacagggagagacactgccctcggaaagaagagcttttccggtgcttgattcctgcaccaccaaagtataagaatcccttcaagtggccacaatgtcgggattttgcttggtacgataacattcctcatcgggagcttagtatcgagaaagctgtccagaactggattcaagttgaggggaaacggtttagattccctggaggcggcacaatgttcccacatggtgctgatgcctatatcgatgacatcaacgctctcatatcattaacggacggcaacatcagaactgcgcttgatactggatgtggggtggcaagttggggcgcttatcttattaagaggaacatcatcactatgtcatttgcacctagagattcacatgaggcacaagtgcagtttgcattggagcggggagtgccggccatgattggagtgatatccacggaaagaatcccataccctgctagatcatttgacatggcacactgctctagatgtttgatcccatggaataagtttgatggtatctatctaattgaagtagacagagtaattagaccaggaggctactggatcctctctgggcctccaatccattggaagaagtacttcaagggctgggaaagaacagaagaagacctgaagcaagagcaagatgagattgaggatttggcaaagcgtctctgctggaagaaggtggtagagaaagatgatcttgctatatggcagaaacctatcaaccacatagagtgtgttaatagtcggaagatctatgaaacccctcagatttgcaagagcaatgatgttgactctgcttggtacaagaagatggagacatgcatatcacctcttccggatgtgaatagtgaagacgaggttgctggtggagctcttgagaaatggccaaaaagagcatttgctgtgcctccaagaataagtcgtggatcagtttcaggcctcaccacggagaaattccaagaagataataaggtgtgggcagagagagcggattactacaagaaattgattcctccactaaccaaggggcgatataggaacgtgatggatatgaatgcagggatggggggattcgcagctgcattgatgaagtatccactttgggtgatgaacgtggtaccttcaggctctgctcatgacacccttggtattatctatgagaggggattcattggaacctaccaagactggtgtgaggctttctcaacgtatccgaggacatatgacttcatccatgctgataaaatattcagcttttatcaggacaggtgtgacgtaacatacattctcctggagatggaccggattctaaggcctgaagggacagtgattttcagggacacggtggaggtgttagtgaagatacaatcaattacagaaggcatgcggtggaagagccaaataatggatcacgaatctggtccattcaaccctgagaagatacttgtggctgtcaagacttactggactggacaacccactcaaaagcagtag

SEQ ID NO: 690 - DNA, 3906 bp, Oryza sativa
atggtccgaatgcttcattccttagatcatccgaatgttctgaaattttactcatggtacgaaacctcagctcatttttggttaatactggagtactgcgttggtggagacctaaagggcttgcttgagcaggataagaagctgcctgaaaattctatacatgacttggcttatgatcttgtgaaagctcttcagttcttgcattcacaaggaattatatattgtgatctgaaaccatcaaatgttttacttgatgaatctgggtgcatgaagctgtgcgattttggattagcaaggcgtttgaaagacatagagaagaccaatcctggagatgtgccgcaacctttgaaggggactccatgttatatggctcctgagttgttccaagagggaggagtgcattcatatgcttcagatttctgggcacttggttgtgtattgtatgaatgctattcaggaaggcccccttttgtggctaatgaatttacccagctagtcaaatctataatttcagatcctacaccacctttgcctgataacccctcaagatcctttcaaaatctgatcaattgcttactcatgaaagatcctgctgaaagattacagtggtctgaactatgcgagcatcacttttggaggagcagaatgtcaattattcctttacctcctcagcctgcctttgacaacatggtcgacctttctgctacaccatatttagttgagagaaatggtgataaaccttctagacagtccacaccacccaagccccgtgatggcctacggaagaaggacgaaaattctgctaaggtgttcacccctgttaagaatatgctaagtggtaagaaaaacaatgcaaaaccttcctgtaaggctgatggattgaagggtgtaaatatcctcaggatgtctcgtgtagctaagaggaatttgcagagagaaaaagacaaggagaactacaggcgacaccctacagaagcttctgagaatgatacagaagttaagattgaaaacaatgatatggaacttgattttggtgaaaatccagaaggtgatgcacctgatgacaatgatggatcagacaatcctggatccgcagaagatgaaaaactttccactcaaggcactgatggtaatgaagagaactgcatgagtaatcagatggatatgctcacagatgaaggcccagttaaggctgaaaccatgataaaaactgaacataattgttcagaaaatcttgatgtggtggccactccaccaagtatttgtatgaggaaagcacaacgagcaaagacaacttcaggtgccgcagctggttccgagccatctgacatctctgcagcattctggcatccaacagatcttgctgttaaaccagttatgcctggtaggaaaggagataaagctgtagagacagtccctatgcttccgtttgaagctcttcctgctgttgattatattaagttgccacgggaacaaatgaatgcattcaatagtcagatacttcagagtttaagtggtacttttcaggtttcagagaaacagaatatcatcaaatacctggagatgttaagcatcaattctgatgctgcaaatataatcacaaatggtccaattatgctgttgcttataaaaatgctccgtctgtcaaaaacttcagtattgcgtgtccaaattgcttcacttatgggattgttgatacgctactccactatccttgatatagagctggcaagttcagggatttttaatgcactatcagatggtctaagggacaagcatgataaactcaggcgattctgtatggcaacactaggagaattactgttctacatttctactcaatctgatcaagataccaaagaaatcaatgcccaagaatcccctttgaaggataacagggccacagcttcttggcaggttccaagttctgtaattgcgctggtgtcatcaatcttgcgtaaaggtgaagatgatctagcccagctttatgctttacgaaccattgataacatctgtagccaagggacagattggacttcacgtttcgcttcccaagatgtaatcagtcacctgtgctacatctatagagcaactggtaagcaggagaatacaagacttattgcaggatcttgtttggcacgcttagctcgcttcagctcatcttgtattcatttaatactggagaggctggccttcaaggatatcgcatgcacactcattaaaggcaattcacgtgagcagcagatcagtttgaatcttctgaattcagcactagttaacagccaaatcataccaaccatgaaccgctacattcagtcgttaacagaagagaagcagttggttcctggactcatctctcttattgaacagggaactgatgttctgcgtggcaaaacccttctatttgttgctcttctttgcaagaacagtcgaagatggcttcctcatttcttttgcaatgcaaaactactatcagcagttgatagattgggaaaggagaaggaaggcttcattcatcaatgcacagaagcatttgtgcagttggttgcttcattggtcccaggcatccttgacactgtctctagtgatatacaacaggttatgggaggcaagcgtcatggagctgctactgctttaactggacgagctcatccaaagagcataattcatttgtttcctgttatccttcatcttcttgggagtgtttcattcaatcacagagttgtgacgagccatgtattgcttcagttggcaaatcttatgaaaattttggaagcaccatttcaggctcgggatgattttcaaatgacactattgagggttcttgaggcagccacggaggagccttctgttatacttaatgaacacaaaatattcacaagtcgaatccttccaagcttatccgtcttgtacaagggcaataaagatggtgatgccagattcctatgtttaaagatactgtccgatgtgatgattgtgatcttcagtgactcttcattgacgtctaatgagcaaacagtatctgacctggaaaagatctctcagaagtattttctccccatgtatccatcatttgcagaggatgaagatccaatacctatatatgcccagaaacttctggtaatgctgatggagcatgattatgttaaggtttctgatattctcaatgaagcaacagtatcccggtgctttgaatttttgctaggagatttgtctaatgcaaatgtaagtaatgtcaagctttgctttgcattggcatctgctcccgatatggacaccgacattctttctcagcttcaagttgtcagaagaatagggaacctgctggagtttgtgactgcaaaagatatggatgattttctagaaccaaccttggaactttgcagagcattcattatccggggcatcagcagtgacaaaattgtggccctttccaaagagcccgcactccttgttgatagtgccttcagcatgagcattgctgtcgatcaacaatcatgcgtcatggatatatgcgactttggtggcaacatgggcattttcctcgacctagttggaagttcagatccacatataagcgatttggcatcagactgcttggtgctgttactcaaagcagcacctcgggaggctacggtgggcttgctgaccaatcttcctaaactgagcgttgttctggacctgctgaagcatggcacctgcctaaggctgactcgcctgctgtattgcctggccttctcctgcaggcaatatctagcgcaaggaatgatcgtgtcgatatctttgtcagccttgatgcgagtagaagcactcgtgtcggcattcaagggttcacatgatggctgccttgctgacgccgcctcatatttgggcgctgaactgcagcgtttacctcgctgtggttga

SEQ ID NO: 691 - DNA, 3855 bp, Oryza sativa
  N_region (2331)..(2331): n = any nucleotide
atgggctgtgtcagttcgaagcaattccatggcgaggagcagcgtggcggcgaggggaagccccggcggcgcccatctagcaactctctgaggcgtcttgttagttacaattccagcaagaggcatgagcactttgaggaggaggatgaagaaggtgtggttgtgtcagccacctcctccagtgctggacatcgtgtagggaatgatgtgagcacggctaggctcatccggaagccccccgcgccggtggttgaggctgtggctgtgcctgtggctgcattgccagatgaggcggcttctgtggcggttagcgtggttgatgtggagaggccagttgccgcgcctgcgaattggaggcgtgctccgaatggcgcggcggagcaagagcctaggagtggtggtacaaggagtgaggcgaaaccgaggattacagatgttgtgcccaatggagtgcagggggggcatgcggcagctggctggccaaggtggctcacagaggtcgcagcagaggcagtccgtgggtggcaacctcggaaggcagagtctttcgagaagttggacaagatagggcaaggtacatacagtagtgtttacaaagcacgtgatcttgagagtggaaaaattgtggcacttaagaaagttcggtttgccaacatggaccctgagagcgtgcggttcatggcaagggaaattcacatcttaagaagacttgatcacccaaatgttattaagcttgaaggtttggtgacgtcgcgcatgtctagtagcttgtatcttgtatttgaatacatggagcatgatctagcgggacttgcagctacacctggcataaagttcacagagcctcaggtcaagtgttacatgcaacaactactctctggacttgaacactgtcataatcgtggtgttttgcatcgggatataaagggcgcaaatctcctcattgacaacaatggtgttctcaaaatagcagactttggtctagccacattctttaatcctaaccaaaagcaacatttgacaagtcgtgtggtaacattatggtaccgacctcctgaactattgctgggtgctactaactatggtgctgctgttgatctctggagtgctggttgcattcttgcggaattgctgtctgggaagcctatcatgccagggcgaacagaggtggaacaattgcacaaaatatttaagctttgtggttcaccatcagaggatttctgggctaatttgaagttgtcacgtgctacaatattcaagccacaacatccttatcgtcgatgtgtgaatgatgtatacaaggatttccctcctccggctttagcgctattggattgtttacttgctgtagaacctcagaataggggtactgctgcttcggcccttggaagcgaattcttcacgacaaagccttatgcttgtgatccatcaagtctacctaaatatcctccaagcaaggaatatgatgctaagcttcgagacgaggaggctagaaggcaaagagcagctgcagttaaaggacatgaatctgaagctgggcgtagaaagcaacttccagcaccaaatggcaacaacgaattgcagcaacgacgggttcagcttaatccaaaaagcagcagtaataagtttattccaaaggaggatgctgtcactggcttcccaattgatcctccaggaagagctggagacaatgtttaccctcagcgtgcgcctctgatgcatgctggtcgttcatcctctactctgggccgatcaagtggcactgatcagaatgctcagaggttttacacatctcaaattgctgctgctgagatgtctactgcaactggtgggcagcgaggcaatgccactaagctgtcctccaaccttggggagagtgccaggagacaatatttgagagagcatcgatctagttcaagatatagtcaacttgctgctgctgaaccctctgacagacctgaatggacacaccaattccaagaaagaccatcatcttcccaccgcaaagatgatggggcagcaaataaggaacctactgtggtgaatggcgctaagaagagcaggatccactactcaggaccattaatgcctcctggagtaaacatggaagaaatccttcgagagcacgagcggcagatccaacaagctgtacggagggcgcgcctcgacatgggaaagggcaagaatcacgtcgagagagaccagtcggaatcgcttctgtacactacccagaatggcagacccaaaggctcgcctcctttctacctagccctcgccgacctcccggccgcgcgggccgccgtcgagcaggcggcgggaaaggcgcgggcnttcccctggaacctgcttatatggggctacgcgggccgtgggctgtgggaggacgtgatcttgtcgtacgagaagatggtgggttggggcgtcgccgccgacaggttcacgtacccgtcggttctgcgtgcctgcggcgagctccgggaggtcaccattggccggaacattgagcagcgcattcggaggtgtagatatggtctggacatgtatgtctggaatgctttggtggggatgtatgccaagtgtggggagctggaggatgcccggagggtgtttgatggaatggctgtgagagatgttgtcagctggaatacgatggtgtccgcgtatgcgtcgacggggaagtcgaataaggcatttgagcttttacagcaggttcctggtgcaaacgttgtcacgtggaatgcggttgcagcagggaatttgaaggcggggaactacgatgaagtgattaggttggtgtctcaggtgagaggatatcatgggacaggggtggattctgtgaccatcgtgattgggctcaaggcgtgtggtaggaccgggtatttgagtgttggtagggagttgcacggggtggctgttcgtctatgctttgatagccttgagtgcgtggtgaattcgttgataactatgtactcaagatgtgggatgatgagctctgcctgccttctgtttagagcatgctcagttcggagcatcacaacctggaactcactgcttgcaggatttgcattcatggaacagatcgaggaagcttctttgattttcagagagatgatcggttttggtgtctgtccaaatggtgttactgtcttaactatgctttcccttggtgcacgggttggacacctctgtcatggaagggagctgcactgctacatccttaagcatgagctggatagctctaaactaatggaaaattcacttgtcgacatgtactccaaatgtagacaaatggtagttgcacagagagtgtttgaactgatgcaatttcgagacaagcatgcctacacatcactggttttgggttatggattgcaaagagagggacatgtatcactgaagctctttgatgagatgattgtgaacagtatagagccggaccatgtaactttcgttgcagttctatcagcatgtagccactctgggctagtaactcaggggcagctactatttgccaagatggtttctatatttggtattgcaccaagagtggagcatttttcttgcatggttgatttgtactgccgtgaaggtttgctcaagatggctgaggtgataattgacaagatgccatttcaaccaactgctgcaatgttagcaactcttattgaggcttgccgaatccatggtaatacggaaatcggggatcgggctgcaaagaagttgctggctatgaggacaaacaaccctggtcattacagattgattgcaaacatgtatatagcagcaaaatgctggccagaactagctaaaagtgagatcactaatgagcaccctggagctaaatatgattcctag

SEQ ID NO: 692 - DNA, 2898 bp, Oryza sativa
atgggggcggcggaggaggaggcggcggcggcatgggacaaggcggaggccaaggaggagaggataatggtgtcggtgcggctgcggccgctcaacggcagggaggccggcgacagctgcgactgggagtgcatcagccccaccaccgtcatgttccgcagcaccgtccccgagcgcgccatgttccccaccgcctacacctacgatagggtgtttggtcctgattcctctacaaggcaggtctacgaggaaggagcgaaagaagttgctctatcagttgtcagtggaatcaactcaagcatattcgcgtatgggcaaacaagcagtggcaagacttacacgatgaccgggataaccgagtatagtgttctcgacatctatgactacatcgaaaagcatcctgaaagagaattcattttgagattttcggcaatagagatatacaatgaagctgtgagggacctcctgagccacgacaccacacccctcagacttcttgatgatccggagaaaggaactaccgtagagaaactcactgaggaaaccttgagggacaaggatcatcttaggaaccttcttgctgtgtgtgaagctcaaaggcagattggagaaactgctttgaatgaaacgagttcaaggtcccatcaaatactcagattgaactttgttgacctagcaggaagcgagcgtgcatctcagactgcttcagctggagtgaggttaaaagaaggtagccatatcaatcgaagtcttcttacactgggaaaagttgttcggcaactcagtaagggaagaaatggccatatcccctacagagattcaaagctgactcgtatattacagtcttccttgggaggcaatgcaagaactgctattatctgcacaatgagccctgcacggagtcatattgagcaatccaggaatacactattgtttgctacttgtgcaaaggaggtagttacaaatgcacaggtcaatgtagtgatgtctgataaggcactcgtgaagcatctacaaagagaacttgaaagattacaaagtgagattaaatttccggcgccagcctcctgcactactcatgctgaagcattgagggagaaggatgcacaaattaaaaagctggagaaacagctaaaagaattgatggaagaaagagatactgtgaagtctcaacttgactgcttgcttaaaagcgattgtgatgaccatagtgacggccgcgttgcgaagcgatgggatgagcatagtcgatcctcagagtcttttgcacggaatgcgtctgaagaagcattttcagtttcagatacttctggtgttccttaccaggatcaagataatgctgtgtttaatggatcctatgtcttcagtgatgaccgtgatgatattgtattccctgttcaaacagtggatcttcctgaagaaacaaagcatgaaaaatttatgtcaccttggcaccctcccagccaccatagttcttctgattgcatagagtcatatcatatgacagaagcggcttccagaactgcatcagaagtctctgaagagcattgtagagaagtccaatgcatagatatacatgagcatagaagaagcacaagtcacaaattcgaccttttgctgccccaggacaccgagttccaaacacctgaattagagatctccaaagaagcagtccctcaacctgatgaagaccaagaacttgagagcataacaaacagaatggaagatcctaccaggatgtgccctgtcgaggaggagcaacaagatgagatcgtagatacatgtgaatctaatggtaccacagacaatgatgtcaagctatatacatgtgattctaacatttcttttgacattcagaaaccttaccctaatggatgtctgactgtaaaaaggtgtatactgagctccaaggatagggcgttgtctagaagtaaaagctgcagggctagctttatgattattccaaatagttggtttgatgattccgagtacaccagccagacaccacctaatgaaatcttgaagcataccccaagaaggtttgacaaggttaggagaagcttgtatccagaaaatgataacccttcttcagtagaccgttctgagttttctggtgaagtttcttctgatgaagtagtgaaggacatgagcaccattgatgaagtagccaaagacatgtgccccagcgacgcagaacaagaaactctcaccagtgacatcagttgtctcaccaagttgaagaagactgatagtgaccatgaggatgaacttgatgagtatcaggatcagcagtctattagagatggatctacaaccttgagaactgtcaaagatgttggcatagattcatcactgagtgcctctccttctcgttggcctattgattttgagaagatgcggcaagagattattcagttgtggcacgaatgcaacgctcccatcgtacacagaacttacttcttcctcctcttcaagggagatccagcagataacatctacatggaggtggagcacaggagactgtccttcattaggaggtccttcagtgccagccctgcaggaggcgagcttaattctgccgtcgtatcaagcctgaaaaatcttcgacgcgaaagggacatgctctacaagcagatgcttaagaagctcaccaatggggagaaagagcgcgtttacgctagatggggaatcgatctgagctcgaaacagcgaagattgcagctatctcgtctcgtctggacgcagaccgatatggaacacatcagggagagtgcatcccttgttgcgaagctgattgagctgctggagccagcacaggcactgaaggagatgtttggactgaacttcacactagctccccgatctgaacggcgatccttcggccttctaggtacctga

SEQ ID NO: 693 - DNA, 2826 bp, Oryza sativa
atggctttggagaaaaaaatcctcagaaaggacaatttcaacgaagaacaaagccaatatatcagagagggaacaggaggtacatcacttatctctttaacattattaagaagccttatgaattatgatatgttcctatctggattttcaacttttccttccctgcagaaagagaagattgcacggttagagagatccttgcaatgcttaaatgaacagatttcatttgctcaagctgaatgcgtggagaaggatgctattttagctaagcaagcaaaagtggcagaagaagcaatattaggttgggagaaagctgaaggtgaagcaatagctattaagacacaacttgatgatactctagatcagaaagccgcaattgagcaaaggatttgccatcttgatgaggctctaaatgttgccatggtagagagggagttattgataaaggacactgctaaactgatttctcatgagcaagttaaagttgagaggctggaaggagatgtagtagagaaaataaacataattgctagcttggatgccgagaataggaaactttctgaaatgctctcaatgaaagagaaaatgatctcagagttaactgaagcaaagggtgtgatagagtcaaatttcaagaaccttgaggtaaaactagagtcagcggacaaattgaattcttctcttagatatgaggtttgcatgctgcagaagcaacttgatattcgaagtgaggaaaggaaatttaacctgaaatctgctgatgctgcacataaacaacatcttgagaatgtaaaaaagattacaaaacttgaagcagaatgccagagattgcgttcaatggtacgtaaaaggctaccaggccctgctgccattgctaaaatgagaaatgaagttgaaacactgggtaacaatgcagtaataacaaggacgagaaggttcaattctacaacatcattcaactcaggcaatctagtgcagaactcctatgatgcatcacatgaaagttcttcattgcttgcaaggctgcatgcgatggaagacgaaaataagactatgaaggaatctctttctagtaaggatggtgagctccagtattcgcggaccatgcttgctcgcacaacctctaaactttcccaagttgaagctcagcttgaggagttatcaagaggtcgggttgcaacagatttagtaaaatgcagtcctacagtggtcgagaaccctctatcatcaatctccgaggacggttgcaatgaagataatgtcagctgttcaagctcatgggcgtctgccttgatttctgaactggaacacttcaagaaggggaagctgactacaccctcttgtaagagtaccggagtatcagacttgagtttcatggacgactttgaagagatagaaaagttagcattggcatgtgatgcgaaacctacagaatcgtatgattcaaggagggagtctagagaatcatcagggaaagagctagtaacagttgatggtcctattgaaacatctgaccaactccgtcagcacaagattgagaaggcagtcctgaagttgatagaacttattgagggtgttgtccagagatcatcaaaagattatagtagcactgttgtgctctctggtggcagtgagggcgaccgctctaacacattgactggctacgttgcacgtgcattcctgtggaaaacgtctgaacttacttctgtactacaaaatttcgtccttgggtgtaacgagcttttgtatgggagtacagatgttgaaagatttgtgcttgaaatcaatatcacactagactggataatcagccactgcttttcactccaagatgtatcagacatgagggagactatcataaagaacttggagataaatagcagttccggactagaagttgttccagtaattaagcacaccggaatccaaacaacagatggcatgtgtgaacccaggacgcctaacaagatgcagatggcgatagtatctgtatcaagcttaatggatattggatataaagctgatgatgactcagaaattttcaggaataaaataccagtctctaaatgtgaggaatcagaaggaaaagcttcaagcctgcgagcagagcttaatgcattgaaagaaacaggaaaaatgatggcacatggtgtcgatggtgaatccacaatcaatgaacttgggaaaccatccaactctgacataaacaagggcaatcaacacggagtgtcttctcttgaatccaagcttcagctagaacgtttccctgctaaagaaggtccaaaatgtgtttctaggaatgaagatcagcatgtacagatgcggctggagatctcaacagcatcagagaagcttatcgagtgtcaggagacaatcctaaacctgggaaagcaactgaaagcacttgcatctccaaaggatgcgatccttttcgacaaagtggttcatacaaaaattcagtctgagcgaaaaccccggtctcagtcgctaaacgagatgctagccatggatgatggaggattcgattacctcagctcccccaaaaccaaggagatcatatgcgcggaactaagatcgcggcatgaaagaagttgctctgtcgacaacggaggcgatgattcagtaacatgcagttcccacccaatgccggtggcaccaccaatgaggccctacgatgtgaatggaacttgcaaggatgaggctgctctcaaggtagtagcacttatgccgagcaagcagaaggggaacaccaacttgctgaaaaggattctggcaggaaggagaaaggaagccatgaccaggccaaatgtcgttgcgactgcttag

SEQ ID NO: 694 - DNA, 2727 bp, Oryza sativa
atgaagaaagtattcgatcaaacagtccgggacctaaaaagagaggtgaacaagaaggtcctcaaggtgcctggtatagaacaaaagattcttgatgccacaagcaacgagccatggggcccacatggatcactcttggcagaaatcgcccaagcaacacaaaattaccatgagtaccagatggtcatgaatgttgtgtggaagaggatcaatgacactggtaaaaattggcggcatgtttataagacactagctgatttccagtatatcgattcgagtgggagagatcaaggtagcaatgtacggcggaaatcccagagccttgttagtttagttaatgacaaagagaggatacaggaagttaggcagaaagcacttgctaccagggacaaataccggagtgcattcgccaccagtggaacacacaggagcccaggtggctatgacaatgaccgctatgaaggaagctatggcagtaggtatgataacagaaatggctacgggggagaaagagagtatggatatagggatgatgacagatatggtgttgctggaactactcccaatcgggaaggagatcgttattctagggattctaatgagcagcgctacagcagagatagagaagatgagtacaaaggaagtcatagcaaccatgaatatgcagaaggatcaggtcgcaggagctatggacgagatagggattcatatggggatgatgaagcttattcatcccgtggccggcaaagcaatgctgacggacctactcaggatgagaggcccatggagcggaagccttctaaccagcagattgcttcaccaccgccaaactatgaagatgtcacaagagatacacaggataataatcatgatggacgaaatggagggactgtgcctgtgccagttgctgcagcaaaggtgtcttcacctccaagaacaagtgtacccccaggtcaggtgaatggtgtacatgataatactgtggaagacgtacctgcaccaccacctactcatcctgaagttaatgggtttgacgagtttgatcctcgtggatcagtaccagatacctcacctccagtgaacccctcacaagccgtgaatagcttggaaatggatttattcggaccagatcctattaattcgttggctttggtatctgtgcctcagccaactgccagcccaaatgttgagccatcagcaaatccaggatttgagagtaacagttttatgggcatgccaccggcttctactggattcaatgaggcctttgatgcaactaatccttttggggatcctacgcctttcaaggctgttcatgaagaaactcctgcagtttctcagacaaatgctgcacctgctggttctttccatgctactgaacctgctgcagatgcaaatcctttccagcctgcttcagcagcaagctttggttttggagacactcttggcgacctctcttttggatcgaatgctgcacccgggcagcaagatatttttgtgcccacctcatcacattcagaggtaccacctgcaaacccatctgtgcaccctgaacaggcagtcccatcttatgtctcctcccaggcacctcagcctgcagctgctggtccacaaactcatgctgctcccgcttcatttgcttctcaagcacctcccacttcatttgcttctcaagcacctcaagcaggggcaccctatcctcaggctgcctccacatttcctcattcacaagcatctcatcctgcagccactaatccatctacaatccctcagaatgttgccacaccatttgctcctttacaaatgcctcaacctgtaccatcaggccaatcaaactattttatgcaaccagttccagggactggcattaatggcatgtctggggctccttcacagaatggagcaccatcctacatcccttcacaggcttctcaatttgcagctccaacaaatctacagccctctcagccaaccttccccccacaaactgccatggcagcttcacaggcaacatcaatttctcgaggggcatctcagcctcttgcagtgccgaattcaatgccttctggtgtgaactttccattacaatcaagttcatcagctccccctgaaacaatcctttcagccttgcaagttagtcagtctgagccagtgaagaaatttgagtccaaatctacagtttgggctgatacattgagccgaggtttagtcaatctggacatctctggaccaaaggctaatccgcacgctgatattggagttgacttcgattcaatcaatcgcaaggagaaaaggcaagaaaagaaagtctctcaagctcctgtggtatctacgatcactatgggcaaagccatgggaactggctccggcatcggtcgggcaggtgcgagtgccatggcacctccagccaacccaatgggtgcaagcaggggcattggcatgggtatgggcgctgctggttccggttacggtggtggaatgggaatgaaccggccaatgggcatgggaatgggaatgaaccaacaaatgggccatgggaatggggatgaccaacaggccatgggaatggggatgaaccaacaaccaatgggaatgaacatgggcatggggatgaaccagggtatgggaatgaacatgcggcctcctatgggaatgggtccaggtagtggatataatccaatgggtaccggatacggagggcagcaaccatatggtgggtacaggtga

SEQ ID NO: 695 - DNA, 2562 bp, Oryza sativa
atggcggggtcgaagtttgggtcgttcaagtcggagaaggggagctcggcgggggcggcggcgggggccggagcggcggcgcagaggagggacccatacgaggtgcttggggtggggcgtaatgccaccgagcaggagatcaagagcgccttccgccgcatggccctcaagtaccatccagacaagaatgcagacgaccctgttgcctcggacaagtttcaagaagccacattctcttacaacatactgtcagatcccgataagaggcggcagtatgattcctcgggattcgaggccattgaagcagatagtcaggaactggagttggacctgtcaagtctgaacactgtaaatacagtgtttgctgccctgtttagcaagctaggtgtaccaatcaagaccacagtttctgcaacagttttagaggaagcattgaatgggtcggtgggaatttcccaactcgagcttggccagtccgtctttaggaaggtggaaaagcaatcagctcacttttattctgtggacataacagataaagaagccaaaatggggttagtgtgtagagttcaatcaactgctaaaagtaaattcaagttgctatatttcgagcctgaagaaaatggtgggttaagccttgctttacaggagaaactacgatgcgtggaggcaaagatacttgcaaaacgatctgagctgtctaaatttgagtctgagtatagagagatcgacgagcttctcaaggaaaggaatgcaattcatgcatcctacaccaacaacacaactctgcaacggagttccagtagcaacaaagggaaaacatcctctaaagagtccaaaagtgatgatgaccaaactgtgaaaaaggaaaagaaatcgaagagcaagtccatggagggatccagaagtgatgatgatggtcctagaaaggaaaagaaacctaaggaacgacttcgaaggaagaaatggttcaacatccatttgaaagtattccctgcaagttactactcccaggaaatggaacccaagggagttgctccgagaagaaatatctttttctttgtcgtccactccatgggatcaaataggcaggaatctcagtttgacattcggaaagacaccctcgcaaattattttttctcctgtgacaacagcaaacccaactcctcccccctcctctcctcgcatttcttcgacctgccattccacacccgcgcgcgcctcaaactctatgtgagggaagggaaacaatcgacttcccagctgagaaaccaagaagcagcagcagcagccatgcgtccgtccttcctcctcctcctcgtcgtgtttgccggcgtcttggccggcggggcgcgcgcggggccgccgttggcgggcgagaatctgccggggcagctgttgccgggcgagaagccgccggggcagccgttgccggggcagccgttgccggggcaaccgttgccagggcaatcgttgccggggcagccgttgccggggcagccgttgccagggcaatcgttgccggggcagcctttggtgggcgagaagccgccggggcaaccgttgccggggcagccgttgccagggcaatcgttgccggggcagccgttgccggggcagccgttggtgggcgagaagccgccggggcagccgttggtgccggggcagccgttggtgggcgagaagccgccggggcagccgttggggggcgacaagctgtcgccggattactacgcccagacgtgcccgcgcgcggagcggatcgtcgcggaggtggtccagtcgaagcagatggcgaacccgacgacggcggccggggtgctccgcctcttcttccacgactgcttcgtcagcgggtgcgacgcgtcggtgctggtggcggccacggcgttcgagaagtcggagcagagcgcggagatcaaccactcgctgccgggcgacgcgttcgacgccgtggtgcgcgccaagctcgccctggagctcgagtgccccgaggtggtgtcgtgcgccgacatcctggcgctggcggcgcgcgtgctcatcaccatgaccggcggcccacgctacccgatctccttcggccgcaaggactcgctgacgtcgtcgccgacggcgcccgacaaaggagatgccgcagtccaacttcaccatggaccaggtgatcaagagttcgcgcagaggatctacgactaccaggggaagcccgggaacgtggacccgacgatgaacccggtgctgagcaagggcttgcagacggcgtgcaaggagtacctcaaggacccgacgatcgcggcgttcaacgacgtgatgacgcccgggaagttcgacaacatgtacttcgtgaacctggagcgagggctcggcctcctcgccacggacgaggagatgtggtcggacaagcgcacccagccgttcgtgaagctctacgcgtccaaccccaccgccttcttcgacgacttctcccgcgccatcgacaagctcagcctcttcggcgtcaagaccggcgccgccggcgagatcaggcggcgctgcgacacctacaaccacgggcccatgcccaagtga

SEQ ID NO: 696 - DNA, 2079 bp, Oryza sativa
atgtcgaacaccccggcggtctccacgtattgtggctaccgagaactaaacgcctacaatcgcatcttcctagggactgatgtagagaaaactcctattggccgaagccggtgttcaccacttcaccaccaaaccaaacaggagtggtctggcaggctagtaaacagtgcaaagacagttgaaagctctgctcgcgagttcttaggaaaggacaagtcaactacacttgtggctagtgcaaactttgttgatctggctggaagtgagcgtgcatctcaggcattgtcagctggcacaagactgaaagaaggttgtcacattaataggagtttgcttgcccttggcactgtcattagaaaactgagcatgggaagtaatgcacacataccgtatagagattcaaagcttacacgcatactacagccatctttgggaggtaatgcaagaactgcaattatttgtacactgagccctgccactagccacattgagcaatcaagaaatactctgctatttgggagttgtgcaaaggaagtagttacaaatgctcaggaacttgctagattggagagcgagttgcggcatccagttcagagttccagtctcgaaacattattgaaggaaaaggacaaccaaatcagaaagatggagaaagaaataaaagaactgaagtcacaacgtgatttggctcaatccaggttgcaggatttgctgcaatctgtcggtgatcatgacctgaaccgtcaagttcaaggaaagcattcagtcagaagccctccatctgttggaatgcccccaagcgtcagcagagatgatagttctcaggtctctcatgatgattcagatctttacaaggaagtgcgatgtattgaaagcaatcggacaggaggaaatgaccagttggacttatcagctggtgaaagtagtagcccacaagattcaaatatgaattctggtttgcatggaaatgattcaaatgcatcagtgaattctaggcattcaaggccctctggcgaagctcctattactttggaggaacacttggagaatattagaaggccttttgtcagtctagccaaagatctaggatcttcaacacgtaactcatcaaacttaagagtaattggtagaagcaggagctgtagatcactgacaggttctactatgtttgacgatatggagatggatgattgcactccactaaatagaagtttggtggagttcccaggaagacctgtggaatctcatagaagaggatctgcactgcactatgatgcagagaccgacacactttcaagggcaggatccatgagttctgagatcagcacttttaaggatgcaaagacaaatgggtctgttgcatgcgatacagaattcactggtattggtgaatttgttgctgaactcaaagagatggcccaggttcattatcagaagcagttaggtgaccagaatgcaaatggaaagagcatcggattggacccgatcgagggtgtttctcagtcaccttctcgatggcctttggaattcgagaagaagcagcaagagatcatcgagctttggcaagcttgcagcatttccttggtccacaggacttactttttcttgctattcaagggagaagcagctgactcgatctacatggaagtggagcttcgaaggctatcattcctgagagatacatactcaagggggagcacccctagcaatgcgatagtaggcagcctgagtacttcccctgttgcgagcgcaaagaagctgcagcgggagagggagatgcttgccaggcagatgcagaagcggctgtccacggaggagagggagcacacgtacacaaaatggggtgtctcgctggactccaagaggaggaaactgcaggtcgctcgccgcctctggaccgagacgaaagacctggagcatgtcagggagagcgcgtccctggtcgccaagctgatcgggctccaggagccaggccaagttctcaaggagatgttcgggctcagcttcgcgccgcagcagcagccgacccggcggcgatcctccaacggctggagatacgggatcccttcgttcgcctga

SEQ ID NO: 697 - DNA, 1935 bp, Oryza sativa
atggcacctgatcctgtcatgcaatttcagactattatcaccggatcttcacgtgaacaaacctctggtcaacgtgtcaactcagaagctgctgcgctaaacactccaaatgaaaagatagtgcgtgttccatctgataaacagcttgtgcctggtcaccgtctaacaaacggtacaggtccggtttccagctcaaagcagccctcccacacaggctcatctcctgatcctttggaccctaatggacatcccaaaaagaaaaagaagcctaaaccatggtccagagaggaggacatggaactaggagcaggtgtacagaagcatggtgaaggaaattggatggaaattctgcataaatataaatttgatagttcaaggacgcatcttcaacttcaacagagatgggcgcttatttgcaagcgtcaggggtcaaccaagcctgctacccctaaaatacccaatgttatgtcggaggaactaaaggcagcacaaaaagcattttcattggccattgggacgaccagatcgtctacattaagaccaggaggtgtgccacatcacaatccaatggttactactacgaatcctgaggtgaaatctgttacagcaccttcaccattgccggtaccggtgcatgttgttccggtgcctgttccagtgcaaccagtacaagtgcagttaccaccacctcagttgcatcaagcacctgcgcaatctgcacctccacctccaaaagtatcaaatgcttcaaataagtcacgaaataattctaagaaacaagttgcccaatcaattcctgtgaatggccctttgtcgatacaagaggcagctcttgctgctggtgggcgaattgccgaaccaagtgttgccaccaattttttaaaagctgcacagtccacaaaagctgtgcacataagatctcgaggaacaggatcttcaaaatcttctacgggatctaaaacacctactgtggctggtgaacctgggacacagcttggcagtgatcaacacctagaattacaaagtactggtggtccatctcaagttttgactgcacatgcaactgaacaagttcataatgtttcagaagtcgctggggttaatcctctgggacaatccgctggagtgcatttatcagaaactaagaaagcactgaacaccacaccagtgtctggatcttctgacaaaatggaaatagatgacaactctaattattttgcagtcacaatggaggacttgttccctgaggatgtgaagcaggaagatgttcaagatcccaagattgaggaggccatagaccccaaggatgcagacatgttagaatttgatcgctttgtggcccaaggatgcttaaataaggataatgtggataagagcaaggctgccaagattgctccagaagctcaaagcgttattggcagccagaaaaaacagctgaagacgctgcccacagttggcaaaagcaaccctgtatttgctggacctccagcaactgcgaaaaagaccaaagctccagttccacagggtgggatgtctagcggcatagttggcgtgctgaatagatcattaggagggaaggcacctgctcctgctaccacaggcacccaaagtactgtccagaagcagcaaagcatgagctcaaagggcaacttgttagtgcccaagaatgtggcgcctggcaccgtaacaccagccaacaaccgggccaacacagcggtgaacggggctagcaaggggatgaattctggaatggccttgtttttggctcaagattttttccatgctgcacgcattgcgacgaagatttggagtgtgatagcatttcatacactctactgcatgtcgcttgctttgatcattctttgccattgcggtgacatcgtggcaactggcaatggacggacgctggcaatgctgctggttgttcgaagctga

SEQ ID NO: 698 - DNA, 1857 bp, Oryza sativa
atggagggaagtggacaaagtgataagggtggacatgttacatggacatcttcaatgtctacctacatgcttgaatacctcgagggtattgttgctagtgggaacaaaacttcctcggggtttaagcaagtccacttgaaggcttgtgctaaagctttgaatgatcacttcaatattaatttgacttcagatcagattactaatcacataaggacttggaaaaggaaatattctaagatagctgatttgaggaagttgagtgctgctctttgggatgatgaaaattttatcatatcacttgatcataaacattatgcagaccacatcaaggatcacaaggctgatgctgaatatctgaacaaacctattcacaactatggcaagatgcttgtgatatttggcaatagcttggctacaggaaaatatgcaaaaggatctggtgatcctctagccactgaatctattcccattgatgatgatgaagaagaagaaattggtattggaagtgctgcagcaactggatcagctagtagagttcatgcccttaatgaggaaaatggtgcatcatcttcagcacccaaacccaagaaagctaagactgatgctgcaattgaagaggaagggctgataggcgcatttaaatctgttggtgacaagcttgctggagcaatagttgaagctggaaaagaggctgcaaaatctaacaaagagctgcccgataacctatatgagagtgtgcatagcattccagggtttgaagatacacatcttgctcattaccatgcacatctagttgacaatcctccaactgcaagagtgtttgttacccttgaatttgctcacaaggtagacaacaaatacgtgatgcagttgattatttgtacatgcaactatccaattttcccaagtataccaggtaggagtgtgggactgggagcggcggcggcgtcggaggcaatggacgcttcgtcggtggcgctctacggccagctcaaggctgctcaaccattcttcttgttagctgggcctaatgtgattgaatcagaggagcatgtcctgaagatggcaaaacacatcaaaggcatcacaaccaagcttggtctgccacttgtgttcaagtccagctttgataaagcaaatcgtacatcatcaaaatccttccgtggtcctggtctggaggaaggcctgaagatacttgaaaaagtgaaagcaacatatgacattccagtggtcactgatgtgcatgaaagccaccaggcatgtcccagtcgtttttgccagtttgaatatcatcagaaaaacaagactgatcttctagtggctgctgccaagactggaaaaattatcaacatcaagaaaggacaattctgtgctccttctgttatggccaactctgcagagaaaatcagacttgctggaaatcaaaatgttatggtctatgatctaattgttgatccaaggaattttgagtggctgagagaagctaattgtccagttacctttgaattagctatcaactatggtatagtacgtggaccattgatggatattacatttcaggtagctgatgtaacgcatgctctacaacagcctgctggaaaaaagcttgatggtggaggtgttgcaagtgggggcttacgagaactaataccatgcatcgcaaggacttctgttgctgtcggagttgatggtattttcatggaggtacatgatgatcccttgaacgcaccttgtgatggcccaactcaatggccactgcgcaatttggaggagctattagaggagctgattgcaattgctcgagtcaccaagggaaagaagccactcaagatcgatctcacccccttcaaagaataa

SEQ ID NO: 699 - DNA, 1833 bp, Oryza sativa
atgggcgaggaagaagctgagagcatcctagaggcgctcaagaagaacattgatatcttcgccaggagccccgatgaggtgggaggtgttccgacagatctcatcatgcatcacctggcggtcaaaccggataccaagccaaaaaaacagaagctgcgcaagatgtccgccgatcgccaagaagcgacaaaagccgaagtccaaaaactgctcagagctggggtcattcaagagattgaccatccggagtggctggcgaatctagtgctggtgcggaagtcaaacgacaaatggcgcatgatgcctttcggcctgaggaatgcaggagcaaccatcgccatgctggtgtataaggtcctttgcaggcagttggggcgaaacgtggaagcttatgtcgacgacatcgtcgtaaaaagccgcaaggctttcgaccatgcgtccgacctacaggagaccttcgacaacttgcgtgcagcgggcataaaactgaatcctgagaagtgcgttttcggcgttcgtgcaggcaagctgttaggcttccttgtttctgaaagaggcattgaggcgaatcccgagaaaatcgatgccattcagcaaatgaagcctccgtcgagcatacatgaagtacaaaagcgccaagcagcgttcgacgagctaaagcaatacctgcaaagcccgccagctctgctaagcccagcaccaggaagcgaactgctactatacttagcagcttcgccggtggcagttagtgctgccctcgtccaagaaacagagttcggccaaaaaccggtctatttcgtctccgaagcattgcaaggagcgaagacaagatacattgaaatggaaaagctcgcttacgccctggtgatggcttcgcgcaagcttaagcactactttcaggcccacaaagtcatagtgccatcacaataccccttgggcgaaatactccgaggcaaggaagtcaccggccgactcagcaagtgggcggcagagctatccacgttcgacttgcattttgttgcacgcactgctatcaagtctcaagtgctagctgacttcgtagctgaatggacaccggtattcgcccccgagcccgagcccgtcgaacaattctgggtgatgtgctccgacggttcatggtcgcacaagggggcaggcattacgacagtacacatttcaccgaatggtgtgccgattcggtacgctgcaaggctgcagttcgacacaaccaacaacgcagcagaatacgaagccattctcctgggcctaagaaaggcgaaagcactaggggtccggcgcttgctaatccgaaccgactccaagttggtggcaggccatgttgacaaatccttcgaggcaaaagaagaagggatgaagaggtatttggaggccgttctgtccatggaaaagtgcttcaccggcataacggtcgaacacttacctagaggccagaacgtggaagcagacgccttggcgaaatctgctgcttgtggtggcccacattcgcctggcatcttttttgaagtcctgcatgcaccaagtgtgcccatggacagcttggagatcatggcaatcgaccaggtgaaactaggcgaagacccatacgactggcgaaccccgtttgtgaaacaccttgaaattggctggcttccggaagacgaagtagaagcaaagtgcttgcaactcagagccacaaagtataagatggttccgggccagctctatcgctccggggtacttcaacccttacttcgttgcatctctttcgccgaaggcaaggaaatgacaaaggagatacaccaggggctatgtggcgcgcaccaggccgcatga

SEQ ID NO: 700 - DNA, 1764 bp, Oryza sativa
  N_region (1686)..(1686): n = any nucleotide
atggccggcgctagatctgctccaagtgtcgctgccgcccccttacccatgccgctcccgaggcccagcagcagcggatccactctccagaagctcgttggccctgccgccccttcccttgcgccgttgacgctgagagccgcgtttgtctccttccccgcgctgcttccgaggcccggcactagcggatccgccctcccaaggcctgcccgcgccggattccctcctcggtgccccctctcccatgcctctactgccgcccccttccccacgcagccaccctttccctcatcattgccattgcccagctcgacccgctttggccagccagatccactagcagggaggttgggtcgccagatccggaagccctctcttatgcgaggcggtactgggcggcggtggagagagaagggacgccggagggaggagggagaagggtgggagagaggtgtagagagaagggaggcggaaggacccgagggaagagggagagagccgaagggagtttgtggcgtcctttacctaccgttagcgaaaacccgatttttgctgagctttgggaatcttggaggaggaggaggagcaggggggagcggcaaggcggcggcgtcgtcgttcctgcagctgccgctgtccacggcggcggcggccaccgcgtactacggcacgccgctcgccttgcaccaggcggcggccgcggctggcccgtcgcagtaccacggtcacggtcacccccaccacggcggcggccaccaccacagcaagcacggcggcgccggtggtggggagatctcggcggcggaggccgagtccatcaaggccaagatcatggcgcacccccagtactccgccctcctcgcagcctacctcgactgccagaaagtcggagcgccgccggaggtgctggagaggctgaccgccacggcggcaaagctggacgcccgccctcccggccgccacgacgcgcgcgacccggagctcgaccagttcatggaggcgtactgcaacatgctggccaagtacagggaggagctgacgcggccgatcgacgaggccatggagttcctcaagagggtggagtcgcagctcgacaccatcgccggcggcgcccatggcggcggcgccggctcggcgcgcctcctcctcgccgatggtaaatctgaatgtgttggttcttctgaggatgacatggacccaagtggccgcgaaaacgagccgcctgagatcgacccgcgcgctgaggataaggagctcaagtttcagcttctgaagaagtacagtggctacttgagcagcctaaggcaagaattttccaagaaaaagaagaaaggaaagctgcctaaggaggccaggcagaagctgcttcactggtgggagctgcactacaagtggccttacccctcagagacggagaagattgcgcttgcggaatcgacaggactagatcagaagcagatcaacaactggttcatcaaccagaggaaacggcactggaagccatcggaggacatgccgttcgtcatgatggaaggttttcacccacagaatgctgctgcattgtacatggatggcccgttcatggcagatggaatgtaccgcctcgacggatggttcgaattaaaatcgaaattacttgtgaaattgctggacctggatgttctacttcctagagctgtgaatttnatagtttctggatttggtaatcaggcatgcttggtgaagcatttagaaattatgtatacatttccagatgataattaa

SEQ ID NO: 701 - DNA, 1620 bp, Oryza sativa
atgggaagaggagaccacctgctgatgaagaacagcaatgctgctgcagctgcagctgctgtcaatggaggtggcaccagtttggatgctgcattgaggcctctagttggttcagatggctgggattactgcatctactggaggctctctcctgatcagaggatgcatgcgcaggcattgctgtcgaaccagccgatctggcagagcagcagtgaggaggaggaggctgatggcggcggtggcgccaagacgcggctgctggtccccgtcgccggcggcctcgtcgagctcttcgcgtcgagatatatggcggaggagcagcagatggcggagcttgtcatggcgcagtgcggcggcggcggcgccggggacgacggtggggggcaggcgtggccgccgccggagacgcccagcttccagtgggacggaggcgccgacgcgcagaggctgatgtacggcggctcgtcgctgaacctgttcgacgccgccgccgccgacgacgacccgttcttgggtggtggtggtggtgacgccgtgggcgacgaggcggcggcggcgggcgcgtggccgtacgcggggatggcggtgagcgagccgtcggtggcggtggcgcaggagcagatgcagcacgcggcgggcggcggcgtggcggagtccgggtcggaggggaggaagctgcatggcggtgacccggaggacgacggcgacggcaaggggcgctccggcggcgccaagaggcagcagtgcaagaacctcgaggcggataggaaccggaggaagaagctcaatggccacctctacaagctccgctcgctcgtcccaaacatcaccaagatggatcgcgcgtcgattcttggagacgcgatcgactacatcgtggggttgcagaagcaggtgaaggagctgcaggacgagctggaagacaaccatgtccaccataagccgcccgacgtgctcatcgaccacccgccgccggcgagcctcgtcgggctcgacaacgacgacgcctcgccgcccaacagccaccaacagcagccgccgctcgccgtttccggcagcagcagcaggaggagtaacaaggacccagcaatgaccgacgacaaggtcggcggcggcggcggcggtgggcaccggatggagccgcagctggaggtgcgtcaggtgcaggggaacgagctgttcgtccaggtgctctgggagcacaagcccggcgggttcgtccgcctcatggacgccatgaacgcgctcggcctcgaggtcatcaacgtcaacgtcaccacctacaagaccctcgtcctcaacgtcttccgcgtcatggtatacgccccgctcgccgccgccatggccatgaacgcgagctcgcgagctgactactccgagctggtgagggacagcgaggtggcggtgcaggcggacagggtgagggactcgctgctggaggtgacgcgggagacgtaccccggcgtgtggccgtcgccgcaggaggaggacgacgccaagttcgacggcggcgacggcgggcaggctgcggcggcggcggcggcggccggtggagagcactaccacgacgaagtcggcggcggataccatcagcacctgcattacctcgcgtttgattga

SEQ ID NO: 702 - DNA, 1524 bp, Oryza sativa
atgctcagcttctcgtcctccgcctcgtcgtgctcctccggcggcggtggcgccgccgtggccgctgcggcggcggctggcggggcgatgccgctgtactatggcacgcctgcttcttgctcaggattgagctcagtgagcttgagcagcagcatgcagggtgcaatggccagggtgaggggtcccttcacgccgtctcagtggatcgagctggagcaccaggcgctgatatacaagtacttggctgcgaatagccctgtaccacacagcctcctcatccccatcaggaggagcctcacatcgccctactcacctgcctactttggctcaagcacattgggatggggatctttccagctgggctactccggcagcgcggatccggagcccggccggtgccgccggacggacggcaagaaatggcggtgctcgagggatgcggtcgccgaccagaagtactgtgagcgacacatgaaccggggacgccaccgttcaagaaagcatgtggaaggccagcctggccatgccgcgaaagcgatgcccgcggcggtggcagcagccgctgcctctgctacccagcctagtgctccggccgcccacagtggcggagctgttgctggcctcgctatcaaccatcagcaccagcaaatgaagaactacgctgccaacactgccaatccttgctctctgcaatatagcagggatctggcaaacaagcataatgagagtgaacaagtgcaagactcagacagtctctcgatgctgacttccattagcacgagaaatacgggcagcctgtttccgttctcaaaacaacataatccttttgaagtgtccaactcaaggccagattttggcctagtatcacctgattcactgatgagttctcctcatagctccttggagaacgtcaatttgctcacttcgcagagtctgaatgaacaacagagttcagtttcccttcaacactttgtggactggccaaggacacctgcacaaggagctctcgcatggcctgatgctgaagacatgcaagctcagagaagccagctctcaatatctgctccaatggcgtcttctgacctgtcatcagcctcaacatctcccatccatgagaagctgatgttgtcaccacttaaactgagccgtgaatatagtcctattggtctcggttttgcagcaaatagagatgaggttaaccagggagaagcaaactggatgcctatgttccgtgattctttgatgggcggaccattgggagaggttttaaccaagaataacaacatggaagcaaggaattgcctatcggagtctctgaatcttttaaatgatggctgggattcaagctcagggtttgattcatccccagttggtgttctgcagaagaccacctttggatcagtatccagtagcaccggaagcagtcctagactggagaatcatagtgtttatgatggcaacagtaacctgcgggatgatctcggttcagttgttgtaaatcatccgagcatccgcctggtgtga

SEQ ID NO: 703 - DNA, 1467 bp, Oryza sativa
  N_region (354)..(354): n = any nucleotide
atggcggcgtcgctggcaatcgttgccgtggtcgtcgcgctgtgcgtggcggctgccgcgtcggccgagacggcgacgtacatcgtgcacatggacaagtcggcaatgccgagcggcggcggcggcgggaacgggtcgaccagcctggagagctggtacgcggctacgctccgggcggcggcgccgggcgccagaatgatctacgtgtaccgcaacgccatgagcgggttcgccgcgaggctgtccgccgagcagcacgcgaggctgagccggtccccgggtttcctctcgtcctacctcgacgcccccgtgacgcggcgcgacaccacgcacacgccggagttcctcggggtnagcggcgcggggggcctgtgggagacggccagctacggcgacggcgtcatcgtcggcgtggtggacaccggggtttggcccgagagcgggagctaccgcgacgacgggctcccgccggtgcccgcgcggtggaagggctactgcgagtccggcacgcggttcgacggcgccaaggcgtgcaaccggaagctcatcggggcgcgcaagttcagcgcgggcctcgccgccgcgctggggaggcggaacatcacgatcgccgtgaactcgccgcgcgacacggacggccacggcacgcacacctcgtcgacggccgccggctcgcccgtcccgggggcgtcctacttcggctacgctcccggggtggcacggggcatggcgccacgcgccagggtggccgtgtacaaggtcctgttcgacgagggcgggtacacgacggacatcgtcgccgccatagaccaagccatcgcagacggcgtcgacgtgctctccatctcgctgggcctcaacaaccgcccgctccacaccgaccctgtggccatcggctcgttcgccgcaatgcagcacggcatcttcgtgtccacctcagccggcaacgacggcccgggcctctccgtcctccacaacggcgcgccgtgggcactgaccgtcgccgctggcaccgtggacagggagttctccggcatcgtcgagctcggcgatggcaccaccgtcatcggcgaatcgctgtacgccggctcgccgccgatcacccagagcactccactcgtgtacctcgactcctgcgacaacttcaccgccatcagacgaaaccgcgacaagatcgtgctgtgtgatgcacaagcttcctcctttgctctgcaggttgcagtgcagttcgtgcaagatgccaacgcggccggcgggctcttcttgaccaacgacccgttcaggctgctgttcgagcagttcacgttcccgggcgccctgctgagcccgcacgacgggccggcgatactgcggtacatccagaggagcggcgctccgacggccaagatcgcgtttccgggcgacgctgctgaacacgaagccggcgccggaaggcggcggcgtactcgtcgcgcgggccggcggtga

SEQ ID NO: 704 - DNA, 1242 bp, Oryza sativa
atggctaggattctttatctaatcaatttggtggttcttttccttggctttaatctgcacagagctctctcatggaggaaccaaagttacatgaatgatatcgctgatcgatgtgccccttcaccccatcctttaagtatgtgccagtcacgagcagcagcttttggctatccatgtgaagaatacaaggtcacaacagaagatggctacattcttagtttaaagaggattccccatggtcctcatgactctaacacctcgactgagatgaggccaccggtactgcttttccatggacttatggtggatggtgctacttgggtaatgagtactccaaaacaatcacttggatttattttggcagacaatggatttgatgtttggattgccaatagtcgtggaacaaattccagccggaaccatacctcactctccacaaaagatccggcttactgggaatggtcgtgggacgaacttgcttcctacgatcttcctgcagtgctgcagtttgcctatgatcacacaggcgagaaaatccactatatcggtcactccctgggaaccttgatgattcttgcagccttctctgagcacaagttactagatgtagtgcgatcagctgttttgctctgcccaatagcttatctgagcaggacgaaatccaaactccttaagcttgctgctcacatcttccttgcagaaacagttcactggctaggcttttacgagttcaatcctgttgggccagttgcacatgaagttctaagccaaatatgcggcgatcctgaaattaattgctatgatctattttcggctgtagcaggaccagattgctgcctcaatacttcaaccttttgtgcctttctagagcatgctccacagtctacctccgtcagaaacctcgttcacttgtcgcagctggtaagaaatggaggtgtcagcaggttcgactacggcaacgccaaggataacatgaagcattacaaccagccacgcccaccgccgtacaacctctcctccattccgaatcatgtccccatcttcctcacccatggtggcgaggactacctcggcgatgtccccgacacaaggcacctcctgaggacgctggtcaagaagcacaacagcgacagcatcgaggtgatctacgtgccagactacgcgcatgccgactttatcatggcctacaatgctccagaactcatatacggaccgatggtcgacttctttaagcgtcactga

SEQ ID NO: 705 - DNA, 1215 bp, Oryza sativa
atggtcagggatgcttatggtacagcttcatcaagaagagccttcatggcatatgtgtctgaagggttgggcagcctacaagattgggatcagtacaaactctcatttggaaatgttaataatcatttcggaactattgagcagatggaatggctcaatttgtggaacaatccagctttgaatgactcaattcatggatatctaaatgatactaaggctttgctggagttgtacagaagttcacaaattcgttgcttggaagatgatttgattctacaagatattggttcttgccatgcaaaagagaaggcaattatttctcataatgccattatcatactttcgcaggtggagtatgccttgaaattcccagtctatgccaccttggaaaggctagagcagaagaggaacatagaacaattcaagaccaaggaacaactaaaaattgagggcttcaagctgctgaaatcaggataccggtgggacgggcacggtgagattggcttctcctccgagtgtgtagagattctattctatgctatttacaacacgagcaagcagattgcggaaaaggccgtgccgctgcagaaacgcaatgtcgtggatcatatcgccgaatcgtggtggttcacagtgaggggcatgttgaccgaggcagaatggaggatggacaagtatgtgccaacaacagtggaggagtacatgtcagctgccgtggactcctttgctctaggccccaccatcacctcagcggcattgttcgtcggaccagagctctcggaagaggttttcaggagcaaggagtacatccacctaatgaaccttgcgaacactatcggccgccttctcaatgacatgcagacatacgagaaggaaatcaaaatggggaaggtcaatagcgtcatgttgcatgctctttcccacagcggcggcggccgcggctcaccggaggcatcgatggaggaggccaagagagagatgaggagggttctccagggtagtaggtgtgacctcctaaggctggtgactagagatgggggggttgttcctccaccgtgcaggaagctcttctggttcatgagcaaggttttgcacttcgtctacatggaaaaggacgggtatttcacggccgatgggatgatggcatcagcaaatgcggtgattcttgatcccctgcaagtgacacttcttccatctggtttgggaacgctgtga

SEQ ID NO: 706 - DNA, 1173 bp, Oryza sativa
atgggttcccgcgacggatggcggctactcctcctcctgctcggcttcctgctcgtggcgccgacttgccgcgctcgggaggcgcagccgctgccggtactggaggaagaggaggtggtggcggacgcggcaggagggcgtggtggcgcgggcgctgctgccggcggaggaaacaggcgcgcgccggtgcggcacgagctgtcgctggacttctacgccaagacgtgcccggccgtcgaccagatcgtcggcaacgtcaccgcgccgcggttccgcgacaaccccgccgccggccccgccgtgctccgcctcttctaccacgactgcttcgtcgaagggtgcgacgcgtccatactgatcgcgccgacggccaacaacggcggcggggcgccgagggtggagagggacatggaggagaaccggaacctgccgcaggaggcgttcgacacggtggagatggccaaggccgccgtggagaaggcgtgccccggcgtcgtcacctgcgccgacgtcctcgcgctcgccgcccgggacttcgtccacctggcaggtgggccctactacgcggtgaagaagggtcggaaggacagcagggtgtccctggcgggcaaggtgcggggcagcctcccgcgcgccaactccaccgtggacgagctcctccgcgtgttcgccgccaagggcctcggcgccggcgacctcgtggcgctctcgggcgcgcacaccgtcgggttcgcgcactgcgcccacttcctgggccgcctctacgacttcggcgggacgcggcagccggacccggtgatggacgcgcggctggtgaaggcgctgcgcatgtcgtgcccctacaccggcggcagcgcccgcgtggtggtgcccttcgacgtgagcaccccgttccagttcgaccacgcctactacgccaacctgcaggcgaggctgggactcctcggctccgaccaggcgctgttcctcgacgcgcgcaccaggccgctcgtcgaggggctcgccgccgacagggagcggttcttccaggcgttcgcggccagcatggacaggatgggctccgtccgggtcaagaagggcaggaagggggaggttgatgtgatggaaaaagttgaaagtttagggaagtttggatctaaacacagccttattgatatggccaggttgatgtga

SEQ ID NO: 707 - DNA, 1125 bp, Oryza sativa
  N_region (556)..(556): n = any nucleotide
atgttcgccgccatctgccgccgccggctcgccgccctattcccccaaatccgcggtggcggcggcggcgcatatcatgtccagtccaacccccaggccgccctcctcttccacagctactcctcaaccgccgtcaccggcggctccgaccccgagccatgccccgacaccgtctcttacctggtctcctgcggcctccccccggccgttgcccgtcacacggccgccaacacccgcggcctccggatccgatccaccgagaaggcggacgccgtccgcaccctcctccgcagctacggcttctccgacgcggacgtcgcccggattgcccgcagcgccccgctgctcctcaccgtcgatcccgaccgcatcatccgccccaagctcgagttcttcgccacgatggggttccagcccagcaagctgtccaccgcgccgctcctcctcgcgcgcagcctcgagaagcacctcgtccccaccatccagttcctccgcagcatcatcggcagcgacgacgggatccgccgcgggttcttcccgcatccctcgcgcactncctggtcagcctggacaactgcatgcgccccggcggtggaagccctccacaggcacggcctcaccggccgcgaggacgtgtccaaagtcctcgtcctccagatgggcgtgctcatgctgtcgccggtccgcatcggcgaaatcttcgaggatctcaaggctatgggtatgtccatcacggacggccgctttgccaactcgttccgcgcgatgtgcagcatgaggagggcgacctggctgcggaaggtggcgctgtaccggagctttggcttgtccgagagtgaggtgttcgaggccttcaagaagcagcccacggcactgcttggcgctgacgagaccataaaaaagaatgcgtcgttcttccgcgacgcgctaaagcttgaaatgcgcgaggtaatggtgcatcctgttgttatggcatatagctttgagaagaccatcctgccaagtgccaagacattctcagggaggtatgtagataggtttgctgctgatgtgccagacgttgttgaagcatatgagggtaagatcaaattcaaaggattcaagggtcagggtcagggtgtttaa

SEQ ID NO: 708 - DNA, 1092 bp, Oryza sativa
atggcggcggcgctgtccaagctcctccgccgtcggctgcgcggcggcgggcaccgcctgctcccgtcccgtccctccacctccgccgcctcccagccacctccgccgcctccttccgccgccacaccgccaccaccaggggcagggaaggaggcgggcgcgtggtccaagctcttcctctttgcccccggcgccatcaccttcggcctcggctcatggcagctcttccggaggcaggagaagattgagatgctggactacaggacgcggaggctggagatggagcccattgcgtggaaccagatggccccgtctgatctcagtgccggggtcgatccggccacaccggagttccggaggatcgtgtgcgagggtgatttcgacgaggagaggtcggtgttcgtcgggcctcgctccaggagcatctctggtgtgacggagaatgggtattatgtggtcactccattgataccccggcctagtgagcatggcagttcgtggccacctatacttgtgaatagagggtgggttcctcgtgattggcgtgataagaacgtacaggatcaccagggcgtcagagaagttccagaatataaagaggctgataaaaagacagatggaaaaggttcatggtggaagttttggtctaactctaaggagcctgaacaatcttgtgagattgaaaaacctgtaaaacctcctgtaagagttttgggagttatccgaggaagtgagaagcccagcatatttgttccagctaatgaacccagtgttggccagtggttttatgtggatgttcccatgattgctcgtgcatgtggcctccctgaaaatactatttatatagaagatataaatgaggatgtctctccaacaaatccttatcctgttccaaaagatgtcagtactttgattcatcactcagtgatgccacatgaccatctaaaatacaccgttacatggtacactctttctgctgctgtgactttcatggctgcaaagcggataaaggcaaagaagctcaagttcccgctgcttcagaaagagatgttcgataacctgagtactgcatcttcatctctcaggcaatga

SEQ ID NO: 709 - DNA, 1071 bp, Oryza sativa
atgtaccaagagtttctcctccggtccaagctgagggaagcccaagtccagggtgcgcctgctggacaactgttgggccagttcgccatgccaagccaagctcaaggggcctcgccccaaggccaactgccacagtttgacccgagcaccacggtccatgcacccatgactttcgcacaagccgtgccctccgggtacggagcgatcccaccgccgaatcaagcctggaatccagccatgttcgatccagctgtggcgatgcaagctgcttccacagaccagcagaaccaggcgatggtgttcggcacggggcatcaatcaacacctgcagctcaacctcatgtgcaagttgtaggttcgccattcgcgctcccatacccacagttgaactggccctctcagaccgatcgagctggcaaggcggtgatggtagtcgaagaagtgcaagccctccacaaggagttcgacgcccaatgggcttgccaacactggcattatcccaagcgccaacttcgctcaaggagttcggaggagaagcagtgcaagctttgggtcaggccctcctcaaagtcgccttcggcacacaagaaaacaagagaagaagagatacccttcgatgttgttgacatcccatataattacaacgccatcttcggtcgaggcactttgaacaagttcgaagcaatctctcatcacaactacctcaagctgaagatgcctggcccaaccggtgtaatagttgttaagggtttccagccttcagctaccgcggtgacctccttcgatagggaagttcataccttacaagtcgaagggcaagaaagagccataccaacgacgaaacctgccccacacggcaagattttccagttgcagatagatgatactgaccccacaaaagtcgtatcactcggcggagacctaggcgaacaagaagtgaatagcatcttggccgtgctcagtaagaacattgatatcttcgcttgggggctagacgaagtgggaggtgtttcgccagatctcattgtgcaccatctagcagtcaagcctgacgcaaagccgaagaaataa

SEQ ID NO: 710 - DNA, 1026 bp, Oryza sativa
atggaggtgacggccgagttcggcggcgcctactacggcggcgcggcgggccgcgagaagaaggcgctgcagcaggggtgcggggaccacttcgccgtggacgacctcctcgtgttgccctacggcgaggaggatgaaacaacaagggagggtgaggccaccggcggtaaggaggaggctgccggctttgggaacgcgtcggcggactcgtcgaccataacggccctggatagctgcagcaattccttcggcctagccgacggcgacttccccggcgagctgtgcgagccgtacgatcaactcgcggagctggaatggctatccaactatatgaacgagggagacgacgcattcgccaccgaggacctccagaagctgcagctcatctccggcatcccctccggtgggttctcgacggcgagcgtcccgtcggctcaagctcaagctgcgtcggcggctgcctccatggcagtgcagcccggcggcttcctgccggaggcccctgtccccgccaaggcacgaagcaagcgctcccgcgctgcgcctggcaactggtcgtcccgcctgctcgtgctgccgccgcctccggcctccccgccgtccccggcatccatggccatctcgccggcggagtctggcgtgtcggcgcatgcgttccctattaagaagccgtcgaagccggctaagaagaaagacgcgccggcgccaccggcgcaggcgcagctctcgagcgtgccggtgcactcgggcggctcggcgccagcggccgcggccggggaagggaggcggtgcctgcactgcgagactgacaagacgccacagtggaggacggggccgatggggcccaagacactgtgcaacgcgtgcggggtgcggtacaagtccgggcgactggtgccggagtaccggccggcggcgagccccaccttcatggtatcgaagcactccaactcccaccgcaaggtgctggagctgcgccggcagaaggagatgcaccagcagacgccgcatcatcaccagccgcag

SEQ ID NO: 711 - DNA, 975 bp, Oryza sativa
  N_region (9)..(9): n = any nucleotide
atgggggantgcggcggcggcgagtacaggtgctgggaggagcttctgccggacgcgctggggctcgtcttccggaacctgccgctccgggaggtgctgacggtggtgccacgggtgtgcaagtcgtggagccgggtggtggccgggccgtactgctggcaggagatcgacatcgaggagtggcggcagcagcagggcaagcccgagcagctcgtccgcatggtggagatgctcgtcgcacgcagctgcggctcctgccgccgcatcagcgtctccggcctccccggcgacccgctcttctccttcatcggagaccatgcacgggcactgaggacgctggagattccacggagcgagatcagcgacgcggcggtggagagcgtggcgccgaggctgcccaacgtgacgttcctggacatcagcagctgcaccaagatcggggcgcgcgcgctggaggcgttcggcaagaactgcaagtcgctggtggggctccggcgggtgatgcacccgacggacgtcgccggcaaggcgtgccagcgcgacgaggcgcgcgccatcgcctgcaccatgccgaggctccggcacctggagatgggctacatggtgatcgcgacggatgcggtgctcgacatcctcgcgcggtgccgcgacctccggttcctcgacctccgcggctgctgggccgtcgacgacaagttcctgcaggagaggcacccggggctgagggtgctcggccccggcgtcgacgactgcttcgagaacagctacctggaggagtgctccgactactccgacgactcctccatctactcgtgggagctcatggaggacgacgacgacgactactacgccgtcgggagcgacgacgaggccatttgggacgacggccagggcctcgagaacctggaggtcaggttctacggcggcggcttcagcgagagctatgctggcttcgattggccaccatcaccatga

SEQ ID NO: 712 - DNA, 912 bp, Oryza sativa
atgtttgaaagaggagttaaattgtgtttgtcatacatagaagcagttccatggaatgagaacgaggaggagaagctcaagaatctctttgcaagatgtacttttgatgaagcaatatcccaagatgttctggctagattgcggcctcacagctggagcagctcagaagacctcacagtgcatcttatccaatcagtcacgagcagcaccaacagtggtgcaagaaaagatatgcaatctttggtaaatggccttctaagcaaaagttctgtctaccaaaaagacatggcagggctaaacagagagagcctgtataatatctgttatgcctgtttaaattcactagtggatctttatgacgaagcaacagaggctacaaaccacactgctcaagcattagttatcaagggcagtaaaccatttattgagagaatctctcagcagacagagaacctcaactggctcttggacattcttgtgaatattgacatggctgaagagtttgtggagctgtgggcaaagcaagacaggctcatcaggatacatgagcaggcatcacccatgatgaggtatgaactaagccgaatatctgctagtgttttcatcgcactcggcaaaggaaaagttcagtgccgtggagagctgaggagcctcctcttctacggatggttcagcccgatgttgcttgatttcggctggcttcagcgatgctccaaaggtctggatgtaagatctttggaggaaaatctaggacaggccctactaaccctcccactcaagcagcagcagtgtctatttgaggagtggtttcagtgttttgcatccaaaggatcagagtgcccgaaccttactagagctttccaggtatggtggagaaggtccttcgttagatcatcggtagaaggtcagtga

SEQ ID NO: 713 - DNA, 867 bp, Oryza sativa
atggtgtctctccgcgcggccatcgtcctcgtcgtcgccgcctcgtcggtcgccgtcgccttctctcatgcggaagggaacgaggggccggacttcacctacatcgaaggcgccatggacgggccgtcgaactgggggaagctgagcccggagtacaggatgtgcggcgaggggaggtcgcagtcgccgatcgacatcaacaccaagaccgtcgtcccgcgctcggacctcgacacgctggaccgcaactacaacgccgtgaacgccaccatcgtcaacaacggcaaggacatcaccatgaagttccacggcgaggtcggccaggtgatcatcgccgggaagccgtacaggttccaggcgatccactggcacgcgccgtcggagcacaccatcaacggcaggcgcttcccgctcgagctccacctcgtccacaagtccgacgccgacggcggcctcgccgtcatctccgtcctctacaagctcggcgccccggactccttctacctccagttcaaggaccacctcgccgagctcggcgccgacgagtgcgacttcagcaaggaggaggcccacgtcgccgccgggctggtgcagatgaggtcgctgcagaagcgcacggggagctacttccggtacggcggctcgctgacgacgccgccgtgcggcgagaacgtggtgtggagcgtgctcgggaaaggttttcccccgttgttctactcttccgtgtcaaagagtgcatgtcagattaagcagaaccaccagctaatccccttcgatgcgcagccaccgcgccgcaccaccggccggggcttgagatgggaattgaagcacgacggagatcgagactcttctactttcaagatatga

SEQ ID NO: 714 - DNA, 834 bp, Oryza sativa
  N_region (791)..(791): n = any nucleotide
atggagatttattctaacaccacaaggtttgcgcttgcatgcaacacttcatctaagatcattgaacccattcaaagccgttgtgctattgtacggttctcaaggctttcagatcaggagattcttggccgactcatgattgtggtagcagctgagaaggttccttacgtgccagagggacttgaagctatcatctttactgctgatggtgacatgaggcaagctttgaacaacttgcaagctacagttagtgggttccgttttgttaatcaagaaaatgtgttcaaggtgtgtgatcaaccacatccgttgcatgtcaagaatatggtgaaaaatgtgcttgatggaaagtttgatgaggcttgctctgctctgaagcaattatatgatttgggctactctcccactgacataatcactactctcttccgggttatcaagaactacgacatggctgaatatctgaagctggaattgttgaaggaaaccggatttgctcacatgagaatctgcgatggtgttggctcatttcttcaattatcaggccttctggcaaagtttgcgttgttgtacatctgtgccaccacacaactgagcttaggtggcccctcgaccaatgataggctacgaagcattgcaccatcaaaggaagatgcgtgcaacacgataccggcgttgatagctcgagactatcaaacacagacctatgatcagaacctcacataccagcacgacaattcggagcttctacaaaatgtatcacatctccctgtaacaaaagctagaaaccngaaacaccaacaccctgagccagccaacaaaaaacacagatga

SEQ ID NO: 715 - DNA, 765 bp, Oryza sativa
  N_region (489)..(489): n = any nucleotide
  N_region (593)..(593): n = any nucleotide
atgttatggctgcgtggatttttcaccctgcgtgaaggaattaacagccagacagtactctacacaaatgttttcaagtcacaaggtataggttcacatgactcagtgaggttttataaagagccttgggattcagaaaggaaagacttagggttgcaagcgggtcaacccgtgaacccgcttataggcaaaattagtttgcgagttggcccgcttgcatccctagatgccgtcttagctcttaacaagcatgggattggggtgctgcacgccgcggcatgccagggccatctgaatgtttgcaagttcttggtggaggaattggggggtgacgtgaatattgctggaaaagaagatataacaccgtttatggccgctgctgagtctggtgatgttcctacggtggagtattttcttgatcatagtggtgatgtaacaaaagcagatgttagaggatgcacagttctccaccatgctgctggcacaggnatacctgttgacatagactgtggccttggaacaccactctttcatgctgctaacaatggcaaggataagacactgaagattttgttggatcacaaggcagatgnattggctatttgtgacagacatttgaagagtattgacatattatcttcaacaacgggagacgacgacaggattctcgagaacccggccgacgtcctcgtaatcgtttgccggaaccaagcaacccatcgtcatcgtcatcatcctctagatgttgatctagagcttaaataa

SEQ ID NO: 716 - DNA, 750 bp, Oryza sativa
atggaggtagaacaagttctatctatcacctccaaccccaaggtagacagtatcaccaatggcgacaatgtgatcatcatccctagtgtgagcacggaggagaaggagcacatcaatggagctgcagagacaaatcatgttgtgatgatcaccgctgcttccatggacagaaccgacggcgacgacaggacgatgaaggaggaggagacggacggcatcgccatcgccaggagcgcctcctccaacggaagccggcagcaagacaagaagcggggcgcgttcggcctcttccgggcgatgttcatgtccttcaacggcagcgccagcatcaagaagagggccgccgccgccgccgccaccatgggctatcagaagaaggccgaggcggccggcggcggcgcggcggctgacgtggagaggtcgtccagcgacgtcgcgtcgtggaagaacctcgtcgacggcatgcgcccgctccgcctccacggccacctggagtactacccgccgccgtcgccggacaggagcgatggcacgagcatgaccagcagctactcgtccgcccaggacctgcaggagcttgtcaatggccatggaaaagaagacgaggaagaagaaaagaattctctggagacggaggacggtggatgcagcccgaatccgatcgacatgcaggccgaggagttcatcgcgaaattctacgagcaatttaggctgcaaaagtcggactcattcaacaaccgagcctattga

SEQ ID NO: 717 - DNA, 726 bp, Oryza sativa
atgacccgacatctcatctcactggaccgtacctgggctctagacccagcacatagggccgacacagcatggctgttcggtcagccgtgcctaatcggacagtgccccaaagaagaagatcatcgtcaaaacatgtcgctcatttcgaagctgcggttgatcactgtggatgtcaccggtactctgcttgcctacaaagggcagcttggtgattactactgtatggcagctaaggctgctgggaagccatgtcctgactaccagcgaatgcatgagggcttcaagcttgcatacaccgagatggcaaggcaatacccatgctttggatttgcagcgaagatgccgaatatcgactggtggaggatgtgcgtcaaggattcttttgttaaggtgatgccactgttttggctccgagtgggacttggggtgttctctggaatagttggtgtggagaagccagatccaagtatctacaggattgcactggaaatggcgggcaaggtcgcgccagaagaggcgcttcacataggcgacagcatgcgcaaggactacacccctgcacggagcatcggaatgcacgcgctgcttctggaccgattcaagaccgccgatgctgagagctggaggaagtctggagcaactgtgctccctgacctggtagctgctcaggagtggctcagcaagaatctcaaggatgagccagtagcagctgaacaaaatgtctga

SEQ ID NO: 718 - DNA, 687 bp, Oryza sativa
atgggcgccgcaggggtgggggtggtggttgggggcggaggaggaggaggcgcccgctgttgccggatcaaccgcaccgccaacgtgggcgcgtggggcccgggggatggccggcggagcgtggtgggcggcaaccggagcaggcgaagtcacagcgatggccggagggacgcggggcaccaccggcgagaggagaggagccgcccgcggcccgtcgctgctccgccctcagctccgcccactgctgagatggttgtcctcaccggcggccactccatcggcaaggccaagtgcttcttcatcgaggacggctacatgggagccgtcccacttgatcccatcacccccaacctcgtcaatcccaacttcttcgacctcgtcatggccaagaagatgccgctcaccgtcgaccacctcatggggatggaccgaggacgcggcgccatggaggaaagaatggcggccggtgaggcgaagacggttgctacggacactgagaggaagccaaccaggacggcgccgactgtgaggaggacaacgtcggctgaggagaagacccctcctagcgtctacagggacgaaaatgagactgagcgacaaatagagggacctaaatccgagcgcatgtcggcaacaaggatagtggacggcaccaatctcgtggcctcctccatctcatgcttttga

SEQ ID NO: 719 - DNA, 354 bp, Oryza sativa
atggcctcgttgtcctctttccggcttgccgtggcggtggcagcactgttggttgttggctcatgtgccactgagctcaccttcaaggtcgctgagggctctagcgccagtagtctagagcttgtcaccaacatcgccatctctgaggtggagatcaaggagaagggtggcaaggactgggtggcgctcaaggagtcatcatctaacacctggacgatcaaaagtgaggcgccgctcaagggccccttctctgtccgcttccttgtcaagaatggcggctaccgcgtcgtcgatgatgtcatccccgaaagcttcactgctggctctgaatataagagtggcatccaactctaa

SEQ ID NO: 720 - DNA, 330 bp, Oryza sativa
atgcgcgtcgcagtggcgacactgtttgtcgttggctcatacgccaccgagcttaccttcaaggttaatgagggctctagcgcaactagcctggaactcatcaccaacgtcgccatctctgaggtggagatcaaggagaagggtgccagcgactggacggcgctgaaggaatcatcgtctaacacctggacgatcaaaagcggctcgccactcaagggccccttctccgtccgcttcctcgtcaagaatggcgggtaccgcgtcgtcgacgatgtcatccccgaaagctttacggccggctctgtctacaagagtggtatccagctctaa

SEQ ID NO: 721 - DNA, 1755 bp, Oryza sativa
  N_region (917)..(917): n = any nucleotide
  N_region (1750)..(1750): n = any nucleotide
atgacgacgacggccgccggcggagccaccctgtgcgcggcgagggaggagcaggagctcctggccacccgcctgaatgtgaacggcatccggccgccgcattgcgccgcggaatctatcctcatctacctcaccgcgccggggctctccatgatgcccatgcgggtgatggcctccgactccatcgcctccgtcaagctccgcgtccagacctccaagggcttcgtcgtccgcaagcagaagctcgtcttcgatggccgggagctcgcccggaacgacagccgcatcatggactacggcgtctcccacggcaacgtcctccacctcgtcatccgcatctccgacctccgcctcatcaccgtccagaccgtccacggcaacaagttcaggttccgcgtcgagcccggccgcaccgtcggctacgtcaagcagcagatcgccaagaactccacccacgacgacgaccaccacagcctcgtcctccagggcgaggtgctcgacgacgcccacctcatccacgacgtctgcaggaccgacggcgccgtcatccacctgctcgtccaccgctccgccaagctcgccgccaggcccgtcgaccgggacttcgaggtctccatcgtcgcgcgcaaccgcaacgccgccgccgacgctgctcaaccgacgttgcacctgcagagggacttcgccatcgagccggtcatcgtcaaccccaaggccgcgcttccgccagtgatcgagaacctggtgggcgccgtgctggccgggatggagaaggggaacgccccgatcatgtcgtcggagggcaccgggggggcgtatttcatgcaggacgcgtcggggcaggagcacgtcgccgtgttcaagccggtggacgaggagcccatggcggccaacaacccacgcggcctcccaacctngcccaccggcgaggggctcaagaaggggacacgcgtcggcgagggcgccatcagagaggtcgccgcctacatcctcgaccaccctcccggtggccgccgttcgttcgcaggacatcatggctccgccaccgtgggcttcgccggtgtcgcgccaaccgcgctggtccgttgcatgcacaggagcttcaagcaacctgcagcttccgaacaaggtcctccattgttcaaggtggggtcattgcaagcgttcgtgaagaacagcggcagctgcgaggacatgggacctcgtgcgttcccggtgcacgaagttcacaagatctgcgtgctggacatcaggctggccaacgccgacaggcacgccggcaacatcctcacctgcagagacgaacaaggccatggcctcaccctggttccgatcgaccatggatactgtcttcctgagagttttgaggattgcacattcgagtggctctactggccgcagtgtcgggagccattcagcgaggagacggtggagtacataaggtcactggacgcggaggaggacatcgccattctgaggttccatgggtgggagatgccagccaagtgcgagcgcgtcctgcgcgtcaccaccatgctgctcaagaagggcgtcgactcgggcctcgccgcgttcgacatggggagcatcttgtgcagggagacgctcaccaaggagtctgtcatcgaggagatcatccgtgaggttgaagacgatgttggtgatgaagctgccttcctgcagtctgtctctcaatccatggatcgccgtctgggtgaattatccaagaaaaaaaaaagtaatattttcncgtaa

SEQ ID NO: 722 - DNA, 1383 bp, Oryza sativa
atgttggtagatggagatgggcgcgtgacggggaaagacgcgctcaagttcttcgccatgtcgaatctctcccgccccgagctgaagcagtgggcaatcgctgattccaagcgtcagggttatcttggattctcggagtttatgaccgcaatgcagcagctggtttctcttgcacaagctgggaatgagattcctttaagatcagttacttcgatcatcgatgggttaaagaaatcttacattgagaagttgaggccactagaaaaaacatatcagttcgatgactttgtttcacctttgctgttgtagactagcagtgatttcgatgcgaagccaatggtcatgttgctgggtcagtattccacaggaaaaaccacattcataaagcatttactgaagacaaattatccagggtgctcatattggtccagagcctacaactgacagatttgttgttattacttctggacctgatgaaagatgcatccctggaaacacaattgccgtgcaagcagacatgccatatagtggcttgtcatcttttgggacagcatttctatcaaagtttgaatgttctcagatgcctcatccactactggatcatataacctttgtggacactcctggagttttatcaggggaaaagcagcgaacacagcgtagctatgacttcactggagttacatcatggtttgcagccaagtgtgacctaattcttctcctatttgatccacataagcttgacatcagtgatgagttcaagcgtgtaattgggtcactcaaagggcatgatgataaaatacgtatagttctgaacaaagcagaccaagttgatgcacaacaacagctcatgagagtctatggagcactgctatggtcgcttgggaaagttctgaacacaccagaagtcatgcgtgtgtacataggtcatttaacgacaagcccattagggagacagtagctgggccactgggtaaagaactgtttgagaaagaacaagaagacctgctctccgacctgaatgacattccaaagaaagcctgtgaccgtcgaatcaacgaattcgtgaagcgttcgaggtcagccaaggtccatgctcacataatcagccacctgaagaaggagatgccggcgctgatgggcaaggccaaggcgcagcagcggctgctcgacaccctcgacgagcagttcgccaaggttcagaaggagctgcacttgccggccggcgacttccccagcgtggatgagtacagggagacactgagcgcctacaacttcgacaagttcgagaggctgaagcccaagctggtgcagggcgtcgacgacatgctcgcctacgacatccccgatctcctcaagagcttcaggaacccctacgaatga

SEQ ID NO: 723 - DNA, 1051 bp, Oryza sativa
  N_region (177)..(177): n = any nucleotide
  N_region (183)..(183): n = any nucleotide
gccaccgactccttcagcccgaacaacctgctcggggaaggcggctttgggagggtgtacagaggccacctcgaagagatcaacgagcagatcgtcgccgtcaagcagctggacaaggacgggttccaggggaaccgcgagttcctggtggaggtgctgatgctcagtctcctgcancacccnaacctcgtcaagctgctcggctactgcaccgacatggaccagagaatcctcgtctacgagtgcatgcggaacggctcgctggaggatcatctcctagctcccgtggcaaacgcggatgaagatcgcggtgggcgcggcgaagggcatcgagtacctgcacgaggtggccaacccgccggtgatctaccgcgacctcaagacgtccaacatcctcctggacgaggacttcaactccaagctgtccgacttcggcctcgccaagctcggccccgtcggcgacaagagccacgtcagcacgcgggtcatgggcacgtacggctactgcgcccccgagtacgccatgaccggcaagctcaccaagacgtcggacatctacagcttcggcgtcgtgctgctggagatcatcaccggcaggcgggcgatcgatacctccaggccgacgcacgagcaggttctcgtccaatgggtgagcaactcactgccctcgtcctacaaaaattaaccgatttcgagctgcattaattaactggcttctctgtgtgtgcaaacacaggcggcacctctcgtcaaggacaagaagagattcgtgagactggctgacccgttgctggaagagaaattccccctcaaggggctttaccaagctctcgcgatcgcctccatgtgcttgcaggaggatgccagcaacaggccgatgatcagcgacgtcgtcgcggcgctctcgtttcttgccgagcagaagtatcatccccaagatggcccggatcaggccgcccggaagagcagagacagggactgtagcaatcctcccaggaagacagacatggtttctgagatcaaggcagatgatgaaatcaagcacaggtga

SEQ ID NO: 724 - DNA, 762 bp, Oryza sativa
atggcgaggagctctccttgccttgccgtcgctgtgctcctccttggagtggtggtggcggcgattggagcctttgctgatgaaggggcggcgagcggttggggactagggcatggcgcccgtttcctcagcaggcgaggccgtgctgcgtatgagaagtcgtcggagccagaggcaaagcctgcgtcgcagcaggagccgaagtcggattcttactcgcaggcaaagcctgggccaaaagatgagcccaagccggagccagaggcaatgtctgcgtcgcagccggagtcgaagccggcaacttactcggagtctaagcccgaatcaaaggcagagcctgaatcaaaaccagagccaaaggcagagtccacgccacaaccagaagcaaagtcagagcctaagtctgagccaaagccaaagtccgagccatacgcagaaccaaaatcagagcccaagtccgagccacagtcagaaccaaatcccgagactaaggcggagccaaagtctgaacccaagtatgaacctaaatcagagcctaccccacagactgaaccaagggcagaatcgcaaccagaaccaaagacagagccaaagtctgagtcgaaggctgaaccgaagccagagcgaaagtcatactcaaagtcaaaaccagaaccagaatccaagccagaagcaaaagcagaacgacagccagagtctaagcccgagccaaaacccgagtcagccccaaagaaggaaacgccttcgtcggcctacccatga

SEQ ID NO: 725 - DNA, 583 bp, Oryza sativa
atgggcgaggaggccaagtacctcgagacggcgcgggccgagcgctccgtgtggctgatgaagtgccccccggtcgtctcgcacgcctggcagggcgccgtgtcctcctccttcaagatggagatggctcaaactaacactggcaatacaccaaagagttactccttgaatatgtccaaggattttgtaccaatgtgtgttttctctgagtctaaccaaggaaggaaaagtcgagcataaatttgacatgaagcctcacagtgataatttggtgaactatggaaagttatgccgtgaaaggacacaaaagtccatgatcaaaactagaaaagtgcagccgttgcctggcatgaaaagaatacgtagggatcgcagggaactggaaaatattatattcaagctttttgaaagacagcccaattgggcactaaaggcgctggtgcaagaaactgaccagccagagcaattcctgaaggagattctgaatgatctgtgtttttacaacaaacgaggaccaaaccagggaacgcatgagctcaagcctgagtacaagaaatctacaggggacactgatgcttcttga

SEQ ID NO: 726 - DNA, 413 bp, Oryza sativa
atgtcgtggcagacgtacgtcgacgagcacctgatgtgcgagatcgagggccacacctcacctccgccgccatcgtcggccacgacggcaccgtctgggcacagagcgccgccttccctcagtcgtctgtgcctgtgcagttcaaaccggaggagatgaccaacatcatgaaggacttcgacgagccggggttcctcgccccgaccggactgtttcttggaccaaccaagtacatggtcatccaaggtgaacctggcgctgtcattcgtggcaagaagggatcaggaggcatcacagtgaagaagaccgggcaggcgctggtggtcggcatctacgacgagcccatgaccccggggcagtgcaacatggtggttgagaggctcggtgactacctcgtagagcagggcctgtag

SEQ ID NO: 727 - DNA, 579 bp, Oryza sativa
atgatgagatttagttcaacggataagaaggatagaagaaatatgctatttgctgctattccatctatttgtgcattcagtgctgccgttcccccggccccaaaggacaagattgagtcgccgctatcactttttttggggggccaatcccgcgaagagttatggaaagattttatagctcaattgaatgaagaaagtgaattcatggacaacattttttttggtgtttacaacgcgagaaacggctatgaaagcgccacagttcttcagggaatacggatagatttagcgataaacggctatgaaagtgcatttttgtcggaatttgcacctatttgtatctatttagtgatcagtccgctagtttctttgattccactcggtgttccttttccatttgcttccaatagttcgacctatccagaaaaattgtcggcctacgaatgtggtttcgatccctccggtgatgccagaagtcgtttcgatatacgattttatccggttcctattttatttattatccctgatctggaagtcaccttttttttcccttgggcagtacctcctaacaaggattga

SEQ ID NO: 728 - DNA, 979 bp, Oryza sativa
  N_region (780)..(780): n = any nucleotide
ggatccgagcccagtacgtgtgaaacgtgcttgctgtgagctgtgcgatgcggcccggacgaacatgcatgcagagctgcagctcaagctggaaggccacgaagatgagagagattctaacaattggtatcagagccaatttatgcccaagatcctgcgcttcaacaagatggccatcgtcgagcactccgcatcgcgatcgatgagggagggcatcgtgtcgctcccatatccagtgctcacctccaccaactactccacctgggcgatcaagatggaggctaacatggaggcgcaaggcatctgggatgccatcgagcccgcggccgatgaggccgtggacattaagaaggacaagcaggcacgtgcgtgtctcttcggggccgtccccgaagacgtgttgcagcagatcgcgaagaagaagactgccaaggaggtctgggaaagcctcaagacgaggttccttggcgttgagcgtgtgaagaaggcgcgagtgcaaaccttgaagagcgatttcaaggcattgcacatgaaggacaccgagtcaatcgacgagtttgccggcaaaatcagtggcctggcaaacaagttgagcgatcttggtgtaaccatggacgatgatgagcaagtcaagaaactactcgattctgtgccagataagtttctgcatgtcatcgctgcaattgagcagttctctgacttggacagcatgccatttgatgaggcaattggtcgcctcaaggcatacgaggaaaggatacgcaagcgtgatgacatgantggcgagcatctacttttcacgtccggcgacacaagcggtggccgcagccgcgtcaagaagccggacaggtccaagacaatgtgctactactgtcaagaacttggacactttgcgtatgagtgccctgagaaaaagaagaagaaggagatagcgctccttgccgcagcgtcaagtgatgaggagccaactcttctctga

SEQ ID NO: 729 - DNA, 4173 bp, Oryza sativa
  N_region (2859)..(2859): n = any nucleotide
atgacggacgatgagctcgtcaagaagctacttgactcagtgcctgaaaagtttttgcacataattgcagcgatagagcaattctgcgatttggacaccatgccatttgaggaggctattggccgcctcaaagctttcgaggagaggatacggaagcacagtgacaatgatggggagcagcttcttctcaccacacgcaacactgatgatggtgctggtcgagcccgcggcaagaggtttgataaatccaagtttggctccagctcattggcgagatgccgacgtgccgtgcgatgcggtggtgcgagaatggagcaaacaacgttcatgaagaccaagctcaactgcatgtggagtgctgcgagaagtagccgaattgcaagcaagacaagaagatgtacctcggcattatggtacaacgacatcccccggcgcacggtggtgtgggtcgccgaccggggaactccggtcacaaacagcagttcgtctgcgccgacgctgtcgctgaccaactcctccaacctcgtcttgtccgacgcagatggcggcgttcgctggacgaccaacatcaccgacgatgcagcgggcggcggctccacggcggtgctcctgaacaccggcaacctcgtcgtccggtcaccgaacggcaccaccctgtggcagagcttcgagcacccgagtgactcgttcctgcccggcatgaagatgcgggtcatgtacaggacgcgcgccggcgagcgcctggtgtcgtggaagggccccgacgacccgtcgccggggagcttctcgttcggcggcgacccgggcacgttcctccaggtgttcctctggaacgggacgcgcccggtttcgagggacgggccatggacgggcgacatggtgtcgagccagtaccaggcgaacaccagcgacatcatctactccgccatcgtcgacaacgacgacgagagatacatgacgttcaccgtctccgacggctcgccgcacaccaggtacgtgctgacctacgccggcaagtaccagctccagagctgggacaacagctcgtcggcgtgggcggtgctcggcgagtggccgacctgggactgcaaccgctacggctactgcggcccgttcggctactgcgacaacacggcgagggcgcccgccgtcccgacgtgcaagtgcctcgccggcttcgagccggcgagcgcggcggagtggagcagcggcaggttctcgcgtggttgccggcgcacggaggcggtggagtgcggcgaccgtttcttggccgtgccggggatgaagtcgccggacaagttcgtgctcgtcccgaacaggacgctcgacgcgtgcgccgccgagtgcagcagcaactgctcgtgcgtggcgtacgcgtacgccaacctgagcagcagcgggtccaagggcgacatgacgaggtgcttggtgtggtcaggggagctggttgatacagagaaggaaggtgaagggctaagcagcgacacgatctacctcaggcttgctggtcttgaccttgacgcgggtggaaggaaaaagagtaatgcaatcaagatagtactgccagtgttaggctgtattctgattgtcctatgcattttctttgcatggttaaaaatcaaaggcaggaaaacaaaccaggaaaagcacagaaagctaatttttgatggcgaaggaagcactgtccaagattttgaactcccatttgtaagatttgaggacattgctctagcaaccaacaatttctcagaaacaaataagattgggcaaggaggtttcggaaaagtttacatggcaatgctaggtggtcaagaagttgctattaagcggttaagtaaggattctcgacaagggacaaaggaattcaggaatgaagttattcttatcgcgaaattgcaacacagaaatttggttcgccttcttggctgttgtgttgagggagatgaaaaactgctaatatatgagtacttgcctaacaaaggcttagatgctaccctttttgatggttcaagaaaaatgaaactagactggacaacacggtttaatataatcaaaggggtggcaaggggacttctttatctgcaccaagactctagattgaccataattcacagagatctcaaagctggcaatgttttgctagatgctgaaatgaaacccaagatagcagattttggcatggcaaggatctttggtgataatcaacaggatgcaaatacccagcgtgttgttggaacatatggctacatggctcctgagtatgcaatggaaggtatcttctctactaaatcagatgtctacagctttggtgtgttattgttggaaattgtgactggtataaggagaagctccactagcaatatcatgaactttccaaacctcatagtttattcatggaacatgtggaaggaagggaaaagcaaggatttggtagactcatcaattatggatagttgcttactacatgaagttttgctctgcatccatgtagcattgttatgtgttcaagaaagcccagatgacaggccacttatgtcatctattgtgttcaccctggagaatgggagtagtgttgcactgctcccagccccaagttgccctgggcactttacacaaaggagttctgagatagagccaatgaaagataatactcagaactcaatgaatacttttacgctaacaaacatagagggaagaattctgctgaagaaagttttgatggatcggtcagctgcggctttagcctgcatcaccagtgttcttctcctcctcctgccgccgccatgtgcatccgacgatcggcttgtcaccggcaagccgctctcccctggcgccaccatcgtctccgatggcggcgcnttcgccttgggcttcttctccccctccaactcaactccggagaagatgtacctcggcatatggtacaatgacatccccgggcgcacggtggtgtgggtcgccgaccgaggaactccggtcacaaacagtagttcgtctttgccgacgctgtcgctgaccaactcctccaaccttctcttgtccgacgccgacggccgcgttcgctggacgagcaacatcaccgacgatgcagcgggctccggctccaccgcagtgctcaagaacgacggcaacctcgtcgtccggtcaccgaacggcaccaccctgtggcagagcttcgagcacccgaccgactcgttcctccctgggatgaagcttggggtgacgttcaagacgcgcacatgcgagcgcttggtgtcgtggaagggccccgacgacccgtcgccggggagcttctcgttcggcggcgacccggacacgttcctgcaggtgttcatctggaacgggacgcgcccggtttcgagggacgggccatggacgggctacatggtgtcgagccagtatcaggcgaactccagcgacatcttctacttctccatcgtcaacaacgaggaaaagagatacataacgttcagcgtctccgagggctcgccgtacaccaggtatgtgattacctacgccggcaagtaccagttccagcgctggaacatcagctcgtcggcgtgggatgtcgcggagtggcctagatgggactgcaactattacaactactgcggcccgaacggctactgcgacaacacagcgagggcgcctgctgtcccgacgtgcaagtgcctcttcggcttcgagccagcgaacgcggcggagtggaacagcggccggttttcgcagggttgccggcgaaaggaggcggtgcagtgcggcgaccgtttcttggccgtgccggggatgatttcgccggacaagttcgtgctcttcccgaacaggacgctcgacgcgtgcgccgccgagtgcagcagcaactgctcctgcgtggcgtacgcctacgccaacctgagtagcagcatatctaagggcgacaagacgaggtgcttggtgtggtcaggggagctgattgacgcggagatggtaggcgaaaggcttggcagcgacacgatctacctcaggctcgccggtcttgacgcgggtaagcaccaatttaaattgagcaattttactgttcgtaaggagaagtacggattacaatttgaggtattttactgtttgaggtttatacttttagtccttgagttgagaaagtactaccagatacagcgaggtgctaatgaaatataa

SEQ ID NO: 730 - DNA, 2221 bp, Oryza sativa
atgaggccctcgccgcctcccggcggcccggcggcggaaccggtgcccccgtggctgagatcgctgcccgtcgcgcccgagttccgccccaccgccgccgagttcgccgatcccgtctcctacatcctcaagatcgagcccgccgcggcgccgtacggcatctgcaaggtcgtgccgccgttgcccccgccgccgaagaaggccaccttctccaacctctcccgctccttcgccgcgctccacccggacgaccgctcgccgtccttccccacccgccaccagcaggtcggcctctgcccgcgccgcacgcgcccggggctcaagcccgtgtggcggtcctcccaccgctacacgctcccgcagttcgagtccaaggccggcgccacccgcaagtcgctcctcgccggcctcaacttccctgcctccaggcaactcaccccgctcgaccacgaggtgctcttctggcgcgcatcggccgaccgccccatcgtggtcgagtatggcagcgacatgtcgggctcgggattctccccttgcgccgcgcagccgcagccgccgccgcagcagcaaccgacggcgcgggcggcggcgcaccttggggagacggcgtggaacatgcgcggcgtggctaggagccccggatcgctgctgcggttcatgccggaggatgtccccggggtcaccacgccgatgctctacgtcgggatgatgttcagttggttcgcgtggcacgtcgaggaccacgacctgcacagcctcaactacatgcacctcggggccgccaagacgtggtacggcgtgccgcgcgacgccgcgctcgcgttcgaggacgtggtgcgcgaacatggctacggcggggaggtgaaccccctagaccttcgctacattggggcagaaaacaacagtgatgtcccctgaagtgcttgtggagtcgggtatcccctgctgcaggtgttatttccttctgtttgttcaagattggtgcagaatgcaggggaatttgtggtcacttttccaggatcttatcactgcggtttcagtcatgggattcaactgtggggaagcatccaatatagctactcccgaatggttgagaattgccaaagaggccgcaatccgaagagcttcaatcaatcgtcctcccatggtttcgcactatcaattactttacgatctcgcactgtctatgcgttttagcggagctctcgaataaaggagaagaagaaatgcgaaggggaacaactggtcaagaagatgttcatccaaaatttgttagatcagggtctattatcatgtgtcacttgtggaattttaagtttttcatgtgtggctgtactcaaaccaagagattctacagcacgatacttgatgtctgctgatgacaaggattcatcaagaatgcatgtattttgtcttgagcatgctattgaggttgagaagcaactgcatgctataggtggttctaatattatgcttatatgtcgtccaggaatatcccaaaatagaagcggaagcaagattgttgggtgaagaaatgggactggtatatgactggaagggcattcatttcaaggaggccaacatggaggacaggcagaagatacaggaagttctgcgggatgaggaagcaatacctacaagcagtgattgggctgtaaaattgggtattaacctttattatagtgcaaatctggccaaatctcctttatataacaaacaaatgccatacaacagagtcatttatagggcatttggctgtgattctcctaatgactcgccagtaatgttcaatacttgcgaaaggaaacaaagccaccagaagaaaatagtggttgctggccggtggtgtgggaaagtatggatgtcaaaacaggagggttgttctatgagttttcgtacaaagcgggacttgtctctgcacaagagtgatatctgcccagtgaaaggctgcgggaagaagttcttctcgcacaagtatctgctgcagcatcgcaaggttcacacagatgaccgtccgctaacatgcccatggaagggctgcaacatggcattcaagtggccatgggcaaggactgaacatctcagggttcatacaggcgacaggccctatgtttgccatgagccaggttgcgcacagacattcaggtttgtctcagatttcagccgtcacaagcgcaagacaggtcattctgtcaagaagaagaagaaagcaaagagttga

SEQ ID NO: 731 - DNA, 1714 bp, Oryza sativa
atggcggcagtggtggtggtgcgcgcgtcgcacgtcgtctacccggagctccagtcgctggaggcgaagcacgtcgacgggaagctccggaccgggtaccacttccaaccacccaagcactggatcaacgggtccgatgtactataagggcttgtaccatctgttctaccagtacaaccccaagggcgccgtgtgggggaacatcgagtgggcgcactcggtttcgacggacctgatcgactggacggcgctggagccggggatctacccgtccaagacgttcgacgagaagggctgctggtcgggctccgccaccgtgctccccagcggcgtgccggtgatcatgtacaccggcatcgaccccgacgagcggcaggtccagaacgtcgcctacccggtgaacctctccgacccgtacctccgcgagtggtacaagcccgactacaaccccatcatcaacccggacggcggcatcaacgccagcgcgttccgcgacccgaccaccgcctggtacgggcccgacggccactggcggctcctcgtcggcagcaaggtgaacatgaaggggctcgccgtgctgtaccggagccgggacttcaagaagtgggtcaaggcgcaccacccgctgcactcggcgcacaccgggatgtgggagtgcccggacttcttccccgtcgctgtggcgggcgggagccgccactaccgccgcggcgtcgacaccgccgagctgcacgacgccgccgtggcggaggaggtcaagtacgtgctcaaggtgagcctcgacctgacgcggtacgagtactacaccgtcggctggtacgaccacgccaccgaccggtacgtccccgacgccgccttccccgacaacgactacggcctccgctacgactacggcgacttctacgcatccaagtcgttctacgacccggccaagcgccgccgcatcgtctggggctgggccaacgagtccgacaccgtacccgacgaccgccgaaagggctgggccggcatccagcaggcgataccgaggaagctctggctgtcggcggacgggaagcagctggtgcagtggccggtggaggagctcaaggcgctgcgagccaagcacgtcaatgtcactgacaaggtcatcaagaagggcaactacttcgaggtcaccggcttcaagtccgtgcaggtgcagtcggatgtggatatggcgttcgcgatcaaggacctgagcaaggcggaggagttcgacccggcgtggcggacggacgcggaggcgctgtgcaagaagctcggctcggacgtcgacggcggcgtggggccgttcgggctgtgggcgctggcctccggcgacctcaaggagaggacggccgtcttcttcaggggtgttcaaggccaacgactcctcgcacgtcgtcctcatgtgcaacgaccctaccagaggtcatcgtacgagtcgaagatctacaggccgaccttcgccggcttcgtcgacgtcgacatcgccaagaacaaacaaatcgccctccggacattgatcgatcactccgtggtggagagcttcggggcgcgcggcaagacgtgcatcctgacgagggtgtacccgaggaaagccgtcggcgacgacgcgcacctcttcgtcttcaacaacggcgagtcggacgtcaaggtcaccaacctggacgcctgggagatgaagaccccgaagatgaacgcggaggagtag

SEQ ID NO: 732 - DNA, 990 bp, Oryza sativa
atgccgtcagagttcgtcgccgccaggaagaagccgccgccggagttgttgttcgccgccggtcggaagaagcagcagccgccgccgcctggcatggcgttcgtgccgtcggagttcgccgccgccggcgttggcaggaagaggcagcctgcgccgccggtggagatacgccgggtgtgggcgcacaacgtggaggaggaattccggatcatccgcaacgcgatcgatcacttcccgtacgtgtccatggacacggagtttcccggcgtgatccaccgcccgaccaagcaccccgccctgctcaccgccggcgaccggtacgacctcctccgccgcaacgtggacgcgctccacctcatccaggtgggcatcaccctcgccgcgtcccccaccgcggcgcccgcgctcgccttcgagatcaacctctccgacttcgaccagcgcgtccaccgccacgccgccgagtccgtccagctgctggcggagcacggcgtggacctcgccgcgcaccgcaggcacggcgtcagggcgagcgcgctggcgccgctgctcatgtcgtcgggcctcgtctgctcccacggcgccgtcaagtgggtcaccttccactccgcctacgacttcgcctacctggtcaagctcctcatggggcggaagctgccgaggtccatggccgagttcctgaacctggtgcgcgtcttcttcggcgacgaggtgtacgacgtgaagcacatgatgcggcactgcggcggcgagctgtacggcgggctggagcgcgtggcggcggcgctgcaggtgaagcgcgcggcggggcggtgccaccaggccgcctccgacagcttgctcacctgggacgtcttccggcggatgcgggagctctacttcctcaagcatggcgtcgaggcctaccaaggcgtgctcttcggcctggagctcgacatggacatgcccagcaacaaaacaccctcgctgccgctggtggcagcgagatga

SEQ ID NO: 733 - DNA, 647 bp, Oryza sativa
atggttgggaataggatatggtttgggggccttttcaccagctcaggtagaaggcgccaaatcaatgctgagaagacctttgagctgagccctgttcagcaggagcaacgtttgcaaaagctgaaggaaagactaaatataccttatgatcaaactcggagagatcatcaggaagctctcagggctctgtggagtgcttcatttccggatgcagagctgtcaagcttaatttcagagcagtggaaggacatgggatggcagggcccaaacccatcgactgatttcagttcaggggctgtggatttgtgggacttgagaatcttctcttctttgcaacaacatatccggtacgctgcttctgaagaaacaagggatgagagccacatgggagtacccctttgcagttgctggtgttaacgtctcatacatgttgatccagctgctggagctcaacgcaggaagaggcatttgacgtcctgtactgtatagctttcgagatgatggatgcccagtggctggcaatgcgagcatcctacatgcagttcaaagtgctggaagcaacaaagcagcagctggagagagagctatctctggaggacgtcaatggaatccgtgacataccagcttacaaccttttgtacaagtag

SEQ ID NO: 734 - DNA, 621 bp, Oryza sativa
atggccgcgcgatccctccaccacctcctcctcctcctcttcctcgccggcttccactccctctccctctcccccgccgccgcactgcggttcgacctgcagtcgggccacaccaagtgcatctccgacgacatcaaggtgggcgccatggcggtggctcccggagtcccaccgcgtctcattgcgggtcacgtcaccctacggcaacagcctgcactactcggagaacgtgcagtcgggcaacttcgccttcacggcgtccgaggccggggactacctcgcctgcttctgggcgcccgaccaccgccccaccgccaccgtcggcttcgagttcgactggcgcagcggcgtctccgccagggactggaccaacgtcgccaagaagggccaggtcgatatgatggaggttgagctcaagaagctggaggatactatcaactctatccatgaagaaatgttttatcttcgcgcaagagggaggaggagatgcaggaactgaacaggagaacaaactcaaggatggcttggcttggtttcttctcactagctatctgcctgtcagtggcggggttgcagttgtggcatctgaagaacttctttgagagaaagaagcttctataa

SEQ ID NO: 735 - DNA, 604 bp, Oryza sativa
atgtcgttcaccggcacgcaggacaagtgcaaggcgtgcgacaagaccgtccatttcatcgacctcctcaccgccgacggcgtctcctaccacaagacatgcttcaagtgcagccactgcaaggggaccctctcgctgcagatgtgtaactactcttcgatggatggtgtcctgtactgcaagacgcactttgagcagctcttcaaagagacggggagcttctcaaagaaattctcgcaagaaaaactttttccagggaagagctcctagcaagctatcttcagcattctctggaactcaagataaatgtgcagcctgccaaaaaactgtgtacccattggagaaggagggtgagtcttaccacaagagttgcttcaagtgctcgcatgggggctgcatcctgacgacgtcttcctacgcggcgctcaacgggatcctctactgcaagatccatttctcgcagctgttcaaggagaagggcagctacaaccacttgatccagaccgcacaatcgaagcagaaagagtccgaggaggctgcaccggtggcggccacagaggccagcgagaaagaacaggaagtgcccccacaagacgcgacatag

SEQ ID NO: 736 - DNA, 528 bp, Oryza sativa
  N_region (231)..(231): n = any nucleotide
  N_region (251)..(251): n = any nucleotide
  N_region (254)..(254): n = any nucleotide
  N_region (295)..(295): n = any nucleotide
  N_region (301)..(301): n = any nucleotide
  N_region (346)..(346): n = any nucleotide
atggccgacgtgctcctcggctcggagcgccgcgtcctcatcagcgcctccgccctccctccgccggagaccctcctcggccgcctcgaccagctcgacctccgggttgcggcagctggaggagcagcggcgggcgaatgccggcgacggcgacggcgggccggcggcgcaccaccagcacagcaagtcgctgccggcggcggcgctgctagcatgtgcggcgttgcagcntttgcaagccaagggcagcntgntggaccgcttaaacttgttcgattcacgcttcaggcagttnagtgcnagttggaacttcgcggcggcggccggcggttcgagcttgcccgcnttggcgcggccggccgaggaccgcgcgtggtcggagccgccgtgccggagccgtgcaaacaccaggcgccggtttgcgccgccgccgcggccggcggcgggagctggagcggcgcgcatttcctgtacaagggcgcgcggcagcttcatcgcaccaaaccgaacacatccacggtgacatga

SEQ ID NO: 737 - DNA, 474 bp, Oryza sativa
  N_region (71)..(71): n = any nucleotide
  N_region (91)..(91): n = any nucleotide
atggccaaggtaatcacactaatccttgtcgttattacagtgtcaaccatgctagcctcacctgtggaatncaccaagattcctggtgccnttcctattggaatgtctccatacaactttacgacaatgatagatatcttcaaagtggccatgttagtgccaacggaggattgcacctccaatgttgagatgtgcataagtgagacatgctcctacatcagaaaagccctcgatggtgttgttgatgctgccccaccagcaaaacaggcggaaactaaggaggccacggccaagatggctgggattgctgctactatgctcgacacagccatggcttcaggagaaaagagacaagttgccgcagtttccattgccttcatgcttgctgctgatgcgattgacgcatccgcacctgctgacaagtttagagtaatggatgaaacattcaaagcagccgcttctcctatcgcttga

SEQ ID NO: 738 - DNA, 351 bp, Oryza sativa
  N_region (159)..(159): n = any nucleotide
  N_region (162)..(162): n = any nucleotide
ctcctggccgcgggcgctaccgacgacatgggcgtggtggcgtcggggcggtggcagatggcggcggcggtggagacgtgcgacggcgccgtcagggagtgcgacgtggacgacgaggaggaggtggaggagatggcgttgatgggggcggccgccgcngcngccgccggggagacgctgatgcggcggccgacgaactggtaggtgagctacgcggtgctggacgccaacaaggtgtcgtgcaataagcgcggtcagtcctactaccagaactgcgcctcacagaaggccggcaacccctaccgccgcggctgctccgccatcacccgatgcgctcgcaacaccaactga

SEQ ID NO: 739 - DNA, 3075 bp, Oryza sativa
atggcttctagatggatactatacgtgactcgatgcctcgggagagtatttacggtgatggaccgggagtcggcttggggatacgatgatgtccgtggtggtcagagatcatgtgggatacttaggcgagagttgatgcacgtggttgatggagattctatatggcatacaatggaggtgtttaggactcctagtatgagtttggttcatggctttaggctgcctacatcagtcgaaatttttgtaaggagtgctgttggtgcactttgtaaagtcgtcatctactttaagagttcttcgatttgtgtttcaccgggtttcggcagtctaaccggtgatataccggcggctcggcaggcgacttcggcggtcagaccggttgatctatactggtcagacgggcggcatccgagcggtcagaccgacagatcgatcttggtcagaccgaactccgtcgattttgaggcttctctatttaaccagcaaagtgaaagaaagaaaagaaaaaggggaatgagggatcaggtggctgccagccaacgctactgctccgttgccgtcgctagcagtgcagggagagggcgcggacgtggaaggggcaggcctggaggtcggttcaatggtcgccatgatcatggccaaggaggtagatggcatggtaatgctggtggttgtcatgggtggaataatgggttcggtttgaatgctggaccgagcggtggcaacttcaatccatcgctagggtttcagccgcagtttggttctctcggtcagtctgttgcgggacaagggttctttggtgcggcgccaagtggtcctctagcttccgcccctgtggcctttcctgttctgccgggtgcaggagctgtgttacctgctgctagtgtggcggcggggattcctcccttcccggtggctggaggagacgttgcacctgggggtccggcggtaaccataccagccgcaggtcttcaagcaggagggcatgttgctggtggtttagtggatggaaagggtgctgttgttggtccaaccggtggaactaaggctgcagctaagttgggctctggtgttgattctgctggtactgccggttttaccactgctgctgtattgggtggttctgatactattggttctaattcacaacagggaatttgtccttttgatgcaaacagaggtaaaacaaaggtcgacaacaaaggccatacaatgcaggagtgttcttctaagtattattgtgaggtctgtgaaagtgaggatcatattgcttctcgttgtccaatatttagatctacttttaaacctactgcccagttatgtggttatgctgtggatggtttgggtttctttcatattcctctttcagctggacagagaattaaacctgagccaaaggcggctttagttaaggtgaataaaggtcagatgacagtgaattctgttatatctgagttggagagattgatccctggtaaatggaattgggtggttcatgacaatggtgatggtaccttccgagccatttttccttcagctgctgaattgaggcgtatggtagaatggggcaaagtgcatacaaaagttggtgatgctgaaatggagattgtggagagaggtgtgggtaatgaggtgaaatatgttatttcaaaggtgtgggtacagtgcaaagggctgccttctgagctaagagagtacttgatcatctgtgctgttggttctttattgggtattactaaagccgttgatatgctttttactagaagatatgacatagctcgcctacaagtgttggtccttgatccatcttcgattcctgatgtggttgatgtgggagagaatggggcaagtaagaagcaggatatggggaaagaatctggttctggagctactggtaatacctctaagatgggttctggggtctctggtaatacctctaagataggttctggtgatcagtttagtgagaagggtggtacttctctagttaattcacagttaagcctgttatctaagaacgatggcctgaatttgtctgatgaagagtttgatggattggaggatgatgctatattggttgagaagtcccagactcaggaaagcctagtggctaaattatctgctattcttgaggcagtaatctctccatccaggaagagcaagagaagggcaagtgatagtgatcagatggttcttgagagggctgagaaactgaaggctgagaggaacctggagaatcttcagtctaaaagtaatgacccaaaaaagcataagttcgtgtttgatttagttaaggaacatcaacttgattttattgcgttgtcagagaccgttaagaaagagtttactccggctacacttaaaaatctttgtactggtaaggagtttttatggcattgtaaaccctctagaggcagggagttacaaatgtctggtaggaagtttacttgggcaaataacttaactcatccaacttttgagaaacttgatagggttttaatgttgacggagtgggaacataaattcgcactatcctcagtgattgctcttaatagagatatctcggatcatactcctttacccttacgtacgaattcgccatcttcgaataatgctcaacctacttttaagtttgaacttggttggcttttacgtgatggttttgttgatatggttaaggaggtttggtctagtgttgacgaaggcaactcttcgatggagcattggcatgcaaaaattcgtcgcttaagacagcatccgaggggttgggctaaacatacaagcggtatttataagaaggagaaaaaagatttattagacaagttggactttcttgataaaaaggcagagactgttcttttgactcaggaggaaattaactttcgatggttttataggaatagattatcttcacttcttagagaggaggaaattaagtggtatcagaggtctaaaactaaagatattctggagggtttatttggtcctactgataattctgttattcaatttgatgagaatagaaccgttgatattcctcatgtttctcatttggagaatgaggctttaacataa

SEQ ID NO: 740 - DNA, 1368 bp, Oryza sativa
atgtctccaaggatcccgacgagggcgaacctcgccctcgccgccctcctcatcctcctcaccatcgccgccaccaccctcgcatcggcgaagtgcatcgcgaagaacaaacccgaaggcgaggagggggaacccagtggtgcgggcgcggctgcggcccacgcttcaccggagaagaaacccggctccaacggcgggttaaccaccatgtccgtcggtgagagcgtaccggagatcaagaaggactcctccgatgatggcgccgccgtgaatgagagcaagaaacctaaatccagtggcggcttgactaccctctccgtcgatgatagtcaagcagaacccgcggacagtatagcagaacccgtggaagatggcaccgacgacggcgaggatgagtcggagaaaaagaagaagaagaagaagaagaaatccaaaagcaagagctccgatgatgatgatgatgatgccgagaagaaatccaagaagaaatcgaagaactcggacgacgatgaagatgacaagaagaaatccaagaagaaacccaagaacccggacgacgatgaagatgacaagaagaaatcgaaaaagaagagctccgatgaagacaacgacggtgccaagaagaagaagaagaagaaatccaagggcaagagctccgatgaggaagatgatgaaaagcccaagaagaaatccaaaagcaagagcaaatcctcctcctccgacgaagaagatgagaagaaatcaaaatccgagggccaagccgcggccaaaccaaaggaagaagacgaggaaggcggctcggcatcggcatcggcatcgacatcggcgccgaagaatgagcaccactcgggcaccatgtcgctcccggacccggacatgatcgcgcagccggtgatgcaggcgctgaacccagtggtgaaggcgctgtgcggcaagacggaccacgccgacctgtgcgagtcctccatcgggcagctgccgcagcagccgccggcgcagctggacgacatcggcgtcctcaggctctccatgaacgcgctgcgcgccaaggtgcaggaggcgatcagcgtggcgacgaacaggatgggggcggcctccggggacgaggtgtccaaggacgccatgggcgactgcctccagatgtacgacgacatgaaatccaacctggactcggcggacgcggcgctcaagaagggggacaaggacacggcgcacaccatgctcgactccgcgcgcaccgacgtcgacacctgcgaggacggcttcagcgagcgggaggggctcaagccgatcatgggcgacctcgacaagatcctcgccgagctctccagcaacaccatcgccattgcctccgccataattgagtga

SEQ ID NO: 741 - DNA, 1161 bp, Oryza sativa
atgaatatgcacgacatgcaattcgagaactccaacatccaacctggaagggcgccgattaactgcatcgacgacgcacccatggatgatgcacctggagcaacaaagatcggttgcacatcgtgcaacctgccggcctcccccatcggccctccttctctaaccaccggctctccttgcccttcggcccctccttctccggaggggaacgctgcctccactgctttcgttggatcccctcctcctttcgtcaatccgccaccgccagctgactacattcctccggccatatctaggacagagagagggaggcagggaggggagcggcgccgaccactgggaggggagccgcctactgtggctgccgttagctcttatcctagtcgtcgcgcgcctccacactaccgatggccgccggctctccttctagtcattgtgcgcctccatgctgccggtggctgccgcctccaccctccacgccgccggctctcctcctggtcgccagtggccgtcgtctccaacctgtgcaccatcggctctcctcgtggtcacagcgcacctccccccttcttcccctcccggcaagatctgggagggagggagggagaggagcagctgccgccaccaggagcagcctccgccaccgccctcccccttccccccttcagccggatctgcgagggaggggaggcgagccgtgccggggtgcgtcgccatctccctctggccggatctgcaccggggataaggaaggagaggtgggcgggagagaatgtcgattcctcacaatcgatcactctttgtgatgctgccaaaccatggcaattaggatctcaagacgctgcaacacctatgatgcaaggaatcattgacttacatcacgatatctttttcttcctcattctgattttggttttcgtatcatggatgttggttcgcgctttatggtatttcaacgagcaaactaatccaatcccgcaaaggattgttcatggaactactatcgaaattattcggaccatatttcctagtgtcattcttttgttcattgctataccatcgtttgctctgttatactcaatggacggggtattagtagatccagccagtactatcaaagctacggctagagaagtcaatagcatcgaatgcttctggtga

SEQ ID NO: 742 - DNA, 1041 bp, Oryza sativa
atgccttcctcctcctctcgccgccgccgccgccgcggccgccgccgcaagaagaaggaggaggaggcgagggactgggccgatggcctgccgctggacgcgatcctggccatcttccacaagctcggccacgccgacatcctcatggccgccgaccaggtgtgtgccacctggcgccgcgccgcgcgggacgagcccgcgctgtggcggcgcatcaccgtgcgcgggaccgaggcgctctccgccaggatcaaccgcggcggcttggcctgcgccgccgtccgccgcagcgcgggccagtgcgaggccttctgcggcgagtacgccggcgacgatggcttcctcgtgtacctcaccgagcaggcctcctgtttgaagagccttcggctcatctcatgcttgggtgtctcaaatgaaggaattgaggaggcaacaaaggaattccctcttcttgaggagcttgagctctcattctgctacaatgttactcatgaggcgtatgcggctatcggcgcggcatgcccacagctcaagcgcttcaggcttagcaaacgatccttctatgattcaggaggtatccgctggaaaaacaacgatgatgctggtggaatttcaaagatgcacgggctacgctccctgcagctcttcgccaataacctcacaaatgaaggtctctcaaccatcttggataactgccccaacctggagtctcttgacattcgccattgcttcaacatcgacatgggcgccgactccctgcgagcaaaatgtagcaggatcaagatgctgaggccacctgatgactcaactgatgactatgacttcgatgtgtacactcccaggaggctccccatctcccccggttttgtgcggtattattcggtgtattctgatccggaatattccatgtactcggatgaatggacgtctgaggaatttgatgatgatgatgatgattattccggtccttcccgctacgaggaagatcttgacaagtatgataacgcgcttcccaggtgcatgaggacgtttctgaaatga

SEQ ID NO: 743 - DNA, 537 bp, Oryza sativa
atggatgtacttgatggcagtcgtcggcagtttcagttcctcgcggcaccacgactaggggtgaaatcgggtcgggttcgagatgaggatcggctggcagcaaaggcatgtagcggcggtggccgcggctcaacggatgcagcagaagctgatctccaaagaactctaaagttaagcgtgcttagcctggagcaatttgggatggatgaccgatcggaaaattattcccggttgcgcagacatgacgttactgaatggtaccagagccaactctcgcggtttcacgggcacgtgagtcacagttgcacaggcatgctgcgtatggctggtgtggatccggagtggtcacacagcatggcacatacgctggcattggacacacggacgtggccaagagggacgttcctggctaggaattacacagtacaacgcagacactcacaacgcacgcgcactcacccctatgaacgcatgcacgcaaaccctacccctatgagcatctttgaagactgggccggcaaatcctggagagattga

SEQ ID NO: 744 - DNA, 1661 bp, Oryza sativa
atggatcgttccgtttttcgtgccagagccaaacgttcccaacctgctctttcgaacagagccttagatgtcttctgcatgtatttggggagttcggcaatctgccatcatgcaaagccccagcaagatctctgatgcctctggctcaatgccccctgccacgttccaagaagaactgcttcactccattgttcctctgttgggctccttcgtcgacattctcgcctttgctggcacctgccattcttggcgtgctgccttctcatcatacccatcaaaatctgcctttcgcaccttactcccaccactcctcgtccgacccaatgtccgcgtcaaatccccttgtatcccttctaccagcaatggtcctcacaagctactacgctcatgtcaggtcattgatctagccaaccgaaacaccccgctccgctgccagattcctcgagaaactctgcagaagatgctttttgcaggctcttctcatggtcaactcatatgctgccgcagtggttactgtctcgttgttgatgtgttcaccggtgctgaggtttcaccaccacgtcttccattcagcaaggaccatgaggagatctacttttgtggcactctgacggctcctatcacgtcacccaactcacatctccttatcagcaaccggtcatctctgttcgattggccggttggaagtgactcctggtctgagctcaagcttcctgttaatcgggtcgatcagattgtggaattcaatggtcagctcatcgccgtgattgaatacaagctgtacactttgcagttggcccccaagcttcgcctgaagaagatgaaaaccctgtggtgggatgacatgagtgaatgtccatatttgagaccatggctagtggtttgcgatggcatgcttctcattgttgaccactacataactttgtcatttggagcaccagtcaactacagaccgtaccgcctggacatgtcagccaagcctgcaaaatgggtggaggtaaagaagctggagaactgggcactctttatcgggggtgatgcgagaagcccgccgtttgctttcaagaacccggagcgctggggagggaggagcaactgcttgtactatgctcactactcccagccatggagccttcatgggttgggtgatgatgcagatgctgtgtgggatcctaccactgatgataaccttgtgttcaaaagaaactggtacagtcagctgcaggccttctgggctcgctggacagttgtcgtcatcaatggcggaagaagatatcaacaagatgatgagctccgacggggagatatcatcaatggcggagagggcggcgagcctgttgcggcaactgatcgaggacggctgcgccgccgccaaacccctcgctgagatggtcgagtactgcgccaagcacgccgccggcgaagctcaaggtaaggaagaggaagtattagacggcgagtccagcgacgaggaggagacggacatactcaggctggaggccagcttgatgggcgtggagaacatgctcagcgcacggcggagctcatcaaggactaggacaagccgccggagccgtcgccggagaacgtccccttccacggctttcacagtatacattcatttattgagcactgctacacagactaaattttcttattaa

SEQ ID NO: 745 - DNA, 1493 bp, Oryza sativa
atggatactgtggtgggttcatcatccaagccatgcgggccgctgacggattaccgcattccggattacatcctgaggccggatgcgcagcgggtgcttcttgatcatgcgcccccgtgccccgtgctggtgttcatcaattctggatctggtgcaggttttcgatgtctccgaagaggctccggataaagtgttgcaccgtttgaatgtcaaccttgagaagctcaagatggatggagacattcttgctgttcaaatttggagaactctcagaataattgttgcaggtggcgatggtacggcaagctggctgcttggggtagtcagtgatctcaagctttcacaccctcctccaattgctactgtgcctctgggaaccggaaacaaccttccattttcatttggatggggaaagaagaatccttgtactgaccaagagtcagtaaaatcattccttgggctagtgaggcatgcaaaagagatgaaaattgatagtggcatatcatgttgaggatgcgagctacaaaggaaggtccatgtgatccaatcgcccccttagagttgcctcattcattacatgcatttcaccgtgtgtcaagtagtgattccctcaatatggaaggttaccacacattccgtggaggattttggaattactttagtatggggtatggatgcagaaatttcttacggatttcattctgaaaggaagaaaaatccagagaaattcaaaaaccagctgacaaatcagcagggtacatatgctaaggttggacttaaacaaggatggttttgtgcttctttaagtcatccatcttcaagtccaggaatattgctcaacttgcaagtgtgaaaatcatgaaaagagccggtagccactggcaagaacttaacattcaccacagagcattcgatcaatcgtctgtctcaacctgcctagtttctctggaggtctgaatccttggggcacacctggcacaaggaaagtagaagagagggagctgacggcaccttttgtcgatgatagacttattgaggttgttggattccgtgatgcctggcacggacttgtcttgctggccccaaatggacatggtacccgccttgcgcagcaggcccaaaggatccgtttcgagttccacaaaggcgcagcagagcacaccttcatgaggatcgatggggagccatggaagcagcccctcccaaaagatgacgacaccgttgttgtggagatctcccaccttggtcaggtcaccatgcttgccaacgagccctgcaagtcgaagagcgtccatgacgaccaatcctcccacgcacaacacagcggccatggcaacaacgacgacgacaaggacagcatggaggacgaagatgagtgggaggatggcaggaggaagtttggtgccgcagatacattcaagatccctgacgaggttgacattgctcacctcagctgaactcagaattggtatcttttctggttgcattcttga

SEQ ID NO: 746 - DNA, 1473 bp, Oryza sativa
cagacctgccaccacatcaggaaattgggatgccatcactctctcctacaatgactgagaggggaacattgcaaggtggctgaagaaggaaggagataaggtctcacctggtgaagttctctgtgaggtggagacggataaagccactgtagagatggagtgcatggaagagggctatctcgctaagatcattcatggagatggtgccaaagagatcaaagttggtgagtcattgctgtaactgtggaagaagagggtgaccttgagaagtttaaggattataaaccttcaacttcagctgcacctgcagccccttctgaaccgaaggctcagcctgagcctgcagagccaaaggtgaaggagacagagccttccaggactcctgagccgaaagccccaaagactgaagaagcttctcaaccagggggtcgaatattctccagccctcttgcaagaaaattggcagaagataacaatgttccactgtcaagcgtaatgggaactggtcctgatgggcgaattttgaaggcggacattgaagattacttgggcttctgtagcaaagggtggcaaaagggaagctcttgcggctccagggttaagttacactgatgttcctaatactcagataagaaagaggttactgcaaaccgcctgctaagctctaaacaaactattcctcattattacttgacagttgacgcccgtgttgataatcttatcaattgcgaggggaactgaatccgttgcaagagtcatctggcggtaagaagatatctattaacgatcttgttataaagaggctgcagctctggctcttcgaaaggtccctcagtgtaatagctcgtggatgagtgattttatccgccaataccacaacgtgaacatcaatgttgctgtacagactgagcatgggttgtttgttccagtaattaggtgtacctgtgtttcaggatgcagacaagaaggggacttggtacaattgctgaggaggtgaagcaggtggctcaaagagcaagggataacagctttaaaacctggaagattatgagagggaggcacattcaccatatcaaacctaggaggtcctttcggaatcaaacaattctgtgccatcataaatcctcctcagtcagcaatcttggccattggtactggctgagaagaggggtgatacctggcagcgtagacggccagtatgagtttggttccttcatgtcggcaacaatgagctgtgatcacaggaggtgctatcggcgcagaatttctgaaagcattcaagggctatatcgagaatccaaactcaatgttactgtgaagttaaagatcagcaaaactattcttctcatgtgctcgaataacgcagagtggtgctatctcattttgtataataccggcacggtgttctgtcaaggaggacccgaaaaccaagagcacataaccatagacagaatgacctggtttttggattaa

SEQ ID NO: 747 - DNA, 1412 bp, Oryza sativa
gaaatagcctttcttattcaaggcttgacagttgaccaagataattatatcgaagattacatgattggtcataataatgatgaatttgatgatcaatcaatttcaaacacagaaacaaccaaattgtatggccatgaagaaggtgtgacttggtttgcacgtccattcaagggaaaaaatgttgttgaaagtgaccatagtcctatacctaatttgcttgatcctattgtcacactttttgatagtatccatggtaatatattgaatacacctgaattcactagttctggaaacatgtcaaatgatatagaacaacctaaaacagatttggagagccaagaagatcttgatactgattatgaagatgacctcggccatccacttctatttcaccaaggatcttatatggaaggaatagatgatgcatgtgttaatggaggatggcacatagcttggaaatttgttcaaagagagaatgaatttgggcaaacacaagatgacttccaacaaatttttctacaaggtgatattcttcaagctggccgtgtttcccatgcaaccgctttggttagcacaccttcttttcaccattctattggacctgcaatggtgcatccatccaaattcaacttgtctaccgaaggacaaagttggtctgatcttttacaacccggggtaaagcagggattgattgtgggtgtcacaatacaaattcttcaacagcttgctggaattagtggcattctttattacactcctcaaatacttgagcaagctggagctggaattttgttaaaatggtttaatgttagttcttcctcatcatctattttgacgagtgctctaaccacctttacgatgcttccttctattggtattgcaatgaaatgcatggatcgttatggaagaagagatcactccttctttacacaataccaatgttgatagtatcacttattatattgatcgtggtcaatgttatgaacttagaagcaatttttggagctattttatccacatttggtgttatcatctatgtttgttgcttcgttatgggatttggaccaattcccaatgttctttgctcagagctttttcctcctagttgtcgtaaccgttgtatgtctatttgtacattgacattttggattgtttccattattgtcacttatgcatttcctgttatgctaagctccataggtctaattggtgtttgtgggatatatgctgttgtctgcatagtctcctttatattcgtgttaattaaggtgcctgaaacgaaaggcatgcctcttgcggttatcgcaaattccttagctgttggagcaaggctatcagttaaacggaatgagaacatctaaatgagagtgatttttctttgttaacattttttaatagtaagacattattga

SEQ ID NO: 748 - DNA, 1405 bp, Oryza sativa
atggacggccgcaaggatgtcgggatcctcgccatggatatctacttcccgcccacctgcgtcctccagcaggaatcgctcgaggctcatgacggcgccagcaaagggaagtacaccattggtctcggccaagattgcatggccttctgcagtgaggtggaggatgtcatctcgatgagagcatgacagttgtcacatccctgctgaaaaaatacaaggtcgatccaaagctgattggtcgattggaggttggcagtgagacagtcatagacaagagcaaatccatcaagacttggctgatgcagattttcgagtgcggtaatactgacattgaaggagttgattccagtaacgcgtgttatggtgggacagcagcgctgttgaattgtgtgaactgggttgagagtaactcctgggatggacgctatggccttgttgtttgcacggacagcgcggtttatgcggaaggcccagctcgtccgacaggtggtgctgctgctattgcaatgctcattggtcctaatgctcctattgcattcgagagcaaatacaaagcttctcacatggctcacgtctatgatttctataagcctgatcttgcaagtgaatatccggtcgttgatggaaaactatcccaaacatgctacttgatggcgctagactcatgctacagacagttttgtaagaagggaaacaattctcaatttctgatgcagattactttgttttccattctccatacaacaaggcttgtgcagaagagttttgctcggctttactataatgatttcacgcgcgactgcagtctgttgacaatgatgctaaagagaagctccagcctttctcaaatttgactggcgaggagagctaccaaagtcgtgacttggaaaagtcacaacaagtagcaaagcccttgtatgacatcaaagttcaaccatcaactttgcttccaaaacaaattggtaacatgtacacagcatctctttatgctgcgttggcgtctgtactctataacaagcatgctagtctgcaacgaattgttatgttctcgtacggcagtggcttgacatccactatgttttcgttgaaacttaacaatggccaggaccccttcagtttatcaaacattgcttcagtgcttaatgccacggagaagcttgagtcaagacatatgttgcccgagaaatttgtggagacgctgaagctgatggagcaccgatacggcgcaaaagatttcgagacgtgcaaagacacgagcttgttgcctcctgggacgttctacctcaccagggttgactccatgtaccgaagattctatgagaggaaggccgacgaggagatcgctgcagccaaagccaagtacagtaatggacatgccaccaatggctatgccaatggccactag

SEQ ID NO: 749 - DNA, 1386 bp, Oryza sativa
atggagaagaaggcgtccatcctcatgaaccggtatgagctcggccgcatgctcgggcaaggcaccttcgccaaggtgtaccatgcacggaaccttgcatccaaccagagcgtcgccatcaaggtcattgacaaggaaaaggtattgcgtgtcggcatgattgaccagatcaagcgagagatctccatcatgcgcctcgttcgccaccccaacatcgtccagctgcacgaggtcatggccagcaagagcaagatatactttgcaatggagtatgtccggggtggtgagctcttcagcagggtagccagggggcgactcaaggaggatgctgcgaggaagtacttccagcagttgataggggctgtggacttctgtcacagccgcggtgtctaccaccgagacctcaagccagagaacctcctcgtcgacgagaatggcaacctcaaagtgtcggactttgggctgagcgccttcaaggagtgtcagaagcaggacgggctgctccacacgacgtgtggcacacctgcatatgttgcaccagagataatcaataagaggggctatgatggagcaaaagcagacatatggtcttgcggtgtcatactctttgttctgcttgctggctacctcccattccatgactcaaatctaatggagatgtaccggaagataagcaaaggtgatgtcaagttcccacagtggttcactactgatgtccgaaggcttctgtccaggctgcttgatccaaatccaaacattaggatcaccgttgagaagctagttgagcatccatggttcaagaaggggtacaaaccagcagtgatgctatcacagccaaatgaatcaaacaacctcaaggatgtccatactgctttcagtgctgatcacaaggacaatgaaggcaaggcaaaagaaccagcaagctctttgaagccagtgagcttgaatgcatttgacatcatctccctctccaaaggatttgatctgtcaggcctgtttgagaacgacaaagagcagaaggcagactcacggttcatgacacaaaaaccagcatcagcaatagtgtcaaagctagagcagattgctgagacagagagcttcaaggtgaagaagcaggatggactggtgaagctccagggatccaaagaagggaggaaagggcagctcgcgatcgatgcagagatctttgaagtgacaccatccttctttgttgttgaggtgaagaagtctgcaggggacacgttggagtacgaaaaattctgcaacaagggcctaagaccttctctcagggacatctgctgggatggtcagtcagagcatccatcactggcacagtcatcaactctgactcagtcctctaagtcaatctcgagacatgccatttaa

SEQ ID NO: 750 - DNA, 1378 bp, Oryza sativa
atggacgtggagtacgacgtgatcgtgctcgggacggggctcaaggagtgcatcctcagcggcctcctctccgtcgatcgcctcaaggtgaggtgctgcatatggacaggaatgattactacggtggagactccacatcgctcaacctgaatcagcagctatggaaaaggttcaaaggtgaaggtactcccccggcgcaaattggggctagcagagactacaatgtagacatgattccaaagagtttatgatggcaaatggtacattggtccgtgtacttatccacactggtgttaccaagtacttatcattcaaagctgttgatggaagctatgtcttcaataagggaaagatccacaaggttccctctactgatatggaagctctcaagtctccattgatgggattgttcgagaagcgcagagcagggaagttcttcctttttgtccaagattacaaggaaaatgatccaagtacccacaagggatatgaccttaacaaaatgaccaccaaggagcttatctcaaatatggtttggatgataatacaatagactttattggccatgcagtggctcttcataaagaggataactacctgacagaacctgcaattgacactgtaaagcggatgaagctttatgcagaatcagtgggtcgttttcaaggaggatcaccatatatttatcccttgtatggcttaggagagctgccacagttgatccagggttttgcaaggcttagtgctgtctatggtgggacatacatgttaaataagccagagtgcaaggtataatttgtgttgttattgaatttaatgatgaaggaaaagtttgtggtgttacgtcagaaggggagactgcaaaatgtaagaaggttgtctgtgatccatcatacatacctgataaggttagaaaagttggaaaagtttttcgggcaatcgctatcatgagccatccaatcccaaatactgcagattctcactctgtacagatcataataccacaaaagcaacttggacgcaaatcagacatgtatgttttctgttgttcctactctcacaatgttgcatcaaaagggaagttcatcgcgttcgtgtcagcacaagcagagagtgaaaatccagcggcggaattgaaaccagggatagaccttcttgggccagtggatgaactatttattgatacatacgacagatttgaacctactaatgacccatcttcagacaattgtttcatctcaacaagttatgatgccacaacacactttgagtctactgtgatggatgttctttccatctatacaaagatcaccggaaagagacggttgatctcagtgtggatttaagtgctgcgagtgctgctgaagatgatctctaa

SEQ ID NO: 751 - DNA, 1203 bp, Oryza sativa
  N_region (556)..(556): n = any nucleotide
  N_region (643)..(643): n = any nucleotide
  N_region (655)..(655): n = any nucleotide
atggtcaccctcctcctcgccttccgcctctccactctcttcctcctcctcgccgccggcgccatcgccgtcgatcccgatggcgccgccgcgcccgataccgccgccgcgcccgataccgaggcggcggcgctcctccggctcaaggcgtcgctgatcgacccgacgaacgcgctagaggcgtggtcgccgtcgtcgccgtcgccgccgtgcgatgaaacacaccggtggccaagggtgcagtgctacaatggcgtcctcatcggcctccgcctcgcccgcctcaacctctccggcgacttcgacttcgcggcgctgtcgcggctaccggggttgcactccatcaacctcatccgcaacaacttctccggcccgctgccggcgagcctcgccgccgtgcgcagcctccgcgcgctgtacctgtcccggaacgcgttctccggcccggtccccggcgacgtgttcgccgccatgagctggctcaagaagctctacctcgacaggaacgacttctccggcgagctcccggccggcgccatcgccggcgcgccgcgcntccaggagctccacctggaccacaaccggatcgaggggcgcgtccgtccaagctcccggccaagctccggctgttcaaggtgttgcnaaaacgccttancggggttcctccgggaggccgtcgccgcgcggttcaacgagtcggcgttcgccgggaaccccggcctgtgcggcgcgcctgggagcggcgccggcgcgtgcgccgcggcggcgccggccccgcgcacaccgcgatgccgatcggcggcgtcggcggcgcacggaaacaggtggcggagttcgtcctgatgagcaacgccgccggcgagttcgggctgccggagctgatgaaggcgagcgccgaggtgctcgggaacggcacgctggggtcggcgtacaaggccgccatgcgcaacggcgtgacggtggcggtgaagcggatgcgcgacatgaaccgcgtcggccgcgccgagttcgaggagcacatccggatgctcggcgagctccgccaccccaacgtcctctcccccgtcggctaccattaccgcaaggaagaaaagctcatcgtctccgagttcatgccacgtggcagcctcctctacgtcctccacggtaataatagaatggttacaagtcgttttgactttgatcaaaatcaaactactctaa

SEQ ID NO: 752 - DNA, 1197 bp, Oryza sativa
  N_region (114)..(114): n = any nucleotide
tgccggccatacttgagtatagactccacagcccttaatgggagttggaatggtcagctaggttctgctacatccatagatggacacaactggatgtttccggttgcatttggnttttttcaaagtgagaccactggcaattggacttggtttatgcaacaacttcataaggccattggaaaacagccacacttagcaatcagctcggatgcttgtaagggactggagaatgttgtgaaaagtgtatttagtacagcagagcatagagaatgcttttggcacttgatgcagaatttcatcaagaaatttcatggttcagtgtttgggaacatgtaccctgcagctaggtcttacatgacagatagatatgagtattacatgaataaaattcatgaggcaaaatcagatgtgaagccatatctagaaacttatcacggcctactttggatgaggagtaagttcttagaaaagataaaatgtgacttcatcaccaacaatctagcagagtcatggaacaaatagatcaaggatatgaaggatcatcctattgcagatctcgcagatggcatcagagcaaagacaatggatctatttgcgagacggaggaagataggtgagaaactagatggtgttatgctccctattgtagttcgtcaactgaatgcaatgactagagatttgggtcacttgaaggtagtgcaaggtaataaggacctagcagaagtgactgagattactcctgaacatgatattagtaggcatgctgtcaatcttacagaacatacatgcacttgtagagagtggcaagtttctggcaaaccatgcccacatgcattagctctcataatatcagctagaaacccaagaatggctgattacctggatccttgctattcagtggaaaagtataagctggcatatgcaggtgttattcatccacttccagataagtcccaatggccaaaagtcaatattggtttcaagttgttgccacctctcactaagagggatgtagggaggcaaagaaagaataggatagttgggtgccttgagaaaggaagcaagcctaggaccaaaggaaagtggcaggttcaatgtaagaagtgtcttaacatgggccatagacaaacatcctcaaaatgtccattaaatggtaccaagaaaaaaaaggtagccacatacatttacttcttctag

SEQ ID NO: 753 - DNA, 1191 bp, Oryza sativa
atggccgggctcggcggcgcgcccgccatggcgcccgggaccagcctcatcggctcgctggtgagggaggaagggcacatctactcgctcgccgccaagaccgacaccctgtacaccggctccgacagcaagaacatccgcgtgtggcgcaagcagaaggattccggcgggttcaagtcgtcgagcggcctcgtcaaggccatcgtcatctccggcgagcgcatcttcaccgggcaccaggacggcaagatcagggtgtggaaggtgtcgcccaagaacggcctgcacaagcgcgtcggcagcctgccccggctgcgcgacttcctccgcggctcgctcaacccgtccaactacgtcgaggtccgcaagaaccggacggcgctctggatccgccacagcgacgccgtgtcgtgcctgagcccgacggactcggcgcagggcctgctctactccggctcgtgggaccggaccttcaaggtgtggcggatcaacgactccaagtgcctcgagtccgtggtggcgcacgacgacaacgtgaacgccatcgtggcagcgttcgacgggctggtgttcaccgggtcggcggacgggacggtgaaggtgtggaagagggagctgcaggggaaagggaccaagcacgtcgcggtgcagacgctgctgaagcaggagcacgcggtgaacgcgctcgccgtgagcgccgtcgcgccggtgctctactgcggctcctccgacgggctcgtcaacttctgggaaggggagcgccacctggtccacggcggcgtgctgcgcgggcacaagaaggccgtgttctgcctcgccgccgcgggctccctcctcctcagcggctccgccgacaacaccatctacgtgtggcggcgcgacggcggcgtccactcctgcctctccgtgctcaccggccacaccgagccgatcaggtgcctcgccatcgtcgaggacaacaaggacaacgccgccgtgcccgtcgacgccgtggacagcagcttcgcgtcgggctcgtccacgcggtggattgtgtacagcggcagcctcgacaagtcgatcaaggtgtggcgcgtcgccgaggacgcgcctgacgcgctgctccgtggccccggtggcggcgacgcgccgcagatgttcgaccggtaccccggcgacccattcggcgccagcagctcgtcgttccgctag

SEQ ID NO: 754 - DNA, 1180 bp, Oryza sativa
atgagtcggaggaggagcaagagagataccgaggcgaagattgcagatcttgagtacaaggtatcgagctacgagctcagcatgcaagaggaggtggcaaggaagcagagcatggacgccatgcaaactcaggacgaaaccacctgccccgttgatgagatcacgtagcggacaccatgtgagctgcatattcccttcaagaacttatcaatcaagaaggtggcgttgggaatgaccatcccaacggacccttcagggacttaccattgcaggccgattccagcaggatactcgagggtcaaagttgagctggtggaagccgcgtacgaggtcctcgagttggactaccctggaggagacgtgagacgcatctacgagacacaagccacgccattatactatggcgcaagcgccctggggcgacaatcggtgtctcgtgcaccatctcttccggctccaccacctcctgcaccatctcctccagttcctccaccacctcctcctgcaccatctcctccggctcctccgcctcctccacctccaccgtgtctgcctgcacctcccaagacaaggtctcgccaagctccaccgcttgcccgcacaagggcaacgaagaaggcgaaagagaagtgaagaggcaactcaagcctcggagtcctgaaaataatatacctattgacctgagcgtgaagaacttcttcaaggaatgtccacaacaaacaaggaggccttaaagctatcggactatgaccgaacacttaagaaagcctattacaagaagtccaaaccagtccctcggcttggagaacaaccaaaccaagaggtcgagccgtgtccctaccgacatagatgtacaaattccatgaatggttcatggaaatgagcgccaagggtaaagagatgttcagagcgaggatcagaaaccccgacttcttgcaaggagaagaagttctgtgcatccatttcaagaatgtcttcgaactatatcatctagacgccctcgacgtctctcttctgagcgcatggattttagggggctttacgatactgggttcatcgaccctcagaaaatcaacaccgaaatgatcgacaagtacgagaaagacatagaggacaatctcgtccatctcctgacgcagcagcatttcaagacgttcatactactgtcgaacaacacata

SEQ ID NO: 755 - DNA, 1170 bp, Oryza sativa
  N_region (81)..(81): n = any nucleotide
  N_region (100)..(100): n = any nucleotide
  N_region (103)..(103): n = any nucleotide
  N_region (888)..(888): n = any nucleotide
atgtccttccccgacgaggaggaggacgaggccttcctcctcgccgtagcggccacggaggaagcggcgctggcctcctcngactcctccaagcgccgcngcntctccatgacctcgtcgacctcctcgtcaccgacttcggccactcctccccccgccgccgtccccgaggggccctacctggccgcgctcaagggaagccacagctccgcctggaagcagcagcaggagacgctgagccaggcgcgcaagcgtcccggtgggtcccaaaccctagccaccccaggtagcggcagcggcagcggcggcgcgcaggtcgcgaggggcggcgcgtgcttcaagtgcggggactcttgccactgggcaagagaatgcccgcaatccgtgccagctactggcggcggaggaggaggcggggcctttggtggaagcggaggagggggtggtgggtatggggacgcgggtggggcggtggaggagaaggcttgcccctgcggcgccgggagttgcctagtgctcacatccaacacgcccaggaatccgggccgcaagttctacaggtgccccatgcgggacaatggaggttgcaactactttgagtggtgtgataacccatctccaggtcctgcaaatgtcagtggcaatactgtttttcagtcagatacatcagttgcgcatatgctttgcccctgtggtgctggagcttgcttaattctcaccacaaagacaggaaagaatgttggaaggcagttttatcgttgcccagctaatcagggaggtagctcttgtggctatttcaagtggtgtgatgaacaacagcttaggacagctgctccactgcaagcttcaacacaatatcatactgatgttgcttcaagtggcaaattnccagcaagaggagctcctccgcctgcttcaaatgcgggcaagagaaccattgggcaaaggactgcccaaatcaatcttcagatccttatcctgacaaaggtgggagaacatttacttctgcaagctctcccgatgcgtgtttcaagtgtggtaagagcgggcactggtcccgtgattgccccaccgcaaattgtggttctagtaccgtctccagccatgtcaagtcctcttctactttgggctcatggaacagccacagatactgatagccggtacctgtga

SEQ ID NO: 756 - DNA, 1086 bp, Oryza sativa
atggctgatcgcgatgaggaacagatactgtacgatacaatcgcatcgggaagcagccagtactggaacgaagaagaggggaacgaggatccaaaccagtacttgaacgaggagagggatgcagaggggaacaaggagggaaacgtggagagagatgcggaggggaatgaggaggagaaaatggcagaacagttccagaccttcaagggagatctgtaccggaaatacatcctgaaggggcagacaccgaacttcgacgtattcccgaagctaagggatcactaggacgagttcgttgcttacaagacaggtcaacaagggcaggcgatgatggaaagaaacaaagaaaatgccgccaagaagaagtaccatcaccacttggggtcaggcggctatagcgtcgcgatgccgaagtgggaggagatggaggcaagcttgcttgagaggggtatcgaaccggccaccgctaaatggcctgatcgatcgaagttctggtactatgctcatggtgtaacgctcaacccagttgatggctccttggtcttcagcgatcagatacgcgaggctgcgagtcgactaatggacgcagtggaagcctcttctcagggcacgttccgacccgacagagagaaggacgagctgtcactcgccctacagactcccgagcatccaggacgaacacgagggaaaggcgtgattccctggaagatgggattcaaggaggacatccacacgtataggagtcggatgaggagcaagagagataccgaggcgaagattgcagatcttgagtacagggtatcgagctacgagctcagcttgcaagaggaggtggcccggaaggtggatgaacgcatggcagcacatcgttcacacgatccccagccgtacatacatcctccaatggtcagcccatcaggcaatcgtagcagctgcgcctcaacggggcaggtagtatcacatagcatggacgccatgcaaacccaggacgaaaccacctgccccgttgatgagatcacgcatcggacaccatgtgagctgcatattccctttaagaacttattaatcaaggtatgctcgatgtaa

SEQ ID NO: 757 - DNA, 899 bp, Oryza sativa
atggcgggtgcggcgtcgccggaccacctgttcggccttcgcaacagcttctacgtcggcgcgtaccaggccgtcatcaccggcgtccaggccatccccgcgcgcgctgccctctcccccgacgccctcgccgagcgcgactccctcctctaccgctcctacatcgccatcggctcccaccagcagctggtgatcgacgagatcgggccgggcgcggccacgccgctccaggccgtcaggttgctcacggtgtatctctccggcggcgccggcggcaagaaggaatccgcgatcaggaagctgaacgagctcctggcagatgatgcggtggggagcaacccgattctccggctggttgcagggacggttctcatgcacgagcgggactatgccggagcactgaagcacacaaattctggtgggactatggaattgcgatgaatgttcagatatgcctccagatgcacaggtctgatcacgcagagaaacagctgaggataatgcagcaattggacgaagaccacacactgacgcagctcgcaaacgcatgggtagaccttgtcatgggcgggtccaagatccaagaagcgcacctcatcttccaggacttgtcagagaagtacccagcaacttgcttaattcttaatggtaaagcactgtgcctgatgcacatgggtaactttgaagatgcagagggattgctgctggaatcactgaacaagggatgccaaggatgcagaaactctagccaacctcgttgtgtgcagtctgaacctaggaaagtctgcatcccgctacctgaaagccaactgaagctggcacacccagaccatatgctggttaagcgaatgtcctctgctgaagacagtttcgacagagcctgccaagcgatatcatga

SEQ ID NO: 758 - DNA, 864 bp, Oryza sativa
agtattatgactccctactacagtgaaaaaacagtatattccaaaagtgatcttgatctggagaatgaagatggttggaataatttcatgggaagaattaattccaaaagaggaagtgaagtcggggcaaatgaggaaaacgtcctacagcttcgtcattgggcttctcttagagggcagacactttgtagaacaggagttttcaattatgaagcaagcatggatgagggggaatagtgcaattcaagaagctatgggatctcagtcaattgtgcagctagatcttttgatgaccttagccaagactgaactagcaagaggtttcagaagcaccctgggggatttcataatcatgacgcttcagctctgttcagtgttcttcactttctaccttgggaccaagtcacattattttcgacacacaattctccatggtggtgcaaaatatagagcaactggcagatgtttttttgttcgccatgtaaggttgactgagaaatacagaatgtacttcagaagccactttgtgaaaggacttgagctgatgttgctgctagtagtctatcagttttaaggtgatgttgctacggattcatctgcctatatacttctgacatcatcaatatagctcttggttatcacttggctcttcaatccatcaggatttgattggcagaaaatggtagatgactggaatgactggaccaagtggattagcagtcgaagtggcattggggttcctgctaacaaagcttaggaatcctgatgggaggagaagcagaaacatttacagtctacaggtctactgggctgtttctgggagatcatactatctctcagattcttcatgctccaatactgtat

SEQ ID NO: 759 - DNA, 855 bp, Oryza sativa
tatgttacaaataaacgagggatgaagctctttgcatgccaatggagtcctttagaccatgaaccgaaagctctaatcttcctatgccatgatctttcaatgtttaggatatgccatggaatgcagcatttcaatgagagtcaggaacaggtgttcggttggcaaaggctggatttacagtgcacggattggactatcagggccatgggaagtccgaaggacttcaaggctatatcaatagttttgatgatgttgttgttgattgctcgaactactttgcaagtgtttgtggagtgcaaaggaaaaaagaagttccttcttggtgagtcaatgggaggcgctattgtgctgatgctacataggaaggaacctacaaattgggatggggctattttggttgcccccatgtgcaaggaagatatgaagcctcgtcccattgtgataacaatcctaagcaagcttagcaacgtgatacctacatggaaaattattcctactgaagatgtcattgataagcaggtaagaaacaatccatattgctataaaggaaggcctaggttaaagactggttatgaactttttatggcaagcttggatattgaaagcactcttgacaagcaggttacactaccattcatcattgtccatggtggtgatgatgccgtcacagatccatcagtaagtgaagaactgtatacatcagctcagagcaaggacaaaacactgaaactgtacccagggatgtgtcacgccctgacatctggtgagcccgcaagcaacattgacattgtatttttggacatcattaagtggcttgatgagagggtatcagtttcataatatgagatcagttaa

SEQ ID NO: 760 - DNA, 855 bp, Oryza sativa
gtgcttgtggagtacaaaagcaaggaccctgatcatgtagagtgggcaaaagctctaaaagagctcttcgtgcctagtttgcgtgactatgtgaagacattctaccctttgggccctgtgtggcaacctcctgggagttcaacaagcaaagcaccttctgctccctgccctccttctgcatctcttttcagttcttcagctcaatcatcacaaccaaaaaccggaatgtccgcagtcttcgctgaaatcagctctgggaaatcaatgacacaagggtcttaggacggtgacagctgacatgaagagcaagaatagaacggatagaactggtgttgtagctgctgaaggaaaagaagctcataagaaaccctcctctagttcaaccaaattaccttctaaattggagctccaaatgggtcgcaaggcaacaagaacttagtaattgaagattgtgataccaagcaatccatatatgtatttggatgcaaggattctgtgctacaggtcaaagaggaaaagtgaacaacataactattgataagtgtagcaaaatgggattattgttcaagtgttgtcgctgcttgtgaaattgtgaactgcaacagtatagaggtccaatgtgagcagggctctgtaccaactatatcgattgataacacttctggctgccaactttatttaagcaaggaatctttagagacatctataacaactgctaaatctagtgaaatcaatgctcttgttccagatgcaaacagcgacggcgattgggagcattccttaccccagcagttcattcatgctttcaaagatgggcaatttacaacattaccagcatgtcattcaggcggctga

SEQ ID NO: 761 - DNA, 842 bp, Oryza sativa
atgccctctcctgaaccactcgattcctcccttgccccctcctccctgtgcacgattcctcgtgtttttctttttccttgtccgttcttgatttcctggtgcttctccgcagatcatccgcaagggcttctaccagaccaagaacgtggagcacaagggccaggtggatttggtgacggagacggacaaggcctgcgaggacctcatcttcaaccacctccggaagcactacccggaccacaagttcatcggcgaggagacgtccgcggcgctcggcgccaccgcggacctcaccgacgacccgacctggatcgtcgaccccctcgatggcaccaccaatttcgtccatggttcccttttgtttgcgtctcgatcggtctcaccgtcgggaaaattcctactgttggagttgtgtacaaccccatcatgaatgagcttttcacagctgttcgtggaaaaggtgccttcctcaatggttctccaatcaaaactggtgaaggctcttctggtaacagaggagcaggttggaaccaaaagagataaggccactctggatgatacaacaaacagaatcaacaagttactattcaagagatctatacggatgtgtggctcgttggccttgaacatgtgtggagttgcctgtggtaggcttgatttgtgttatgagattggatttggtggcccctggatgtggccgctggagctctgattcttcgggaagctggtggttttgtttttgatccagtggtggggagtttgatctgatggcacgaagaatggcaggatcaaacagctatctgaaggatcaattcatcaaagaattgggagatacaagttga

SEQ ID NO: 762 - DNA, 834 bp, Oryza sativa
  N_region (354)..(354): n = any nucleotide
aggactttgcgcaagctctttgatgttgacccaggagactacatgctctccatttgcggggatgatgcactgctggagctttcatctcccggtaaaagtggaagtttcttttatttcaccaatgatgacaagtacatgatcaaaacaatgaagaaagcagaagttaaagtacttctgaggatgcttccagcctattataaacacgttcgttcttttgataatactctagtaacaaaatttttcggcctgcattgtgttaaaattacaggagctattcagaaaaaggttcggtttgttataatggggaatcttttctgctccaactattcaatccacagacgctttgatttgaanggatcatcacatggtcgcacaacggacaaacccattgatcaaatcgatgagactaccactttgaaggaccttgatctcaatttcattttccggttagagggatcatgaggcaattggacaaggattgtgagtttctggagcaagagagaattatggattacagtcttctggttggcgttcacttcaaagaccgatgcaaagaagctagggattggcatgccctcaagggtggagaatgttgtgaagaatcctgaaagcgaatcccagctcattggcgaaccaacaggggaattccaggacgttatcctgttctttggaatcattgatatcctacaagactatgatatcagcaagaagcttgagcatgcctacaaatccatgcaatatgatcccaactccatatcggctgttgatccaaagcaatactgcaaaaggttcagggatttcatttacagggcttttagtgaagacctacagtaa

SEQ ID NO: 763 - DNA, 810 bp, Oryza sativa
gttccaatgtttgaaaacatggatgatccgctcttggatgccttgtgcgaccacctaaagcctgttctatatacagaaggcagctgcataattcgtgaagaggatccagtatatgaaatgctcttcatcatgagaggtaatctcatgagtatgacaactgatggtggaataaccggcttcttcaaatctgatgttttgaaaggtggagatttctgtggcgaagagctcctgacctgggctcttgaccccacatcagtttccaggctccctagctcaaccaggacagtggagacaatgtccgaagtcgaagcttttgccctgacggctgaagacttgaagtttgtggccacccagttccgacggctctaccgcaaacagctccggcacacgtttagggcagcctgtttcatacaagcagcctggcataggtactgcagaaagaagatcgaagactctctacgcgagaaggagaagaggttgcagttcgcaatcgttaatgacggtgctacaactctcagcttcagggcagcaatatatgcttcgcgtttcactggcaacatgatgcggatcttgaggagaaatgccacccgcaaggcctggctgcaggaaagtgtgcctgcaaggttgttacaaaaaccagcagaacccaactttgctgcagaagagcactagttctgtttaccacgaatgcgtaaggaaatttttgtgcatggcttgtgcactttttacttgctgatatttttgctttcggttgacactgacctacaaattgaggagaggaaaaaaatcgcaataggtatctctctgtaa

SEQ ID NO: 764 - DNA, 735 bp, Oryza sativa
atgaacgacggcgatgtggcgcggcagctgaagcagatgacggacttcatccgccaggaggccgtcgagaaggccgccgagatcgaggccgccgccgccgaggaatttcaaatcgagaaactacagctggtggaagctgaaaagaagaggatcaggttggaatttgaacggaacgagaagcaaggaatactcaaagcagctcaatgcttcccgacttgaagttctgcaagctcaagatgatttagcgatgtctatgttggaggcagcagggaaagagctactgtacataacccgagatcaccatgtatacaagaatcttcttaggatatttattgttcagcagagcttgctgcgtttgaaggagccagctgtgattctgcgctgcaggaaggaggatcgtgagcttgttgaatcagttttggagtctgcaaagaatgaatatgcagacaaagcaaatatatatcctcctgaaataatggtagaccgtaatgtctatctgcctcctgctcccagtcattatgaggcacatggaccctcctgtttagctctggtggagttgtgctagcttcccgagatggaaagatagtctgtgaaaatacattggatgctagactagaggtggttttcagaaagaagctaccagaggtatgtaactgtgtcgttccttttccattgctctttctgaaaagtggctcttctgaatatttctctgcatcattatttttgtggatatag

SEQ ID NO: 765 - DNA, 699 bp, Oryza sativa
  N_region (203)..(203): n = any nucleotide
agaaatttttagacagctctaagctgaagaggcattttcttattcatacaggagagaagaactttgtctgccctcatgaaggctgtggaaaggctttctcattggattttaatttaaaggcacacatgaaaacacattctgtgataactatcaagtgtgcaagtacccagaatgtgctcgaagaaattaagggctcatatcangcaacagcatgaaaagaatccaggtgggtctgcaacaaaccgcagtggtctagcagaccactcccataatagtcacacaccgaaaccgtcagcagctccacccactccctcagctgatcgcccatacgtctgtccttatgatggttgtgccaaggcatacattcatgagtacaaacttaacctccatctgaagaaagagcaccctaatcactaccaggatgccggtgctcaagccgcctcttcgaagatgtcgaagcgaagaagcaagccctccttgacggccaagatgccactgcccaaggtccctaagcgcaggggttacacagagccataccaacctcctgttagtgttgtcgaagagcaccagtggccgaggaatgtgctgtacgaggacgatagcgaggagactgaggaagagggagataatgttggggacggggcgaggtacagagctgctagcagcgacgacgatgaggagactgaggacgaagaatga

SEQ ID NO: 766 - DNA, 684 bp, Oryza sativa
atgcagggggcgcgtgttaatctgaaggggtggcaacaggctgctgttgcattcggttctgcatttggggccttgcttgaccctagaagagctgatctgatagctgctcttggggagactactgggaagccagcatttcagcgtgtgcttcagcggatgaggaacagtgctgaaggcagggatgttctcctggagcgtcctcgagttatatccacacaagtttctcatgcctgggacatgcctcagaacacatttggtgcagcatatgctcagttcatgggatcaaggaacttctcaccggatgaccgcccacctgtccgtttcatggatacagatgagcttgcgtatgttgcgacccgcgcccgtgaagtccatgacttttggcatgtgctgttcggccttcctacgaacctgattggagagactgcccttaaggtcattgagtttgaacagatgttccttccaatgtgcatgctttcagtcgttgggggctctgcgaggttcaatgagaaacaaaggacactgttttttcagcattatttcccatgggcttcaaaagcaggtcttaagtgcacagatcttatgtctgtgtactatgagaagcattttcatgaagatttggatgaagtgaggaggaactggggaattataccatgccctgatcccaaaaggagcagtgtttag

SEQ ID NO: 767 - DNA, 621 bp, Oryza sativa
agggtgttcctctaccagcatttcctcagcgacgacgaggccaaccacctcgtctccctctcagcggtggctgataacctgtccggcaagagcgagctcagcgacgcccgcaccagctccggcaccttcatccgcaagagccaggagaatggtgaggatatccaagtgttaaggtataagcacggcgagaagtatgaacggcactatgattacttcagcgacaatgttaacactctccgtggtggtcatcgcatagctactgttcttatgtacttaacagatgttgcagaaggtggagaaacagttttccctctagctgaggtgaaaccacgaaaaggggatgcacttctgttcttcaaccttagcccagatgcttcaaaagattcattgagcctccacgctggatgcccagtcataaagggtgagaaatggtctgctacaaagtggattcgtgtagcctcattcgacaaggtttaatctcacacacaggacgacaatgagagttgtgaaaaatgggctgccttgggagagtgcataaagaacccagaatacatgattggaacagcagcattaccagttactgcagaagagttgcaacatatgttagcgatccaattgtaa

SEQ ID NO: 768 - DNA, 582 bp, Oryza sativa
gaggaagagcctcttattcagacagtagaatgtcgtatttgccaagaggaggataacatcagcaaccttgagagtccatgtgcttgcactggaagtctaaagttgcagtatgctcatcgggcttgcgtgcagagatggtgcgatgagaaaggagatttgacatgtgaaatttgccatgagtgtttgcagccatacaaacacgggtacactgcacttcctagagctcatcctgatgagacaaccattgatatagatttgcatgatccaaggattattgcaatggcacaaaatcacataatggaagctgactatgatgattattcagtaacaaatgcgagctctgctgccttttgccgctctgctgcgcttattctttttctactacgagtcaccgggtttctgctaccattctacatcatggcttgggcaatcaatatcttacagggccgaaggcggaggcaggcggctgctctagctgcaactgaggtggcattcattctacagtcaggacaaagaaggggcatgaatttcaccatcgcaccagattcccctgccacacctcagcatgagcctatcccttga

SEQ ID NO: 769 - DNA, 568 bp, Oryza sativa
ccctccttcaagctcatcctcgtcggcgatggcggcaccgcagggaagacgacgttcgtgaagaggcacatcaccggggagttcgagaagcgctacgaacacgatcggggtggaggtgcggccactggacttccacacgagccgcggcaaggtgcggttctgctgctgggacaccgccggccaggagaagttcggcggcctccgtgatggatactaatccatggtcattgcgcgatcatcatgtttgatgtcacctcgcgtctcacgtacaagaacgttcccacctggcacaaggacatctgcagagggtctgcgacaacataccgatcgtgctgtgcggcaacaaggtggacatgaagaacaggcaggtgaaggccaagatggtgaccttccacaggaagaagaacctccagtattacgagatctctgccaagagcaactacaacttcgagaagcctttcctctaccttgccaggaagctcacagggacatgaaccttcggttcgtcgaggagttggccctcctccccgccgacgtcaccatcgacctcatcgcgcagcaaaagtga

SEQ ID NO: 770 - DNA, 456 bp, Oryza sativa
atggcgatggcggtgcaggggagccgtgacccggatttcttcgtggagggcgacgtgtactgcgacacgtgccgcgcggggttccagacgaacgcgacgacggcgatccagggcgcgcgggtgcggctggagtgccggcacttcatgagcgcgagcggggcggtggagagatcggcggaggggacgacggacgcggcggggcactaccgcatcgagctggtggacaaccgcggcgccgaggaggtgtgtgcggtggcgctgctcagcagcccggaccccgaatgccacgagacggaggtgggtcgcgaccgcgcgccggtcaccctcgttcaggacgccggcctcgccaccatggtccgccgcgccaatcctctcggcttcctcaagacccgcccactccccatctgcggtgaccttctcaagagctacgcgctcggcaccgcaccaagctactag

SEQ ID NO: 771 - DNA, 456 bp, Oryza sativa
  N_region (355)..(355): n = any nucleotide
  N_region (382)..(382): n = any nucleotide
  N_region (385)..(385): n = any nucleotide
  N_region (409)..(409): n = any nucleotide
  N_region (423)..(423): n = any nucleotide
  N_region (436)..(436): n = any nucleotide
atggattcgacggagctgaggaaggtgttcaagatgttcgacaagaacggcgacgggaggatcaccaagaaggagctgggcgagtcgttcaagaacttcggcatcttcatccccgacgacgagctcgacgccaccatggacaagatcgacgccaacggcgacggctgcgtcgacgtcgaggagttcggcctcctctaccgctccatcctcggcgacgacgccgccggccgagcccccaggacggcggcggcggccatcggcggcaagggcggcgcccccgacgacgaggacgaggggatccgggaggcgttcaacgtgttcgaccagaacggcgacggattcatcaccgtcgacnagctccggtccgtgctgtccagcctcnggntcaagcatggccgcaccgccgacnactgccgccgaatnatcagcatggtgnacgccgacggcaacggccgc

SEQ ID NO: 772 - DNA, 442 bp, Oryza sativa
atggtgcacgggacgctggaggtgctgctcgtcggggccaagggcctcgagaacaccgattacctgtgtacgcatcagcttataattcctaatccttaaacgcatttgcttgaacatggatccatatgcaattctcaagtgccgttcacaggagcagagaagcagcatagcatcagggcaaaggaagtaaccctgaatggaacgaaaactttgtcttcaccgtgtctgacaaagctacagagctgttgatcaagctcttggacagtgatactggctcagccgacgactttgttggtgaagcaacattcctttggaagcagtgtatactgaagggagtattccaccaactctgtataatgttgtgaaggatgaacattactgtggagaaatcaaagtcggcctcacattcactcctgaggtagtttctaaaaaggctggctaa

SEQ ID NO: 773 - DNA, 357 bp, Oryza sativa
atggagttctacgaggaaacgacaaggactactcggattgtatccatattggtctctttagttctacttagacaaggggatatctatggtatacaaggcctcctagaaggagagggacacgccacaaggccacaagatgttgcacacaatacacaagccaacatacgccaagacaagccgtcggatatcgacatcagagataagcctaaacaatcccaatatggtgtctgcggaggccaacaagagggatctagcgctacctctgatctcgccgagtgcgaattcgaggaggaagactaccctgtcatcgactacgagttggttatccatgccgacaagtcgacgacaactagatag

SEQ ID NO: 774 - DNA, 316 bp, Oryza sativa
  N_region (3)..(3): n = any nucleotide
atnaggcccttcgacgaaacctgccgaaacccatggcgaaggctatggagcgagagcagcgcaaggcgaagagtagcgctaggccagaggcgtctcagacgaagggtgcaaggcgaagactgtctgccgaaggagatgacttcgccttgacaagtcgcccccgcgagggccgaggaagcctttccggcccatcaggccggcgatcgccacggcccatcaggggcccatgagcccctataacattatgtacccctgtaaatgccccttctttaagggtaatcatgtaaattcccctgtacaacctaaaccctggtag

SEQ ID NO: 775 - DNA, 1527 bp, Oryza sativa
  N_region (601)..(601): n = any nucleotide
atgactgcatctcggactagatcgagccgatcggagcgagcgcgagccgagttgtgcgcaccattcctggatcataatcacccccttataaacaaggcatggactccccagcgacccccgtgggcttatctctgccacttctcagtctgggtgccccgcaatgaaccatgttatacaaaagggaaaaggggtttattgtgtcagcggctagggtttgcggtggaccgggtgcacggcggcggctcacagaaacgaacggccgagatccatccatccaaaactgacggccaagatccatcggtccacgaccgggccacgggggacgacgacgatgacgtcagcggtgacgtcaccaccggcggcggctcgggcgtgcaagctcaccggcgaacgacggcgcgacggcacgaacggagggcaccagcacgtagagagcgacgcggcgaactaccgatcaacggacggcgacggcgtcgaggaagaagcggcggcaaccttcggcttgacgacgacggcggtgctccggcggtctacagcaacgatggaggggcggacgaggacggcgacgtgacggcgaccacgacggcggccttcccgagcnacggcgacgactggagcgacggcgacgcacggctggagcggcggcgacgacggcggcacgagggctctacgggcgaagagagacgaaggcgagggtggcgacgggtagcggaggacctgggggtgcttaaaaaggggctaggcacggcggcgaaggcccacggcgaccggcgacgcgaaggaaagattagggttcgggagagagagacgaatccgattcgagatcgaatccgcgaatttccaaagcgatttagacgatgtttccaaaagggaaaagccctcttcataaatttgtacaatcaatgccacgaagatagcaaactcgattgtcgaatatataaggaaagtggcgacgatttggcaccagatatccggttgtgtggaaagaccagctgtgatatacacaaaaaccatcaaacaacaacgattgctcgtgaaggggtcacatgtcgccgaaccggcttcgccactcagtggatcggcttcgctttctactggctgagctacgccaactgcgatccggcttcattattccgtgttctgctttgctattcagtggatgttggttcagtcgaatgtcctcatgacatgcctccaacaagcccctcacaggcaacggtgattatgaaacgtggaaaaacacgtggcgacacatgtcgacatgtggcatctatggatgatagggagatgatgcggatggatctaggccgagctgacgtggcaaggaaaaggattttggaaatccaacggtggagattggatctaggggatcgagcagctgagattgcttgcggtttttttaactgcttgacccaccacgccatggcatgctccagcgcggcatggtcgtcggcagtgcggtggcattcggcagctgaagcatctaggcccccgtcattgattttggtaattaatgacaagcgctaa

SEQ ID NO: 776 - DNA, 1458 bp, Oryza sativa
atggccgagaagacccaacaaacatgggccaggcccaaattgagcaatgcgggacagcccataaagggtgctatttatggcccagaaggcccaccaaacatgggccaggcacaacgtggaacaaacaggacggcccatgagggcactaataaggcccatccgatcaagcggcccgcccatccactccgtctccacccaacggcggaggcgacgacccgatattccgatccgccggcgccggcgccgccagtcgccgactttatcggcccaaggaggagatcccctgcggcggcgccgtcgagccggtgggggaagggagagcttgaggcggaggcggaggcagagcgtgagctccgaaccaccaccatggggacctctgcgcaggagccaaatctctggaagcaaatcgacgacgccgagcactatctggtcagcggattgttcgagcaggccgtatccactgccttatctgtatccagtcaagtacattcggctgccatggagaattcatgcgaccatgatgagcttctggaaatgcttgaattagctgggatggtacttgttcaggcgcttaaagaacttaagagggctacgatgcacatggcaggaggatctggatctgatcttagaccaatcttcgatgaataccttgctaaatggagatatactgatgatcaagtttatgttttagatgaaggaaagaacagctcctcaaatgggttggttgttacatcggttatgtcacctgaacaatattttgaggtggcagagttgtacacggtaacattccttagtgttgtctcccatgagactgcaactgctatctcatggactgaaaaggctgagttgactgaacaagatcggcaggacctattgagaaaacttcatgcgttacaatctgcagctaataagaagtccaccaatcagggtgcaaaactatcagaatcagcagaaagaaacctttccacttctcagaatggctcaatatcaccagcacatgaggatgctactaaaagctcagcacctacgcacaatgggaatatacagggacttagaaaggctttgccgaaatccattcaaccttcttttcaacgcgtcacaaatcaatttgatccattgttctggtggtttcattcatttcgcataaaatttggaaagataaatccactcgcagctgttcaacagagtgagaagcggtttgcaataagtgacatattcatggctgcaagcgatatgtttatgtatctagctttgtatgctatcgcctcctggttgagctgccccgtgacagtttacttgagcatcttcgtgctggcttctattgaaagaatggctgaaagaatgctaatgaaagaaggtggccatcttctagggcttgcttacctgagcatcttcatgccggcttcgactcacttgtcctttggtctcttggcaactgtggaagaaacgcaactgtag

SEQ ID NO: 777 - DNA, 1458 bp, Oryza sativa
atggagcggcggccggagctgcggcggacgatgacgctctcggagcagctgtccgcgcccgaccaggccatccgcgacttcctcaagatcccacacgacggcctcggcggcggcgacggcgagggagggaggatccccgccgccgcgggcgcctccggtggcggcggtggcgtcggtggcatgatcaactggaagccgctgcccttctccagcggctccaggcgcgccgcggtcgacggcggcggccacgccaatgaggacgacgacgaggaccacaccgacgacgacgacgacgacgacgaagaggagcaaggcaaggacgacgcgcccgcggcgcagatgtcgctgatggcgctactggagcaatcggacagccagtgggactcggaggacgaggacgaccaaggccacggcggtggcggcggcggcgggggcaacggcggcggcggcggcggcggcggcgcgcgcaagaacggcgacggcgacgacgacgaggacgacggcgaggggcgggaggaggagatggtgcacgtgtgctgcgtgtgcatggtgcgccacaagggcgccgccttcatcccgtgcggccacaccttctgccgcctctgctcccgcgagctctggccgcggcaactgccctctctgcaacggtttcatccaagaaatcctcgacatcttctaatcatcttcttcagaattcagatgcaaaccaagaaatcctcgacatcttctaatcttcttcagaattcagatgcagatagaacgatcatgcagcatggcggtttcctcaaaaaacgaattgacgccatcttctttccagacgaggtcgatgtgagactattttcctgggccgtgaaggccggcccggatgaatttgtacatggccgcttcagttgtgctgtacatatttaccatactcactattctgaaggaagccgaattattggtggcactgttgctaattgcattagtgcagccctgcattatagaggtgtgccctccttagaaatagggcgccaggtgaaatggttgagaactgctgcaaatgccagctttctacgctgccgcttcttcccccggcgagatcggtgcgaaactagtcgtggtccgttacaaaatggcccggcgcccggctggcccatgtgtgaaactaaatcatgggccgtgctggctgtgcaggccggcctggttatgctgctgggcttggaggcttggattggtcgcggactctgttcctgtctctgctcgttacatcaggagtcgcggctccgctccggcgctgggagggagaaaagcggccggcgagcacagctaaaatctaaactaaactttcgattatactgtgctgtactgtcagacataaataatgtgttctgttctgtgttgaatgtcatggttgtacgcttctatgtttgttacgtggcgcagagccgatttgctgcgctgtcgccgaaagagtag

SEQ ID NO: 778 - DNA, 1273 bp, Oryza sativa
atgcacgcacttgcatatttgctgtgtggcttgctgagtatgtcatatgctcaccttgcaataatcaatcaaacctcagttgaagacaagttgcgaaggagaagacgtttggcttatccccatttgagctgcctgtgggagtggagtcggagcttcgctagatttattttccgctgcagttttcttcatgtgactttacatgaacagaggtttgcggaagccaggaagaacttcaaaaagattaatcatgtctgtccttatatctatgggtccaacgatgatgatgatattgactccgaagtagcagcagccgagtgggttagaagtaagaaggttataccgtgccaatgggtgaaaaagttatggaaaagaagagagaatcaggaaaggagggttcaaagattgaggaacagacaacgcttccaagaagtcgagcaagagattaaccatcggctgaagaaaacgaagccgaggcaggagtggcgtgttaagaaccaagctgctacagccgatgaggtcaaagccgacgaagcaaaaaggttggctaaagggaaaagtgttgtcactgcgtcggttaacatggttttcacgttaccagctgagtttggagctaatcaagccgatgttgacgaaattgaagaagcttcggctagattggttttgttgccagaacaagcaagttttgagaagccagaagggacagacaatcggcacttaaaaccattgtatacaaatggctatgtcaacgggaagccgatgtccaagatgatggttgatggtggggctacggtgcatttgatgcaatatgctacattcaagaagctgggcagaaatgcaaaagatctcatcaaaacaaacatggttcttaaagactttggtggcaatccatcggagaataaaggagtgctgaatgtggagctgacaattggcagcaaaaccgtccctacaacattttttgtcatcgatgggaagggttcttatagcttgttgcttggaagggattggattcatgctaattgttgtattccttcgaccatgcaccaatgcatgattcaatggcaaggcgacaagattgaaattgtgccagccgacagggtgtgcattgattttcgagacctgaacaaggctaccccaaaagatgaatatccaaagccagtagccgatcaattggttgatgctgcttccaggcacaagatattgagttttatggatggtaatgcagggtacaatcagatctttatggccgaagaagatatccataaacagcttttag

SEQ ID NO: 779 - DNA, 1269 bp, Oryza sativa
  N_region (127)..(127): n = any nucleotide
  N_region (129)..(129): n = any nucleotide
atggacgccctcgtctgcaccaacgccttcgccaccgccatcgccgccggcaggtttcccctcccgcgaggccgctcgcccccgtacgccgcggcagccgtccccgccctccgctcccgccgctgcntnccgactcgagggctgctacgcctgcgctgcgccaggggggtggattggactgatccgtcgttcgtggcagtcgcggagaagcccgacgcgggggcggaggcatggaaggcgctcgcatccgcgggcggcggtggcatcgaggaggaggaggatggcccgtttgaggcgatcaacggtgatggaggatactcggtggaggagtctgtggtcttgccgccattcgagcagagcttggtggcggcggtggcggacagtgtcgaggacgatgcgctcagtcaggcgctcagctctaagttggatttcaaggagacgtctacttttgtcatgtatggcagtggtgctttcattgccggatggattttgtctgctgttgtttcagcaattgattccattcccttgttcccaaagatactgcaaattgtaggccttggctacacaatttggttcagcacacggtatcttcttttcaaggaaaacagagatgaactgtttgttaaagttgatgatctcaaaaggaaaattactgggtatgctaccgatcaagcgtgggagttcatggactcgccggaggaggagcgaggcgaccggcgatggcggaagaagaaggaagagcacggcgggctagtcgctgttttgtcgtcgcgtcgctcagcctccaccgctgcgtttcccctctcctccctggctccctccctctactctctctccactgaagaggacggcggagctatccgcgtggtggatgcggttatcggcccgctcatcgaccggggcagtagggcctgtggcgacgctgtcgcggcggaaacggatatggaagtgcgcgggttgtcactggcaagctcgagctccccttcgtccttccgacaacaggtagctccagatccccctctcttgtcattgcccccctcgccccctcccacgccgaccgttggtgagcacgagctcatggtccaactcccttgctacctccaggagcttcatcttctccgtgaaatcgtgtcggtaaagctcgagctccccttccccaagcgactcctcgtcctcgaccaggcggcggcgacgctgcacaagatgactcctccccacgcgggtggctccgatgaggtccacctttcccgctctgggaggcggcggtaa

SEQ ID NO: 780 - DNA, 1266 bp, Oryza sativa
atgggtttgggggaatttgggtgctgcattgggggttggtttggtgctctgcgtgaatctggtggggatagtgagatcgtggttatactgggctttcctcctgataaactcgttctaaagacattcggtgttgccatagttttccaaggaatggagcagttcaggaagcattcagttgcttcaacaagtttgctggtgctttctaatttctggctttctaggagcatcaaatccccaagattttcccacaggttgtcagctattgcaggctcaagttcaagagcctgccagtcgcaaataaagcaagtgacttcttgcatgcagcatttggccggattgcgttttggttctcaagttagagaagagcacgctatacaaattcttttagcaaagcttgctaatgcaacatttgggcgactgtggaacgaggtggaggagcgccatgcctgtaacattcttatgttagctgctgctactgtaccaccatttgaaaacatatcgccgaagatgcttgcagactcaatgacattgggaagagataatggtcgtaccagagaacctgttgatcagcattctttggaggaaaaccattcaggctgtacttgtgttgctgtgccaagaataattttaccagaagacgcaactgaaccaaaaactgggataaagttccctactcttctcgaggataattcaaatccaacttcagaggtgctcgtcgggatgggctttagaagcatgcgaataatgagggtcaaaaacctgaatctctatgcctttggattatatatacaaccagattctatttgcaaaaggctgagcccaaagtatgcttctgttccagtttctgaactgaaggaccacccagatttctatgaagatcttttgagggaaaatattcatatgacagtcaggctgatagttagctacaatggtcttagcattggcacagtgcgggatgcatttgagaagtccctttgcttccgattgcagaagatgaatcctaatactgattatcattgcttgaagacgtttggttcttattttagtgaagatatttgtatacctgcgggtacaaagatcgacttccggcaaacctctgatggccagctcataactgaaattgatggcaaacaaattggtgctgtccagagcaaagatctttgcagggctttcttcgatatgtatattggtgatccacctgtttcagtcgagaccaaacaagacattgcacagaatgttggtggactcattagaagatgttattga

SEQ ID NO: 781 - DNA, 1188 bp, Oryza sativa
atgatatttgagtttaatattaagtccacatgttatcacctaagattaactatagaatttcgggtatattacaccacctcctcactggcacacagggatgacaaatgtcgtaactgtggcaagctcggccattgggccaaggagtgccggagcaagcccaagcatgaagaccaggcccatgtggcccaagacgagcccacgctcatgctcctgactggaggctgcgtcgaaaccgcaggctccatgttgccgccaccgccgccaccagcgacgccggcgcctcagtgcgtctgcatcgagctcgtcgagaagaaggtgttcactgcgttagatgatgaagcagaccgcgacccgcgcagctggatcatggactccggcgcgtcaaaccatatgacaggttgccgagcggccttctccgacctcgacactagtgtcaccggcaacgttcggctcggggatggctcgatcgtccctatcgaggggcgcagcacggtgttgttcacctgcaagaatggagaacaccgcaccctcgccaacacgtacttcctgccgtggctcgctgccaacattgtcagcatcggccaactccacaaaactggcttccaagtattggttgaggacggcatcatgcgcgtccgcgacgagcagtggcgcctgctcacccaaatccctcggagcccagggcgcttgtatgtgcttgacatcaagctcgcgcggccagtttgcttgacggcgcgccccggcgaagacgcgtggcgttggcacgctcggttcgggcacatcaactttactgcgctgagaaaaatgagcagggagaccctggtacgtggattgccattattgatgcatgtcgatcaggtttgcgaggcgtgtctcgccgggaagcatcgacgggcgccgtttccacaacgcgtgctgtctcgctctaacgagcccctgcaactcctccatggcgatctctgcagcccgatctcgccagcgacgccgagtgggaaccgctacttccttctcctcgtcgacgactacagccgcttcatgtggatcaagctccttttgtcgaaggacgtcgcaccagccgccatcaagcagatacaagcggccgccgagagcaagtcgggaagctgctttgtgcactacgcacggaccgagggggcgagttcaccgccgaccactgttggtatttcttaa

SEQ ID NO: 782 - DNA, 978 bp, Oryza sativa
  N_region (222)..(222): n = any nucleotide
atgtttgtgtgctttctgaactttttcattccggtgaaaaacatcgcagccacgtgtgttaatatatgccaatattggcattatttgacaaaaagttcgtcgcgcgagtcacggagtgatttttcgacacgaactcacccaacatactccaataagtccaaaaatcatgttttggtgctttttgaagtttttcattccggtgaaaaacatcgcacccacatntatgtccaaaaccatgtttcggtgctttctgaagcttttcattccggtgaaaaacatcgcacccacgtgtgccaatatgggccaatattggcattaattgataaaagttcgctgcgccagtcacggagtgatttttcgacacagactcacccaacagactccaatatgtccaaaaatcatgttttggtgatttttgaggtttttcattccggtgaaaaacatcgcacctacgtgcgccaacataggccaatattggaattaattgacaaaagtttgctacgcaagtcacggagttattttttgacacggacgcacccaatacactcaagtatgtccaaaaatcatgttttggtgctttttgaaatttttcattccggtgaaaaacatcgcacccacgtgggccaatataagccaactttggcattaattgacaaaagctggctgcgcgagtcacggagtgatttttcgacacggacgcacccaatacacttctatatgtccaaaaatcatgtttcggtgctttttggactctttcattctagtgaaaaacatcacacccacgtgtggcaatatatgccaactttggcattaaatgacaaaagctggctgcgcgagttacggagtgttttttcgacacggactcatccaattctctacagtatgtccaaaaacatgtttcggtgctttctaaactttttcattccggtgaaatacatcgcacccacgtgtgctaatataggccaatattggcattaa

SEQ ID NO: 783 - DNA, 847 bp, Oryza sativa
atgtggcttctcccactttcaactgtgaagttgattttgaaaagaccagacgctgagcacccaaatctgctgcaaaggcttcagcagaaggggggattcttggtccctcgagcagagcccccattgaatcgatcagatctgagcttccattggcgacaaactctccttcttccaactggggaaaacctgggacagcttggcaggttggctgggggacaccaaggtagaggagaaacgctcgaggatgggagtggagagcggcaggagacgggcggcggcgcgggcttctctgttgctgtcaagtggtttgactactttcaatgtcctgtacaaaggtgtaatgctgattcaaaagcttgttatgtcctgattaattgtcctgactgtgcacgctgcaccgccgctgccatcgggaggggaggatggacaaataggagggcgccacgcatcgcacccgcttttctccctcctgtccacagcagcacagtgccgaagccactagtcttgccatcgcttcgagccatctgtcaccgcactaggtacgatgctggcagttttgcaattcactcgacggcgcaaggtgttggcgcttcagaccgccacacggtgagcagtgagcaccccaaacccctcttcgttcgacccctaggccctagctgtcgtgccctagtcgagcaggctctagccttgctggccggccgtgacaccaccagcggcatgtacctcaggggatgcttaggccgccaacggtgccaccagcctgcagatcggtgtagggtggaagcggaggatgagcttagtgctgccattaccagcctcgctgttgttccggaagcacaaatcgcac

SEQ ID NO: 784 - DNA, 693 bp, Oryza sativa
atggcacgcggaggcggctacgggtgggcgctcgcggcgggcctcaacgccgcgctcgccgccatctccgccaagttcttcgcgcctccgcttctgaaatacagcatggtgatacttttcaatgtgacaatgtggggctgctatgtgaacagcctcaaagcactgtcatccctccaagcaaccgtcaccaattttgctgccaacttcatttcatcaggtcttgcagggtactttctgttcgaggagccactgccttctaagtacgctgggcagagacaagagtttggctatcttgattctgaggatgagtcgaccaagggaccctttgcagggattgattggaaacgtttcattcagaaatttttatacgttccaaacgagacactgcgtgttgcttcgactacacgttgtgcgtccggcacgatacgacaaactttccagctgaagctggatgtatgcgagcagtgcaacggccggccgggaaacgaacacctcttgaatccctctcacagaagcgaacaagccagcttcgtggccagtaagtaccaagccacagctcaccgcggaatcgaccggggtgagctgagctggatgcagattgcgcccggagtaaccgagctggggacgggtagaaatggaagcctgggggctgtggctgtggcgtgggccaaagcagcagccatcaccagataa

SEQ ID NO: 785 - DNA, 647 bp, Oryza sativa
cagcagcatcgacacgcgtagattcatcgaagttcagtttacatgccgcattgttatggactatccatgattttcctgcatatgcctatttgtctgggtatactactagcggaaaatatggatgtccgaattgcagtgaacacacatcatcgaggtggctaaaaaaggggcgcaaatatagttatatgggccatcatcgatggttgcccaatgatcatgagttccgcaatcaaaggcagccatattatagtaacgtggaacatacaactactcctcaagcactaagcggacgatcaatccttagtaagctggaaggcagaaatttcactatgggaaaatcaaataaccaatcgagcgaggtagctgacaaaaagaagaaaaataaaagaaagagggtaactgaaggtgttggtgttgaaactcatagattcccgatgccgagctactattggtatagtttccaatcccctaccatgatgcacgaacccgcacgaacccgcggaagtttgaatagaaagaggaaaaggaaattctacgggttggattgctcatgtgtccacgggcagccacgctcgtccactttcttggtaaacgactcgatgcattttctcttccttgccgctagcatgcatgcactgataatttaa

SEQ ID NO: 786 - DNA, 576 bp, Oryza sativa
atggtgggttgtgagcacatggttttgatggtcgtgctcatgacaattaaggaccagctcacgagtttcggttgtgaaacattaatcgtgccaaccacaagccagcgtgggcaacggctttactttttgtatagtatggttcattgcggagcaccagactgtgaagtggcggagataagcccacgggggtcgctggggagtccatgccttgtttacaagggggtgattatgatccgggaacggtgcactgctttgaattgtgttatgcagaggtggtacacctctggccagagtaaaactattcgaatagccgtgcccgcggttatgggcgggtctaacaatgtctttcctcctggtttggaatggtatattcctggtttggagatagaactgtgcagccgcgattggttgttcagagtggttgggcctatgcaacaggactatattatgccatcctttgctatcccttgcacttgcatatttgctgcgtggcttgctgagtatgccatatactcaccttgcaatcattcatcagaggaggagttctacagtgatgttgatggtgtggaggattag

SEQ ID NO: 787 - DNA, 460 bp, Oryza sativa
atggatcggcaatggatgtacgctgaccggcggtccaaagagtttattgacggtgtgcactattttttgagagtgaccgaagctaacaggcaaaggggttttatttgttgtccatgcaataagtgtaagaatcagaaggagtattctgcatccaggactatttatttccacttgtttgagtcggggttcatgccaagctataattgttggacatcccacggagagcaaggtgttgaaatggaagaagatgaagtggaagacgacaatattccggactttgctcagtacgttggatttgaaggaaatcaaacgggcgaggaggaaagggatgctgatggtaacgacgttgcggatgatcttggtcagatgttgcaggacgccaaggaggactgcgaaagtgaaaagggggcccataaattggacaagatgttagaggaccacagaatgtcgttgtacccag

SEQ ID NO: 788 - DNA, 330 bp, Oryza sativa
atggttgatgatccttttttttcctcttccttccttctttccttccttactatggtgagaaacagacaggccctgcaaggaggagagaggagggaatgtgccaaaacgcgagcaggagcaagatttgaaggcctgaaagagaggaaggaggaggcaaaatatagggagggaagggctggcggtggagatggaggcttgcatgatgccaccacgttcggagaggagcatttgaccaagcacgtcccctccttggtgtgtgagaaccagaagcgttgtgtgcaaccaacatgcgcgccaccacccatcgctatagcagctccccttgcatag

SEQ ID NO: 789 - DNA, 300 bp, Oryza sativa
atgcccggaaggcaaagttatcaaggtcttaaattcgcccagaaatctccatcggcagtccacgatatccaccctaacgtcctatgtgccgttcctatcctaaccacctcgttgaaaaccaattgtgaaccctcagatcttcgacatttcgccgaaacaacagctgcttcgtggcatatggcaaagttatcaaggtctttaattcgccaagaaatctccatcggcagtccacggtgtcgcgcccgccagcctaccttgacggcgcggttagtcgacgtgcttgacaccgacgtcgtctaa

SEQ ID NO: 790 - DNA, 2625 bp, Oryza sativa
  N_region (208)..(208): n = any nucleotide
cataatgattggacccttgaggaagactcaaaagccctacattttctccaggtgattatggcaacgagaatgttcaacttgttaaaagcatttcagatcttcagctccccaaagcagctattcttgggaatcatgactgttggcacacgtatcagttttcagagaagtcatttatatggatttgcatctcttttttttttgaaagaantaaaagaagctgatactgcacttaaatccaagaagaaccttggtgagcagcatgttgggtacaaatgtttggattttccaacaataaagctgagtgttgttggtggacgaccattttcctgcgggggtaataggatatttagaccaaagcttctgtcaaaatggttgctgtcattcttagttgcttcaccgggttgggttcttattgcatactacttctgctgtgtagtaacatgcagtgaaatcgagctacagtggtatggtgtcaatgatatggctgaaagtgcaaagaggatatatgatgctgctacaaatgcaccaaaggagcatgctgtcatattactggcacacaatgggccaacaggtctaggctcaagaatggaggatatttgtgggcgggattgggttgctggtggtggtgatcatggtgatccagatctggagcaagccatatctgatctgcaaagagaaaccggagtttcgataccgctggtcgtgttcggtcacatgcacaagagcctcgcctacgggagaggccttcggaagatgattgcctttggagctaaccggactatatatctgaacggcgccgttgtgcctagagtgaatcatgcgcaatcaagcaggcagcctgcaatctccacaagcgaaaagactgggctcgaaggattaacaggactgatggttccgacatcgcgggcgttcaccattgttgatctctttgaaggcgccgttgagaaaatctccgaggtctgggtgacggtgggtgatgccaggacggagcttgagcaggaattagtcttgtacaagcaaccacataaaagtgtcccttccaacattgccatttggagctctatgggttggttgaccaaattttttagaggttcaacccacaaaatctcggaagggcaataccacagcaaacccgcggaggagacgatatggaatggaccctctaattccgcagttgtgacgatggtgtacccactagagtccacatttggtcaactcgacttgctattgttggctactgatctccgtcaacttgtcattgacgatgtagattgttgtgatttggatgtcccgtcagaatttgacaatgaagatatcgctcgtgctatatcactctctctattagaggaggaacaaagaaaggcaaaggcaatagaaaaggacatgcatttggaggaggatgaacaacttgcaagagctatccaggaaagtttgaatgttgaatcgcctcctcgtgctcgtgaaaatggcaacgccaatggtggcaatatgtatcaaccactgccatttatgttttcttctggattcaggacttgtgccggatgtcacagtgagattggtcatgggcgtttccttagttgcatgggagctgtttggcatccagaatgttttcgctgtcatgcttgtaatcaaccaatatatgactatgagttctccatgtcgggaaaccatccataccataaaacatgctacaaggagcgctttcacccaaaatgtgatgtctgcaagcaatttattcctacaaatatgaatggcctgattgaatatagagcacatcctttctggttacaaaaatactgtccatcacatgaggtggacggtactccaagatgctgtagttgtgaaagaatggagccaagggaatcaagatatgtattgctggacgatggtcgcaaactctgcctggagtgccttgattctgcagttatggatacgagcgagtgccaacctctttatcttgaaatacaggaattttatgaaggcctaaatatgaaagtggaacaacaagttcccttgcttcttgtagaaagacaggctttaaatgaagccatggaaggagagaagactggtcaccaccatcttccagaaacaagaggtttatgcttatcagaagagcaaactgtcagcacgatattgaggagaccaagaatggctggaaataaagttatggaaatgataacggagccatataggttgactcgtcgatgtgaagtgactgcaattctcattctttatggtctcccaagattgttgacaggttcaattttagctcatgagatgatgcatgcgtggttgcgacttaaaggatatcgcacacttagtccagacgtagaagagggcatatgccaagttcttgctcacatgtggattgagtcagagatcattgcaggatcaggcagtaatggtgcttcaacgtcttcatcctcatcagcatccacatcatcgaaaaaggggggaagatctcagtttgagcgaaagcttggtgattttttcaagcaccaaattgagtcagatacctcaatggcctatggcgatggttttagagctggcaaccgagctgttcttcagtatggtctaaagcgcacccttgagcatatccggttaacagggactttcccattttga

SEQ ID NO: 791 - DNA, 2403 bp, Oryza sativa
atggagaaagtcgaggtcgatgggaacttcattggtacgggtaattggaagctgcatggagcactatgtaagcaacttcacaaagtagttcttgaagtattggatgttattcctgtccttgaagctacaaggcctggaaacagttctggacttcttgcattgagttccttgcgcatagctgttgagaaggccaagaatctacttcagtattgctcagagtgcagcaagctatacttggcctttacagcagaaaatgtcctggcaaaatttgagaaagcaagatatgcgcttctggaaagtcttcaccaattggaagaaacacttccagaagcagccagttctcagatactagatatcgcaaaagatctggagaaagcagtttttaccttggatctgattgaaaagcaagctggtgtggatgtgaatcaattagttcagaatgaggcaaaatccaatggctttcttcatgacaatgaacttgaatttttccgacaaactgcatttcgggtcggcgttgcgtcatcggcaacagctcttaccgagagaagagcacttagaaggcttcttgagagggctcatgcagaggaagacataaagaaagaatcagttgcatcttatctactgcacctaatgaggaaatactcaagcatttttaggagcgaaacgacggatttcaccaacacatccatgtgctcaagcccttcttgctcttcccgttcattgtccagctcgattgatctccatggaaatggtcatgttattgaaaagtcgatatctagggttggctccttcaatctcaggcagatcaaaggcttatcaggtagcatgccattgccacctgaggaactaaggtgcccgatctccttgcaactcatgcatgaccctgttattatcgcatctggtcagacatatgagcgggcttgcattgagaaatggtttagcagcggcaacacaacctgcccaaagactcggaatgaattatcccagctctccatgacgcccaactattgcatcaagggtttgatagcttcatggtgcgagcagaacggggttctagttccatcggcgccgcctgattctcccaagctcaagtacctgaggatatcatccttgaatagtagcaaatgtcttgtgaccaatggcgttagcacggtcttgtttgaagacacatgcgcggaggatgatattaaggatggtggtaaagttgcttcggaggagtgcactcggcagaactccggagaggctccatctgagatatgtgaagttgatcaggcctcaccagaaaaacatcctcatgagaactccgagaaggtagcagaggcgacatgtgagctttggctgcgtgtgctgagcaaggacgacgatgagtgtgtcgacgagcaacgtgaggtgatcgagcagattagattccttttgaaggatgacaacgagcttaggaaatacgcgggtgctaatggtattaccgagctactcatccactttgtgaagaaggcagtctgcagagatgatgttcagtgccaggtggttggaacaatggctctgttcaaccttgctgtcagcaatgataggaacaagaaacaacttctctcaggtggagtcctccccttgatggagcagatgatacagaagcctgaaacctacgaggctgccgtcgcaatgtacctgaacatttcctgcctcgccgaggcgcaggcgatcatcgggcagagcgaggccgcgcctctcctgatcaagggcctgcaaggagacggcttccggatgagcaagacctgctgcctcgacgctctcctgacgctgtacaacctgtcgctgcaatcgtcaaacatcccgaccctcatctcctccggcatcatgcagagcctccacgacgtcctgacgccgtcctccccgacgacggagaaggccctggccgtgctgatcaacttggcgctgacccgcgccggcaagaaggagatcatggccgactcggacatggtgggcgccatcgtcgtcatcctcgagaacggggaccccgccgagaaggagaaggccgtgtcgtgcctgtggatcatctgcagcggcgatgacggcggcagccagatggtgctccaggaaggcgtgatcccggcgctggtgtccctgacggccaacggcacgggcaagacgaaggataaggcgcagaggctgctcctgctgttccgcgggaagcggcagcgggaggtcgagcagctgcagccaagggtgcagctgcacgaggtggtgagccaggcaaccgcgcagcacgagcagcagcagcagcagcaacaagaagaaagcagcgagccaggcagcgacaagatgtcgcggctgcgcaattcaaagtcgaagttgagaaggttcacgagggccctggctaggttgctcaagaaatggggcatccgctga

SEQ ID NO: 792 - DNA, 1764 bp, Oryza sativa
atggaggtgttcggcgatctggataaggtggacgatgctgagtgcgtggaggtggatccgaccaggcggtacatacgctacaatgaggtgctagggagaggagctatgaagactgtttacaaggcatttgatgaggttgaaggcattgaggttgcatggagccaagtggagatagatgaggttatgcaatctccagataatcttgaacggctatactctgaagttcatctactaaagtctctcaagcatgaaaacgtaatgaagttctataattattgggttgatgatcaaaagaagacaattaatgttattacagaacttttcacatctggaagtctcaggcagtatcgtcagaaacatccacgtgttgacttgaaggcaataaagaattgggctagacaggtactccgtgggctggattacctgcacacccaccaacctccaattatccacagagacctgaagtgtgacaacatttttgtcaatgggaatcatggagaagttaagattggagatcttggattagccacggtgatgctaacgcctagagcaaaaagtgttattggtactcctgaattcatggcgcctgagctatatgatgagaattatgatgaacttgttgatatatactcatttggaatgtgtatgttggagatgttcactcttgagtatccttacagtgaatgtacaaatgcagctcaaatttttaagaaagtatctaagggtgtcaagccggctgctctggctaaaatcacaaatattcaggcaaaacaatttattgataaatgtttagttcctgcttctgaaaggctgtctgccaaagaactattgcaagacccctttctttgctctgataattctagtgttcttgttggcactaagtttccgtcatcattacccaaatcagtagatgtctctttggaagctttgcacatggatgttgacaccaatgaatctatgtgtactagcacatgcaagagaaatgatcttggtggtccacatagatctgtgttggagttcacgcgaactaacaaaaacacagagctaaagctaacaggcgagaaacttgatgacaattcagtatcactggttttgcgaattgccgatttgtgtggacatgcaaggaacattcattttctcttctacttggattctgatacagctatgtctgttgctgctgaaatggtcgagcagttggagttagcagactgtgatgttactttcattgctgattttattgatcttttgatagtgaatcttgtccctggtcagcagctgatgaatgatgcagtaatgagtacttccagcgaatctaaaatgggtgaaagtgagcacgtaattacttcccagcagcatccatcggagttgacacatgattatgtactagttgaaggaggaccaaatagctctgaagggtcagacatttctgttcagcttgatgggagttccaaaagtcttagtgagtatggcgttgacgaatacaggacactggaatgtggtgcgtacaaaggaaccgataaactgggctgcagacatccgttaagtaatggttcaagtaattttgcaatctttcagatggatcaagcatcacatcactcggagttggtgatcggtgcatcggtttcaattactgaaaatcgagatgtgttaaatggagagcttggtctgattgaagctcagtacgagcaatggtttcgtgaattaacaaggatgcgggaagaagctttggaaggagcccggaagaagtggttaccagataaatga

SEQ ID NO: 793 - DNA, 1608 bp, Oryza sativa
atgggtgcggccggggctgttgttgagatcagttcggacgacgaggcgattcctgttgctgccaagcgtcccaacgttcctcccgtgtcgtcttcacatcctctacctgaagactgcaacggagttgaggagggtttaggtgatcctgctgccttggtggaattcgtggcatctatgctggatgacaaaaggtctgcgcgtgatgtggctgctgctgatgatggggacgacgacgattgcgtgatgctagatggtgaccctgataaagcggtcctcgttgtcaatgagcagagacctgggcaaggtggcccagaggaagaactgcagatagtttcagagaaaggagagttgcacttcagaccgtacattgtcttcgtggtgatagcatgcagggatttccctcatccacgccatctatgtgttagcatgccattcacaagttctcatgcagatcattgtgccatgtgccactgttatgtttgcgactctcctgctccctgtgccttttggggcaaaggtacagagcctactgatcattgtcatgctacggacaagaatgcaaaatggacgaaaatgaggcagtcattgaagcgcaaaaacctgccatcatctaaccgtagaggtatcaagaatcattttcagccaatctcagcaacagcatccttgcagttgcagcaatatacaggggatcgtttttcagttccacgtctatcaccattgtctccagtaggattccatgtttcgagaaatgtgagccaaaatcaatggatgatgaagctcattggagttccaccgaatgtgggacaacctgttaatctgcaggaagcaacatttcctagagctagcattccgcgcaaaagattcagaagtgatggttcagctcctccagttcatctatccacaaatgctaaccatttgcgccatcctgcccctaactctgtcctggttcagccagtatcctctgcagcatttcagacaacacaatctcaaccagcatcctctgcagtatctcagaattctgtcagtgctgctagaccattacgagttcagacaacacaatctcagccaccatcctctgcagtatctcagaattctgtcactgctgctagaccattacggggttactcacctcagaattctttcagtgcaccagttagggttcagtcgacatcatatcatcaggttgctccaggtatatctcaaggacttcaggttcagtcaacatcataccttcaggttgatccaggcagggcggttagtgctgaactgcagctttctcagtgttcctcgcttcaaactcagggaattcaacaccagcatgatccatcggcagatatttaccaaaacatatggaaggaggcacttgctaagctggcatcagagctgggggtttctgattacaatattgatccaccagggcgtcttccaagcactcctcaacccaatcagctgcatgctcaaatgaggcctggtcatcaacctactcaagcaacggcaaggcagggagttcaagctaatggtggtcatgttgcagcagcatcacagaaaaggacttccaatggccaccacttgccaaatcacaaacaattcaaccctggtgccaattga

SEQ ID NO: 794 - DNA, 1509 bp, Oryza sativa
  N_region (326)..(326): n = any nucleotide
atgggtggctgctcctccgccttcgcggtttccaccaggatgatccgcttcagccgcggccgcgtgccggcggccatcctccccgtcaccagcaacgacgagccctgctgcagctgctcccctgaaaacaacaacaaaaacaacgacggcggcggaggcggatgcgacggcggcgagcaccagaaggggaagtcgtggaggaggtggcagtacaggagatgcggcggcggtggcggtggcggggccgggaggaagaacgccatcctcggggacgcggccgacgtgaagacggcggcggggttcgcggagaggtacaggctgggggncggagctggggcgcggggagttcggggtgacgcggcggtgctccgacgcggccaccggggaggccctggcctgcaagacgatccgccggaagcggctgcgccgctgtgccacgagaacggggtgatgcacagagacctgaagccggagaacttcctgttcgccaacaagtcggaggactcacctctcaaggccatcgatttcggcctctcggtgttcttcaagccaggagaaagattcacccaggtggttgggagcacatactacatggcaccagaggttctcaacagaagctatggcccagaagcagatgtctggagcgccggcgtcatcctctacatcctgctctgcggagttcctcctttctggggagacaatgatgagaaaacggtgacggcgatactccagggtgggatcaacttccagagggagccatggcccaaggtgtccccgcatgcaaaggaccttgtcagcaagatgcttgaccccgatccttctacccggttgacagcaaaggaagtccttgagcatccttggctcaagaatgccgatagggctccaaacgtttcgctcggagagattgttcgatccagactgatgcaattctcagccatgaataagttcaaaaagaaggcacttggacatttgccgatgaaggtcgttgccaagaatttaccggtggaggagatggataaatatactcagatgttccacaagatggacaaagacaacagcggtaatttgacgcttgaggatctgaagttgggcctccagataaatggtcatcctgttccagagacagagatcgaaatgctgttagaagctggtgacatagatggaaatggaacattagattgcgaggagtttgtaacggtattacttcacataaagaagatgagtaatgaggagtacctacctaaagctttcaagttcttcgacaaagatggtaatggtttcattgaaatggaggagttgatggatgctttaggtgatgaactgggccctactgagcaagtggttaaagatattattcgagacattgacactgataaggatggtcgcattagctatcaggagtttgaatcaatgatgatatctggatcagactggagaaatgcttcccgacgatactcaaaagcaaatttcagctccctcagtcgtaagctgtgcaaaggaaattcatga

SEQ ID NO: 795 - DNA, 1434 bp, Oryza sativa
  N_region (320)..(320): n = any nucleotide
  N_region (832)..(832): n = any nucleotide
  N_region (974)..(974): n = any nucleotide
atggcagagcaagcaacagtagtcgcggcacgagcaatttcggtggcggtggcaaaagctcatcgtgatagtggcgagcaacactgcatcagtcggcatggtggacaagcagccgtcacaataacgatcggggacctcgtcggcatgaaatggcagcagtctcctccgactccgcccactgatgccccagacaccaatgctccctccgcccttgccttgtctgcggtcacccccaccgcctctgcagtctgcaccgaccggcgctcccaccggcgcccccgcgagctcctctgcattcaccaccaccggtgctcccatcncggggatgaaggaagagatggggaagaaagaagaggaataatggaggaagatagaactgacatgtgggtcccacgtccaggagggatcgggtggaaggtcggagaagccagtcttcaggtccatatttttggaaaaactgtgatgtctggagttggtaatgatataggtcctagaaatttggctggctacgttacttataaccgcagaacgagcaatgaatccccaacgacaaacgaacgtgcaacaattcctgcacccgcaactccatcctgcaagttcagtgctccatcagtgttcagtttcatccatcccaaagcagactctactggtggtattccccgaggcgactatatccccaccaatgtgatctccattacagatggacaaatctgtttggaaacagagctcttttatcgcggaattagacctgctattaacgttggattatccgtcagtcgcgtcggctctaggaggggtggagctggagctggagttgtgccaaacaggcccntagtctgcatggtctttttggcagctgctaaaagcgtcactgattgcctagaaggccacgtcttccctgctctagtgcttaggctgaaacctttattctatggcagcacttgtgtcatttggactactagcgatccatctangcttgagcaattgaaggaaattgctgttggaagacttctgcgtggtgcacaacccgaattgatggacactctaatccagtattcgaaggatggcgatgataacagcaagcatcctgttcttccttgcccaagtgaccagttaggacgcccagatctagccatggcaggcccagattgtgtggtcccactatgtccaggcaagctcactctaggaaggaaacctgataaatttgatggcactgtgcagttaggaggatctccaagcggttttggtttgccttgtatgcagcattgcacagcaggaagtgatcgtcactttagagcagcatcgcgtcctattgtggttaaggcatgtgacaagtgtcacaggtcttgcttctatcagctgtatgaattgagtagcagggcacatctccttggtatggatgatgtcccttttagtggcgtattggccaactag

SEQ ID NO: 796 - DNA, 1212 bp, Oryza sativa
  N_region (36)..(36): n = any nucleotide
  N_region (69)..(69): n = any nucleotide
  N_region (80)..(80): n = any nucleotide
  N_region (149)..(149): n = any nucleotide
  N_region (155)..(155): n = any nucleotide
atggcgaacaagcggcagcgggaagcgcggaagcgnttccgcgaggcgaacccgggcctcttccccgcnaacccgacccntcccgccgacggcaccaagaagaagaagaacaacaagaagagcatgttcaagaagacgagtaaggcggntggggnaggcgcggggaggtcgaagcacccgctccgggtccccgggatgcggcccggggagcggtgcttcatctgcaaggccgcggaccacgtcgccaaggtctgccccgagaagtccctctgggagaagaacaagatttgcttgctctgcaggcaacgaggtcatagcctgaagaattgccctgacaaaaatgatgaaaatttgaagaaattctgttataattgtggtgaatctgggcactcactttccaagtgccccaaacccattgaaaatgggggtacaaagttcgcaagctgttttgtctgcaaacagcagggacatttgagcaagaattgtcctgaaaacaaacacggcatttatccaaagggaggttgctgtaagatatgtggtgaagttacacacctggccaagcattgtccaaacagagggaggcaagacttgatatcttctggggatgatgctttcaatacggaggagcatcacctggaagacaatgctgttctccggggtggagatgaccttgatgacgattttattgaagaagaagaaacaagacacaccaaggcaaagaaggctaaacaatctagttcaaaatctaccacagagacaggcgatggtgacaagaataccaacactaaggcaaaagcgaactcagcgtcggggatggccgtgggcgacgagtgcaagctcaagttccaggagctcaagtcgaagaggagcttccgcttcatcacgttcaagatcgacgagcggacgcagcaggtggtcgtggacaggctgggccagccgggcgacacctacgacgacttcaccgcctccatgcccgccagcgagtgccgctacgccgtcttcgacttcgacttcgtcaccgacgagaactgccagaagagcaagatcttcttcatctcctggtcgccggacacgtcgaaggtgaggagcaagatgctgtacgcgagctccaaggaccggttcaagagggagctggacgggatccaggtggagctgcaggcgaccgatcccagcgagatgagcatggacatcgtcaaagcgagagccctctga

SEQ ID NO: 797 - DNA, 1122 bp, Oryza sativa
atgaacgttctttctcgtaaagttgatactaagtcgagtgctttggtttcttcttcttcttcttctttggatgttgatgcttcttcatctaagtcttcttttcttgctatttttaatgccacatccgatgatcaactcgaacagatcgaggaggaggatttggctttggttgctaacagaattgctcgagctatgaacaatgccaggtccaggaaaagaggtggtccaaatcgttgctttgaatgtggttcaattgatcatcttcgttcgcattgtcctaagcttgggagaggcaaaagagaagacaaagatggtgagaagaccaacgacaacaagtcgaagggtacatccaaagggaggaagatcaaggagaatctcaagaaggcttttgatcaagtctacgccgtgtttgagccactaagcgatgtggatggtgatagtggagatgaagctaagggaaagaacatctccggtgtttgcttcatagcgcgtggtgttggtgctagaagtggtgagattttggttaaacctgatactaacaaaactgtgtttaaatctgctggaaaccagacagaccgcagtaggtcccgcggtcagaccggcgaccggtcagaccggctactgtgcctcggtcagaccggtggtgaagcggcggctttggtggcaaggaaggaaaacgtgtggatcgtggattccggttgttcgcgacacatgactggtgataaaaaatggttcacctctctcaaaaaggcatcaaagactgaatcgattatctttggtgatgcttctactagtgccgttctcgctataggtttggttaagattctttggcttttatctactttgaaagattatggtcttacttttgagaaagtacctctcttttgtgataatactagtgctattaacattgctaagaatcctgttcaacactcacgcacaatgcacatatatattcgctttcactttttgagggatcatgttgagaagggagatgttgaattgcagtttttggacacaaagttgcaacttgctgatattttcactaaacctttggattctaatcgttttgcttttcttcatggtgaattgggaataattcatccttttggcatgttttga

SEQ ID NO: 798 - DNA, 864 bp, Oryza sativa
  N_region (189)..(189): n = any nucleotide
atgctagcggttatgatccagagagcaaataatgcaggacagcttgttggactggtgcatcatctcattgatggtggattgtccatcctccaatatgctgatgatattatactctttatggaacatgatctagagaaagcttgtaatctaaaaatgttgttgaacgttttcgaagaattatctggcttnaagattaattttcataagagcgagctttactgctttggtgaagcccaaacagctcaggatcaatatactaacctttttcaatgtgaggttggttcttttccattctgttaccttggcattcctatacatcataggagacctcgtaattcggagtggaaggaagtgattgagcggcttgaaaaacggttggcaagagcgatcaagaagattgattatttccgatcaaggttcttttggcaaggggatggacacaaaaggaaatatagactagcaaggtgggacatcatatgtcgtcctaaagaccaaggaggggccaagcctgattttctcaggtttggctccttcaacatcaaagatggctctcaagttcggttttgggaagataaatgggaccttactggctctaagttagtggcgtggaatcaccttctctcacgcatcgctaatattatattatctcacgaccaagatgagtttaaatggaatctaaccactgatgggagattctcggttaaatctctttatcttgcgttggtgcagaccgatgttatcttggctccgctcataggctatccttcagaaggtcaatttgcggggtactatcattgcggcttgtcaacaattggagctagtggccatggagttttctaccccggcgcatgggtggcgttctag

SEQ ID NO: 799 - DNA, 642 bp, Oryza sativa
atgccatcaccgttactttttctgtcagctccttccatcgtcgggcccacttgtcacatcgctcttctcgctctgctgcatcctggaagacgtgggaaacggtggtccggtgttgggattgacctgcacctcgtccaccatcaggaccggtcttccggcctctattgcaaagcacaaccatacttccacatgtctaaatgggtgtctagtagtcgagatgtcgtggcacaggacgggaatctaggtggtcactcccgagaggctaggttgagtgaagaactatgtcacgccctccgtccgtataccgtggtgtactatgggcagtctaaccggcgaggaggcagcggtctaaccggcagcaggcaggcggtcaaacccgcgacggcgatcatcagcaagcagggagacggcggtcaggctggccggacaacaccggttaggccggcggcaaagctgccgaatccggtgggctaccccgaaactggccccacgatagcaaggggaatgtgcggcgatttggctgagcgcgagaagagtggtcagaggcagcggtggcgtgctctaggggagagcaaacgagatgagaggggtgacggaacggtggcagcttgggtttcgtggttgtgggaaaaaaatccttag

SEQ ID NO: 800 - DNA, 333 bp, Oryza sativa
atgaggcgtggccagcagtggaggaggccgacacggtgcgaggaggagctaccagtgggtgcggtacggtctacggcgcatgaaggctggccggcggggggtgccggtgtagtggtcccacatgtcggcagaggttggacagtgtggagcatcggggcgccagccatggactcgcaggtggtgccatcttcgagggttctgcaggagacttgcaactacatcaggagcttgcatcaggaggtcgacgacctgagcgagaggctgtcggagctgctggccacgtccgacatgagcagcgcgcaggcggcgatcatccgcagccttctgatgtag

SEQ ID NO: 801 - DNA, 1909 bp, Oryza sativa
atggaggcgaaagacgggcaagcatggctggggacgaacggatacggcagcaggagggaggaagacggcgtgtgccacgacgacagcgcgacaccggtgagggcgaacactgtcgacgagctacactcgctgcagaggaagcctcagagtgcgtctttggcatcgatgacatgtgggattgggccaaaactcgtcaacggtgacccagcaaggaaaaaagaaatggctggcaaggctgtgacacatcaccaacaccatatcactgtccccacgatcactgtgagcgacagtgacctcaagttcacccatgttctgtacaacttatcccctgaactttatgagcatgcaatcaaatatgagaaagggtcattcatcacatccagtggggcgttagcgacgctatcaggagcaaagaccggtcgatcacctagggacaagcgtgttgtcaaggatgaaacaacagatgatctgtggtggggcaaggatcaccaaacattgaaatggacgagcaaacctttctgatcaacagggagagagctgttgactacttgaactcccttgataaggtgtttgttaatgatcagttcctaaactgggaccccaacaataggataaaagttcgaatcatctctgcgagggcctaccattctctcttcatgcacaacattgcatccggccaacatacgaggaactagagaattttggcgagcccgacttcaccatctacaatgctggacagttcccgtgcaaccgttacacgcattacatgacatcgtcaactagcatagacttaaatcttaagcggagagaaatggtcatcctgggaacacaatatgctggagagatgaagaaaggcctcttcagtgtgatgcactacctcatgcccaaaaagcagatcctctcgttgcactctggctgcaacatgggcagagggggtgatgtagccctgttttttggattgtcagcttcaaggtactggaaagacaactctgtcaacagacaggaataggatcttaattggtgatgatgaacactgctggagtgataatggtatctctaacattgagggcggctgctatgctaaatgcatagatctttctcaggagaaagaacctgacatttgggatgcaatcaagtttggcacaggtgttggagaatgttgttttcgatgagcactcccgtgaagttgattatacagaaaaatctgtcacaggagaatacccgtgctgcttaccctattgaatacatagctaatgctaagataccatgtgttgggccacacccaaagaatgttatcctacttgcatgtgatgcatttgggtgtcctccctcctgtcagcaagttgagccatgcacaaaccatgtaccattttatcagtggctacactgcattggtcgctggaactgaagatggtatcaaggagccacaggctacattttctgcctgctttggtgcagcttttataatgctccacccaactcggtacgctgccatgctggcagataagatgaacaagcatggagctaccggatggcttgtcaacactggttggatcgggggaagagttatggtgtaggtgagcgaatcagcttggcctacacaaggaaaatcatcgatgccattcactcgggtgagcttttggctagaagctacaaaaagacagatgtctttggactagacatccccacaaaagtggaaggagttccatctgaattgcttgacccaataaatacctgggaagacaaagactcatacaagttgacacttctaaagctgtcagatctgttcaagagaaatttcaaggtatttgcaaattacaagaaaggtggtgttagtgatctggctgatgagattgctgctgcaggaccaaatttctgattttaattgaatagtagtagtatgtcttaa

SEQ ID NO: 802 - DNA, 1251 bp, Oryza sativa
atggctgaggagctgaagctgctggggttcgttgtccggcgtgagcccgtacgtgatccgcgcgcagatggcgctcgccgtcaagggcttggcgcacgactacctccccgaggacctcacccgcaagagcaagctcctcctcgacagcaacccggtgcacaagtcggtgcccgtgctcatccacaacggcaagccggtgtgcgactcgctggtcatcgtcgacccgccgacccctaccaccgcgccgtcgctcgcttctgggccgccttcatcgacagcaaggtgttccctccgtgccttgccattctgaagacggcggcggcggaggcggaggaggagaaggcggcgaagctcaagttgctgggcgtgtgggatagcccgtacgtgaacagggtgcagatcgtgctcaacctcaagggcctgagctacgagtacgtcgaggaggatctcatgaacaagagcgacctcctcctcggctccaacccggtgcacaagaaggtccccgtgctcatccacaacggcaagcccatcgccgagtcgcgggtcatcgtggagtacctcgacgaggccttcgccgccggcgccggcggctccgtcctcccctccgacccctacgagcgcgccgtcgcccgcttctgggccgcctacgtcgacgacaagatggccggaggaggagatgagctgaagcttttgggcacatggttcagcccgttcgtttccagagtgaagttcgtgttccacctcaagggcctgagctacgagaacatcgaggaggacctcaagaacaagagcgagctcctcctcaagagcaacccggcgatcaagaaggtacccgtgctcttccacaacggcaagccactctgcgagtccatgatcatcgtcgagtacatcgacgagaccttcgccggcgtcggcccgtccgtcgtccccaccgatgcctatgaacgcgccgtcgctcgcttctgggtctcctacatcgacaacaagagcaagtcgatggaggagaaggcggaggggctgaagcagatcttcgtggcggtgatggtgctggaggaggcgttcaaggagtgctccaaggggaggccattcttcggcggcgacaacgccgggatcgtggacatcgcgctcggcagccagctcgggtgggtgcgcgcatcccaggcgctgtccggcatcaagctgttcgatcccgccaagacgccgcttctggcggcctgggcggagcgcttcctcgcgctggacgcggcgaag

SEQ ID NO: 803 - DNA, 1120 bp, Oryza sativa
atggcttcttccaagcctctccttcttgggcttctcctgtccatcacttgcctcttgcaggtcctactggcggcggcgaaccctcagccgccgccgccgccgtcgtgcgacaagtccgacaaggagctgaggttcatgttctcgcagtggatggccaagtacgcgaagcactactcgtgcccggaggagcaggagaagcggtaccaggtgtggaagggcaacaccaacttcatcggcgcgttccgcagccagacccagctctcctccggcgtttgcgccttcgcgccgcagaccatcaccgactccgtcgtcggcatgaacaggttcggcgacctcacctccaccgagttcgtccagcagttcaccgggttcaacgcctccggattccactcccctccgccgaccccgatctcgccccactcctggcagccgtgctgcgtcgactggcgctccagcggcgccgtcaccggcgtcaagttccaaggcaattgcggcgtcgtgctgggcgttcgcgtccgcggcggccatcgagggcctgcacaagatcaagaccggcgagctggtgtcgctgtcggagcaggtgatggtggactgcgacaccgggagcttcggctgcagcggcggccactccgacacggcgctcaacctggtggcgtcccgcggcggcatcacgtcggaggagaagtacccgtacacgggcgtccagggcagctgcgacgtgggcaagctgctgttcgaccactcggcgtccgtttccggcttcgccgccgtgccgcccaacgacgagcggcagttggcgcttgccgtggcgaggcagccggtgacggtgtacatcgacgcgagcgcgcaggagttccagttctacaagggcggcgtgtacaagggcccctgcaaccccgggagtgtgaaccacgccgtcaccatcgtcggctactgcgagaacttcggcggggaaaagtactggatcgccaagaactcgtggagcaacgactggggtgagcagggctacgtgtacctggccaaggacgtgtggtggccgcagggtacctgtggcctcgccacctccccattctaccccacggtttaatccgcgttcgtgtgcccggctggcttttcttaa

SEQ ID NO: 804 - DNA, 986 bp, Oryza sativa
atgaatataacaaaattcacttacaaggagctttcaagggttactgaaaattttagcccgtctaataagattggtgagggaggttttggatctgtgtataagggaaagcttgttgccgtcaaggtgctatctttagagtcaagacagggagcgaaggaatttctgaacgaactcatggcaatttcaaacgtatctcatgaaaatcttgtcaagctttatggctattgtgtggaaggaaaccaaagaatccttgtctacaattatcttgaaaataatagccttgcacaaacacttttgggtatgagcaacatccagttcaactgggcaactcgagtaaatatttgtgttggcatcgcccgtggactaacatacctccatgaagttgtaaatccccacattgttcaccgggatatcaaagcaagcaatatacttctagataaagatcttacgccgaaaatatctgattttggtttagcaaagcttttgcctccagatgcatcacatgttagcacaagggttgctggaacattggttacttggctccagagtatgccattcgaggacaagtgacacggaagtcagatgtttatagttttggtgttctgttactagaaatagttagtgggagatccaacaccaatacaagattaccctatgaagatcagatacttcttgaaagggcctgtatgttcctgaaaattgggcttttgtgtacacaagatgtcacgaaacatcgacccacaatgtcgatggttgtccgcatgctaacaggtgaaatggatgttgagctggcgaagatcagcaagcccgcaataatcagtgactttatggatcttaaggtcaggagcatgaggaaagaagtggacatagtttcatcctcaacatccacattgctatcttccatcatggcacactcttctcctttgttgtcgcaagagacaacagaagcctccatgacattcaccgcgatatcagatcgtgagtga

SEQ ID NO: 805 - DNA, 519 bp, Oryza sativa
atggcgtcgaaagcctttgcactcgtgctgctggcggcggcgacgctggccatggcggccagcacggcggcggcgcagagctcgccgcaggacttcgtcgacgcccacaacgacgcccgccgcggcgagggcgtcggcctccccgacgtggtgtggaacacgacgctgcaggcgttcgcggagagctacgtggcggtgctcgccgccacctgcagcctcgaccactcgaacagcgtgcagctgggctacggcgagaacctgtacatgggcggcgccggcagcgcgtcgacggcggcggacgcggtcggcttgtggatggaggagaaggcggactacgtgtacagcagcaacacgtgcacgaggggggcgctgctcgactgcggccactacacgcaggtggtgtggcggagcacgacgtcgatcggctgcgcgcgcgccgcctgcagcaacggcggcggtgtcatcatcagctgcaactatttcccgcccggcaacttccccgatcagcgcccttactag

SEQ ID NO: 806 - DNA, 511 bp, Oryza sativa
atgctgcgtgttttaattgcatcgttaagatttgcctctgaacatgcacactattgcatatgtgtcataatcattgatgtgttttatttgcagaccacacaacttgttaagatcgggacatggggtggaaatggaggaggtcgtgtagacctatctgtactcccaaggagcttgaaaagcgtgacaatccgtagtggtgcagccattgatgctattgcctttacatacattggcacagatgggaaggaacatcttgcaggtccttggggtggtggcggtggaaatccaactacggattacacttggatctcaggaattcgtgaagggaatctccggaacttttaccaacgtcgtgacaaaccttaaaattgtcaccaatgtcaccacttataattttggacaaggtggtggaactgcttttagcctcccgctgcagagcggcagtgtggttggtttcttcggacgcgcgggagcacttgtggactctatcggagtttatgtccacatatga

SEQ ID NO: 807 - DNA, 498 bp, Oryza sativa
atggcggggagcggtgtcctggaggtgcatctcgtcgacgccaagggcctcaccggcaacgacttcctaggtgagatagcaggcaagatagacccgtacgtggtggtgcagtaccggagccaggagcgcaagagcagcgtcgccagagagatcaagggaagaacccgagctggaacgaggtgttcaagttccagatcaactccacggcggcgaccgggcagcacaagctctttctgcggctcatggaccacgacaccttctcacgggacgacttcctcggcgaagcaacgatcaacgtgactgacctgatcagcttaggcatggagcacggcacatgggagatgagcgaatccaagcaccgggtcgtcctcgcggacaaaacataccacggcgagatcagagtcagcctcacgttcacggcttctgcaaagaggctcaagaccacgcagaacaggttggaggatgggcgcacagctttcgtcagtagaaagattgtga

SEQ ID NO: 808 - DNA, 305 bp, Oryza sativa
atgtttttgttgttgtttgtctggttgattttgttgcaggtttacccgctgatcgccgccatgaccttcgtcacggggctgtgcaccttccagctcacaaggaacgtgttcatgaacccggacgtcagagggtgaacaagaacaaccgtaaaagtgcggtgctggagaacgcggaggagggtgagaagtaccaccagcacgcgttccggcgattcctcgccacgcagcggccggaggtcttcccggcgctcaaccgcttcttcgccggcccggcgacggtggcgagaagtgatcgccacgactga

SEQ ID NO: 809 - DNA, 429 bp, Oryza sativa
atggtgctcatgctagtggcggaggaggaggcggaggtggtggttacagccaatacggtggatcgggatctggtagcggatatggctcgggctcaggctctagccagacctctcaaaatggatattatggttatggcggttcatccagtgctggcggcgctggtgctggtggcggtgccggacaagctggtggttactggccatccaatggtcatgggtctggtagtggtacgggttatggctctagctccgctaataattactacggaggaccatacgcaaatgctaatgctggtggcaatggtggtggtaatggtcaaggccaatatggtggccgtggcgttggcgcaggtgttggatcgggatacggtgacgccaacccttaatttcctacctagccgggctgcactggcttggggccccttgtag

SEQ ID NO: 810 - DNA, 3720 bp, Oryza sativa
  N_region (1678)..(1678): n = any nucleotide
atggctcaccgtggcgcctgcggctgcgagaagaacaccggagatggcgcaggcatcctcgtcgctctgccgcacaacttctttgagcttccgccgcctggtgagtacgccgtcgggatgtttttcatgcccacagatgacaaacgccgtgaaaagagcaagcttttgtttcgtgaggcagagttgctggggcataccgtcctcggctggcgccgggttcccacagacaactcgggcttgggtcaatcagcggtagatacagaaccagtgattgagcaagtgtttgtcaccaaaagtgcaagttcaaaggctgattttgagcggcagcagatgtacgtcctacggaggttctcagttatgtccatacgagaagttctaggcgtcaagaatggcggaacaaaagatttctacatgtgctctctatcttcaaggaccattgtttataagggtcagcttaagccaagccaactcaaggggtacttctttgcagacttaggcgatgaaagcttcacaagttacatggcactgatccactcaagattttccacgaacaccttccctagttgggatcgagcgcaaccaatgcgtgttttggggcataatggcgagatcaatacccttagagggaacaagaactgaaggcacgtgagggtctcttgaagtgcgagggactaggtctaacaagggatgaaatgttgaaacttctgccgatagtggatgctacatcttcggattcaggtgacaatgttcttgagcttctcatacaatctggaagaagtgcgccagaggctgtcatgatgatgatccctgaggcgtggcaaaacgatgttaacatggaccctgagagaaaagctttgtatgagttcttttcagcacttatggagccttgggatggaccagctctaatctcatactgatggccgctaccttggtgcaacccttgatcgtaatggtttgaggccaggccggttttatgtgacctacagtggccgtgtaattatggctagtgaagttggtgtggtcgatgttcctcctcaagatgtttcaagaaagggtaggctaaaccctggaatgatgcttttagttgattttgagaaccattgtgttgtgaatgatgatgaattgaagaaagagtactccaaagttcgtccatatggagagtggctgaaaagacaaaggatacaactcacagatatcatagaatctgtaaatgaagcagagagaattgcaccgagcatttcgggtgcacttccaatgggtatctgcggaattctgactccgctgaaggcttttgggaagcccttgaaatgctgatgctaccgatggccaaagatggacaagaagctcttggatcaatgggaaatgatactcctctagctgtgatgtcaaacagagagaagctgacttttgaatacttcaagcagatgtttgcacaagttacaaacccaccgattgacccgatccgggagaaaattgtcacatctatggagtgcatgattggtcctgaaggtgacttgtctgaaacaacagagcggcagtgccatcgcctcacgcttaagagtcctttactgaatacaaatgaaatggaggctattaaaaagatgaactaccggggttggcgcagcaaggtgcttgacataacttatcctaaaaagaatggcaggatgggcttaaaacngactttagataaaatttgtgctcaagcacgtgaagctattcatgagggctacactattctagttctctctgatagagttttcttcagagcgtgtagctgtcagttccctattggcagttggagctgtccatcagcaccttgtctcacatcttgagaggacacgcataggattgttagttgaatctgctgaacctcgcgaagtgcaccatttttccacccttattggatttggtgctgatgctatatgcccttatttagctatagaagcaatatggcggttgcaaattgatgggaggattcctcctaatgatgggaaaccttatacacaagaacaacttatcgagaaatatttttatgcttcaaactatggaatgatgaaagttcttgcgaagatgggaatatccactctggcatcttacaaaggtgctcagatttttgaggcccttggtcttgcttcggaagtggtcagcaagtgttttgaaggtactcctagtagagttgaaggtgcaacctttgaaatgcttgcacaagatgctcttcgtctccatgagattgcattcccatcaagaactttacctcctggaagtgcagatgcaaatgctcttcccaaccctggggattaccattggaggaaaaatggagaagtacaccttaatgatcctttttccattgcaaaattacaagaagcagcacggattaacagcagggaagcatacaaagaatattctaggcgcatttacgagctgaataaggcatgtactctgcgtggcatgctgaaatttagagaaattccaaaccaaatttccttggacgaggtagaacctgcaaaggagatagtgaagcggttctgtactggagcaatgagttatggatccatttccttggaagctcatacttccctggctgaggctatgaacacccttggaggaaaatctaacacagaggtgagggaggggaacaaccttgccgtatggtgcctcttcctgatggatcaaagaatccaagaataagtgcaatcaagcaagttgccagcggaagatttggagtttccatctattatttgactaatgcagttgaggtgcagataaaaatggctcagggtgctaaacctggtgaaggtggtgagctaccaggccacaaggtcattggtgatattgcagtcactagaaattctacagctggtgtagggctcattagcccacctcctcaccacgatatatattctattgaggatctcgcacaacttatccatgaccttaagagaatgcaaacccaggtgccagaatcagcgtcaaactagtctctgaagctggtgtaggaattgtcgctagtggtgtggtgaaaggacatgcagaccatgttctgatctctggacatgatggaggcactggagcctccagatggacagggattaaaaatgctggacttccttgggagcttggcttggctgcattatgatgaggaagtgccataccaacacttgccctgctggtattgctacacaagatccagtcaatattgtgttgagaagcaagatcatggcctcgacatggcattagataacaaactcatagataccatccatattaagctgaatggaagtgctggccaaagttttggtgcttttctctgtcctgggatcactcttgagcttgagggagacagcaacgattatgttgcgaccatcacgagtttcaaatgctgtaaagtaccgaggtttcataaaatatgagcgagagggtacttcttacagagatccaaatgagcgtgtaaaagattggaatgaagttgcaattgaattggttcctgggccactgctaaagacgcaatctgctcggtgcatggattgtggcactcctttctgtcatcagaagagagttgctattgttggcagtggcccagctggtctagctgctgcagaccaactgaacaaaatgggccatttcgtgactgtctttgaacgtgctgaccgtattggaggactgatgatgtatgggttccaaatatgagctgacaaagagggcattgttcagcgacgtgtc

SEQ ID NO: 811 - DNA, 3183 bp, Oryza sativa
atgcctggagcagctactgccgcagttgttgacagccgccagtgcaaacagcacgcggaaggccctgctgcggtcctcgccatcggcactgcaaaccccacaaatatcgtctatcaagatgggtttgccgactactacttcggtctaaccaagagcgagcatcttaccgagctgaaggacaaaatgaagagaatattcaggaatagagaaacgctacatccaccttgatgaaaagctcatccgtgagcacccggagatcatcgacaaacacatgccttcccttgaaaatcgcgtagacatcgttaccactgagatcccgaagctcgcggagtctgctgcacgaaaggccatcgccgagtggggccgtccggccactgacattacccacctcattttcagcacctactctgggtgcagtgctcctagtgctgacctcaagctagcatcactacttggcctcaacccttctgtctctcgcaccatccttagcctccacggttgctctggaggtggtagggccctccaacttgccaaggagcttgccgagaacaatcgcgatgcacgcgttctcatagcctgcgccgagttgacgctgatatgcttctcaaacccagatgaaagcaaaatcgtcggccatggactatttggggatggtgccggagcaatcattgtcggcgctgacccattggtcgatggagagcgcccgctgtttgagatggtccttgcctcgcaaacaacgataccaggtactgagcatgcacttggcatgcagaccacctgcagcggcatagatttccacctctctatccaggtgccaatgctgatcaaggacaacatccggcagtgcttgctcgacacattccgatcggttggaaacatgaatcctaattggaatgacctcttttgggcggtgcaccctggtggccgtgcgatccttgacaacatagaaggcgagcttcagctgcagccaacaaagcttgcagcaagccgccatgtgctgagcgagtacgggaatatgagtggcacgacgattgcgttcgttctggatgacttgcgtcgccgtcaggagaaggagggagatgagcatgaacaacctgagtggggagtaatgctagcctttggaccgggtatcacaatagaggcaatggtgctgcgtcagcacgcggaaggccctgctgcggtcctcgccatcggcactgcaaacccggcaaatatcgtctatcaagatgggtttgccgactactactttggtctaaccaagagcgagcatcttattgagctgaaggacaaaatgaagaggatatcgtgtagacatcgtctctactgaggtcccgaagctcgccgagtcagccacacggaaggccatcgccgagtggggccgtccggccattgacattacgcacctcatcttcagcacctactccgggtgcagtgctcctagcgctgacctcaagctggcatcactactcggcctcaacccttctgtttctcgcaccatccttagcctccacggttgctctggaggcggtagggcacttcaacttgccaaggagctcaccgagaacaaccgtgatgcacgcgttctcgtagcctgtgccgagctgacgctaatatgcttctcaaacccagatgaaagcaaaattgtcggccatggactgtttggggatggtgccggagcaatcattgtcggcgctggcccactggtcgatgaagagcgcccactattcgagatggtcctcgcctcgcaaacaacgataccaagtactgagcatgcacttggcatgcagaccaccgccagtggcatagatttccacctctctatccaggtgccaacactgatcaaggacaacatccggcagtgcttgcttgacacattccgatcggttggaaacatggatcctaattggaatgacctcttctgggcagtgcaccctggtggccgtgcgatccttgacaacatagaaggcgagcttcagctgcaaccagcaaagcttgcggcaagccgccatgtgttgaacgagtatgggaatatgagcggcacgacgatcgcgtttgttcttgatgacttgcgtcgccgtcgggagaaggaaggagatcagcatcaacaacttgagtggggagtaatgctagcctttggaccaggtatcacaatagaggcaatggtgctgcgtaacccactctcatgaagtcttaagcagcacgcagaaggccctgctgcggtcctcgccatcggcactgcaaaccccgcaaatatcgtctatcaagatgggtttgccgattactacttcggtctaaccaagagcgagtatcttactgagctgaaggataaaatgaagagaatatatagagaaacgctacatccaccttgatgaaaagctcatctgtgagcacccggagatcattgacaaacacatgccctcccttgaaactcgcgtagacatcgtcaccactgagatcccgaagcttgccgagtccgccgcacgtaaggccatcgccaagtggggccgtccagccactgacattacccacctcatcttcagcacctattccgggtgcaatgctccaagcgctgacctcaagctggcatcactactcggcctcaacccttcagtctcttgcaccatcctcagcctccacggttgctctggaggcggtagggcactccaacttgccaaggagctcgccgagaacaaccgtgaggcacgcgttcctgtagcctgcgccgagctgacgctaatatgcttctcaaacccagatgaaagaaaaatcgtcggtcatggactgtttggggatggtgccggagcattccacctctctatccaggtgccaacactgatcaagaacaacatccgacagtgcttgcttgacacattccaatcggttggaaacgtggatcctaattgaaatgacctcttctgggcagtgcaccctggtggccgtgcgatccttgacaacatagaaggcgagcttcagctgcagccagcaaagcttgcggcaagccgccatgtgttgagtgagtatgggaatatgagtggcacgacgatagcgttcgttcttgatgacttgcgtcgccgtcgggagaaggaaggagatgagcatcaacaacctgagtggggagtaatgctagcctttggaccgggaatcacaatagaggcaatggtgctacgtaacccactctcatga

SEQ ID NO: 812 - DNA, 2642 bp, Oryza sativa
atgccctcctccgcaagaacctctgcttccaggtcccctcctccctctttctttcttggcgcgtctccccgatttcgcaggttttggttcgatttcctcaccgtttcttgcttgcttgcgatttcttgctttgatgcagaggaggaacatgaagacgaacgcgtgcatcacggtgttcccggtgttcctgtgcgtgatcctcgtggtgctccagggggtgatcaaccacgagatcaacaagcccaagtaccagtgcggctgcgcctgcgtggacgccgcgccggacgggacctgccggaggacggagtgcggcgtcgagcactccacgctggaccaggtggggagctgcccgatcaagagcccgacgccatggccggccttggtccaggtcccccgccccgagtcccgggccgtcaggtgcagggacacagggtcttgccctgcctctgtccttgtcaccggaatgaaccgctcgcttgctcaaatgcgttcaaggcttatcattatggcgtgaaagtgcatcacaaattaataatgaactatttagagtatgattttctgaacacaaacaacaatggtcttgaaataaacatttggtacaactctacatataacaacaacactgcatatgacgtcatctcattgctacgagttccacgcttgggttaacacgtccaatgcatacatgaaatttcttaaaggaagtggagtggagatgctgcttgaatacgttaaagatatgccaaaagtaggaaccaaaccaaaatttgatctctcttctcttcttggtgctctgttcttcacctggatcattgaactactttttccagttatcttaacatatctcgtgtacgagaagcaacagaagctgaaaattatgatgaagatgcacggcttgaaggatgagccttactggatgatatcatattcttacttctttgctctatcagctgtctatatgatagtgtttgtggtatttggatccttgatagggtttaaatttctttaaaacaaataactacggcattcagtttgttttctacttcatctacataaatcttcagatcgcacttgcatttttcgttgcggccttcttttcttctgtaaaaacagccacagtatatatatgtatttggttctggcttactaggggcatttcttctgaggttttttgtggagtctactagttttccgagtagggttggatagtagtcatggaaatcatccctggattttcgctgtaccgagggttatatgagcttggtcaatatgcattctctggaaatgcaatgggaacaaatggtatggagtggactaatctgagggactctgagaatggaatgcgcaatgtcttgattatcatggttgtcgaatgggctattctactcccattagcattttatttggataaaatctcatcattgggtagtggagcccgtaaaacacccatgttcttcttgaaacgtttcaaaaatcgtgctgtatcactgcggaggagctttgggagacaagggtctaaagtagttgttgaaatggacaaccctgatgtttcccaagaagtcgagcaacttctgctggaaccaaatgcaagccaagcaatcatatgcgacaacctgaagaaggtttaccatggaaaggatggaaaccgggacaaacttgcagttcgagggttgtctcttgccctccctaaaggccaatgttttggtatgcttggcccgaatggagctgggaaaacatcatttatcagcatggtacagtggcaacaagggctcattccacccacatctggcacagcattagtccatgggatggacataaacactgatatggatagcatctacacaaatatgggtgtatgcccacaacacgagtatgattcttgctctaaaactaatttatttagtaccatttttatgctactttgggaaacattgactggaaaagagcatctattgttttatgggagattaaagaatcttaaaggcgctgaattagagaagcaggcagttgatgactccctgaagaatgttaacctgtttcacggtggtgttggaaataagcaagtggggaagtacagtggtggcatgaaacgaaggcttagtgtcgcaatctcattgattggggaccccaaggtactaatatgatttatgttgttttcatggatgagcctagcactggactagatccagcatcaagaaataacttgtggaatgttgtgaaggaggcaaagaaaaatcgtgctatcattcttacaacattcaatggaagaggcagaggtgctatgtgatagactcggtatttttgtagatggtggttttcaatgccttgggaatccaaaggagctgaaagctagatatggtggcacatatgtgttcactatgacaacatcttcagaacatgaacaggaggtcaaacagctggttcagcatttgtcaccaagtgcaaacaggatatatcacatatcagggacgcagaaatttgagctgccaaaacaggaggtgaagatagcagacgttttccatgcagttgagaaggcaaaaagacagttcagcatacacgcttggggcctcgtcgacaccaccttggaggatgtcttcatcaaggttgccaaaggagcacaaggagtcaatgtgatcgcgtaa

SEQ ID NO: 813 - DNA, 2566 bp, Oryza sativa
atgctgggagggctcaaggacaagctgacagggaaaaatggaaataagatcaaaggcttggctgtgctgatgagccgaaaattactggatccaagggacttcactgcctcgctcctcgacaacgtccatgaggacaatgagggcagggggatagttggatcagaggcgaatctggagcaggggttgacagatttaccatcggtatcacaaggggagtccaagctcacagtgaggttcaactgggagatggacaagcatggtgtgccaggggccatcatcatcaagaaccaccacagtaccaagttcttcctcaagaccatcaccctccatgatgtccctggctgtgacactattgtgtttgttgccaactcctggatctaccctgttggaaagtaccactacaatcgtatcttctttgcaaacaattaccttcccagccaaatgccagaagcactgaggccataccgtgaagacgagctgaggtacctcagaggggaggacaggcaagggccgtatcaagagcatgaccgcatctaccggtacgatgtttacaatgacctcggtgaaccagacagggacaacccacgccctgtcctaggtggctcgcagaagcacccctacccgcgtcgtggccgtactggccgaattccgaccaaaaaaggacccaaactcggagagcagattatcactgctggaacaaatttacgtgccaagcgatgagcgcttcgcgcacctcaagatgtcagactttgctgggtactcgatcaaggcaattgttcagggcatcttgcctgccattcgcacatatgttgatctcacacctggtgaatttgactcgttcgaggacatcttgaagctctacaggggaggcctgaagcttcccagcatcccagcactagaggagctgcgcaagagcttccctgtccaacttatcaaggacctgcttccggttggaggcagctacctgctcaagttccccaaacctgatatcatcaaagtgcttggaggacagatgaggaatttgcacgagagattctggaattcccaccaaaaagtactcttgatcctagcaagtacggtgaccagactagcacaatcaccccagctcacattgagaagaacctcgaaggcctcagcgtgcaacagaacaggctctacattctggatcatcatgatcatttcatgccattcctcattgacattaacagccttgatggtatcttcacctatgccacaaggaccctgttgttcttacgtgatgatgataccctgaagccactagcaattgaactgagcttgccacacatcgagggcaacctaacatctgcaaagagcaaggtccatacacctgcatcaagtggcattgagtcttgggtgtggcagctggccaaggcttatgttgctgttaatgactccggttggcaccagcttatcagccactggagcccttcgtgatcgctacaaaccgccagctcagtgtgacacaccctgtgtacaagctcctccagccacactatcgcgacacgatgacaatcaatgcattggcacgccagacactcatcaacggcggtggcattttcgaacaaactgtctttcctggcaaacatgctctggcaatgtcttcagcagtttacaagaactggaacttcacggaacagggccttccggatgatctaataaagagctactgatcaaggactacccttatgcaacagatggcctggcgatctggcaagcaatcgagcagtgggtcactgagtactgtgccatctactacccaaacgatggtgtcctccagggagatgtggagctgcaagcatggtggaaggaggtgcgggaagtcgggcatggtgatctcaaggacgcggactggtggcccaagatgcagagcttgcctgagctcaccaaggcctgcaccacaatcatctggattgcatcagcactccacgcagccgtcaatttcgggcagtacccatacgcgggctatcttccaaaccgtccgaccataagccggcggccgatgcccgagccgggttccaaggagtacacagagctggacgagaacccagagaagttcttcatccgcaccatcaccagccaattccaaaccattctcggtgtctcgctcattgagattctatcaaagcactcagcggatgagatctatcttgggcagcgtgacacgccagagtggacatcagaccccaaggcactggaagcattcaagaggttcagcaggcagctggtggagattgagagcaaagtgttgaacatgaacaaggaccccctgctcaagaaccgggtcggtccagccaatttcccctacacactgatgttccccaacacgtcagacaataagggggcggctgaggggatcactgccaggggcatccccaatagcatctcaatatgagactgctgcacgcgtcacgcgctgctgagttggtgtaggtttgtggctgttatcttaggccctagggcacaagcaatgaagctgcatagtactatttgctacaaattatgcaagaataaagttttagtgctaataataaagttactgttgtag

SEQ ID NO: 814 - DNA, 2337 bp, Oryza sativa
atgctggttcagctgcatgatctgcttgagaaggctgactcgaacataattggtatttggggtcaagggggtattggtaagacgacactactacatgccttcaacaatgatcttgagaagaaggtccataactaccagcaggttgtcatatttattgaagtatccaattcagagacacttgacacattggagatgcagaagaccatctccgaacgtcttaatttaccatggaatgaagcagagataactgtgaaacgggccagattccttgttaaggccttgtccaggaaaagatttgtactgcttcttgatgatgtaaggaagaaattccggctagaagatgttggcatcccaactccagacaccaacagccagagcaagctgatcctaacttcacgtttccaagaagtatgctaccagatgggcgcatagaggaacttgattaagatggatcttctggataatgatgctgcatggaaactgttcttgagcaagctaagcaccgaggcttgtgcagcagttgaatcacctagtcccagcaatgttgttagggatcatgccatagcaatagctcaaagttgtggaggtctaccacttgcgctcaatgtcattgggactgctgtggcaggctatgaagaaccaagagattggaattcagctgctgatgcaatcaaagagaatatgaagtttgaaggtgttgatgaaatgtttgctacgctgaaatacagcttcgacaggctcacacctactcagcaacagtgctttctgtattgcactctttttccagagtatggatcaattagtaaagagcatcttgttgattattggttggctgaaggtttgctacttgatgatcgcgagaagggtaatcagataatccgaagtcttatttcagcatgcttgttgcagaccactagttcaatgtcatcaaaggtgaaaatgcaccacataatcagacatttggggctttggttggttaacagggaagatagaagttttgttgttaaagcagggatggccttagataatgctccaccagcaatagaatggaaagaagctacaaggatctccatcatgtctaataacatcacagagctttctttctcaccaaaatgcgaaaacctcaccacactgttaatccagaataacccaaagttgaacaagctaggctggggttttttcaaatatatgcgatccttgaaagtgctagatctatcacacactgcaattacttccattccagaatgtgataaattggttgcattgcagcatctcgacctgtcatacacacatattatgagattacctgagcgcctatggttattgaaagagttgaggcatctggacctcagtgtgactgttgcacttgaagatactttgaataactgctcaaagttacacaagttgagagtgctgaatctcttccgcagccattacgggattcgtgatgttgatgacctgaatctggattcactgagggatctattgtttcttggtatcactatttattcacaagatgtgcttaagaaattgaacgagacccatcctttggcaaaatcaacgcatcgcttgaacctgaagtattgtggagatatgcaatcaatcaaaatttctgactttaaccatatgaagcaccttgaggagctgcatgtcgaatcatgctatgacctgaatacactggttgccgatactgagttgacgacttcttgcctacaagcactgaccctctccgtccttccctcattagaaaatgtccttgttgcaccaatgccccataattttcggtacgttcgcaaattgtccatttcacaatgccccaagttgttgaacatcacatgggtccgaagacttgaactgcttgagaggcttgtcatatccaattgtgatgagatgctgactattgttgaagaagctaacagtactgaagagcagcaatatggaacacaaacaataaaaatgcagggttattattctgaagaacaagacgatcatgcaatggctgagagttcacgcaatgagtggaatgatgattaccaaagcgtcaatggagaatcaaccaatggcgcaacgaggcaacctgacttcccaaagttgagatcaattgtgctgactgatgtgaagaagctgagaagcatttgcacgccaagagattttccctgccttgagactcttcgagtggaagactgcccaaatttgagacgcatcccactgtgcagcactcacaactgtggtaaactgaagcaaatttgtggttcatctgattggtggaagaaactgctgtgggaggacaaggaggcggtggcacatatggagagcaagtacttcattccaatctga

SEQ ID NO: 815 - DNA, 1590 bp, Oryza sativa
aagcggttcgaggcgatgaacgtctccgacgccgcgtgcgccggggtcgtcaagtccgtcctctgcgcggttcccgtcctgtgcaatggatcagcttcagctagttctacttgggaaacatgcaagaatgtgacaatactgaattctccttttcaatctcctttgcaaggtggtgcaacattacctagttcatcatcaaaacttactgatgtttggcagtcagaaaatgacttttgtacatcatttggtggctcatctgacaaccagtcagtatgcttaaatggaaatgaagtttcatttagcacttcagaaccatcacccagtcctaaaggggtgtgtattgagagaattggaaacgggacatacttgaacatggctcctcatccggatggatccaacagagttttcttgtctagccaagcaggtaaaatatggttggcaactgtcccagaacaaggctctggaggcattctgcaatttgatgaagccagcccatttattgatctaactgatgaagtccactttgattctgagtttggactcatgggtatagcatttcacccaaagtttgctaccaatgggcgcttctttgtttcttataattgtgacagaactcagtcatctaactgtgctggtaggtgttcatgtaattctgatgttaactgtgatccttcaaagcttggatctgataatggtgcccagccatgccagtaccaagttgttgttgcagagtactctgcgaaagtctcatcatcaaatgtttcggaggctaatccatccgaggttagaaggatatttacaatgggactgccatatacagcccaccatgggggacagatactttttggacctacagatggatatctgtaccttatgatgggtgatggtggaaacaaaggcgacccttttaatttttctcaaaataagagatcacttttggggaaaattatgaggcttgatgttgatggcgttcaaattgtggggtaattattctgttcctaaagacaacccattcagtgacgaccgagacttacaaccagagatttgggccttgggcttgaggaacccatggagatgtaattttgattctgagaggccttcctatttctactgtgcagatgttgggcaggatttatatgaagaggtagatttgatctcgaagggtggaaactatggatggcgtgcatatgagggcccatacatttatcatccagaatggactcctggagggaatacatcgcttaattctataaatgccatcttccctgttatgggctacagccattctgctatcaacaagaacactgggtctgcatcaattacaggtggatttgtttatcgagggtcttctgatccctgcctatatggaagttcggcgaggacaacaacaaggatgtcttccttctaacatacaaaggcgtctaccgagttgtccggcctagcctctgcggctacacctgtgccgcggagaaaccagagaccaacaacaatggaacgtctccctcaggctcttcatcatttgcttcaggaaggaggatagggaagttggcagtagtaatggcgtttgttttgtgtgcattattcttctga

SEQ ID NO: 816 - DNA, 1569 bp, Oryza sativa
atggcgctcgctctcgctcacctcatccttgccgccgcattgccgctgctcttcctctcacgtgcagatgggggcgaggtgggcgtgtgctacgggagggatgggaataatctgatagatccaccgtccgtggttagccttctcaaggcaaagggtatcaccatggtgaggatctacgacgccgacccgaccgtgctaaacgcgctggccaaccaaaacatcaaggtgatggtggcgatgtccaatagagatctagtagctggctccgccaaggatttcaatagtgcgctcagttgggtgaaaaactacgtgttgccgtactaccgttcctcacaaattaacggcgtggccgtggggaacgaggtgtttcagcaagcacctgacctgacctcacagctggtatcggccatgaggaatgtgcaggcggcgctggcgaggctgggcctcgccgacgcaataaaggtatcaacacccattagttttgattcagtcaaggtgtcattcccgccatccgcaggtgtgttccaagataacatcgcccagtcggtgatgagtcccatgatcgacttcttgcaacaaaccaactcctatctcatggttaatttctacccatatattgcctgggctaattctaatggccaaatctctcgtgattatgctgtatttggccccaacgcctctcctgtggtcgatcaagcaagtggcatcacataccatagcctctttgatgctcagctagatgctgtttacttcgctatagaccatgtttcaggtggtagtgtgagagtctcaatggcccaagcaagacgggggcgcccgtctccaaggatacccgtgaaatgttcagaatgtgggcatccctctggtggtcggctccctcagttgtccacactagatgatgttcaagtagacgtggctacaaaagccaacgcccaagcttttaacaatggtcttatcagtcgtgcactattcggagccaccgcagttgggagcacccggctgcaagcagcgttggattgggcttgcagtaatggtgcagattgtggtgctatccaaccaggcaagacatgctttgcaccaaacaccttggtcgcacacgcatcttacgcgtttaatgactactaccaacgtaagagccaagctagcggtacatgtgacttctctggtgctgcttttattgtctacaagccttcaccaagtatctgcgacccgaacccaagctggtgcattgcgaaaccggaggttggggacacacgtttgcagaatgcgctagactatgcatgcggtagctgcgcagattgcagcgctatccagcgtggtgcgcaatgctttgaccctgacaccaaggtagcgcatgcaacctatgcattcaacgactattatcagactaccggtcgtgccagtgggtcatgtgattttaacggcgctgctaccattgtcacacaacaaccaataaatggttttcaccggtgctcatttaatcatattttgcagagattggaaactgcgtactctcaccaaacaactcttgaatgtacagaagactcggcagtaagaggatgggattga

SEQ ID NO: 817 - DNA, 1332 bp, Oryza sativa
gaagagagggtaactgtattggtcattggtggaggaggaagggagcatgctctttgttatgccttggagcgctctccatcctgtgatgcagtcttctgtgcccctggtaactctggcattgctcaatctggagatgctacatgtataccggacctggacatatcgaacagcgacgcggtcatctcgttctgtcgcaactggggagtcgggttggttgtagttgggcctgaagcaccccttgttgctggccttgcaaatgagcttgtcaaagctgggatacctacttttggtccttcatcagaggctgcagcgttagaagggtcaaaagacttcatgaagaagttgtgtgataagtaccacattcccaccgcaaaggatccttcagatgctaagaaatatgttgaggagcaaggagcccctattgttgttaaagccgatggattggcagctgggaaaggtgtagttgttgctatgactttggaaaaggcatttgaagcaatagactctatgctggttgaaggttcattcggttctgctgggtcacgggtaatagttgaagaatatttagagggggaggaggtttctttctttgctctagtggatggagaaactgctttgcctcttgaatcagcccaggaccataaaagagttggtgatggcgatgttggtccaaatacaggtggtatgggtgcatactcccctgcaccaatagtgacggaaaaactcaagtgcaaagtgatggagagcatcattgtcccgactgttaaaggtatggcaactgaaggatgcaagttcgtcggtgtgttgtatgctgggatcatgattgagaagaaatcgggactgccaaagcttattgaatacaatgtgcgatttggtgatccagaatgtcagcaggttctgatgatgcggttacaatccgacctcgcacaggtcttgcttgctgcatgtaggggagaactggggtcagtctcactaacctggtcgcctgaattggcaactgtggttgtgatggcaagtgaaggttaccctggtgtttacaagaaggggacagtaataaaaaatatcgatgaagctgagcaggtctctcctgcagttaagatctttcatgctggaactgccctagatcgagatggaaacttcgtcgcggcaggaggccgtgttcttggtgtaaccgcgaaaggtaaggacattgaggaagcaagggcaaaagcatatgacgctctcgacgttgtcgactggccagaaggatttttcaggcatgacattggttggagagcacagaaatatcggcgcatggttgcacactgataggcatgtactgtaaatctgtaa

SEQ ID NO: 818 - DNA, 1277 bp, Oryza sativa
atggatttcttcagtgaatatggtgactccagccgatacaaaattcaagaaatcgttggtaaaggaagttatggagttgtttgttcagctattgaccaacataccggtgacaaagtagcaatcaagaaaatacacaatatctttgagcatctatctgatgctgctaggatcctccgtgagatcaaacttctccggcttttacggcatcctgatattgtcgagatcaaacatataatgttacctccatctagaagggacttcaaagatatttatgttgtcttcgaactgatggatacagacctccaccaggttattaaggctaatgatgacttaacgaaggaacatcatcagttctttctgtatcaaatgcttcgagcattgaaatatatccatactggctaatgtttatcatcgtgatttaaagcccaaaaatatattagcaaatgctaactgtaagctcaagatatgtgattttggactagcaagagttgcatttaatgacactcctacaacagttttctggacggactacgttgcaactagatggtacagggctcctgagctgtgtgggtctttcttttctaagtattcaccagctatagatacatggagtattggttgcatttttgcggagattttgactggaaaacctttgttccctggtaaaaatgtggttcatcaattggacttgatgactgatctcttgggtacaccatcaatggatgctatttcaaggcggaatgacaaggcaaggaggtatctgagcagcatgaggaggaagcagccagtacctttttcagaaaagttcccaaatgtagatcctttggcactcaagctcttacaaaggcttctagcatttgatccgaaggatcgacctactgcagaagaggcatgcaagctctacttgaattagttggctgatccatattttaaaggccttgcaaaagtggagagagaaccatcatgccaaccaatttcaaaaatggagtttgagtttgagcgaagaaaggttaccaaagatgatatcaaggaacttatattccgtgagatattagagtatcatcctcagcttctgaaggattacatgaatggctccgaaaacacgagctttctatatccaagagtgctgttgataatttccggaggcaatttgccatcttagaggaaaacggaggaaagagtggtgcactagataggaagcatgtttctcttccaagggtccggtattaccattcgagaatccaggcgccgcagatccgcacagcgcacggagggtg

SEQ ID NO: 819 - DNA, 1010 bp, Oryza sativa
atggagtactcttacagctacaggttcatgcttgtatgctctgttcttgtactgtgccttaatactcggggtgcgagatgccagttatccgacgatttctacgactacatatgtcctgatgtgtacaccgttgtccagcagcatgtttatgctgccatgaggactgagatgaggatgggtgcctccctcctaaggctccatttccatgactgctttgtcaatggggtgtgacggttccatccttctggacggtgacgacggcgagaaatttgcacttcccaacaagaactctgtcagagggttcgaagtcattgacgcgataaaggaagatctcgagaacatctgccctgaagttgtttcctgcgccgacattgtagcccttgcagctggctatggagtactatttagtggaggcccttactatgacgttcttctcggtagaagggatggtcttgtcgcaaatcaatcaggagctgacaacggcctcccttcaccgttcgaacccatcaaatcgatcatacagaagttcaatgatgtcggcctcgacacaaccgatgttgtcgtcctatcagaggagggcacacgatcggacgagcccggtgcacgctgttcagcaaccggttgtcgaccacctcaagctcagccgacccgacgctggacgccaccatggccgccaacctccagagcctctgtgccggtggagacggcaacgagaccaccgtgctggacatcacctccgcctacgttttcgacaaccgctactaccagaacctcctcaatcagaaaggcctcctgtcctccgaccagggcctcttctccagcgacgacggcatcgccaacaccaaggagctggtggagacttacagcgcagatgcccacaagttcttctgggattttggcagatccatggtgaagatgggcaacatcagcccactcaccggtgacgacggccagattcgcaagaactgcagggttgttaattaactgagcttcagtgtgttgaaaagata

SEQ ID NO: 820 - DNA, 997 bp, Oryza sativa
atggcttcatccaagactgttctttctgcaattttcactgcttctctgtgcttcactgtagctcttgctttccctgctcaccatgaggatcttcacccagttgtgcagagcccaccaaagccagttctttctccagattactataaggctacatgcccacaagctgatgagattgtggtctctgtcctaaagaaggctattgccaaggagcagaggattgctgcttctcttctcaggctcctgttccatgactgctttgttcagttcagggatgcgacgcgtcggttttgttggatgacagtgaagaattcgtgagcgagaaaaaggctattcctaacaaaaattctattagaggatttgaagttatagacgagatcaaggctgcacttgaagaagcttgtccacacacagtctcttgtgctgacaccattgccctagctgcgagaggttcaacagttctggagcggtggcccatactgggaacttccactaggaaggaaggattcaaaggcagcatatatgaaattagcaaacaagaaccttcctccaccaaatgcgacactgcatcgtcttgtgaaattctttgaaaggcaaggactggataaggtggaccttgtggcactgtcagatcttcttgttaaccacacggcagttcttgcggatttctccgtcgtaaccagtgaggggattgatgttccccatcttggttatcgagttcacgtagtgctcgaagaacagcggttcgttttctgcatagcttctgacgagacccgcgatctgcgggtctcgtcctgtccacagaacttcatctgaattgaggagccctcttccctcgatcagcagcttgtaataggtgttgtcgaatttcgaaggggtagcaaactccagtgggcgtaagttgttgtcaccgccgttgcgtgggcatgttgaggccagtgtggagtagaacattctctctagcgttttgtcaggctggttgtctctgtgctggttgtag

SEQ ID NO: 821 - DNA, 947 bp, Oryza sativa
atggcgtccgaacaacaacgccggcgatcaccacctaccatcctcgccgccatccttcttctctccttcttggcgacggccaacctcgccggcgccatcgatccagccggaaggagacggaacgtggtcgtcttctggggaggcaacaagaacgaaggcagcctccgttcagtctgcgacagtgactctacaacatcgtcatcatctccttctacagcctcttcggccatggccgctactgggacgacctctccggccacgacctccgccacatcggcgccgacatcacccactgccatttcaaggccgtctacgtcctcctctccatcggcggcggcgatggaaaagactactccctaccttcctccaaatccgccgccgacgtcgccgacaacctctacaactccttcctcggcggcagccgcccgggagtctaccacccattcggcgatgacgtcacagtcgtcggcattgacttcttcattgaccgcggtcaacccgaccactactacgagatcgccgagcggatcaactacgacacccgccactggcgtgaccccatcgggttcaagctgacggcgacggtgagttgtgcgtacgacgactctgaccccaggatgaagaaggcgctggaaacctaccttttccggcgaatccacgtcaggttctacgatgatccgaggtgttcatacaaccatgccgggctcgccggcgtcatggcgcagtggaacaggtggtcggcgagttacccttataatgggaagatttacttggggctcgcggcggcgaatttgacggggaagaatgacatggtcgccgtcggtgagctctaccggaagctgctgccggcggtgcagaagacggatacctacggaggagtgatgctttggaacagctactatgactccatcactcactacggacggtatgtcagtgcctgggcttaa

SEQ ID NO: 822 - DNA, 914 bp, Oryza sativa
agcaaaggattcaagaagtggctgtatatagttgtgattccagtggctggtttgattatgcttgctggcatggcatggatgttcttgccatgccgcaagaaatccgttgcgactattggcccttggaggactggactcagtggccagctgcagaaggcatttgtgtcagggagtgccccaattacagcgtccagaactggagcgtgcttgtgaggacttcagtaatattgtggcaagtcatccatactacactgtctacaagggaaccttatcatccggtgttgagatcgccgttgtatcgacaacgatttcacgaataaatcataagaatttcatcaatctgctggggttttgtgaggaggaagaacctttcacgagggtgatggtgttcgaatacgcaccaaatgggacgctttatgagaatctccatgcttcacattcaagtgataacatgctggtaaattatttgtgcagatgaggcctttgatcacatcgactggagaagtagaatgagaataatcatgggaatagcttactgtattcagcacatgcatgagctcaaccctgccaacgtgcaccctgatctgcattcaagtgcagtatttctttctgaagattgtgctgcaaagaacgtttacagttttggcatactgcttcttgaaatcatctcagggaaacccccttactctgaaaacgagggctccctggcgaatctgaaagaaaatgagctagatgtgatctgtcagataatcatggaatgcatccagagtgacccaacgaagagaccaggcatgagggagatcaccacaaggctgagagagaccatagccatttcgccggatgcagcaacgcccagattgtctccgctctggtgggctgaagtggaggtcctctcaccagtggagccaaggtag

SEQ ID NO: 823 - DNA, 876 bp, Oryza sativa
  N_region (336)..(336): n = any nucleotide
  N_region (338)..(338): n = any nucleotide
  N_region (402)..(402): n = any nucleotide
  N_region (413)..(413): n = any nucleotide
  N_region (586)..(586): n = any nucleotide
  N_region (596)..(596): n = any nucleotide
  N_region (605)..(605): n = any nucleotide
  N_region (628)..(628): n = any nucleotide
  N_region (661)..(661): n = any nucleotide
gagatcgtccggtacggcgagctggtggcggcgacgtacaaggcgttcgacctcgacgccgcgtcaaagcgctacctcaactgcaagtacggcaaggcccggatgctcgacgaggtcggcatggccggcgcagggtacgaggtcacgaggtacatctacgccgcgcccgacctcgccgccggcccgccgtgcccgagccggtggatcgggtacgtcgccgtggccacggacgaggcggtgcgccgcctcggccgccgcgacatcgtcgtgtcgttccgcggcacggtcaccgggtccgagtgggtggccaacatgatgagctcgctggcgccggcnangttcgacccggccgacccgcgccccgacgtgaaggtcgagtcgggcttcctctccgtctacacntccgacgacgncacctgccgcttcacctgcggcagctgccggaaccagctcctctccgaggtgacccgcctcatcgccaagcacaagcacgaggacgtcagcgtcaccctcgccggccacagcatgggcagctcgctggcgctgctactaggctatgacctcgccgtgccgatcaccgtcttcntccttcgccnggccctcgntgtcgggaacacggcgttcaaanggacaggtgcgacgagctcggcgtcaaggtgcntcagggtggtaaatgtgaacgaccccatcaccaagctccccggcatcttcctgaacgagaattctagggttttgggaggcaagctggagctgccatggagtagctcatgctacacacatgtgggagtggagcttgccctagacttcttcaaggcgagagacccagcttgtgtgcatgacttggaagcatacttagggttgctcaagtgccctaag

SEQ ID NO: 824 - DNA, 834 bp, Oryza sativa
  N_region (22)..(22): n = any nucleotide
atggccgcgcgcgtgctccccntcctcctcgtcgtcgtcgtcgccgcggccatggcgagagcccccacggcccacgcgtggggcaaggagggccactacatggtgtgcaagatcgccgagggtttcctgacgaaggaggcggcgacggcggtgaaggagctcctccccgggtgggccggcggcgagctcgcggaaacgtgctcgtgggcggacaccgagcggttccggtaccggtggtcgagccccctccacttcgccgacacccccggcgactgccagttcaactacgcccgtgcaggggattgccacaacacaaacggtgagaaggacatgtgtgtggtcggagcgatcaacaactacaccaacgcgctcgaggactcatcaagtccatgatccaaccgagagcttgatgttcttggcacacttcgtcggcgacgttcaccagcctctccactgcggccacgtcaaagatcttggtggcaacaccatcatcgtccattggtacacaaggaagagcaaccttcatcacgtgtgggatgtgaacgtcattgaaacggccttgaaggaattctacaacgaggacgatgagtggtccaccgaggagaagcagtgggagacttgccgtagccggacaaagacttgtgccgataatacgccgaggagagtgcaaagctcgcgtgcaaagcgtacgagggtgttgagcaagaatccaccttagaaggatgactatttcttcgctgccctgcctgttgttcagaagaggattgctcaaggtggcgtgaggcttgctgcaatactcaaccggatcttcagcgggaacaaggttcagagtag

SEQ ID NO: 825 - DNA, 751 bp, Oryza sativa
tacaaagccttcgataagctggagggtgtcgaggtagcatggagccaatcccggatcgatgactctgtcatggggtcctctaagaagatgaagcaactaaacacagagattcaacttttgaagacactcaagcataagaacattgagaaaatgtttgcttcatgggttgatggggagaagaagactgttaacataatcacagagttgttcacatccgggagcttgacacagtattaccgcagaaagcacaagaaagtgaatatgaaggctatgaaacgatgggcaatacagatattaacagggctagaatatctgcacagtcagaagccagcaattatacacagggatttaaaatgtgacaatatattcataaatggaaatcatgggaaagtgaagattgggcaccttagaatttatggcaccagagctgttaactgggcattacaatgaattggttgatatatattcatttgggatgtgcatgcttgaaatggtgacatgcgaatacccatacagtgaatgtcaaggcatggcccatatattcaaaaagattgatgagatatagggtaagaaaccagctgcgttctacaaaattaaagatgcagaagtaagatctttcatagagaactgtttagctccagtagagaacagaatgtctgcaacagagctgttgaaaagctctttcctccaggatgatgatcttatctcagtctctctggtcaagaatatgtctgaagatgggcagcagcct

SEQ ID NO: 826 - DNA, 734 bp, Oryza sativa
atgagaaagggcccgtggacggagcaggaggacgtgcagttggtttggttcgtgcggctgctgggcgaacggcggtgggatttcttagcaaaggtgtcagggtttgcagcgcagcgggaagagctgccgtctccggtgggtgaactacctgcatccagggctgaagcgagggaggatgagccccgaggaggagaggatggtggtgcagctccacgccaagctcggcaacaggtggtctcgcatcgccaagagcattcctggccgcaccgacaacgagatcaagaactactggcgcacccacctgcgcaagctcaagctcaaacagcaaaagcagcagcagtccgacgaccaccacaacgacaacgacgacgacgacgaccgcaactcctcctcctcttcgtcctcctccaacagcaacagcaacctgcagcagcagccgcagccagaggatgagtcgtcggccagtggcagcctgcaggcccaacatcatgaggaccagcaccaactgttccttcatcctctctggaacgacgacatcatcgtcgacgtcgactgctggagcagcagcaccaacgtcgtcgctccgccgccgatgcccgcctcgccgctctgggatatcgatgacgccttcttctgctcggattattcgctacctctctggggatagtatatatcatccatcagccgccaagacgatgacgactacatcaactcgatcgatcgatgcctcctaa

SEQ ID NO: 827 - DNA, 713 bp, Oryza sativa
atggcgagcccgcagtgctgcgcgaacccaccgacgctgaacccggccggcggggaggggaaggtggtggagagcttcggcgggatcaaggcgtacgtcgccggcgccgcggagtccaaggccgccgtcgtcctcatctccgatgtcttcgaggaagatagccgacaaagttgcctcgtctggatactttgttgtggtgccagatttcttacatggggatcctttagtacctgaaagtactgagaaaccgtttcaaatgtggataaaagaacatggcccgaaagcatttgaagaggcgaaaccaattattgccgctctgaaggagaaaggagtgtctagtattggggctgtaggttattgctggggtggcaaaggtggtggtagagttagtgaaagctcatgagatccaggctgctgtgatgtgtcacccctcttttgtgactgttgatgatatgaaaggtctagatttcagaggtcaaatgcccaattgctatacttggagctgaaattgatcgtatgtccccaccagaagtggtgaagcagttcgagcaggttctttcttcaaagtcagggttggccactttgtcaagatcttccctggggttgaacatggatggactgtgagatacaagaatgatgatgcagctgctgtcaagagcgccgaggaagccctggcggacatgattgactggtttaataagaacctgaagtga

SEQ ID NO: 828 - DNA, 688 bp, Oryza sativa
atggggcagctggagctgtcccaccgggtggtgctcgcgccgctgacgcggtgccgctcctacggccacgtgccgcagccgcacgccgcggtgtactactcgcagcgcgccaccaacggcggactcctcatcgcggaggccactgtcatctcccccaccgcgcagggctacccggacacccccggcatctacacgcagcagcagatcgaagcgtggaaacccatcgtcgacgccgtccaccgcaagggcgccctcttcttcctacagatatggcacgtcggcagggtctccaccacaggatttccagccaaatggacaggcgccgatctcgagcaccgataagctctactgccacatggtggagccaggaatggccatcgtcgaaggacggaggaagatcacccatggtctcctgccattcaggaagcagttcaatggcactttcatcgctgctggcgggtatgaccgggaggaagggaacaaggtggtggctgatggctatgccgatctcgtcgcctacgggaggctcttcttggctaaccctgacttgccgaggaggtttgagcttgacgcaccattgaacaggtatgacaggtctaccttttatacacaggatcccgttgttggttatacagattacccttttcttgaggagattgatgaggagtcaacaactacctatgcttaa

SEQ ID NO: 829 - DNA, 667 bp, Oryza sativa
atgagggtttcttcgctccttgtcgccgtggtcctcctcgccgcgctctcgttccaggcgtgcagcggccatggcggcatcaacgacggcgacgggcaggtcgacgccccggcaacgcctgcgtcgtcgtccggcgtgcggtccaaggggctgatcgccgtgaaggtgtggtgcctggtgatcctgctggtgttcaccttcgccggcggcgtctcccccctgctcatcgtcgcgctctgtttccactccgtctttgaagggatcgccattggtgtctcagaagagcgaggcgtggaggaacctgtggacgatcgggctgcacaagatattcgcggcggtggcgatgggaatcgcgctgctccggatgatccccaagcgccccttcctcatgaccgtcgtctactccctcgccttcgccgtctccagccccgtcggcgtcggcatcggcatcgccatcgacgccacctcccagggccgcgccgccgactggacctacgccatctccatgggcctcgccaccggcgtcttcatctacgtcgccatcaaccacctcatcgccaagggctaccgcccccaccaccccaccgccgccgacaagccgctcttcaagttcctcgccgtcctcctcggcgtcgccgtcatggctgtcgtcatgatctgggactga

SEQ ID NO: 830 - DNA, 653 bp, Oryza sativa
atggcgccggcgaaggtgtacgggccggcgatgtcgacgaacgtgatgcgcatcctggtgtgcctggaggaggtcggcgccgagtacgaggtcgtgcccgtcgacatgtccaccggcgagcacaagcgcccgcctcatatctcccgtaacccctttgggcaggttccagcgttcgaggatggcgacctgactctgttcgagagtcccgcgcaatttcaaagtacatacttcgcaaacatggatctgacctactaagggagagcaacctctctgagtctgcaatggtggatgtttggctggaagtcgagtcgagccatttcgacggcgcgatgtcgccgatcatcttccagtgcttcatcgtccccatgttcatgggtggagcaactgacattggagtggtcaatgagagcttagagaagctgaagaaagcccttgaagtctacgaggcgcagctgtccaaatccaagtacttagccggggatttcattagcttggcagatatcagccatttcccgacggtttattacctgctggcatctgcccatgcttctgtgctcgaagcctatccgcgtgtgaaggcttggatcgatgatgtgatgcagaggccgagcgtgaagaaggtgacagaggctctgaagatgccgtctgcttaa

SEQ ID NO: 831 - DNA, 641 bp, Oryza sativa
cagggttgtgatgcctccatccttctgaacgctacggactccatggagagcgagaaggatgccgagcccaacgccaccctcgccggcttcgacgtgatcgacggcatcaagtccgagctcgagcgcagctgcccggccaccgtctcctgcgccgatgttctcgcgctcgccgcccgcgacgccgtcgcgatgctcagcgggcccagctggggcgtgctcctcggccgcaaggactccctcaccgccagcatagacatggccaacaaggatctcccgaacccgaaagacagcctggccgaactcatcaggatgttcgagaagaacggcctcgacgaacgcgacctcaccgcgctctccggtgcgcacaccgtcggcatggcacatgactgcaagaactacgacgaccgcatctacagccgcgtcggccagggcggcgacagcatcgacccatccttcgcgacgccggccaagttcgacaacgcctactacatcgacttgcttgcgaggcgcgggctcctcacatccgaccaggagctctacacccaggggtgcgagaccggcgacctggtgaagacgacttcgtgagggccatggttaagatggggaacatacgcccaaagcattggtggactccggcggag

SEQ ID NO: 832 - DNA, 640 bp, Oryza sativa
gggtgcagagttctttggcacattcacactgatcttcacagtgctgtccaccatcatcatggatgaacaacacaaaggtgtagagtccctcctcggcatcgcgacatcggcaggattagcagtgacagtactggttctgtcactcatccacatttcaggctgccacctgaacccggctgtcagcattgccatgactgtctttggtcatcttcctcctgctcatcttcttccttacattgctgcacaaatcctcggctcgatcaccgcatcgttcgccgtcaaagggatgtatcatccggtgaaccccgggattgtgacggtgccaaaggttgggacagtggaagcattcttcctggagtttgttacaacgtttgtcctactgttcatcatcactgctcttgccactgaccccaatgcagtaagcagtcggagcaacaatcatgatgaacgctcttgtcgcaggtcgacaggagcatcaatgaatccagcaagaacacttggcccggccattgcaacagggagatacacacagatttgggtttatttggttgctaccccacttggtgctgtagctggagaagggttttattttgcaatcaagctgtagttaccttcaggcaagaacaatattcaatcgtag

SEQ ID NO: 833 - DNA, 606 bp, Oryza sativa
ccggtgtcgtggttgagctttctcctgcttctcgtgactggaggagggataattgtgtactacgacaaggaaaaaaagcgtcacattgaaggtagattactatggctgtcaagcaagaaccatcagtaggcactgcagccatcggtggtccattcaatcttttgaaccatgatgggaaacctgtcacgcaaaaggatttctttggcaagtggactctgctatattttggcttcacacactgccctgacatttgtccagatgaacttcaaaagatggctttggcaattgataaaataagttgtgccagttttcatcacagttgatcctgagagagatactgtagagcaagttcgtgactatgttaatggagtttcatccaaatctaataggactaactggcacaactgatgagataagaaaggttgctcgtgcttatcgagtttactatatgaagacagaggaggagggttctgattatctcgttgatcactcaattgtcattacttgatgaatccaaagatggagtttgttaaattttacggcaagaactacgatgcagattctcttgctgatggcatcatcaaagaacttaaagggcaccaataa

SEQ ID NO: 834 - DNA, 531 bp, Oryza sativa
atgggaagtgtaccgaagaaaggagctgcctttgctctggcggtggccattgcgaccatcgtgatggcgaccaccacgacgatggccgccgacctgtcggacgccgagaaggcacagttcgtcaagctccacaacgacgcccgggccgcggtcggcgtcaaggcgcaggtgtcgtggagcgaggcggtggcggcgaaggcccgggagcacgccagcacgtgccggacggaccacatacaggggccctacggcgagaacctgtggtgggggtggagcagcaccgccggctgggtcgggaagccagcggacgcgatggggagctgggtgggcgagaagccgtactacgatcgcagcagcaacaaatgcgtcggcgggaaggtgtgcggccactacacgcaggtggtgtggagccgcaccacccagatcggctgcgcgcgcgtcaccggctgcaacatcaacggtcgcagcagcacgctgatcgcctgcaactacaacccgcgtggcaacattaacggggagcgcccctactag

SEQ ID NO: 835 - DNA, 522 bp, Oryza sativa
atggtggtggcggtgctgtgtgcggtagcaactatggccatggcacaagaggcgtccaacgtgcgtgccacgtaccactactaccgtccggcggaaaacaattgggatttgggggccccggccgttagcgcgtactgtgccacgtgggatgctgacaagccgcttgaatggcgccagaagtatggatggaccgccttctgtgggcccgttggtcccactggtcaggatgcatgtggcaaatgtctctcgttgcaggtgacgaacacggcgacaggggatcagatcacggcgaggatcgtggaccagtgcgccaatggggggctggatttagactgggacaccgtcttctccaagatcgacagcgacggtcaaggctaccagaatggccacctcatcgtcgactaccagttcgtcgactgcggcgataactagcagctaattaaccactcttataaacttccctacatatatatacacatttcggacagaggagtaattaatatatctctgcctgatgaatga

SEQ ID NO: 836 - DNA, 486 bp, Oryza sativa
  N_region (27)..(27): n = any nucleotide
ccgaagcggacgacgaagaagaggccntggaagtgctgcgacaacatccggcggctgccgccgaggatccacccgccgttctggcgctgcgacgacgagctcaagcccggccagtgcttcgccgcgtgcaaggcttgccgggaggcgccggggccattcccggggccgctcatctgcgacgacgtctactggggcgccgacccgggtcccttctgcacgccgcggccgtggggggattgctgcgacaacaccacctgcaccaagtcgatccctccaatctgcagctgcggcgacaaggtggcggcatgcgacggcgcgtgcaaggattgccagccggtggcgtcgtcgtcggagccgcctcgcttcgtctgcaaggatcagttcaccggacagccagggcccaagtgcacaccatgcactcagaactgatccttgcagatatgatcgatgtccgtcaataactccagaccaagcagaagtacttga

SEQ ID NO: 837 - DNA, 348 bp, Oryza sativa
aagttataactgatgcctttgtcaagtcgggcctagtacttgaaagggatgcgaggcaagaattgaagagcaatatttgatgctaaaattgctgttttcttttcaacttcagttgcacgtgaccataatgaatgtgaggcacaggaagagcgctgcagcaagagatggaaccaaagaaacgactcattcgatgctcggaatattttcagaaaatatggggaacatgactggggcgaatacctcattcccgagatccatctttcgcagcgattcaagttcgatgaaagagggtactactactgctgctcttcaatccccttgcctgcggcggagatgcaaacggagtga

SEQ ID NO: 838 - DNA, 306 bp, Oryza sativa
atgggtttgagctgcttgggtgctgggatgatggggaagaagaaggtgtcgccggcgaagcagcagcagcagcaacctgtagatcagaatcagcagcagaagaatctgtactgctcgaagtcgaaggatgcagatgctgctgaagttggtgagaaggagaagaagattggaggaggatcagatggtgatcatcatgctggtgtggagaaggtcgagatgaggaagaagaagagtggatcatcatcatcatcagctccaatcttgatgtaccagttccccttccactcccgccctggcttgctctga

SEQ ID NO: 839 - DNA, 576 bp, Oryza sativa
atggcaggcactaagcttgcagctcttgggtttattgtcctcttgagcattggattagctagtgctgtaagggtagaaagatactcaaatgcccaaggttcgggcacaggaagtggagagggcacaggaagcgtgaatggtgcgggagctgggttgggaagtgggactgggtctggtagaagtggttacaatggtgcccatgcaagtggtggaggaggaggcggaggcggtggctacagccaatatggtgggtcagggtctggtagtggatctggttcgggctcaggctctagccagaccagtcaaaatgggtattatggttatggtggatcatccagtgctggcggtagcggtgctggtgctggagctggacaagctggtggttactggccatcctatggtcatgggtctggtagtggtaccggctcaggctctagtgaggctactaatacctggtatggacagtatgcaaatgcaaatgctggtggcaacggtggtggtaacggtcagggtcaatatggtggcagcggtgctggtgtaggttccggatctgggtttggtgatgcgaacccttaa

SEQ ID NO: 840 - DNA, 318 bp, Oryza sativa
atggtgagaagtgcttccgaggcgaagaagaagatggctcaccttgagaagacaattgacgagaaagaagaagagatatcagctaggcaaacggacggagccagccacgggcgtcgcgggcactggttgatgacttcagctagcaagggggcgccggcgcgcctgccgaggcggcgaaacggcggcgctagcgccaaccgccgccaccacccggagcccgtcacagtcgatgtcgtcgttgaggtcgaggagttgagaggagcagccgatgcgcgctgtgaaggaggagccaggtgcctgtctgtcgccgccggctga

SEQ ID NO: 841 - DNA, 2745 bp, Oryza sativa
atggcagaagctgcagtagtccaggccctcatcaagattggcacgacttttggagacgcggcattgcaatcgctcaaagacatcataaagaaagaagtagctctgttacaggaactaccagagctcgcaaaatccattgggagggaactggacatgatcaatagcttccttatgcaagtgcgggcgaagatccacagcactgacaatgaagttctgaaacgctgggtggtgagagtacgccaggtggcctaccatgttgaggacataatagatgagtactcctacaatgttgctctgctgcaggaggaaagctatttaagtagaatgatgcgtgcgacctactatggtgtaactttccatggcattgctactggactgaaagatgtacaaaatgatatcaagcaattgtcggatactaagacaaaatttgcagagttcttcaatgagttacatagcaacactggtagtaacacacaatctcatctatcacgtgatagatccctccatacagttaaagaaggtattgttggtatgacagaagaggtagatttactgaattcatggttatcacccaatgatctcactagagtagttttatctgtgtggggtctgtttgggctggggaaaacaactctggtgagaaaggtgtatgaatctgtgaaagagcagaagatctttgactgctattcttggattgaggtaccacacgagtacaacaatgatgtaatgttaaggcagttaataagggacctatcacaagaccaaagccaaatacctggaaacctggacagtatgtatggcagccagctggttgatatattatgtgtggtgttatccggcagaaggtacttgattgtgctcgataatgtctgggatgccgatgcatttcatggcatatcaagctttttgatcgacaatggtaatgctagtcggataatcatcacgactaggacaagtgatgttgcttcactggctcaagacacatacaagctcaagcttaagcccttgggtgatgaggctgcaatggaactattttgcagaagggcttttcataataaagacatgagatgccccccacacctgaaggatctgtgcgaacagattgtgagaaagtgtggtggcttaccatcggccatctatgctataggcaatgtgcttgctgtcagagaacagacagaagtagcatggaaaataatgaatgatcagttccagtgtatgttagaggacaaccctggcttgggagaagtgaggagtgccctgagtgttagcatcttgttccttccaaggcatctcaagaactgcttcctctattgcagcttgttcccacagaactaccggttgtcacgtgaaagccttgtgaagctgtggacagcagaaggattcataacgaagagaggaagcagcactctggaagaagttgcagatgaatacctgatggagctgatccgaggaagcttgttgcaactcctggagacagatgaaattggcagagtagccttctgcaagatgcatgacattgtgcgtgacttggctctgtcctactccagaaaggagatgtttggcctgagtgatggagacctccaaacagatcaaaaggaagatgttcgtcgcctgtcaatatccaagtgcaacaagaatgtgggatcaatcttggagtttcctcgccttcggaccttcgtcgctaccaatggaggcgcagagtcagacctgttacattctctcatacaaaaatcgaagtaccttgctgttctggagctgcaagactcacccatcgacataattccagcaaatattggagagttgttcaacctgcactatcttggattgcggaggaccaatgtgaaatcacttccaaaatctatcgagaaacttaccaatctggagactctggacctgaaatacaccggggtagatgtgctgcccaaggagatctgtaaactgaagaagctgaggcacttgttcgccgagaaactcattgaccgtaatcgccaagtgttcagatacttcaaaggtatgcagctgccacatggattttcacacatgaatgaaattcaaacccttgaaacagttgaggcaacgaaggactccattgagctgctggggaagctgactgcactgagaaccctgtgggttgagaatgtgcatcgcgctgactgcacaaagttgtttgattcattgtcagaaatggagaatctctcaagcctgctcgttagtgccagcgatgaatatgaggtccttaactttgatgcattcagtccttctgagatgaagctccagaagctcatcattagaggctgcctcgagaatgacacatttgacaagcttatgttcaaaaaccttggctcacacatcaaatacttgtcactaagttcctcgagactcggcaatgatccgttcccgctcctcgcaaagaacatgaagaacctcatctacctgagcatcaggaagtggtgctgtgctgaggaggtggctctccgtgaagggtggttccctcgcctgacaacactcttccttggtgacatgaagcaggtgcacactattgtcatcgagccgtcagcggttgagagcttggaggcgctgtacttggtttctctgacggctatgacagcggttccgacaggcttggagctcgttgggtcgctcaggaagctcgttgtgtgggggcagtcagacgatttcaagctggagtggaagagggagaactgggaaacgaagctgcgccatattccggaaattcgcatttaa

SEQ ID NO: 842 - DNA, 2412 bp, Oryza sativa
  N_region (1281)..(1281): n = any nucleotide
atggcaactggcaagacaaggtgcgcctccttcacagtgtgggccacacggacgcggggcgcagaaggtcgcatcaggtttcccgcaccgaggcgcccgcccggacccacctcccaggtcccgcggctgctgcctcgcctcgcctttggcgggctcggacgcccacacgggtcaacgcctagaggtggaaaccaccttaaaacgatttttgctacttccgtttcacaaatggagagagagagagagcaggagtatgtccaatatataggtagtcgcctagtccctcttaaaatattccggcatttcaaccccacccactccgcacccccgcaagtcaactctcttccttcctcctccgtgcttaatgctctccgcattataaccacccacctctcctcctccccccacctcctctctctctatctccatctccaccgctacgcttcccagccatgggcaactccctcgcctgcttctgctgcggcgcgcgccggcggccgaggcggccgccacgtcgcccccgccgcgctcccctccgacccggcctacgacgagggcctgggccactcgttctgctacgtccgccccgacaagttcgtggttcccttctccgcggatgatttggtggctgacgcgaaggcggccgcggcggcggagggggaggcgaccacgttccgggcgatatccggggcggcgctcagtgccaacgtatccacgccgctgtccacgtccgtgctgctgctgatgccggaggagtcgtcggcgtccgccaccgcgtcgtcggggtttgagagctcggagtcgttcgctgctgtgccgctgcagccggtgccgaggttctcgtccgggccgatctccgcgcccttctccggcgggttcatgtcggggcccttggagagggggttccaatctgggccactcgacgccgcgctcctctcgggccctctccctggcaccgccacctccggtcgtatgggtggcgccgtccctgcgctccgccggagcctctcccacggtggccgccgcctccgcaatttcacccgggcgctcctcgcgcgcaccgagaagtttcaggattctgcggatctaggctcgccggacgccgccgccgccgccgtcgccgcctgtgggggcgatccctgtggtctgcagtgggcgcaggggaaagccggcgaggaccgcgtccacgtcgtcgtgtcggaggagcgaggctgggtgttcgtcggcatctacgatgggttcaacggccccgacgccaccgacttcctggtatccaacctntacgccgccgtccaccgcgagctccgcggcctcctctgggatcagcgggagcagaacgtgcagcacgaccagcgccccgaccaacccggctcagccccaagcaccacggcctcagataaccaagaccagtggggtcgccgccgccgcacccgccgctcaagaccgccgcgtggcgccgacgacgaccagcggcggtggaagtgcgagtgggagcaggagcgggattgctccaacctgaagccaccaacgcagcagcgtcttcgttgcaacagcgagaacgaccacgtcgccgtgctcaaggcgctgacccgtgcgctgcacaggaccgaggaggcttacctggacatcgccgacaagatggtcggcgagttccctgagcttgcgctcatgggctcttgtgttcttgccatgctcatgaaaggagaggacatgtacatcatgaatgttggcgatagccgggctgtgttggcaacaatggacagcgtcgatctcgagcagatcagccagggttcattcgatggatcagtcggggattgcccgccatgcttgtcggccgtgcagctcacgtcggatcacagcacttcagtggaagaggaagtaatcagaatacgaaacgagcatcctgatgatccatctgccatctccaaggatcgcgtgaagggctcgctgaaggtgaccagagcatttggtgctgggtttttgaaacagcatacgtccaaacttgattataccaggagcggaataattaagcccaagtggaatgatgcactcctggagatgttcagaattgattacgttgggtcctccccatacatatcatgcaatccatccctttttcatcataagctcagcacaagggatagattcttgatattatcttcagatggactttaccagtatttcaccaacgaggaggcagttgctcaggtcgaaatgttcatcgcaacaacccctgaaggcgaccctgcccaacatcttgtggaggaagttcttttccgtgctgccaacaaagcaggaatggactttcatgaactgatcgagataccacatggtgatcgtcggcgataccatgacgatgtatctgtcatcgtcatctctttggagggcaggatttggagatcctgcgtgtaa

SEQ ID NO: 843 - DNA, 1587 bp, Oryza sativa
  N_region (25)..(25): n = any nucleotide
atggcatctgtggagacgtgggtanggttcgggtcggccctggccggcgtcggcttgctttggtcgaggatgccggagcacgtccatgacgaggctaggtacatcatcagtagcctggtccccatggcgatatcctacttcaacccctacgagcagatcaccgtgtccgagtacggcgaggagcggttccgacgcaacaagatgtttgacgccgtctccacctacctgagccgcgtgtgcgccggtggcgcctgcaagctcaaggccgagctctgcaacaacggcagggacgacccaattgtcactctggacgagaatcaggaggtcgtcgacagcttcgacggcgcacgcatgtggtggaggctgtgccccaaggcctccaagaacaagggggccatcaccgtcacctactaccccggggaagcggacaagccgcgctgcttcaagctagtgtttcacaaacgccaccgccagctcgtgctcaactcctacctaccaagcgtcgtccggcgttggcgcgagctaaccgcgatgaaccggcagagacggctgttcaccaaccatgccaatgaggcgaagaagagcgtgtggaccagtgtcccttacaacccccctgcaacgttcgacatgctcgccatggaccacgccaagaaggttgagatcgtggacgatctcacaacgttccagaaggggaaggagtaccactcaaaggttggcaaggcgtggaagcggggctaccttctgcatgggccaccgggcacgggcaagtccaccatgattggggccatggccaacttcctcgactacgacgtctacgacctcgacctaacttccgtcaagaacaacagcgagctgcggaagctattccttgatacgacggacaagtccatcatcgttatagaggacattgacgcgatcgaggtcgaactcactaccaagcgcaagggcaagaaggcagccaacggcgacgaaatccacgacaagcgtatgctgatagagttttccgacaagaacgatgaaaaaagcaaagtgactctgtcgggcctgctcagcttcgtcgacgggctgtggtcggcgtgcggcagtgagcggatcttcatgttcacgacgaaccacattgaccggcttgacccagcactaatccggccagggaggatggacaagcacatcgaaatgtcttactgccgcttcgaggccttcaaggtactcgccaagagctacttggacatcaccgagcactcactattcgctgaaatcgagcggctgctcgacgacactgacacaactccggcagacgtcgccaataacctcatgctgaggagcaagaggaacggtgaaatcagtcgactgctcgacgagatcgatggggcaccgcgggcagatgtggccaaatggtgcaagaggaagagagacacggacgagtgcctggcaggtttcgtagaaatactaaagaaatccaagatggaatctgcaacaactccaatggattcaatggaagaagccaaagaggaacgacctaacgcaaaagaaagctacaaaatggggcggatatatgatgagaactataggttgggaaatgccagctag

SEQ ID NO: 844 - DNA, 1572 bp, Oryza sativa
atggcgctgtggagtggtctggggcaggcggcgacggtggcgcagctggtcggggcagacgtcggtagtctcatctccatgatcgtgcaagcggcggtgacggctcagcacaacaagaaggagtgcgagcagctcgcccgccgtgccttcatgatcgcggagctgctgccgcatctgcgggatccggaggtggtgtgtctgcccgagatccggaggccgctggtcggcctcgacgacacgctccgggaggcacacgagctcgtgatgtcttgccaggagaagagcgtgatgcaccggctggtaatggcaggtcggcaggccgagagattcagagaagttcagagcaggatcgactcctacctccttgtcttccccttcatcagccacatcgatataacccggcgccttgatcggatatacagagttcttcttccgaatgaccacacgcccgtgccatctccatctgcaggctcccagactcgtgagctggagctcgcagaggaggccgctcaagaggtggtattccgtggcgaagaaggcgagaaattcaccatagcagagcttgcgacggcgaccaacaacttcgcctccgacagactaatcggtcgaggcggtgtcggcaatgtgtacatgggaaggcttcctgacgggagagaggtggccatcaagcactttcccgagtttcactacacatctattgaggatgatgagttcaatgcggagcgcatcatcctctcacgcatccgtcacaagggcatcatccgtctctttggctgctgcgtggagcgccacaagcaggaggctaataacaagcgctccacatgggttctggaaaaagaaagtcgccgaatgccggccttgcagacgccgatgacaacggagcctctcctcgttttcgagtacatgaggaacagctcccttgacaagcaccttcatggctcgctgtcgtcctcctcgccggtggccacatcctggagcatgcgcatggggatactgctgggcgtgtcgcgggccatcgagtacctgcacacccaccctacgcggccggtgatccatcgcgacatcaagccgtcgaacatcctgctcgacgaggcctgggtgccgcgcttgtcggactttgggttgtcggtcgcctgggacgggacggatcactgttgtgatctgtccattgacggcacgctaggatacatcgaccccgagtactttgtgacgcacagtgtgaagccaacgatagacgtgtacagcttcggggttgtgatgctggaggtattgacagggataaaaccaatttttaaacggaaggagaaggaagaagaggacgacggtggcatcatccccacgagcttgctggccttcgccctgccaatcgtcgaggcaggggaggtgcggaaggtgctggacaggcgcccgacgccggagccaacgccgaggcagctccaggcagtggaactggtggcgcagactgcagcttgctgcgtgcggctggagccccagggccgtccagccatttcggaagtcgtggccaacctccaggcagcgatcgacctcatctcatccaatgacgatgagtag

SEQ ID NO: 845 - DNA, 1287 bp, Oryza sativa
  N_region (201)..(201): n = any nucleotide
atggctgccaccaccaagctcgtggctctgggcctcgccgtcctcctcagcatcgggttcgctggtgccgcgagggtggccaggtacacgaactcgtactccggcggcgggggaggcggcggcggaggaggcggcggcggcgggacgaacggcgggtggggctccggctcgggcgccggcgccggcgccggatacggcganagcggcggcaactccggcaacacgtggaactacgggaagggttggcggcgctggcggaggcggcggcggcggcggcgggaccaacggcgggtacggctccggctccggctccggctacggcatgggcagtggctcgagcggcggctccggctcgtcggcgtcggcccggttgctctcagcagcggcggtaattacgccaccggtgatggcgagggcggcggcggcggcggtggcggcggctccaacggcggcagcgggtacggcgctggcgccggagttggccagggcgccggcgagagcggctcgtcgatagcgatggcgccgtctccatccagcggcggcgactacaacggcggctacgccgacgcagccggtggcggcggcggcggcggcggcgggcacggcggaggcccagcagcatctccgagctacggcgttggcgcaggcgctggctccggcgctggcgacgccggcagcgatggctcctccggcggaggctacgcgtcaggaatgggcggcggcaagggcggcggcggcggcggcggcgagaacggcggctacggcagcggcagcggcaagggatccggatccgtgcgggaggtggaggtggcggtggaggtggaggtggctcgtcagggggtggttccggctggggatctggctctggttctggatatgggcaggcaggtgggtctggtggagcgtatgctagcggcggcggcggtggaggaggtagtggcggcggggcgaatggtggatctggctatgggtctggttctgggtctggatatggtcaagccgggagttacgggccttatggtggaggatatgcccagggtgggggaggtggtggtggaagcggtggtggacaaaatggtggatcaggatcaggatctggttctggttctggatcaggtcaggcaggaggatacggaccttacgggggcggatatgctcaggcaggaggacaaggtggtggtggaggtggtggacaaagtggtccagggggcagcggatctggcagtggctcgggaagtggatctggaagtgcaggatatccatagaatttacgcactacctggatga

SEQ ID NO: 846 - DNA, 831 bp, Oryza sativa
  N_region (44)..(44): n = any nucleotide
  N_region (51)..(51): n = any nucleotide
  N_region (55)..(56): n = any nucleotide
atgcgtcatatcacgtactcctacggcgacaagtcggtgacganaggtccngtcnncgaagtggacaagttcacgttcgtcggcgccggcgcgtccgtgcccggcgtggcgttcggctgcggcctctttaacaacggggttttcaagtccaacgagaccggcatcgccgggttcggccgcggcccactgtccctgccgtcgcagctcaaagtgggcaacttctcccactgcttcaccgccgtaaacggattgaaaccgagcactgtcctgctcgacctgccggccgatctctacaagagtggccgcggcgccgtccagtccacccctctaatccagaatcctgccaatccaactttttactacctctcgctgaagggcatcaccgtcgggtcgacgaggctgccggtgccggagtccgagttcgctctaaagaacgggaccggcggaacgatcatcgactccggcacggccatgacgtcgctgccgacgcgtgtttaccggctcgtccgtgacgcgttcgccgcgcaggtgaagcttcccgtggtgtccggcaacacgacggatccctacttctgtttgtcggcgccgctgcgggcgaaaccgtacgtgccgaagctggtgctgcacttcgagggcgcgacgatggacctgccccgggagaactacgtgttcgaggtcgaggacgcgggcagcagtatcctctgccttgccattattgaaggcggagaggtgaccaccataggcaatttccagcagcagaacatgcacgtactctatgatctgcagaatagcaagctgtccttcgtccctgctcagtgcgacaaactttag

SEQ ID NO: 847 - DNA, 4348 bp, Oryza sativa
  N_region (34)..(34): n = any nucleotide
  N_region (60)..(60): n = any nucleotide
  N_region (63)..(63): n = any nucleotide
  N_region (72)..(72): n = any nucleotide
  N_region (103)..(103): n = any nucleotide
  N_region (151)..(151): n = any nucleotide
  N_region (153)..(153): n = any nucleotide
  N_region (195)..(195): n = any nucleotide
  N_region (201)..(201): n = any nucleotide
  N_region (216)..(216): n = any nucleotide
  N_region (286)..(286): n = any nucleotide
  N_region (2778)..(2778): n = any nucleotide
  N_region (2879)..(2879): n = any nucleotide
  N_region (3302)..(3302): n = any nucleotide
  N_region (3311)..(3311): n = any nucleotide
  N_region (3315)..(3315): n = any nucleotide
atgcagaaggtggtgagcctgaggaaaggggaangggggtcgtcgtcgcgggggccggcntcnatgtggtgnaccccggacaacgggggtgttctcgcggtcnagggcgtcgtcgagttgggaagattgggaagaccacgaggaagccctncngtttgccggcgctcgagaaagctgcccacgtacgaccgcgtncgccgngccgtactgccggtngtggaggagggcggcggcggacgggaggcggggaagaaaggtgtggactgctcagctcggcccgcaggancgcgggcgctgctcgagcggctcgtgcgcgtcgccgaggacgacaacgagcgcttccttctcaagctcaaggagcgcatcgaccggggtggggattgatattccgacgatcgaggtgcggttcgagcacctggaggcggaggcggaggtccgcgtcggcaacagcggcctccccaccgtcctcaactccatgaccaacaagctcgagggagccgcgaacgcgctggggattctacccaacaagaagcagaccatgcccatcctccacgacgtcagcggcatcgtcaagccccgcaggcaggatgactctgctgttaggacctcccgggtctggcaagaccaccttgctacttgctttggctggaaggcttggcaaagacatcaagagttctctggtcaagtgacttacaatggacaccagatggaggattttgtgccacagaggacagctgcatacatcagccagcatgatcttcatattggggaaatgactgttcgggagacactctcattctcggcacgctgccagggtgttggaagccgctttggatatgctgaccgagctgtcaaggcgagagaaggcagcaaatattaagcctgatgctgatattgatgcgtttatgaagaggcttcagcgatggagggacaagagaccaatttgattactgactatatactgaagagatattaggactggatatatgtgcagacacgatggtaggagatgatatggtgagggcaggtgagatgcttgttgggccagccaatgcacttttcatggatgagatatcgactgggctcgacagctcaactacatttcagatcgtgaagtcgctcagacaggccatccacatcctcggtggcacagcagtcatctcgctgttgcagccagctccagagacatatgacctatttgacgacatcatactcctctctgatggtcagattgtataccaggggcctcgagagggtgtgctagaattttttgagttgatggggttcaaatgccctgagaggaagggtgttgcggacttcttacaggaagtaacttccaggaaagaccagaagcagtactggatgcagcatgacaagccctatcggtacgtgccagtcaaggattttgctagtgcattccagtcgttccacactgggaaaagtatagcaaacgaacttgctactccattcgacaagagcaaaaatcatccggctgcattgaccacctcgaggtacggtgtcagtgccatggaactgttgaaggcaaacatcgaccgggagttcttgcttatgaagagaaattccttcgtttatatcttcagagcctgccagcagctgatggtggtgtcggcaattgcaatgaccgtcttcttccgtacaaagatgcaccgtgattccgtgactgatggagtcatcttcatgggcgcactcttcttctcagtgatgatgataatgttcaatggtctatctgagctaccgctaaccatttttaagttgccagtcttcttcaagcagagagacctcttattctttccagcatggacctacaccataccctcatggatcctcaagatcccaatgtcctttattgaggtcggtgggtttgttttcatgtcatactatgtgattgggtttgatccgagtgcaggaagaggttcttcaagcagtatctgcttatgttagcaatcaaccagatggcagcggcactcttcagattcgttggtggggcagcaaggaacatgatcgttgcgaatgtctttggatccttcatgttgctaatctttatggttctgggtggttttattctagtaagagagagaaagtgaagaaatggtggatttggggctactggatctccccgatgatgtatgcacagaatgccatctcagtgaatgagtttttggggcacagctgggataaagtcttgaataattctctctccaatgagaccctaggcgtacaagcccttaggtcccgtggcgtcttcccggaagccaagtggtattggattggctttggtgcattgctcggattcatcatgctcttcaatggtctctttactcttgcactaacatacctcaaacaggagctgaaggagaagcaagccaacatcaatggtaatgttctagacgttgataccatggcatcaagtactaatctagcaatagttgacaacacggaaactagttcagaaattgctgataattctcaacctacacaaaggggtatggttctcccttttgctccgctttcactcactttcgacaacatcaaatactctgtcgacatgccacagcaggaaatgaaagcgcatggaatagttgaggaccggttggagctcctcaaaggtgtcagtgggtctttcaggccaggagtgctaactgcgcttatgggtgttagtggtgctggaaagactactctgatggatgtgttagcagggagaaagacaggtgggtacattgaaggcaacatcaccatatcaggatacccaaagaaacnagagacatttgcacgtgtatcaggatattgtgaacagaatgacatccactcaccgcaagtaacagtctcagagtcactgcttttctcagcttggctacggnttcccaaggatgtagattcaaacacaagaaagagatgttcattgaggaggtgatggagcttgtggagctcaagcctttgagagatgctttagttggtcttcctggagttaatggcctctcaactgagcagaggaagaggttgaccattgccgtagagcttgttgctaatccttcaatcattttcatggatgagccaacttcagggcttgatgcccgagcagctgccattgtgatgaggacagtgaggaatactgtggatactggtagaactgtggtgtgcacaattcatcagcctagtattgacatatttgaagcatttgatgagagcttttccttatgaagcgaggaggagaagaaatatatgttggcccgttaggccatcaatcttcagagctgattaagtattttgagagggaatcaaangagtcagcngaantaaagatggctacaatccagccacgtggatgttggaggtgtcaacaatttctcaagaacaggcattaggtgttgatttttgtgacatatacaggaaatctgaactcttccagtaagaggaacaaggcattgatacaggaactgagcacaccaccaccaggttcgagtgaactatatttccctacaaagtactcgctatctttcttaaatcaatgcctagcatgcctgtggaagatgcacctgtcatactggaggaaccctccttacaatgccataagattatttttcactactgtcatagctctcctctttggcaccatcttctgggatcttggcggtaaaacgggcaagtcacaagacttgttcaatgccatggggtccatgtattccgcagtgctttttattggcgtcctaaactctcagtcagttcagccagttgtatcagtggagaggacagtcttttatcgtgaaagagctgctggcatgtattcagctttcccgtatgcatttggacagacaggttgccatcgaattcccgtatacactggttcagtctatcatatatggcatcatagtgtactcgatgattggttttaaatggacggcggctaaattcttctggtacctcttcttcatgttcttcacgtttctatacttcacattctatggcatgatggctgtgggcctgacaccaagctaccacgtcgcctcaatcgtctcatcggctttctatggcatctggaacctattctccgggttcatcatccccagaccggaaagttccaatctggtggagatggtactgctggatatgccctgtcgcgtggacgctgtacggtctggttgcctcgcagtttggagacattatgacgccaatggatgatggcactcccgtgaaaatcttcgtggagaactacttcgacttcaagcatagctggctgggggtggtggccgtggtgatcgtcgcattcaccatgttatttgccttcctctttggctttgccatcatgaagcttaacttccagaagagatag

SEQ ID NO: 848 - DNA, 3921 bp, Oryza sativa
  N_region (1537)..(1537): n = any nucleotide
atggacgcggcggcgaacggcggcagggatggcaaggagaagaaggcgaagaacggcagggacggcgaggacaagaagaaggaggaggacggcgacgccgggaagaaggtgtcgttcacggggctgttccggtacgccgacggcacggacctgctgctgatggcggtcggcacggtggcggcgctcgccaacggggtttcgcagccgctcatgaccgtcatcttcggccaggtcatcaacgccttcggcgaggccaccaacggcgacgtcctccaccgcgtcaaccaggcggttctcaactttgtctacctgggcatcgcgacagcggttgtttcatttcttcaggtggcgtgctggacaatgactggagaacggcaggcgacacgcattcgatctctatacctcaaatctgtcctgagacaggatatagcattctttgatgtagaaatgacaactgggcagatagtttcaagaatgtccggtgacactgtgttagttcaggatgccattggtgagaaggttggcaagtttctacaacttgtggctaccttcgccggtggtttcgttgtagcatttgtgaaaggttggcttctatcccttgtcatgttggcctgcatccctcctgttgtcattgctggtggagctgtatcgaagatgctagcaaaaatctctagcaagggtcaagcatcatatagcgatgcagcgaatgttgttgaacagacaattggagccataaaaactgttgtttccttcaacggtgaaaagcaggctgttgcatcgtacaataaactcataaacaaggcatacaaggcagctgttgaggaaggacttacgaacggttttggcatgggctccgttttcttcatatttttctccagctatggtttagctatatggtatggcggcaagttggtagtcagcaaaggatactcaggaggagacatcataaatatcttgtttgctgtcatgactggggcaatgtctttagggaatgcgaccccatgtatggcagcctttgcagaagggcaatctgcagcttatagattgttcaaaacaatcaagagaaaaccacagattgatcctgatgacataactgggaaacagttggaggacatcaggggtgatgtggaattgaaggatgtgtacttcagctacccagcaaggcctgagcaactgatatttgatggattttcattgcatgtttctagtggcacgacaatggctatagttggggagagtggaagcggcaagtccactgttattagtcttgtcgaaagattctatgatccacaggctggtgaggttttgattgatgggattaacatcaagagcttgaggcttaattggataagagggaagattggtcttgtcagccaagagccattgctctttatgacctccattaaagataatataacatacggcaaagaggatgcaacaattgaagagattaggagagcagctgagcttgctaatgcagcaaattttattgacaaattacctgatggctatgatacaatggttggtcaacgtggcncacagctctcagggggacaaaagcaaagaattgctattgctagagcaatacttaaaaaccccaaaatccttctgttagatgaggctactagcgcattggatgtggaatcagagaggatagttcaagaggcactgaacaggatcatggtggacagaaccacacttgtggttgctcatcgcttgaccacagtgaggaatgctgattgtatatcagttgttcaacaaggaaagatagttgagcaaggtccccatgatgaattggtaatgaaccccaatggtgtttattcgcaactcattaggctacaagaaacccacgaagaagaagagaagaaattagaccatcacatatctgattcaaggtctaaaagtagaagtttgtcattcaagcgatcaattagcagggattctgcaggaaatagtagcaggcattctctagcccttccctttggcttgcctggctcagttgaattgcttgaaggcaatgattcgactgtgggggaacagacagagcagggtggtgatggtgaggtccaacagaaagctcctattggacgactggctagactaaacaagccagaggtaccgatacttttgttagcaacactggctgcaggagttcatggagtgcttttcccaatgtttggagtaatgatttccaatgccatcaaaactttctttgagccagcagacaaactaaaaaaggatgctagcttttggggtttgatgtgtgttgtcctgggtataatttcaataatatcaataccggtggagtactttatgtttggaatagctggaggtaaacttgtagagcgtgtccgtgccttgtcattccggagtattattcaccaagaagttgcttggtttgatgatcctaggaattccaggtttggttgcccattctttattggttgttttctcttcctcctaaatatcaaggaattttacacattgggaactgatgatgaaatttcatcctacagtggagcgcttggtgcaagattatcagtagatgctttgaatgtccggcgtttagttggagacaatcttgcattggcagttcaggtcgtctcaacacttatcacaggaattgtcatagcgatgatagcggactggaagctcactttgatcatcctttgtgtgattccacttgtgggtcttcaaggttatgctcaagttaagttcctgaaggggttcagtgaagatgccaagatgttgtatgaagatgcaagtcaagtggctactgatgcagtaagcagcatcaggactgtagcttccttttgttctgagaaaagagtgatgacaatgtatgataataaatgtgaagcttcgaagaatcaaggagttagaacaggaatggttggaggccttggttttggtttctcattcttgatgttgtacctaacatatggtctctgtttctatgtcggagcacaattcgtacgccacaataaaactacttttggggacgttttcaaggttttctttgcactggtgttggcaactattggaatatctcaaacaagtgcgatggcttctgattctacaaaggccaaggattcagctatctccatatttgctttgctagaccgcaagtcacaaattgactcgagtagtgatgagggtaggacattggccaacgtcaagggaaacattgatttccgacatgtcagcttcaagtatccaacccgcccagatgttcagatcttcagtgattttactcttcacataccctctggcaagaccgttgcacttgttggagagagtggtagcggaaagtccacagcaatcgctttgctagagcgattctacaatcccgagtcaggaaccatcttgttggatgaagtagaaatcaagaacttaaaggtcaattggttgagggatcagatggggttggtcggccaagagcctgtgctctttaatgacacaatccgtgctaacatagcctacgggaagcatggggatgtcactgaggaggagctcatcaaagctgcaaaggcatccaatgcacatgagttcatatcgagccttccccaaggatatgataccaccgtgggggagagaggggtgcagctatctggtggccagaaacagcgggtggctattgcgagggccatattgaaagatccaaagatactacttctagatgaggcaacgagtgccttggatgctgaatctgagcgcattgtgcaggatgcgttagataatgtgatggttggcaggactacgattattgtggcgcaccgcctctcgacgatcaaaggtgctgatatcattgcagttctgaaggatggtgcgatagcggagaaaggaaggcatgaggcattgatgaacatcaaagatggtgtctatgcttcacttgttgaactccgttcaggctcatcataa

SEQ ID NO: 849 - DNA, 2528 bp, Oryza sativa
cagaagaatctccctccgttcacggaatatggacatatatcgcagcctgactgggatacgtttgttgcagatcatacaacagctgaagcattggctttgaggaaaaaaatgtccgagctcgcgaagaaaaatagatatccccatagattggggtcaagtggatacgctgggcacgtcgatcaatggcgggagaccgagcaaagatttgcagcggccggcaaaccactactggtagaccccatggtggaacgtagtaagaactgggtttgggcgcgcagcacaggtcaagtctcggatgagggagacatactattcgagactccggacatagaacaagtgactactaatttgcagcagatcgtcgagaaagaaagagcaggacagtttgtcccacggagggagcgagaccagcttactgtggcgttggggaccgccgaacactctggacgtgtaaggggtttgtcctcaaagccaagttggaagataggctttccacatgacgcaccaagttataagaagagagacaaatacaaagaacaactatcatacaaaatctatgcgcaagtgaaggaacacttctactcgttggtagctaaaaacccgacagcctttccaaggttattccctgatggccagcaacccacacaatccacacagcaaacaactaatgcacccagtagtgtaggatcagtggagacaactcccttccctatggatggtataactggaccaactccgtgcagtctcgtcgtacctatcggccgcgctagaaagactaaggaggttgcaactggtttagcgatacccggatgtcaatttacacaacacgggcaatcccttgaggattacgcaagggtacaggtcgccaaggtccatagagaccacatttccttggaactagacatacctgcacctgagaggattgaacttctcggtgatgcagtgaatcagtttatgttgtggcaccgcagagacataatcctgaccgcggccgttccagcagcaggatcttcaactccatcctcatcacaagcaaggacagttgccgcttctgcttcaccgtcgcctcctggaccaccatcacctccaaatctggcatcaccactaccgtttaggtcaccgcctcgccaacctacaccaccaccgcttaggtcatcggcctcaccaacctacaccaccaccctcccattctcaacagcctgctctcccggctccacaaccagttcaagcctctcccacctccccagctcaacagcatgctcccccgactccgcccttagttcaagcatctccacctacaccccaatctgctctggtagaacaagtgcacataccggaaggtactacatccgaaccgaagtctaatcctttggaacctcgtcgtataattccaaagttgatatcgacatatgacccaaaggagattgacaaggataaggagaagttcatgtttcagctttcaggaattctgagaagagaaaagaacttgctcacgtcatgtcagactcccagaagtcagtactagcagcccaagatgaattgcaatcatggttatctgccgatgtgcctgaaacttatgagtatggcaagccattcttgccaacatatcttatgaacaatctaccctgggaaatgagggcaatgcacgaatggtatatcaaggcatataggaagggtctcggtttcataagcatcgccgtcccggaaggtgctttcatgagattttttttatctctttccgagacctttacgccctctacaagctagataaaatggacgttaatctcgttgcggcattctgtctcatgaagctgatagaactggatcaccggttggatacatcgatccaacaagaatatgcaaaagacaacacaccgtagagctgagagaggactacgagcaattggttggcaagacccctcaagaaaaggaagaatatgtgaagcaattgcacaacaggaagaagctagaagtagcaacatacttagcaatagcaatgttggcgcacgccgacaaagatgtcttaatggtcccctacgcgttgacgaccactacatattattccttgtatatccaaaaaaccaattgatcatatcgttggaccccacacaatatgaaaaggagacctttatggaattcctcactattttgaatttaatagagcacacaagtactaccgcaaaagaggcggaccccagtacatattccatcccagaagcagttacccatcatgactggctggccggtacaaacaaccaccaggaaccaacttgtgcggttattacgtgtgcgcgatgctcagagtaaacgggaggtacaaaacaaccagtaaccaaatccccgaaatcccatatattgcacaacaaatcaacaacggtactacctggaacgtgggcgctgacctctgccgattcctccgtcgtgatgtctgcaacgcaagaggtctcttctacgacaacaagaatgaactcgcaatgaacgacaaatttaaacctctcagagagtgggagaaagaacatatgcaatga

SEQ ID NO: 850 - DNA, 2097 bp, Oryza sativa
atgtcctcctcgccggccgccagccggcgcgccgcagcgattgcccgccacctcgccggcattccggctgccaaattcgcctccctgctcgagccattctcctgcctgggctacgtgccgccggagtccaatgagcagcccccggcgttcgcgctaggcgacctccggaggctgctcgacgggcacgacctgggcgtgcgggactggatgttccgcgtcatggagcagagcacattgttctgcagccggcacgggggccccggacctgcaggcagggtgttcgcatcgccggacttcaacaaggacaaggaggggctgcgggaggcgaagatgaggcggatcgggtacctggcgcggcgcggcgtattccgtggatggctcacagacacggagggcgacgccgaggccgagctccgcaggatcgcgctcctcgactgcattggcgtctacgatcactcgctcgccatcaagatcggcgtccatttcttcctctgcatttctttttgcactccaggggcagcgcaatcaagtttcttggaacaaagcgccaccatgacaaatggttgtcggacacagaaaattatgttatcaagggttgtttttccatgacagaactgggtcatgggagcaatgtccgaggaattgagacagtggctacttatgatattaaaacaagagagtttgtgataaatactccttgtgaatcagcccagaagtactggattggtggagctgctaatcatgctacacatactatagtctttgcgcagctccatataaatgggagaaatgaaggagtccatgcttttgtagctcagattagggatgaacatgaaaatgttatgcctaatatccagatagctgactgtggccataaaattggattaaatggtgttgataatggacgaatttgaatatacgtgttcctcgagagaatttgctgaatcttgttgctgatgttttgccggatgggcaatatgttagcacgatagatgaccctgatcagcagaggtttgcagcatttttatctccacttacacttggtcgagttaatattgcagttaatgcggtttatatttcaaaggttggcgttgcaattgctgtgagatatgctttgtcaaggagagccttttcagttacaccggatggtcctgaaatgctgttacttgattatcccagtcaccagcgacgccttctaccactgctagcaaaagcgtaacctactagctttctctggatttttgtactttgcatatgagcagtgctggtaattttatgaaaaggatgtatgtgaagaggactcctgaacttaacaaatctatacacatttactctagtgctcttaaagctacacttacctggcagaatatgaccacacttcaggagtgccgtgaagcttgtggtggccaaggtttgaagacagagaatcgcataggaattttcaaagctgaatttgatgtccagtctacatttgagggcgacaataatgttctaatgcagcagcaggtaagcaaagccctttatgctgaatttttgacagcaaaaaggaagaatcaaccattcaagggattgggcttggaacacttgaatggtccttgccctgttattcctgattatctgacaagtggcacactaagaagctccagtttccagtgcttgagggagcgagatttactgaaacgattcaccacggaggtttctaactatctggcacaaggagaaaacagagagaaggctttgatgctgagctaccaactcgctgaagacttagctagagcatttactgagcgcacaattttgcaaatatttttggaggatgagaagaatattcctactggttctttaaaggatatattgggcttactaaggtctttatatgttatggtttgcatagacgaatctgcatcctttttgagatatggttgcctatcgcgagagaatgtagccgctgctaggaaagaagtgatgacactgtgcagtgaactcaggccccacgcacttgctattgtcagttccttcggaatcccagatgccttccttagcccactcgcttttgactggattgaggcaaatgcacggtcttctgggaatgaatga

SEQ ID NO: 851 - DNA, 2017 bp, Oryza sativa
  N_region (759)..(759): n = any nucleotide
  N_region (780)..(780): n = any nucleotide
  N_region (791)..(791): n = any nucleotide
  N_region (813)..(813): n = any nucleotide
  N_region (1253)..(1253): n = any nucleotide
atgctagctggatctgatgaccatcgtgctggtccgaggagaggaagaggccattgtcgccgccgtgtcggggagaagatgaggcggatgccaccacgcgacgcaagggagaggaagaggcagccgcacatggattttgttgtcccgagcttgtggtggccggaaatgatcgtcctcgagttcgtgctagctgaatctagttggccgccacgcaaggctaggagaggaagagtcagttggtagccaaacaaacacacgaaagaatgttaatggcgacatcaccaaaaacagcacaatgtcaagcacactgcccccgcccatccgtccagacaaaattgtgttttcgtctttgtggtttggtgggcctttcgatgaggcatggctgagaggaggagagggcttggtgtcggcgatggtacaatctagccctttccacgtgggccagagccaaggcttatttaatactgggctatagcatcgagtccattaggtccctctatttgtcgcccagtccgactttcgtccctcggtcgcaaaaccgggtcctcgtccaacgtggcattgacgtggcaaatgaatcccggaaaaataataaaaaaacgtgggacccacatgtcagctacacaaaaaattataagaaaagccacatgtcagccccctctccctcccttatagaatggcgagcggcggcgcagagggtgggcggtgggtgcagcggccgggcgacaaggggcagcttgcggcggcgcagaggggggncggtgggatgagcggcgcgtngtgcccgggtnagaggaggggccgctcgcggcngccgggcaaggagcccgccggcagccgcgcaccgccgtttctctctagtgtgggacgggggccagtggcggcggagacccgagagcggcgacggtggcgtgcgggcgagggccggagcggtggcggcggagatcgagaccgccgtggaaggttggccgtcggaaggaagaaaacgggccatcagaacggtcgcgtcctcgccaccctcggccccgcgaccgcactatcctccactgtgctccacgccctctctgccggccacgatgcacccgcctccgctgttctcccgccgcgcccacgaacgtgtaagggccgcctacgtctcgccaccgcgactcgcgtcggcatcccctcgaagatggcggcatctggtggtggcttcttctgcacctgcggcggcggcggcgttgaaggcgggaggagtggcgcaggcgggggangcggcgccgccgccgatggacgcggtcggcgtgccgagccggccgacaacgacgtgaccacacgcgtgttgggaggcatctgcatcacacggcttggagctcgtcgccatactgcgtgtccatagtgtcgttcaccgtggggtataatatccgctgcgagaaggaggagcagcgcgtgcccgtcgaggcggccggagcggacggcgtagctgatcgcctgcgggcggcggcggcgcccgagctgagcttcaccgccgcgaagacgaaggagaccacaacggtggcggtgggaggtacacgcggcggggtacggcgagctcggccgcgccctgctcgacctgcaggtcgccgtcgccacatccgcgtctccgccgcgccgctcgccggctgccgctccacacctgcgcctccgccgctcgggactccgtgcagccgccgccgctcgccgcagtctccgccagccgccgcgacacccggaacatctctcgggttttgaggggagctcggccgccgacgacatctcgatgccggccgtcgggtggtgcggatggtggtggtgcgagaggaacggcgagcggcgcgacatggactctagcctaccgctgccgccgccgcttaaactcccgctggccgccattgcttcagccctcgcccgccgccgctcgctccccgcggacggccgtcaataccgccacatcagcgccacgtcagcgaaaccgccctccaaaaccgccgagggagtcaaattgcaccggtttcaataa

SEQ ID NO: 852 - DNA, 1947 bp, Oryza sativa
  N_region (11)..(11): n = any nucleotide
  N_region (41)..(41): n = any nucleotide
  N_region (61)..(61): n = any nucleotide
  N_region (64)..(64): n = any nucleotide
  N_region (69)..(69): n = any nucleotide
  N_region (628)..(628): n = any nucleotide
  N_region (1364)..(1364): n = any nucleotide
  N_region (1395)..(1395): n = any nucleotide
atgccgcgttnggcggtcggcctggtcgtcgcgttgttgtngtgcgccgcgctgatcggtngcngcgcnggttcggggcaggacctcgcggcggacacggcggcgctgcttgcgttccgggacgcggtcggcccgcggctgccgtgggcgtcgtcgtcgtcctcgccgtgcgggtggcgcggcgtccggtgcgacgccggcggtgggcgtgtcgtcgcgctgcagctccccggcgcgaagctggtagggagggtgccgacggggacggtgggaaacctgacggcgctgcggacgctgtcgctgcgctccaacgcgctctccggcgggatcccggtggacatcggcaactgcggggagctccgggcactctacctgcagggaaaccagctcgccggcgaggtgccggaggggttcttctcgcttctgttgctacagcggctcgacctctcgcgcaaccgcatcacggggagcatctcgccggagttcaacaagctccggcggctcgccactctctacttggagaacaacggcctcaatggcaccctccccgccgatcttgatctcccgaagcttcaactcttcaacgtgtccaacaacgaccagctcaccggcgccgtgccggcgtcgntcgccgggaagccggcgagcgccttcagtgggacaggactctgcggtggccctctaagcccgtgtacaaacacttcgccgccatcgccgtcgccgtcgccgtcgccgccgattccgccgcctccggcagcttctcaagatagcaagagcagcaagctctccggtggtgcaatcgccggcatcgctgtcggcgccgcggcggcgttgttggtggcgctcgcggtgatcgtcctcctctgtttcaagcgtgggaggagaaaggaagggagaccagccgacgtcgacgaggacgcgtccccggtgtcggtcacggtggcgaggacggacaaggtcgaagtgaagcggtcgcggtcgcgcccgtcgcagcagacgacgacggcgagcggcgccaagaagctggtgttcgtcggcggcgagccggacgtgccctacgacctggacacgctgctgcacgcgtcggccgaggtgctcgggaagggctggctcggcacgacgtaccgcgccacgctcgagggcggcgccgccgtggtggccgtcaagcggctcagggaggcgcccatcgcggagagggagttccgtgacagcgtggccgagctcgccgcgctccgccacgagaacctcgcgccgctccgcgcctacttctacagcagggacgagaagctcctcgtctcggacttcgtcggcgccggagccctctcctccctcctccacggcggcggcggcgccgtgcgccgcgngcgcctcggcttcacgtcgcgggcgcgcatngcgctggcggcggcgcgcggcgtcgcgttcatccacggcgccggctcgtcccacggcaacatcaagtcgtcgaacatcgtcgtcaaccgcacgcacgacggcgcctacgtgaccgaccacggcctcgcccagctcctcggcgccgccgtgccgctgaagcgggtgaccggctaccgcgcgccggaggtgagcgacctgcgcagggcgtcgcgggaggcggacgtgtacagcttcggcgtggtgctcctcgagatgctcacggggaggtcgccggcgaacgcggtgccggggttcgacggcgtcgacctgccgcagtgggtgcgcgcggtggtgcatgaggagtggacggccgaggtgttcgacgccagcatcgccgacgaggcgcacgcggaagaggagatgatgcggctgctaaagctcgccgtcgaatgcaccgagcagcggccggagcggcggcccaccatggccgaggtggcggcgaggatcgagcacatcgtcgacaccgtcatccggaacgccgacgtggacgatttcgacagcgtttctcagtag

SEQ ID NO: 853 - DNA, 1926 bp, Oryza sativa
  N_region (1746)..(1746): n = any nucleotide
atgtactcggcgaaccactggggcgggtcgttcgagatcgccgcggacggcgcggcggaggatgaccacagccgcaacatggacctggaccgcggcgcgctgtcggcgcggcagcaccagctggacgagacgcagcagagctggctgctcggcccgccggaggccaagaagaaggacaagtacgtcgacctcggctgcgtcgtcgtcaagcgcaagctcctctggtgggtcctctggaccctcctcgccgccttcatcctcatcggcctccccgtcatcatcgccaagtccatccccaagaagaagccccacgcccttccccccgaccagtacaccgacgccctccacaaggccctcctcttcttcaacgcccagaaatcccttctttctctgacgaacaattttggccatgtctcgttctctgctctgacagccggccggctcccgaagaacaacggcatcaaatggcgcggcaactccggcctgtcggatggctccgatctgacggacgtcaagggcgggctcgtcggcggctactacgacgccggcgacaacatcaagttccatttccccttggccttctccatgacaatgctcagctggtcagtgatcgagtacagcgccaagtacaaggcggtaggggagtatgaccatgtgagggagctcatcaagtggggcaccgactacctgctcctcaccttcaactcctctgcttccaccattgacaaagtctatagccaggtgggcattgcgaagatcaacggcacccagccggacgaccactactgctggaaccggccggaggacatggcgtacccacgccccgtccagacggccggctcggcgccggacctcggcggcgagatggcggcggcgctcgcggcggcctccatcgtgttccgcgacaacgccgcctactccaagaagctcgtgaacggcgcggccgccgtgtacaagttcgcgcgcagcagcggccgccgcaccccgtactcccgcggcaaccagtacatcgagtactactacaactccaccagctactgggacgagtacatgtggagcgcggcgtggatgtactacgccacggggaacaacacctacatcaccttcgccaccgacccgcggctgcccaagaacgccaaggccttctacagcatcctcgacttctccgtcttcagctgggacaacaagctgccgggcgccgagctgctgctgtcgcggctccgcatgttcctcaacccgggttacccctacgaggagtcgctcatcgggtaccacaacaccaccagcatgaacatgtgcacctacttcccgcgcttcggcgccttcaacttcaccaagggtgggctcgcgcagttcaaccacgggaagggccagccgctgcagtacaccgtcgccaactccttcctcgccgcgctctacgccgactacatggagtccgtcaacgtccccggctggtactgcggcccctacttcatgaccgtcgacgatctccgctccttcgccaggtctcaggtgaactacattcttggggataacccgaagaagatgagctacgtggtggggtacggcaagaagtacccgcggcggctgcaccacaggggggcgtcgacgccgcacaacggcatcaagtactcgtgcaccggcgggtacaagtggagggacaccaagggggccgacccgaacgtgctcgtcggcgccatggtcggcgggccggacaagaacgaccagttcaaggacgcgcgcctnacctacgcgcagaacgagccgacgttggtgggcaacgccggcctcgtggccgccctcgtcgccctcaccaacagcggccgcggcgcgggcgtcaccgccgtcgacaagaacaccatgttctccgccgtgccgcccatgttcccggccacgccgccgccgccgtccaagtggaagccgtga

SEQ ID NO: 854 - DNA, 1917 bp, Oryza sativa
atggcggctagccgtgtcgccctgtccgtgccagtcgccgccgccgtcgcgctgctgctgctcgcgctcccccgcgccgcggtgtcgtacccgtgggggttgtgcaacgacacggccggcgaattcccggcgaggaggagcagctaccttgccagtatcaacctcatcgccgccaccctccccggcaacgcctcggcctcgccggacctgttcgccaccgccgagggcgtcggcgcgccgccggaccaggtctccgccctcgcgctctgccgcggcgacgccaacgcctccacctgcctcgcctgcctcacccaggccttcctcgacctccccaacgcctgcgcctaccacaaggtcgccgccatcttctacgactcctgcctgctcgcctactccaacgccaccatcgccgccggcgacttctcctccgagaagatcccgatttacgggttctacagcaacgcgaacgccacgacggagcaggcacggttcaaccgcctcgtggcagcgctggtgaacgccaccgccgactacgcggcgcgcaaatccacgcggcggcggtacgcgtccggggaggccgacttcaacgcggagttccccaaggtgtacagctgggcgcagtgcactccggacctgacgccggcgagctgccggagttgcctcgcgcagatcatagggacatatattgggttttttgagaacagggtcggaggattcgtccgcgcggtctggtgcagcttccagtacagtaccacgccctttctcgacggaccgatgcttgtaaggttacaaggaacgtcaggtgcctcgccggcgccgtcgccggcggccgtggtgcccgcagttaaccagacgccgccggcggcgacgccgacgcttgaaggagatgccaattactccactgaagcagaggacattgagaatttagattcgatgctcatcgacatctccattttgcgatctgcaactggtgattttgcagagagtaacaagctcggtgagggcggatttggtgctgtgtacaagggtgtgctcccggacggctacgagatagcagtgaagagactgtcgaagagctcaacgcaaggggtggaagaactgaagaacgagctggctctggttgcgaagctgaagcacaagaaccttgtcagcctcgtcggcgtctgcttggagcaacaggagcggctgctcgtatacgagtttgttccaaaccggagcctcgacctgatccttttcgatactgagaaaagtgagcagctggactgggagaagaggtacaagatcataaacgggatcgctagaggtctgcaatacctccacgaagattctcagctcaaggtagtccaccgcgatctcaaggcgagcaacatcttgctagacgtgaatatgaaccccaagatttcagactttggcctcgcgagaattttcggtcgagatcagacccaggctgtcaccaagaatgtcatcggcacatatggatacatggctcctgagtacctgacacgtgggaactactctgtcaagtcagacgtattcagcttcggcgtcatggtccttgaaatcgtgacaggtaggaagaacaaccacagctacaactcccaacaatctgaagatctcttgaccatgatctgggagcaatgggtggccgggacggtgctggagatggtcgatccgagcatgaacagcttcttctcggagagcgacgtgatgagatgcatccacattgggctcctctgcgtgcagggtgacccggcgaaccggccggtgatgtcgtcggtggtgctgatgctcggcacggacaccgtcgaactccatgcccccgcgaagccgacgctcttcgccaggaaaggcggcggcgacgaatccggcgtcgcgtccggcggcatgtcaatcgtgtcattggaggagcagtcgtag

SEQ ID NO: 855 - DNA, 1320 bp, Oryza sativa
atggagagtagagggaagatactaatggagaggtatgagttgggcagattgttggggaaaggaacatttggcaaggtgcactatgcaaggaatctggagtcaaaccagagtgtggccataaagatgatggacaaacagcaggtgttgaaggtcgggctttcggagcagatcagacgtgagatcacaaccatgcggttggtggctcataagaacattgttcagcttcatgaggtcatggcaacacggaacaagatctactttgtgatggagtatgtgaaaggtggtgagctatttgaaaaggttgcaaagcgtggaaagcttacagaggttgttgcacataagtacttccagcaactcattagtgcagtggattactgccacagtcgaggtgtgtatcaccgggacttgaagcctgaaaacctgctgttggatgagaatgagaacctgaaagtctcagactttggactgagtgcgctttcagagtcgaagaggcaagatggcttactccataccacctgtggaacacctgcatatgtagctccagaggtgatcagcaagataggatatgatggtgcaaagtcagatatttggtcttgtggtgttatcctgtttgttcttgttgctggttaccttcctttccagggcccaaacttgatggaaatgtatcggaagatacaacatggtgaattcaggtgccccggttggttttcacgcaaacttcagaagttgttgtacaagatcatggaccccaacccaagcacaaggatttcaatccagaagataaaggagtctacctggttccggaaaggtcctgaggagaatcgtattttgaaggaaagaactttgaatgaaaacaccaccaaaaatgttgctctggtgcttggtgtgagacgcaagaaaaatgctcatgaagatgtgaagcccatgtcagtgacaaacttaaatgcctttgaaattatctctttctccaaggggtttgatctctctggcatgttcattgtaaaggaatggagaaatgaggcaaggttcacttcagataaatctgcctcaaccataatctcaaagctagaagatgtagcaaaggcgctaaatctcagggtaaggaagaaagacaatggtgtagtgaagatgcaagggaggaaggagggaaggaatggtgttcttcagtttgacatagagatatttgaggttaccacttcctatcatatcatcgagatgaaacaaacaagtggcgattcattggagtaccgacagctactggaggagggcatccggccagctctgaaggacattgtcttggcctggcatggagatgaatag

SEQ ID NO: 856 - DNA, 1141 bp, Oryza sativa
tctttatcctagggtatcaagggactgcgtgatgagattgctgctgggattgcctcccgtgatggtttccctgcaaatgcagatgatatattcctaactaatggagcaagtcctggtgtatgtcctaccttggtacacatgatgatgcagttgctgataaggaacaacagagatggcattatgtgtccaattcctcaatactcattgtactcagcatccctagcacttcatggcggagctcttgtatgtgccatattatcttgatgaatcctcaggatggggtttggaggtttctaagcttaagaatcaacttgaagatgccaggtcaaaaggcataactgttagggcgttggtggtgatcaatcctggaaatcctactggacagcaatatgagctagtaaagttctgcaaggacgaggaacttgttcttctggcggatgaggtataccaagagaacatttatgttaccaacaagaagatcaactctttcaagaagatagcaagatccatgggatacaatggagacgatttacaattagtatcattgcattctgtttctaaagggatattacggagagtgtggcaagagaggcggttacatggaggtcactggcttcagcactccagttagagaacaactctacaaaattgcatctgttaacttgtgttcaaatatcaccggccagatccttgcgagcctcataatggatccaccaaaggtgcaataacatatctgtccttacacgaaatgctggggacgcatcttatgacctctacgaggaagagaaagacaacatcctaaaatctttatctcgtcgtgcaaaggagtctgcatttaacagtattgatggaattacatgcaacaagacggaaggggcgatgtatctgttcccacggatttatctaccacagaaggcaattgaggctgccagggctgtcaacaaagcacctgatgtattctacgctctacgtcttcttgataccaccggcatcgttgtgactcctggatctggttttggacaaggttgcagggacatggcacgtgagatgcacgatcctgccgcaggaggagaagataccttcgatgatctcccgcttcagggaattccatgaggagttcatgtcacagtatcgcgactga

SEQ ID NO: 857 - DNA, 1120 bp, Oryza sativa
tccaagtttactcagcaggagctcccagcttgcaagccgattcttactccaaaatgggtcatttcagttttcgttcttgtcggagtcatttttgtcccaatcgggcttgtttcgttgaaggcttcacgaaaggttgttgagattgttgatcgatacgatgatgcatgtgtcccagctaatacaactgacaagcttgcttacatccagaacccaacaataagcaaaaactgcagaaggactcttaagccaatctttgtgtattaccagctggataacttttatcagaatcataggaggtatgcaaatatactttctgatgtcacaagtatttcaactatcagtacaaataaacccttggatgggatatatgtccagtttatgcagcagttctgttgaaatggagatatgtcaagagccggagtgatgcacagctaagagatcccaaaaaggcaaatgacacctccacttgtgatcccgagggtacagcaaatggaatggcaattgttccttgtggtctgattgcatggagcatattcaatgatacatatggctttgttcgcaacagtaagaacctgccagtggacaagaaaaacatctcttggaagagtgacagggagcacaaatttggacgtgatgtctttccaaagaacttccagaatggttctcttataggtggaaaaacacttgatccaaataaatcgttgagtaaacaagaagaccttattgtttggatgagaactgctgcacttccaacattcagaaagctgtatggtaggatacacactgacctcaagaaaggtgacaccattacggtgacattggagaacaactacaacacatatagctttagtggcaaaaagaagttggtactttctacctcgacatggctcggtggaaagaatgattttcttggtctagcatatctcagtgttggtggactctgcttcttcctggcatttgcattcaccttgctgtacttgataaaaccaagggtgacaacaactacttgtcatggaacagaaaccctgcaggccgttaataagctcttcaaacttttaagttgcaaattcaacatgaagcaagttggattatggattcaaatgtatcttgtactagatag

SEQ ID NO: 858 - DNA, 1098 bp, Oryza sativa
atggcggcttcaatgaattcgaagcttcccctggctcttgtgctcctcctgctgtgcggcggcgcatgcgtagcggtagccatgcccagtgaattgtccatagttggctactcggaggaggatctggcgtcgcatgagaggctgatggagctgttcgagaagttcatggccaagtaccgcaaggcctactccagcttggaggagaagctgaggaggttcgaggtgttcaaggacaacctcaaccacatcgacgaggagaacaagaagatcaccggctactggctgggcctcaacgagttcgccgacctcacccacgacgagttcaaggctgcctacctcggcctcaccctcactccggcgaggaggaacagcaacgatcagttgttcaggtacgaggaggtggaggcggcaagtttgccgaaggaggtggactggaggaagaagggggcggtgacggaggtgaagaaccaggggcagtgcggcagctgctgggcgttctcgacggtggcggcggtggaggggatcaacgccatcgtgaccggcaacctgacgcgcctgtcggagcaggagctcatcgactgcgacaccgacggcaacaacggctgcagcggcggcctcatggactacgccttctcctacatcgccgccaacggcggcctccacaccgaggagtcctacccgtacctgatggaggaaggcacctgccgccgcggcagcacggagggggacgacgacggcgaggcggcggcggcggtgaccatctccgggtacgaggacgtgccgaggaacaacgagcaggccctgctcaaggccctggcccaccagcccgtcagcgtcgccatcgaggcctcaggcaggaacttccagttctacagcgggggtgtgtttgatggtccgtgcggcacgcggctggatcatggcgtgacggccgttggatacgggacggccagcaagggacacgattacatcatcgtgaagaactcgtggggatcgcattggggtgagaaggggtacatccggatgaggaggggcaccggcaagcacgacggcctctgcggcatcaacaagatggcctcctacccaaccaagaacgcttaa

SEQ ID NO: 859 - DNA, 1030 bp, Oryza sativa
atggcggcgcgtggtgcttgcgatcctcctggtcctggcgcctccctgcgccgcctcgtcctgctgctcgctctgtcggtgtcggcgctcgccgcggcggacgcatccggggtgttcgaagtgcagcgcaagttcacgcgccacggggacggcggggagggacacctctcggcgctccgggagcacgacggacgccgccacggccgcctcctcgccgccatcgacctccccctcggcggcagcggcctcgccaccgagaccggattgggatcggcacgccggcgaagcgctactacgtgcaggtggacaccggcagcgacatcctctgggtcaactgcgtctcctgcgacggctgcccgcgcaagagcaacctcgggttgcagattgagctgacgatgtacgacccgagggggtcccaaagcggggagctggtgacctgcgaccagcagttctgcgtcgccaactacggcggcgtgctgccgtcgtgcacctccacgtcgccgtgcgagtacagcatctcgtacggggacgggagctccacggccgggttcttcgtcaccgacttcctgcagtacaaccaggtctccggcgatggccagaccacgccggccaatgccagcgtctcattcgggtgatttgcaggtgtggtgctaagctgggtggggatttggggtcgtcaaacctggcactcgatgggattcttggatttggtcagtcgaactcgtcgatgctgtcacagctcgccgccgcgggaaaagttcggaagatgtttgcgcattgcttggacactgtaaatggtggggggattttcgctatcgggaacgtggtgcagccgaaagtgaagacaacaccgttggtgcccgacatccacactataatgtcatcttgaaaggaattgatgttggtggtaccgcactaggacttccaacaaatattttcgattcaggtaacagtaaaggtaccatcattgatagtgggacaacattggctgcttccaatattctggaaggtcgatgatggatttcctgaa

SEQ ID NO: 860 - DNA, 1003 bp, Oryza sativa
atggcgggggatggtgtggactgggagagcgtggcggaggccacgtccggggcggtgggcgcgctcgtcagcaccaccgtgctctacccgctcgacacctgcaagaccaagttccaggccgagctccagacgcagccgggcgcgcacaagtacagaggaatctttcagatgtcttttgggaagctgttcagaaaagacaaattctatccctatatcagggccttaagacaaagaacatccaatctttcatttcacaattcgtttacttttatggctatagctactttaaaagactctacttggagaagagtggagcaaagtctatcggcacaaaagcgaacttgttagttgcagctgctgctggtgcttgcacagttgttgttactcagcagccactagatacagcatcttctagaatgcaaacaagtgcctttggaaagtccaaagggctgcgggcaactcttgccgaaggcacttggcttgaggcatttgatggcttgggaatttctcttatactaacgtgtaatccttctattcagcagtatactgtatttgatcagctcaagcagaagctaattcagagacagagacgtaaaaatgcagaagcagggggtggttcttcaccagttgctctttctgctttctcagcatttctccttggtgccatctcaaaaagtgttgctacaatattaacctacccactaatcagaggtgcaaggtcatgattcaggctgcagaccctgatgaggatgatgacgatgaatctgaaaggccaggaaaatcaaaatctcccaaaacaatgttgggcgctttgcatgccatgtggagcaaggaaggcatcccaggcttcttcaaaggattacatgctcagatactcaagactgtcctgagttctgcattgctgctgatgataaaggagaagatttcaagatttacttggatttcactgcttgccctgcggcgatatctctttgtttctcagaagagaatcaagagtgcataa

SEQ ID NO: 861 - DNA, 1002 bp, Oryza sativa
  N_region (196)..(196): n = any nucleotide
atggctcggtcggcgctcgacgaggtcaccgacgccggcgccttcgaccggtcgccgtccaccttccggagctctatctccagggacagctccgcccggttccccgccgtgccggggaggtaccacctctacgtctcctacgcgtgcccctgggcgtcacgctgcctcgcctacctcaagctcaagggcctcgacnacgccatcggcttcaccaggaccagggagacggacgaccatcttgggtgggtttttccggccaccggagacgaagagcccggcgcagacccggatcctttcaacggagccaagaccatcagggagctatatgagattgccagcccaaattacatcgggaaaccaactgttccgctgtgggacaagcagctcaagactgtggtgaacaatgagagctcagagatcatccgaatgctcaacactgagttcaacgagatcgcaaagaatcctgacctggatctctatcctgctcatttgcaaacctccgtcaatgagatcaatgagttggtatacgatgcgataaacaacggcgtgtacaaatgtggctttgccaagaaacaggggccatatgatgaggctgtcacgagattatatgaggctctggacaaatgtgaggaaattctaagcaggcaacgttatatatgtggcaaccagttgacagaggctgatgttcgcttgtttgtaactcttataagatttgatgaggtttatgctgtccacttcaaatgcaacaaaaggctcctcagggaataccccaatctgttcaattacaccaaggacatctaccagattcctggcatcagcagcacggttaacatggagcacataagaaagcactactatggaagccatccgtccataaatccctacgggatcatccctgcaggccctaacatcgattacaacgctccacacgacagagagaggtttagtgcctaggagaagataagtagtactccctccgtttcacaatgtaagtcattctag

SEQ ID NO: 862 - DNA, 977 bp, Oryza sativa
gttagaaaacggacatagtggtgcagtcatggcttctaactcttcagatagatctgacagatctgacaaacttatggaccaaaagcggcggcttgctcaaaatcgtgaggcagcaagaaaaagtcggctgaggaaaaagaaggcatatgtgcaacaactagagagcagtaagctgaagcttgcacagctagagcaggaacttcagaaagctcgtcagcagcagggaatcttcatctctagctctggagaccagacccatgccatgagtggaaatgggggcattgacttttgacttagaatacactagatggctcgaggagcaaaataagcagataaatgagttgaggacagcagtgaatgctcatgcaagtgacagtgaccttcgtcttattgttgatggcataatggcgcattatgacgaggtattcaaggttaagggtgtagctgcaaaggccgatgtgtttcatatactttcaggcatgtggaagacacccgcagaaagatgcttcctgtggcttggtggtttccgtccatctgagcttctaaagctcctagcaaatcacctcgaacctttaaccgagcagcagttgctgggattaaacaacctccaggaatcttctcagcaggcggaggatgcactttcacaaggtatggaagcactgcagcaatctctggcagatactttggctggatctctcggttcatcagggtcttctgggaatgtggcgaactacatgggtcagatggcaatggccatgggtaaactaggaacgctcgagaatttcctttgccagcaggcggacaacctgcgacagcagacattgcatcaaatgcaacgaattctgacgatccggcaagcctcgcgtgctcttcttgccatacacgattacttttcacgcttgcgtgctttgagttcgctgtggcttgctaggccacgggagtaacaaaatggtcatgtgtgcctgtgacgaggttag

SEQ ID NO: 863 - DNA, 964 bp, Oryza sativa
atgtattgttttaaggcaagcacttttagcacagtcaaggtgagcaatgtgtcactgaaagcatcactgcgagatgtaaaggaattcttttccttttctggtgacattgtgcatgttgaaatgcaaagagcagtgatgagctgtctcaagttgcctacattacttttaaagacaatcaaggatctgagacggctatgcttcttacggtattctttctcacatcaatggaaatttgttgtcccagggtgccacaatagttgatatggctgtcattgtcacgccagctaccgattatgagctaccagcttctgttttagctgctctagagaaggcagaggacattgttgggaccatgctggccaagggattcattttaggtagggatgcactggacagagcaaaagccttggatgagaagcatcaactcacatcaactgcaactgctagagtatcttcctttgacaagaaaatgggtttaagcgagaagatcagtgttggcacttcggctgtaaatgataaagtgaaggaaatggatcagaaataccaagtctctgagaagacaaggtcagcactggcagctgctgaacagagtgtctctactgctggatctgccatcatgaagaacaggtatgtccttactggagcagcatgggtaactggtgctttcaataaggttgccaatgctgcaaatgatgttggcacaaaagcaaaggaaaaaatagcatctgagcaggagcacaagactgtagagcttgagtctgcagaacctaacagctcagaaggccatggaacacaaaaggatgtggatggtgaattcgccaagatacaggtctctgaatcccctgaagatattcccatctctacgactgcaaccgtccccattactgatgaggattccagtcaggcgtctccacctgccgcctctcccaaaaagccagaacctgcgcaggggttgatactatga

SEQ ID NO: 864 - DNA, 963 bp, Oryza sativa
  N_region (49)..(49): n = any nucleotide
tccatcaggactaagggccggggaagctctacactcccctcaatcgcgnaaccggagccgcttcctcggtacaacaagcattggagacgaaaggcacactcaatgtgtgtctgcaccatgcttcgcaaccaagcacggttcctgcgggaatggatcatctatcactcacgtattggtgtgcagcggtggttcatctatgacaacaacagcgacgatggcattgaggaggtcctcaacaccatggattcatccaggtacaatgtgacacgctatttatggccatggatgaaatctcaggaggctggatttgcacattgtgcactcagggctcgagagagctgtgagtgggtggggttcattgacatagatgagttcctgcacttccctggcaaccaaacactacaagatgtcctccgaaattactctgtcaagccacggatcggtgagctcaggactgcatgccatagttttggtccatcaggccggactaagatcccaaagaaaggtgttacaacaggctacacctgccggctggctgcacctgagcgccataagtcaattgtcaggccagacgcattgaacccatccctcatcaatgtggtgcaccacttccatctgaaggaagggatgaaatatgtgaacattggtcagggtatgatgctgatcaaccactacaaataccaagtctgggaggtgttcaaggataagttctccggacgtgtcgcgacatatgttgctgattggcaggacgaggagaatgttggatcaagggacagggctcctgggcttgggaccaaaccggttgaaccagaggattggccgagacgtttctgtgaagtatatgataacggtttgaaagattttgttcagaaagttttcacagacccacacactggaaatcttccatggtagattggtaaacactgtatttggtcttgcacagcacggcaccacaatacatga

SEQ ID NO: 865 - DNA, 916 bp, Oryza sativa
atggctgctgccgcggcaaggtgggccccggtcgtcggcctattgggcctcctgctgctcccgttcgcgcctgctccggcgggagccgcaacgcccgcgaggtcgccgccgtcgtcggcctcctccgccgtgttcctcctcagcggcgatgtctaccccaccgggttactatgaacattggggacccagcgaagccgtacttcctggatgtcgacaccggcagcgacctcacctggctgcagtgtgacgctccctgcccgtgtgcaaattcaatctgtactgcgttgcacagtggatctagccctaataagaagtgcaccacacaacaacaatgtgattatcaaattaagtacaccgacaaggcatcttctctcggtgtgcttgttatggacagtttctcactgcccctgaggaacaaatccaattgtggatatgaccaacaagtggggaaaaatggtgcagcaccagcaacaacagacggcttgcttgggcttggtaggggatcagttagcttgctctcacagctcaagcagcaagggatcaccaagaatgtactcggccattgtctcagcaccagcggagggggattcctcttctttggggatgatatggttcccacttcacgctttgacagtggtagcacatatacatacttttctgcgcagccataccaagcaactatttctgcgcttcctctgtgctggaaagggcagaaggcattcaaatctgtttctgatgttaagaaggacttcaaaaaaatgggaatgtgtgcttgggcatccttgatggatctgctgctaaggacattacaatgcaggatcagatggtgatatatgataacgagaaagcacagcttggttggatccgtggatcatgtagtaggagccccaagtctattatgtcttcctttccatga

SEQ ID NO: 866 - DNA, 879 bp, Oryza sativa
cttcaggcactttatcattgcatcccttttcgggagcagttgctggaatattatgcaacttacaaaaacacagaagactccgaggacaatttgttgacttgtctggctgatcttttttcacagaagaaaaggactggtgttcttgcaccaaaacgttttgttcaaagagtgaggaaacagaatgaattgttcagaagttatatgcaccaggatgcccatgagttctggaatttcttagtgaatgatattattgatattcttgaatacattggtgcacaggacttttcagcagggtattttgaccaatgaaaccaaatgcctaatgtgtgatactatcacagcaaaagatgagacgttttttgatttgagcattgacgtggaacagaatagttcgctcacaagctgcctgaagagcttcttttccactgagattttaaatggcgaggataagttcttttgtgacaaatgcagcagagtttgcaagaagcacacaagagaatgaagataaagaaggcgccacacgtattggtgatccacctgaagcgcttcaagtacgttgagcagcttagccggcacaagaaactgtcgtaccgagtggtatatcccctggagctgaagctgggcagcatgtctgaagacgctgactgcgagtactccctctttgcggttgtagtccatgttgggagcagccccaaccatggacactacgtaagccaaattaaaagccatggtaactggctttctttcgacgatgacaccgtccagatcagcgaggaatccaccctgcaaacattctatggctcttctcgggagcattgtggtggcaacacagatcatggctatatcttgttctatgagcgccttggtgggaagagctag

SEQ ID NO: 867 - DNA, 770 bp, Oryza sativa
gaagaacaaactgacccttacaagattccaacaaagcacaacataaggatggccatgtattggcttgtacaaggttgccagcctggagactcattggtattccattattctggtcacggagcacaacaaagaaactacagcggagatgaagttgatggaatggatgaaaccctctgcccattggattttgagacacagggaatgattgtggatgatgaaataaatactgctcttgtcagaccacttactcctggagttaaacttcatgcactgatagatgcttgtcacagtgggactgcacttgatttgcctttcctctgcagaatgaacagacaggagtgggcaatatgtatgggaagatcatcgacctcgatctggtgtctggaagggcactagtggcggcgagtgtatttcatttagtggttgtgacgatgatcagacatctgcagatacttcagctttgtcaaagatcacttcaactggcgctatgacattttgctttatccaagcaattgagcgtgggcagggcaccacctatgggagtatcctgacctccatgcgttcgacaatacgcagtacaggtgattcaatgggcagcggaggtggtgctgtaacatcgctaatcacaatgcttcttacaggaggcagcgttagtagtggcggcttgaagcagtgcaggatccacagctaactgcaaacgagccattcgatgtgtatgcgaagcccttttctctatgacacgatcctggtattctccaccgcgtctatga

SEQ ID NO: 868 - DNA, 732 bp, Oryza sativa
atggcggctgctggtgaagaagcttcaggaggcggggacaagtaccggtcgttcatgtacggcgagggggagaaggacaccgtgtggaggcttggatcccctccaaactacgacgtcgtcaacaagctcttcgaggaagagagaaccaagaggaatggccagaggggtctctggaggagaaggtccagagattgctgaagacctgggagatggagctcgtccacaaggtgcgaccagaggaccagaagagtgtccactcgcagaaattctgctccagcaccaatggggatgaggtttctgaatcggaaggatttgatggccatcggcagctacaacgcgttcttgcagacgaagctgccaccggagcaccgcatctacgacccggacaaggagacgctggagtccggcatggccaccttcctgacggcgttcccgcgtggcttcgccatcgaggtgctcgacgtctacagtggcccaccacggatcgtcttcaagtttcggcactgggggcacatggagggccccttcatggagcacccgccccatggcgagcgggttgagtttttcggcatttgcattttccatcattaggttgacgaggagatgaaggttgagaaggcggaattcttctacgaacgcggcaatttcctcgcgagcttcttgagcgcgcctgctgctgctgctactgatgctgcgtcaggctcaggatgccctgtcatgggaggaaattaa

SEQ ID NO: 869 - DNA, 687 bp, Oryza sativa
ctcatgacctcaactgtcggtaaatcaacaaacatccgatggcatgactgcccagtaaaccagcttgacagacaaaagttgctgaaccagaagggctgtgttgtttggatcactggcctaagtggttcagtcaacttcaggaaaaagcacccttgcatgtgcactgagccgtgagctgcactcaagagggcatctgacctatgttcttgacggcgacaatctccggcacggcctgaacaaagatctcagcttcaaagccaaggatcgtgccgaaaatatacgcagagttgggagaagtggcaaagctgtttgcagatgctggattgatctgcattactagtttgatatcaccctataagagtgatcgaagcgcctgccgcaaattactacccaattcttcgttcattgaggtgttcctgaatgtcccacttgaagtatgtgaagaaagggatccaaaaggcctgtacaagcttgctcgtgccggcaaaatcaaagggctttacgggaatagatgatccttatgaaacaccttcagattgtgagggggactgcccttcacctaaatcaatggctgatcaagtagtgtcatatcttgaagccaatggattctttcagaactagagagttgaatgattgtgaatttgtccatgtacctccagatgctgtagcaaagtcaggcccttttga

SEQ ID NO: 870 - DNA, 654 bp, Oryza sativa
atggcaggccttgatttgggcaccagctacctccaccaccaccaatcactgcatctccgccacgacgatggcggcgccggctccgacgacggcggccacgacgacctctcgccggggagcggcggtggcggcgggcccagcagcacggccggtggcgccgggatcggcggcggcgaggtcgtcgctcgccgcccccgcggccgcccgccgggctccaagaacaagcccaagccgccggtgatcatcaccagggagagcgccaacgcgctcagggcgcatatcctcgaggtagccgccggttgcgatgtgttcgaggcgctgacggcgtacgcgcgccgccggcagcgcggggtgtgcgtgctctcggcggcggggacagtggcgaacgtcacgctccggcagccgcagtcggcgcagcccgggccggcctcgccggcgacgctgcacggcaggttcgagatactctccctcgcgggctccttcctggccccggcccgcgccgccgggcgccaaccagccttcgccgcgttcctcgccggcgggcaggggcaggtcgtcggtggcagcgtcgccggcgcgctcatcgcggcggggcccgtcgtcgtcgtcgccgcgtcgttcagcaacgtggcgtacgagaggctgccgctcgag

SEQ ID NO: 871 - DNA, 644 bp, Oryza sativa
gcgcggagcatctcgcagctcgtcaagaccaacggccgccgcgccttcctcgtcgacaccctcgccctggtgaggaagctggagtcgcagggcgtgcccacgaagcaggcggaggcgatcacctccgcgatcacggaggtcctcaacgacagcctcgagagcatctccgagtccttcgtctccaaggccgagatgcagaagggctgagatgctgcaggagtccaatatctccaagttcaagtcgcaagtgcagagctcgcagaaccatttctctttgttgcagcgtgagactgagaaactccgtggagatattgataagatgaggagtgaactgaaaggtatgagattgacaaggtcactgcaggtcagcggctggatctaaaccttgaaagaggaggcgcatccgtgatgaactcgccaagcagaatgaggaaactacagaactcaccacaaagctagacaaggaaattcactcactgaaagcccagctcgaggcagcaaagtatgatgtcatcaagtactgcataggtaccattgtttcgatatcagctgttggactcgccgtgctccgcattgtgatgtgaagcacagatacgttctttcctttacccattcatccatggaaactgcaagaaagaggatag

SEQ ID NO: 872 - DNA, 617 bp, Oryza sativa
atggagctttccttgatagggcttcaaaatgctgggaaaacatcgcttgtgaatgtcattgctgtaggattcaacatgagaaaggtgaccaaaggtaatgtcacaataaaattgtgggatcttggaggccagccaagattccgtagcatgtgggagagatactgtcgtgcagtttctgcaattgttatgttgtggatgcagccgatcgagagaacatggctattgccaaaagcgagctccatgatcttctgagcaagccttctttgactgggatcccattactagtcattggcaataaaattgacaaacctgaagctttccctaagcaaagcttcacagacgtaatgtaagtacacgctaagctattacagaccgataaggttttcttacgcacaaacctgtgttcgacaagttatatgtgacattgcagggggctaaagacaatcactgaccgagaagtggcatgcttcatgatatcatgcaagaactcgacaaacattgactctgtcatcgactggctcgtgaagcactcaaaaaagaagaattgatctaaatttttagcttttgaagtacgcagattctctctttttgcatgttgcgtagcacttggcctgtaa

SEQ ID NO: 873 - DNA, 609 bp, Oryza sativa
  N_region (75)..(75): n = any nucleotide
  N_region (84)..(84): n = any nucleotide
atgggagtgctccgggcggcggtgcccctgcaggcggacgccgacctcgtcctggctaccggcggcggcggcgancgggggcangtggtggggctcgtcctcgtcgacgtctccaacgggttctgcaccgtcggcgccgggaacatggtggatgaggccgctaggctcgccaaggtgttctgcgagaggaactggccagtctttgcgtttcttgacacccactaccctgataagcccgagccgcctttcccgccacactgtataattggttctggcgaggctctggagtggctggaaaaggatccaaatgtaacgatcaggaggaaggattgtattgatggttatcttggtgcatttgagaaagatggctcaaatgttttttcagattgggttgcgaagtttcagatcaaaaccgttttaggaatatgcacagacttttgtgttttggattttgcaagttcagctttggctgccaggaacattggccgagtgcctccgctggaagatgttgtcatttattcagagggttgtgctacgtataacctcccagttgaagtagccaggagtatgcaaggaaccttggctcatcctcaggtattggatcactga

SEQ ID NO: 874 - DNA, 450 bp, Oryza sativa
atggcaagcaaaaggattcagaaggaactcatggatttgcggaaggatccaccaacatcatgcagtgctgggcctgcaggagaggatttattccattggcaggccacaatcatgggccctagcgacagcccctacgctggtggggtgttctttgttaacatccatttcccccctgactacccttttaagcctccaaaagtgaacttccaaacaaagcaggtgtatcacccaaacatcaactccaatggaagcatttgccttgacatcctcaaggagcagtggagcccagcattgaccatatcaaaggtcctcctatccatcagctctcttctcactgaccccaacccagatgatccccttgtcccagagatcgcccacgtctacaagagccagaggccacgttatgaggagacggcgagggcctggacccagaaatacgcaatgggttag

SEQ ID NO: 875 - DNA, 436 bp, Oryza sativa
  N_region (121)..(121): n = any nucleotide
atggcggcggcggcggcggcggcgaagaggaagccggtgttcgtcaaggtggaccagctcaagcccggcacgggcggccacacgctcgtcgccaaggtgctcagctccaagaccgtggtcnagaagcgcgccgaaacgcgagcgggcccggcggcgcgtcccacgaggatcgccgagtgcctcatcggcgacgagaccggctgcatcctgttcaccgcccgcaacgagcaggtgtattctatttacagttgacctgatgaaggctgacagcactgttattatccgcaatgcaaaaattgatatgttcaaaggatcaatgaggcttgctgtggacaaatggggccgcattgaagtgactgaaccggcaagtttcaacgtaaaggaggataacaatctctcacttgtggagtatgaacttgtcaatgttgaagggtga

SEQ ID NO: 876 - DNA, 320 bp, Oryza sativa
atgggcaagacatgggcgatcatcacccacctcaactccattgctggccaagcatcacgcttctctatccgcttacgcgtccatctgcgcgatggagagcccgaccaaggttgacgacgagcagtggctggcctactggatcctctactccttcatcaccctcctggagatggtcgccgagcctgtcctctactgggattccggtgtggtatccggtgaaggtgctgttcgtggcgtggctggtgctcccgcagttcaagggcgcctccttcatctacaagaagctcgtcagggagcagctcaggaagtaccgcgccagg

SEQ ID NO: 877 - DNA, 1203 bp, Oryza sativa
atgcagaaaagacagtgcaaaagcagtggtgtcatgtgtgtgccatgtgatgtaaagcaccagctcttatatagcttcaaaagcgtgaagattctttgtcaaacagcaaggatagttcaggttggtgctaaagccttcaggcagctgctaaatcgaacgcgacgccgcacccaccgcgcccaattcaccgccgagatctcaaccccataccccatggggatctcccacccgctgtccgacgacttcgacgcttctcccgtgctctcgccgccgccgccgccgtcctcatgctgcccccccgcccacgacgaccactaccttgagcatcagatatctgacatcaagagggcaaacagtttgatgactgacagccagatgttcgcacacaaaatgttgctcatacctctaccaggaagacccatgccatcctctgtaaggctcaatggttctggtcagaaaatgaagagagcgtgggctccaaacaatcagcaaaacagagatgttacggattcgctagactcatccaactacaattcttctaagcagcaaatgtcactcgccatgagcaccttgcagtcctattatggtctaactcctcaaaatggggctatgacagatgctggcactgagatgtccttgtacagtaagggcagtttggagcgtatcaacagtgaaacattggtcacttcatctagattaccagacacacataataccgacagaagtaggaactctgaagacacgtcgaatggcttttcagcaacaaacggtgccagtggggccaagatcaatgggacagccaaagcaaagcaagatggttccattcgtcggcggcaaaaagttgaagctgatcaagtgtctaacaccacagatacccaggacgatgtttttacagacccaattaagatgaccaagagtttgttgccaaggccaatttctagtatccgacaaaacatggacacaagcaacccagagtccagcctgaagagcaatggttcatttctgagcggatttagatcagtgcggaagtcgcctagcacaccaaactttgcagatgcagagaatgggatctctatgtggtcaagctcggcatggactttcaaccatgagtcgttcacgcgaccattgcttgatggccttccgaaacccacagcacctagggaggaccaaagctgctttggattgagctgcctgtggctgtag

SEQ ID NO: 878 - DNA, 693 bp, Oryza sativa
  N_region (60)..(60): n = any nucleotide
  N_region (111)..(111): n = any nucleotide
atgctcctcgtcagatcccaccacctcctcctccaccgccaccaccacgccgcccgcctntccccgcgcctccaccgcctcctcctccgccacccgccgccgctcccccgngccgcctccgcggccagtaggctccgcccgccacgcatgtcgtcggcctcctcctccaacgccagctcccccgccccctcgccgcctccccccgtggtgcccaagtcaaagatacgcttttgcccatcttgtggaagcccgacgaaactggctattccagatggagatgaaaagatgagggctgtctgctcttcttgtggaagagttcactatgagaaccccaaaatggttggagagtctgcagcggaaggagcctcccgggaaacattggaggaagcttgtgcagatgtagagatactttcaccttttgctcagttggatattccactgattggccaaacccccaacttctcacctggacctgaatcgctagaatgtgcactttttgccttggatgacataccatttgattctctagcattttcttcgatcattgtcaccttgaggatgtatcttgaagatgtcaagtccggaaatatcaaattccactactgcactataaacaaaaggtacgaccactacccacttgtcattaccatgtctgacaatcctgatggctattgcaacttgcaagtttgctaa

SEQ ID NO: 879 - DNA, 357 bp, Oryza sativa
gacctagcgggtggtaattggtggttgcaagtgcaaggcaaatatgtgggttactggccatcgtccatcttcacccacttgcagacaggcgttgctgacactgtggaatggggcggggaggtgaattcgcctcgaagtaccacacccatgggcagtggacatttccctaaagaaggattcggcaaggccacctacagcaaagcaatccaagttgttgattcctccaacaaacttaaatcaccaaatggtgtgagcttgatagctccgctacccaattactataacgtcatgactggttcctctagtaccacaagctggggcacttacatctactatggcggatctggatgcccttga

SEQ ID NO: 880 - DNA, 351 bp, Oryza sativa
atgcaccgggcaacaagaaggggatatacgggcgatccgccaacaaaggtactagagagagagaacgccgatgcgcacaaggatcaagtcaagggcttaaacggcagaatcagtaaattaaacgacacaataaaagagttaaacgacacgatcgaggcgctggagaggcaggttcagaacctgaccaggtacaaggaagagaagcagaagcagcacgcgaatcttcagaaagaattcgcagagctggagaggaaatacagagacctggatgcagcccacaggaattgcggccccactgtcagattccctgttttcaccgtcggacaaccctactatcaccgccacaattga

SEQ ID NO: 881 - DNA, 3582 bp, Oryza sativa
  N_region (294)..(294): n = any nucleotide
atgggtaatcaccgcttgctgctgctcctcctcctcctgctcgcggtcgttggctctgatcatgggggcgtgctcgccgccgacgagttcacctacaacggcttcggcggtgccaacctcacgctcgacggcatggccgccgtggcgcccaacggcctcctcgtgctcagcaacggcacgaaccagatggccgggcacgcgttccacccgacgccgatccgcctgcggggcggcgcggcgggcggcgccgtccagtccttctcggccgcgttcgtcttcgccatcgtgtccaanttcaccgtgctgagcgacaacggcatggcgttcgtggtcgcgcccagcacgcggctctccaccttcaacgccggccagtacctcggcatcctcaacgtcaccgacaacggcaacgccgataacaacatcttcgccgtcgagctcgacaccatgctcaacccggagttccaggacatgaacagcaaccacatcggcgtcgacatcaacagcatgaagtccgtgcagaaccacagcgccggctactacgacgaagccacgggggccttcaacaatctgagcttgatcagccgccagccgatgcaggtgtgggtggactacgacggcgccaccacggtgctcaacgtgacgatggcgccgctcgacgttcccaagcccagtaagcccctcatctccgcgcccgtcaacctctcgtccgtcgtgaccgacacggcgtacgtcgggttctcggcggccacgggcgtcatctacacgcggcactacgttctcggctggagcttctcccagaacggcgccgctccttctctccacacctcaagcctcccggcgctgccgcggttcgggccgaagccccgttccaaggtgctggagatcgtgctcccgatcgccaccgcggcgttcgtcctcgcgctggtcatcgccgccttcctgttcgtccggaggcgggtgaggtacgccgaggtgcgggaggactgggaggtggagttcggaccgcaccgcttctcctacaaggagctctaccaggcgacaaaggggttcaagaacaagcagctgctcggcaccggcggattcggcagggtgtacaagggcgtgctcgcgaaatccaacctcgagatcgccgtgaagagggtgtcgcacgactcgaagcaagggatgaaggagttcatcgcggaggtcgtcagcatcggccacctccggcaccgcaacctcgtgcagctgctcggctactgccggcgcaagggcgagctcctgctggtgtacgactacatgtccaacggcagcctcgacaagtacttgtacgacaagaccaagcctgttcttgattgggggcagaggtttcagatcatcaagggcgtcgcctccggcctgctctacctccacgaggactgggagcaggtcgtcatccaccgggacatcaaggcgagcaacgtgctcctcgacggcgagatgaacggcaggctgggcgacttcggcctcgcgaggctgtacgaccacggcgttgacccgcagacgacgcacctggtgcgcacgggcaaggcgacgccggtcaccgacgtgttcgcgttcggcgtgttcgtgctggaggtcacctgcgggcggcggccgctcggctgcatcgcgcccgacgaccagaacgtgctgctggactgggtgcaggagcacgagcgccggcacgcggccctcgacacggtggacgcgaggctgtgcggcaagtacgacgccgacgaggcgaggctggcgctcaagctggggctcatgtgcgcgcacccgttgcccgacgcgcgccccaccatgcgccaggtcacgcagtacctggacggcgacgcacccatgccggaggtggcgccgacgatggtgagctacaccatgctggcgctgatgcagaacgacgggttcgactcgttcgccatgtccttcccttccaccgtcacgtcgaccgccagccccatgtccgccgacgtctcggccgtgtccggcctctccggtggaaggatcgcgctggttaccgggggcaacaaaggggtcgggctggagacctgcaggcagctcgcgtcccgggggctcagggtcgtcctgacggcgaggaacgaggcgagggggctggaggcggtcgacggcatcaggcgctccggcgccgccgattctgatgtcgtgttccaccagttggatgtcaccgacgctgccagcgtcgcccggctggccgatttcgtccgggatcagttcgggaggcttgatatcttgatcaataacgcaggaatttcaggtgttgatcgggatccagttttggttgccaaagttaaagatcagattgaaggcatggatgtagatcagagagttgaatggatgagagaaaattcaaaggagacctatgatgaagctaaatcatgcattacaacaaactactatggtgccaagcttgtcacagaagcactacttcctcttcttctgttatcctcctcgggaagaattgttaacgtgtcatcaggatttggactactgagaaacttcaacagtgaagatcttagaaaagaattcgatgacatcgacagtcttactgaaaagagactagaggagctgttggatttgttcctagacgatttcaaggtgaacttaatagaagcacatggttggccaaccggtggatcttccgcctacaaagttgccaaagctgcccttaatgcatacacaaggattcttgccaagaagtaccctacactacgtatcaactgtttgacacctggttatgtcaagactgacatctcaatgcacatgggagtattgacacctgaagagggtgctagtaactccgtaaagaacagaaaccgtggcactacttcatcagcaatagctcttccagggacgctacgaagcagggttgctgtggtcaccggcggcaacaaagggatcgggctggaggtgtgccggcagctggccgccgacggcatcacggttgttctgacagccagggacgagacgaggggcgtggaggccgccgagaagctcagagggatgggcctttcctgtgtcatcttccatcatctggaggtcacggacagttccagcgtttctcggttggctgatttcttgacgactcgttttggcaagctagaaatactggtgaataacgcagcagttagcgggatggagcacgcccaaagagtagatactaacgaggaacagtggctcgtcaacaacgaggatctgaggaaggagctggacgacgttgataacctcaccgaggaacggctggacgaggtgctggacagcttcctgaaagacttcgaggccggcgcgctggaggcgcacgggtggccgacggcgccgttcgtggcgtacaagatggccaaggtggccatgaacgcgtacacgaggatcttggcgaggaggcacccggagctgcgcgtcaactgcgtgcacccgggctacgtcaagacggacatgaccatcaactcggggttcctgacgcccgaggagggcgggaggaacgtcgtgacggtggccctcctgccggacggcggcccgaccggcgcgtacttcgacgagggcagggaggcgtcattcctggaatga

SEQ ID NO: 882 - DNA, 1182 bp, Oryza sativa
atggcgggaaaaggaggtaagggcttgctcgccgcgaagacgacggccgccaagtcggcggagaaggacaaggggaagaaggcccccgtctcccgctcgtcccgcgctggtctccaggaaggtggtagtatgccagtggcaccaactgtggtggtttcagctaccatggaagccaaccatgataggactctgttccctgttggccgtatccatcgccagttgaagcaaaggactcaggcaaatggacgtgttggtgctactgccgcagtttactctgctgctattctggagtacttaacagctgaggttctggaactggctgggaacgctagcaaggatctgaaggtcaagcgtatcacccctcgccatctgcagcttgccatccgtggagatgaggagctcgacactctcatcaagggtaccatcgctggtggagtggtcaagagctttgttttctttgtcacttttcattattttacactccaggctgactggatccagcatagatatacggtacgtggaggatggtctactactcaaatccgagctaaagctactaaccctaatgaaaggttatcattctgttccaagtcaattcttgcatcaataaccaatacaagttgcccccctgctgtttatccccagaaacttacttaccctttactttcacccttggctgtcattcagtggtgtgactgtgaaggtggcggagcctgcatggaagggctgacgagcgagcagatggtggcgttccaggaggcgttcttgctcttcgacaagaacggcgatggatgcatcaccttggaagagctggctgcggtgactcgttctcttggccttgagccgaccgatcaggagctcaacgacatgatgagggaagttgatacagatggcaatgggatcatagattttcaggagttcctgagcctcattgccaggaagatgaaggatggggatggcgacgaagagctgaaagaagctttcgaggtcctagacaaggatcagaatggttttatctccccaactgagctgaggacagtgatgaccaatcttggggagaagatgacagacgaggaggttgagcagatgataagggaggcggataccgatggcgacgggcaggtgaactacgatgaatttgtgataatgatgaaaaacgctgaacggaagatatctgggtga

SEQ ID NO: 883 - DNA, 891 bp, Oryza sativa
atgtcagcaactaacgcgctcgcttccttcccgcctcgcctcaacgcaaagcgagatccccccctatacctattaatacctcatcttgtcgtctcgtatcatctcatctcatcacatcagcacacatcacacgcgccgattccgaagaaatcaatcaaccaactactaggcgaaagcaagagcggatcgggtgctgcatttcgcggtcgttttcttcctctgaattctggtgtttgcggttgcggcaatggcgttggtggcggcagcggcggcgaatccgaagcagaaacagaagcagcagaaggcgtcgatcgggaggcgggcgtggcggctgctgcgcctggcggtgctctgggcgaggaagggcagcgcggtgcacagcctccgcctgctcagcaacctgcggcgcgccggcgtgggcctcggcgtcgtcggccgaggcaccgcctggggtacggcgagcgggagtactcgatcgaggagacgccggcgttccggttccgcaagccgtcggcgcgggtgctccgcctaatcccctgcatcgcccccgccgtcccggacacgcccgggctctacggcgacgaggaccgctacttcttcgcccgccgcgacacggagcccgagtgcggcggcggcgtcgggtattacgactacaatggcgagccgggcgagtgcggcggcgtggacgacgagagcttccgcgacggcgcgatggaggagcagctcctcgagctgtccatgctggaggcgagcgccgccgccgtgacggaggacgccggcgtggacgccaaggcggaggagttcatcgccaaattccacgcgcagatgaagctacagaggcaaatctcatggctgcagtacaacgagatgatggagaggagcctccgctag

SEQ ID NO: 884 - DNA, 708 bp, Oryza sativa
atgcatcgcgcacgcctcctcgtcgtcgtcgtcaccgccgtcgtcaccctcctgctcctggcgccggccgccggagccgaggaagacgatcagttcggctacatccccggcacaccgagggggccggagaactggggcagcctgaagccggaatgggccacctgcagcagcggcgagatgcagtcgccgatcaacctcggcctcctcgacctcaccctggcccccggcctcggcgacctcaactacacctaccgaaacgccaaagccaccgtcgtcaaccgtggccacgacatcatggtcaggttcgacggcggcgatgacgccgccgccgccggcgggctggtgattaacggcacggcgtaccggctccggcaggtgcactggcacgcgccgtcggagcacgccgtcgatggccggaggtacgacatggagctgcacatggtgcatctcaacacccagaaccagaccgccgtcgtcggcatcctctacgccatcggcgcccaggatgagttcctgcacaagttggagccatatattattgaagttgcagaccaaaaagataaggagaagattgtcaatggtggggtggatccaaacgtggccaaagagcatgatatcgtgtattaccgctacatgggctccttaaccacaccaccttgcaccgagggagttatctggaccattgtcaggaagatgaagaggttctaa

SEQ ID NO: 885 - DNA, 556 bp, Oryza sativa
  N_region (63)..(63): n = any nucleotide
  N_region (124)..(124): n = any nucleotide
  N_region (151)..(151): n = any nucleotide
gacggcaaatggcgcgcgctccgcaagttcgccgccgccgagatgctcgcgccgcggcggatntcgtccgcggcggccggcgcgcaagctgcagaccaagatcgtggaagcgctccgccgcgangtgtccggggaagcggcgcggggcgcngccgtggtgttcaggcacgcggtgctcgactccatcctgagcctcctcctcggcgtgctctactccaccgacctggagcgcgaggagcgcgccatgttcagggacctcattgaggagatcgtcgggatgctggggacggcgaacgtctccgacgtgttcccgccggtggccgcgctcgacctccagggcctccgccgcaggatgaccgacctcctcaccatcatgtaccgccacttcgacgaccaggtcgccctgcggcggcgcagccgggacgccggcgaggcgcgcaagaacgacgtgctcgacaccgtcctcgacaaggaggagagcgagtggaagcaggagggctccctgctaagccatgacgtcatgcgagttctcctctccggagggagtagattttaa

SEQ ID NO: 886 - DNA, 4470 bp, Oryza sativa
  N_region (1077)..(1077): n = any nucleotide
  N_region (1079)..(1079): n = any nucleotide
atggccgacgatctgccgccaccgtccatcactcccgtgaccgccgtcgacgccgcatcgaccgccgtcgccgacgccatccgcgcggtcttccaacctgacgctcggcatggcatcgaccccaccactgctgccaatgtcaccgaatcggcggctgcaatctcctccacagccgcatggaaagcgttgatttccttcatcgagaagctctcggcgtccacatcctcgcagccggacaatccgtcagccagtgccccggtcaactccactgcagcagccaccatctcctccgcgtcggctgcggccttcttcgccgggctccacaccagctccgccggcctccagccgcagcacgacgccatcccgcaaggctctggcgcgcctccaccacacggccacggctctctatccttcgtcgccccgtcaccaacagcaccgcaagccgaccacttctacaacgtcgaccttgatgataaggccaccgccaacctccatgcacaggcgatatccgtcctcaacatcaagtcgcttgtaccggtcaccctcgacgtcaactccggcacatacacttggtggcgtggtcttcttctcgtcatcctcagcaagtatgcacttgctgatcatgtcctcactgacaactaccgaccagaccaccccgactggatgcgcatggactgtgtcgtcctctcctggatgtacggcaccatctccactgacctcctggagtcagtcatgacgcatacgactacggcaagattggtgtggcgcagcctcgagcatcaatttcttggaaatcgtgaagctcgtgctctcaaccttaacgccgagttttacaatttccaacaaggcgatctatccgtcaccgactactgtcgtcgtctcaaagccatggctgccgaccttgccgatgtcggcgaacccgttggcgaccgcacactcacgctggctacgatccaaggtttggatgaaaattttgcacacttgcaatctgctttcaccatgcggaagcccttcccgtcattcgccgaggtgcgctcgcaactcctgctggatgaactcaccaagaaccgctcccanancccggctaccaccctcatcgctgccacaagcggccgcacttccgggggggccgcaaactccaatccagcacacattaccggctacggcaacaacagcaacaccggcaaccgcaactccaacggccgtcaaggtgggaacaaccgtggccgccgtcataacaacaacggcggcaacggtgggcaacagcaacctcaatttcgcccacctggcagctcggcgcaagcggcctcctggccgtccccgctcaacccgtggaacggcactctccagatgtggcccgttcctgtcggcatgatcccgtcacgtgtcgtcggctccggttccggtcttcttggacctcgtcccggcgcaccatcgcacttcgctggctccatggttgccgccagccacaatggtgtgccccagcaccctgccgcaccctctgtgctgggacatgccggaccggcccagtccctcgccgcctccaccagctaccagccggtcttcgccgcaatgccctccactccgggcacaccagcatcatggaacggcagcgccaacacgcaatgggatcaacaaggcctcatcaacgccttcaacacggtatcactgtcccaacctccgtctagcgactggtatatagactcgggtgcttcttctcacatgacgtccgatgccggtaccctctccttttcctcccaacctaaccctaatacactgtctcatattattgttggcgatggttctcctctacccatcactgccactggctccactcatttatcttttccacaccgttctttcgtccttaataatgttctcgttagccctgagatcattaaaaatcttattgttgttcatcgttttgctcgtgataatgatgtttctgtcgaatttgacaaagatggtcttgatgtgaaggatttccactccaggaacgtgatcgtttggtgcaatagcttcggggacctctacctcgtccgccctaccgagctccactacgccctcgccgcccgggagtcctccgtcctatggcaccactgccttggtcatcttggatctgaagccctcacccgccttgctcgttcctctgttatcccaccatatagagaactattagccagtctcccctcctccttctgggttgaggctctccacaccgccacacaccttattaaccgtcaccccaccaagaccctccaattccatacacctttctttgccctttacggtatccatcccacctacaatcatctccgtgtttttggttgtaagtgttatccaaacctctccgccactgctccagataagctatcagttcgttccacagcatgcgtctttcttggctatcccagagatcacaaagggtatcggtgtatggaccttagttttaaccgagttatcatctcgcgtcatattgtgtttgacgagcactcgtttccttttgccaagttgtctaacgggacatgtgctactgacctctcctttctagatgattttacagcatcatcgttgcccactcccactagcactcgacggactacagcagcggctcggacttcttcaccgggtggatcaccgcccgcctcgtcggccaccattgacggccaccactgctggcacccactacccggctcgccggctccctccgccgactcgtcagcaccctccgtcgacccaccggcctccccggccggctcaccgaccaccactgccggctcgccggcctccacggcgccctctccaccgccagttgtcagtactacatcagcaccaactcttccgcccgtacccactcgtccacgcagtgctcgagtccccggcggccgtcatctacctcctgtccttggagcttcaccggcactcaactctcacaacatggccactagcagcaagtacggcttccacctgccgaccgaccggctcaacctccacgcctccgctctttcaccgatcccgcgcacataccgagtagcgctcgcggatccgcactggcgtgctgctatggaggaagagttcgctgcactgcgcgccaacaatacatgggacttggtaccgcttcctcctggtgctaacatggtcaccggaaagtggatctttcgtcataagttcaagtccgacggcacgcttgacaggttaaaggctcgatgggtactccgtggtttcactcagcgtcctggcattgattttgatgagaccttcagtcctgtggtaaaaccggcaacggttcgcactgttctcagcttagccgtctctcagaactgggccattcgacagcttgacgtgaagaatgccttcctgcatggcacactacaggagactgtctactgttcccagccgttaggtttcaccgaccctgctcatcccaaatcagtatgtcgtctgaaccgcagtctgtatgtcctgacggcctcctcggcgccgatacttcagtggaccatcacacagcttcagtcagagtttgccatgaaggatcttggagtccatcattttctgggcatcagcgtcacttggaattccattggtctgattctctcacagcgacagtattgttccgagatcctagagcgagctggtatgcttcactgtaaaccgtgttccacgccagtcgacacttgcgcaaagctatctgcttctgatggacaacctgtggcagaccctaccgattatcgcagcctagctggtgctctccagtacctcaccttcactaggcccgatattgcttatgctgttcagcaggtgtgccttcatatgcacgacccccgcgagacgcatctcgctgccatcaagcgcattctccgctatgttcgtggtactatggactacagcttacacaaatctcgctcttcgtccaccgatctggtggcctactctgatgctgattgggtcggctatcctgacactctccgctccacctcgggatatgctgtttttctaggagataatctcatctcctggtcttccaagcgacagaatacagtttcacgctccagtgctgaagctgaatatcgcgctgttgctaacgcagtccccgagacatgctggttgcgacagctcctccacgagttacacactcccccgacacgggccaccttggtttattgtgacaatgttagtgcggtgtacctctccaccaatccagtacaacatcaacgtaccaagcacatcaacattgatctccactttgttcatgacaaggttgcccttggtacagtccgcgtgctgcatgtacctacttcgtcacaatacgccgacatcttcaccaagggtctaccaagctcggtgttttgtgagttccgctccaatttgaacattcactccgcccacgttccaactgcggggggtgttagagatattgtatttgtattcggttcggtttccctcaatcctatgccaattttgtttctataa

SEQ ID NO: 887 - DNA, 3694 bp, Oryza sativa
atgagtgccgcggcgaccaccggcggcggcggcgagcggcggagcctccgtggcatgttcaagttcgcggaccgggtggacgtgctgctcatggcgctgggcacgctgggtgccatcggcgacgggtgctcgaccaacctgctcctcatcttcgccagcgacgtgatgaactcgctcgggccaccggcgtggacttcatgcgcgaggtcgagaagtcttgcctgaatttcgtgtacctggcgttcgcggtgctggcagtggcgtttatgggaggggtattgctggagcaggacgagcgagaggcaggtgctgaggatcaggtacctgtacctgcaggccatactgcggcaggaggtgggcttcttcgactcgcaggaggccaccacctcggagatcatcaacagcatctccaaggacgcctcgctcattcaggaagttctcagtgagaaggaacaggttccactctttctgatgcactctacagttttcatctctgggctggcattctccacatatttctcctggaggctggctctggtttcttttcctctggtcctgctcctgataattccagggctcatctacggcaagtatctcctgtacctctcccgacaatcgcgccacgagtacacaaacgcaaactcgttggttgagcaagctcttggctctatcaagactgtctactctttcactgctgagaaaaggataatccagagatacacagcagttcttgacaagacgatcaagctggggattagacaaggtattgcgaaaggtttggctgtcggattcacgggcctttccttcgccatctgggctttcctcgcttggtacggcagtagactggtgatgtaccatcatgaaagcggaggaaggatatatgctgcagggatttccttcgttttaggcggcctatcccttggaatggcactccctgaactgaagcatttcacagaagcgtcggttgctgccacaagaattctcgatcggataaaccgtgtgccagagataaatgctgatgaccccaagggacttattttggatcaagtccggggagagcttcagtttgagtctgtccgctttgtttacccatcgaggcctaacatgacggtcctcaaagacttcaacctccagattcctgctgggcaaactgttgccttggttggatccagtggcagcggcaagtcaaccgcaatagcattggttcaacggttctatgatgccactgaaggaactgtcaaggttgacggtgtcaacattaaagaactccagctcaagtggatcaggagcaagatggggcttgtcagccaagatcatgcactcttcggtacatccataaaagagaacatcttgtttggcaaaccagatgcaacaatggatgaactgtatgcagcagccatgacagcaaatgctcacaacttcataagggggcttcctgaggaatatgagactaagagattggcgagcgtggagcactgctatctggtggccagaagcaacgtattgccattgcacgggcagtcatcaagaacccggctatacttttgctcgatgaagccacaagtgcacttgattcagaatcagaaaagctggtgcagcatgcacttgaccaagcatctatgggaagaacaacactggtagtagctcataagctttccacagtgaagaatgccgatcagattgcagtggttgatgggggcactatagctgaaattggcacacacgatgaactgattaataagggtggcccatattcacgacttgtgaaactgcagaagatggtgagctacatcgatcaagaaggtggtgaccaatttagggcctcttcagtggcaaggaccagtaccagccgtctcagtatgtccagagcaagtccaatgccacttacaccaggtatttcaaaggaaaccgattcctctgtttctcccccggcaccatctttctccaggcttcttgcgatgaatgcaccagagtggagacaagcagtcataggaagtctctctgctttggtatatggttccttgcagcccatctatgctataaccatcggaggaatgattgctgcattttttgttcaagatctcaaagagatgaatgcaattatcagccgctatgccttgattttctgctcattgtcggtgatatccattgttgttaatctacttcaacattacaattttgcttacatgggagagcatctagtaaggcgtatcagagtccaagtacttgaaaagatcttaacctttgaggcagcatggtttgatgaagaaactaattcaagtggttcactgtgctctcggcttagcaatgaggcttctcttgtcaaaacccttgttgcagatagaatttccctactgcttcagacagcttctggaattataattgcagtgacaatgggccttatagtagcttggaaacttgctcttgtcatgatcgctgtacagccaactacgatgatatgctactatgccaaaaagatagttctctcaaatgtgtcaagggacttagcaaaggctcagcaccaaagtactcagattgctatagaagctgtttacaaccacaggatggtgacctcttttggatgctcatcaaaggttcttcagctctttgagcatacacaagaggaaccactgaagagagcaaggaagaaatcatgggtggccgggatcaccactggactgtcaccttgcctttcattcttgtcatgggctcttgacttctggtatggtgggaaattggcacaatctggggagatctccgcaggtgatgtcttcaaaacattttttgtcttggtgagtacaggaaagttgattgctgatgctggcagcatgacatccgacctggctaagggagcaaatgcagttgcttcagtgtttgaggtgctagacaggaaatctatctctccacaaaattcacagcaggtggaaaaggacaatcagaagaacaaaatacaaggaaggatagagttcaaaagggtagattttgcatatccgacaagaccacaatgccttatcctgcaggattttagcttggatgtgaaagcaggaacaagtattggtcttgttgggagaagcggctgtggaaaatctaccatcattggtttgatccagaggttctatgatgttgacagaggggctgtaaaggttgatggtatggatgtgagggagatggatatcctttggtatcgaggatttacagcccttgttagccaggagcctgcaatattttctggtagtgtcagggacaacattgcttttggtaaaccagaagctgatgaagacgagatcgtggaagctgctaaagctgcaaatgcacatgaattcatatcatctctaaaggacggatatcatactgactgtggtgagcatggattacaactatcaggagggcaaaagcaacgaattgcaattgcgagggcaataatccggaatccagcaatacttctacttgacgaagcaacaagtgctctcgatgcacagtcagagcaagttgtgcaggaagcccttgatagaatcatgtcaggaaggactacaattgtggtggcacatcgactgaacacaatcaagaatgtagattcgattgccttcttaggagagggtaaggtagtggaacgtggtacttatccacacctcatgagtaagaaaggagcattctacaacctagcggctcttcagaaataaactgcttgtataat

SEQ ID NO: 888 - DNA, 3605 bp, Oryza sativa
  N_region (3343)..(3343): n = any nucleotide
  N_region (3357)..(3357): n = any nucleotide
gcgctccacatcctccccaacaagaagcagccgatgaccgtcctccatgacgtcagcgggatcatcaagccccggagtgtaggatgaccttgctgctgggacctcctggctcgggcaagaccacgttgctcctggcgttggcagggaagctcgacaaggacctcaaggtctcggggaaggtgacctacaatggacacgggatgcacgagttcgtcccggaaaggaccgcggcgtacatcagccagcatgatctccacatcggggagatgaccgtgagggagacattggccttctcggcgcggtgccaaggcgttggcactagatatggaaatgctgactgagttggcaagaagggaaaaggcagcaaacatcaagccagatcatgatattgatatctacatgaagtacatgtaggcctcagctatgggaggacaagaatctagtgttgttacggactacatattgaagatattaggattggatatttgtgctgatacggtagtaggaaatgagatgttaaggggtatatctggtggacaacggaagcgtgtcacaacagacaggtgaaatgcttgttggtccagcaagagctttgttcatggatgagatatccactggactggacagctcaaccacgtaccagatcgtgaattcccttaggcagactatccacatccttggcggaactgctgtcatctcattgctccagccagcacctgaaacatacaacttgtttgatgacattatactcctctctgacgggcaggttgtgtaccagggtccccgtgaacatgtgcttgagttctttgagttcatgggcttcagatgccctgccagaaagggtgttgctgatttcttgcaggaggtgacatcaaggaaagatcaggggcagtactggtgtaggcgtgacagaccataccgttttgtgccagtgaagcaattcgcagatgcgttccgttccttccatgtgggccgatccatacagaatgagctttctgagccatttgataggaccaggagccaccctgctgctctggctacttcaaagtatggtgtcagcaggaaggagttgctcaaagccactatcgatagagagcttcttctcatgaagaggaatgcatttatgtacatttttaaagctgttaatgcattgatcgtgatgaccacatttttccgtaccagcatgcgacatgatagagattatggaatgatctatctgggggcattgtactttgctcttgacacagtcatgtttaatggtttcgcagagcttgccatgactgtcatgaaactacctgttttcttcaagcaaagggatcttctcttctttcctgcatgggcctacaccataccatcatggattcttcagattcctatcacatttctcgaagttggtgtttatgttttcataacatactatgtcattggatttgatcccagtgtaagcagtatctgctgctacttgcactcaaccagatgtcatctgcactattccgcttcattgctggaatcggaagagacatggttgtgtctcacacatttggaaagaaatggtggatttggggttactggatatccccgctatcgtatgcacaaaatgctatttcgacaaatgaatttttgggtcacagttggagccaacgtggtatctttactgaagctaagtggtactggattggacttggtgctttgcttggatacactctcctctttaacctgctctacactgtagctctttcagttttgagtctctgaggacgcattgaaagagaagcatgccaacttaaccggtgaagttgtagagaagggaatggtgctcccatttgcaccactatctattagttttaacgacgtaagatactcagtggacatgccagagggcataacagaagaccgtttgttgcttctaaagggtgttagtggttctttcaggccaggtgtacttactgcattgatgggtgtaagtggtgccgggaagacaacactgatggatgttttagcagggagaaaaactggaggatacatagagggagatattagaatatctggctatccaaagaagcaagagacctttgcacgtatatcaggatattgtgagcaaaatgacatccattctccccatgtgacagtatatgaatcacttgtgttctctgcatggctgcggctaccctcggaggttgattcagaagccagaaagatgtttattgaggaggtcatggatcttgtagagctcacatctctgaggggagcacttgttgggcttcctggagtgagcggcctgtcaactgagcaacgcaagagacttactattgctgtggagcttgttgcaaacccttcaattatttttatggatgagccaacatctggtcttgatgctcgggcagctgcgattgtgatgaggaccgtaaggaacaccgttaacactggcaggactgttgtttgtaccattcaccagccaagtattgacatctttgaagcatttgatgagcttttcctaatgaagagaggaggtgaagagatatatgttggtccagtgggccagaattcctcaaaactgattgagtactttgagattgatggcgttagtaggataaaagatggatataatccagcaacatggatgttggaagtgacctcttcagcccaggaggagatgctcggtgttgattttagtgaaatctacaggcagtcagagctatatcaaggaacaaggaacttattgaggagctaagcacaccacctcctggctctactgatctcaacttccctacgcagtactctagatcgttcattacacagtgcctagcttgcttgtggaagcagaattggtcatattggaggaatccatcctacactgcagtgagattactcttcactatcgtcattgccctaatgtttggaacaatgttctggaaccttggaacgagaacgatctattcaatgccatgggatcaatgtatgctgcagttctctacattggagtgcaaaactctggttctgttcaaccagtggtggtggtggagcgaacagtcttttaccgagaaagagcagctggcatgtattcagctttcccgtatgcatttggacaggttgcaattgagttaccatacatcatggttcagactctgatatatggcgtgctggtatactcaatgattggatttgagtggactgttgccaagttcttgtggtacttgttcttcatgtacttcacactgctatatttcacattttacggaatgatggcggtagggttgacaccaaatgagagcatagcagcaatcatctcgtccgctttctacaatgtgtggaacctcttctcaggatatctgatccctcgacngtagatccctgttnggtggaggtggtactgttggatttgcccggttgcatggactttgtatggattagttgcttcccagtttggtgatatccaacatgtgctcgaaggcgacaccagaactgttgcacagtttgtcactgattactttggcttccatcataacttcctgtgggtggtggccgtggtgcacgtcgtcttcgccgtgaccttcgccttcctcttcagttttgcgatcatgaagttcaacttccagaggagatga

SEQ ID NO: 889 - DNA, 3139 bp, Oryza sativa
atgtcccggtacacgccggacttcaaacagaaagatgtcccggtgcacgccgccgtgcacaaatccggcattccggcccagcccatttgcccactcctgacgtgcccaactaccaagtccaccaacccgcgctgcaggtccacccactgctgccgtgccaccctctcttcgcgttgtctccggggacaaacttgttactcgccgttccaactgccaagccaacttcgcgtcttcgcggacgcagtccactccaactccaacaccacccaccgccagcggcggcgaatccgcggcggccgcaatggcgggttcgaggccagcgcgcgagacgacgaccgacgcccccgccgagccgtcgtccgacggcgcggtcgcggccgcaccctcggcggcggcggcggcggagggcgacgcggagatcaccaggccccgcaacgacaagcgcgggtaccgccgcgtcgtgctccccaacgccctcgagtgcctcctcgtcagcgaccccgacaccgacaaggtctccgtgctttcgctggctccttcgatcggggatgtgccgggggttttggtgcctgcctcctgggtttttggcttgaatgggtgaatcccggctttgtttgtttgcaggcggcggcgtcgatgaatgtctcggtgggctacttctgcgatcccgagaggctccctggccttgcacatttccttgtttatagagcatatgcttttctatgctagcgagaaataccctgtggaagacgattactcaaagtatattgcagagcatggtggttcaaccaacgccttcacatgtcgtgaacgtacaaacttttattttgatgtgaacaatagttgcctggatgatgctttggatagaggtttgcacaattttttataaagccattgatctcacccgatgcaactctaagggaaattaatgctgttgactctggaaaataagaaaaacttgttgtcagatcctttgcgaatgagtcagcagctccagaaacatttttgctcggagagccatccatatcacaagtttagcactgggaaacctggacactttgctggttaatccaaataaggaaggattggacacactggaagagcttattaaattttataattcacattactcagctgcagatcattgttaaagcggttcccataaaagaaggccacactttgagaatacagtggccaatcaccccaaatattcagcactataaggaagggccttgcaagtatgtgagtcgtctagttggccatgaaggagaggggtctctattttacgtgctaaaaaatttagggatgggctatgagtttgtatgcatgggaaggtgactggagttatgagttttcattcttcaatgttgttatacagctcacagatgtaggctatggagcacatggaggacattattggactgttattccgatacatagcattgctccagacctctggaactcgtcagtggatttttgatgagcttgtagctatttctgagatgggattccactaccgagacaagagtcctcctatccattatgttgtcaatatttcctcaaacatgcaggattggctgattgcatcatctgtgccatcaaagttttctccagatgctattcagaatatattaaatgacttgactccagataatgttagttcagaatattctgggaatcaaaaaagtttgaagggcaaacaaacttaacagagccttggtatggtacatcatattcagttgaagcagtcactccttccatcatacaggtgtacatttggattgggtaaatatggctcccatggaagatttgcacattccaaaacctaatatcttcattccaagtgatctttcattgaaaaatgttgaggaaaagcttaggaaaacaatgttttcaagagtatggtataagcctgatacaatgttcttcacacccaaggcctacgtcaagatggatttccactgtccactgtccaatagctctcctgaatcgacagttcttactgatatgttcacgaggttgataatggattatttgaatgattttgggttataatgacaaaatgagaacccttctggatactgtcattggaaaaattgctgagtttgaagtgaaggttgaccgttttgctgttataaagtacgagaatttcaaatttcgacaaccatatgagcaggcattttactattgttcattgatattagaggaacaaacttgggcatgggatgaaaaacttgctgcagtttctcatattgaagcaagcgatctacagatttttttgcctcgtcttctgggcaagacatttattgaatgctattttgctgatattagggaacatggaaccgggtgaagcaaaaagtgttatacagcatgttgaagacaccttattcaatgcacccatcagtttctgcaaagcattacccccatcacagcatcttacaaagcgaattgtaaaacttgaaaggggttggaggtattattatccagcattgtgcctaaatcaccaggatgaaaaaaattcttccatcctgcattatattcagcagattcatcaggatgatctcaaacaaaatgttctacttcaattgcttgctcttgttgctaagcaaccagcttttcaccaattgcgttcagttgagcaacttggctacataacagtgcttacacaaagagaaatgattcaggtgttcggggattgcaattcataattcagtcaaccgtgaaggatgacagagtggaagcttttcttaatatgtttgaagggactctataccaaatgcctgatgaagagttcaagagcaacgtgaatgctctcattgacatgaagctggagaaatacaagaatataagagaggaatcagcgttcttctggaaagaaatttcggaaggaactctgaaatttgatagaaaagaggcggagctcaataaagaggagttgattgagttcttcaataatcatgtcaaaaagaaaattcttagcattcaagtttacggcggtctccattcctccgagtacgaaaagatagttcacgatgagccacagccgcactcgtatcaaataaccgatatattcagcttcaggaggtcgagacctttatacggttcattcaagggaggtgttggtcagatgaagctatag

SEQ ID NO: 890 - DNA, 3018 bp, Oryza sativa
  N_region (1103)..(1103): n = any nucleotide
atggcggggaacgactggatcaacagctacctggaggcgatcctcgacgcgggcggggccgcgggggagatctccgccgcggcggggggaggtggagatggagcggcggccaccggggagaagcgggacaagtcgtcgctgatgctccgggagcggggccggttcagccccgcgcgctacttcgtcgaggaggtcatctccgggttcgacgagaccgacctctacaagacctgggtccgcgaggagcccgcaggagaggaacacgcgctggagaacatgtcgtggaggatctggaaccttgccagaaagaagaagcagaaacaacgtcttgagcgtgagaaggctcgtagatatgctgctgccgatatgtctgaagacctatctgagggtgaaaagggagaaaacattaatgaatcatcatctactcatgacgagagcacaagggggagaatgcctaggataggttcaacagatgctattgaggcatgggcaagtcagcacaaggataaaaagctatacattgttctgataagagcattcatggtcttatacgtggtgaaaatatggagcttgggcgtgattcagacactggtggtcagcaggtcaaatatgttgtagaacttgctcgggcattaggttcaacacctggagtatatagggttgatcttctgacaaggcagatttctgcacctgatgttgattggagttatggggaacctacagagatgctgagtccaagaaattcagagaattttgggcatgatatgggtgaaagcagtggtgcttatattgtgaggataccttttggaccaagagataaatatatccccaaagagcatctctggccccacatccaggaatttgttgacggtgcacttgtccatatcatgcagatgtccaaggttcttggagaacaagttggcagtggacagctagtatggcctgttgttatccatggacactatgccgatgcaggtgactctgctgctttgctatctggggcactcaatgtcccaatgatattcacaggtcattctcttggcagagacaagttggagcaacttttgaagcaagggcgtcaaaccagggatgaaataaatacnatatacaagataatgcgtcgaattgaggctgaggaactttgtcttgatgcatctgaaatcataattacaagcactagacaagagatagaacaacaatggggattatatgatggttttgatttaaccatggcaaggaaacttagagcaagaataaagcgtggtgtgagctgctacggtcgctacatgcctcgtatgattcctcctggcatggagtttagccatatagtgcctcatgatgttgatcaggatggtgaagaagctaatgaagatggttcaggttcaacagatccacctatttgggctgatagataatgcgattcttctccaaccctcgcaagcccatgattctagctcttgctcgtccagatcctaagaagaacatcactacactggtcaaggcatttggtgaacatcgtgaattgagaaatttagcaaaccttacacttatcatgggtaaccgtgatgttattgatgaaatgtcaagcacaaattcagctgttttgacatcaatactcaagttaattgacaagtatgatctatatggccaagtggcataccccaagcaccataagcaatctgaagttccagatatttatcgtttagcggcaagaacaaagggggtgtttatcaattgtgcttttatcgagccatttggactaaccttgattgagaggctgctgcttatggtctaccaatggttgctactcgaaatggtgggcccgttgatatacatcgggtactggttcttgacaatggtattctcgttgatccccacaatcaaaatgaaatagctgaggcactttataagcttgtttctgataagcagttgtgggcacagtgccgccaaaatggtctgaaaaatattcatcaattttcttggcctgaacattgcaaaaactatttgtcacgggttggtacactcaagccacgacatcctcgatggcaaaagagtgatgatgctactgaagtttccgaagctgactcacctggagattccttgagggatgttcatgatatatctcttaacttgaagctttccttggacagtgagaaatcaagcacaaaggaaaatagtgtaagaagaaaccttgaggatgctgtacaaaagttgtcaagaggtgttagtgccaacagaaagacagagtctgttgagaatatggaggctaccacaggcaataaatggccatctttgcgaagaaggaaacacattgtagtcattgctatagattctgtgcaagatgctaacctggttgagattatcaaaaatatttttgtggcttcaagcaatgagagattatctggttctgttggttttgttttgtcaacatcccgagcaatatcagaggtacattctttgctaacatctgggggcatagaagctactgattttgatgccttcatatgcaacagtggtagcgatctttgctatccatcctcaaattctgaagacatgcttctcaaattgagtaccgttggggtggagaaggtttaaggaagacactaatttgttgggcagcagaaaaaagccgagggtggtcaagtgcctcctgtgaaagagcttaggaagacaatgagaattcaagcactgcgctgtcatgttttgtacagtcatgatggtagcaagttgaataggtacttgtatataagatggggggtagagctgtcaaatatgacagtggttgttggtgaaagtggtgatactgattatgaaggactattaggaggcgtgcacaagaccattattctcaaaggctcatttaatgctgttcctaaccaagtccatgctgccagaagttattcattacaggatgtcatatcctttgacaaaccaggaattacttcaatcgagggatatggtccagataaccttaagtcagctctacaacaatttggtatactgaaagacaatgtttaa

SEQ ID NO: 891 - DNA, 2896 bp, Oryza sativa
caggagaaactgcgggttgcggtgctggtatcgaaagctgcactacagtttatacagggtaatcatctttcacttcgaagtgagtatgttgttcctgaagaagtcaaggctgcagggtttcagatttgcgctgatgaactgggctctattgttgagggtcatgatagtaaaaagttgatcacccacggtggagttactggaatagcagacaagcttgcgacatcaccagcggatgggttaagtacagctgaggaaagcattaagcgcaggcaagatgtatatggactaaacaaattcacagaaagcgaggtccggagtttttgggtgtttgtatgggaagcacttcaagatacaactcttataattcttgctgtctgtgcctttgtatcgttggttgttggcattgccatggaaggatggccaaaaggtgctcatgatggtctgggaattgttgcaagtatcctcttggtcgtgtttgttaccgcaacaagtgactatcggcaatccttacagttcaaggacttggacaaggagaaaaagaaaatacaagtgcaagtcacaaggaatggttttagacaaaggctatcaatatatgatcttcttcctggagatgttgtccatttagcaattggtgatcaggttcctgctgatgggctattcatttctgggttttctctactgattaatgagtccagtctcactggcgagagtgaacctgttgttgtaaatgaagataatccttttcttttgtcggggaccaaagttcaagatggttcctgcaagatgctgattacaacagttggcatgcgaacccaatggggaaaactaatggctactctcagtgaaggtggcgatgatgaaaccccactacaggtcaagcttaatggtgttgcaactattataggcaagattggtctatttttcgcagtcataactttcattgtcctttctcaagggttaatcagcaagaagtaccatgaggggctgcttttaagctggtcaggagacgatgcactggaaatgttagagcattttgctattgcagttaccattgttgttgttgctgttcctgaggggttacccttagcagttactttgagtctggcattcgcaatgaagaaaatgatgaatgacaaggcattggttcgtcacttagccgcatgtgaaacaatgggctcagctacgaccatctgcagtgacaagacaggaacactgacgaccaatcatatgactgttgtcaaggcctgcatttgtggaaacataaaggaagttaacaatcctaagaatgcatctgatttgtgttctgagcttccagaaactgttgtcaaaacccttctggagtctatttttaacaatactggtggtgaggttgtgattgaccaagatgggaaatatcagattctaggtaccccaacagagacagctttgttggaatttgcattgtcacttggtggaaattttaaggcaaagcgtgatgaaactaagattgtgaaaatggaaccctttaattcaacaaaaaagaggatgtgtgttgttcttaagcttcctggaggaggatgccgtgcacattgtaaaggtgcttcagaaatagtgttggctgcctgcgataagtttatggacgagacaggtgctgttgtcccccttgataaaacaactgctgacaagcttaatgggattattgaaagctttgctaatgaagctcttaggacattgtgccttggttatcgggaaatggaagaaggcctttctgttgaagaacaaataccactgcaagggtatacatgcattgggattgtaggtattaaagatcctgttcgcccaggcgtgagggagtctgttgcaacctgccgatctgctggaattatggtgagaatggtcactggtgacaacataaatacagcaaaagcgatcgctcgtgaatgtggcatacttactgaagatggcctggctattgagggaccggagttcagagagaaaagtcttgatgaactactcaagttgattccgaaaattcaggtaatggcccgatcatcaccacttgacaagcatacacttgtaaagcatttgcgcacaacattcaatgaagttgttgctgtaactggtgatggcacaaatgatgcgcctgcgcttcatgaagcagatattggacttgcaatgggcattgctgggactgaggtggcgaaagagagtgccgatgtcataattctggacgacaacttctccacaattgttactgttgccaaatggggacgctctgtttacgtcaacattcaaaagtttgtgcagtttcagctgactgttaacgttgtggctttacttgtcaacttctcttcagcttgctttacagaatgcacctctgacagctgttcaacttctttgggtgaacatgatcatggacacccttggcgcccttgcattagctaccgagccacctaacgatgacttaatgaagagagagccagtgggcagaacagggaaatttatcacaaatgttatgtggaggaacattctggggcagtctttctaccaattcattgttatgtggtatctccagacgcaagggaaaagcatgtttggccttgatggccctgatgctgaagttgtgctaaatacaattattttcaactcgtttgtcttctgccagcaggtgttcaatgagataagctccagggagatggagaagatcaacgtgctgaggggcatactgaagaactacgtcttcttgggtgttctcaccagcacggtagtcttccagttcatcatggtgcaattcctcggcgagtttgcgaacacgataccactcaccaggctgcagtggattgccagtgttctccttggcctcattgggatgcccatctctgccattatcaagcttcttcccgtcggctcgtcgtga

SEQ ID NO: 892 - DNA, 2650 bp, Oryza sativa
  N_region (1182)..(1182): n = any nucleotide
gttatctttccagcacttgatattcgagtgaaaaatgtagcaggcacgtattcccttgaacataagggggaaaatgatctgtttgcacacctgttctctctgttaaagcttgatgtgcggaatgatgatggtcttcggagggaactcgcgtcctgtacaggtgcaattcaaacgtttataacccaacatatgtccaaggaagaagagcaggtttccttttcccctgtttactctgttaattcctttgtatcaggtcttcccactgctcattaagaagttttcacatgaagagcaagctgatttagtctggcaattcttatgcagcatccctgtcaatatgatggcagagttccttccatggcttgctacttctgtttcatctgatgagcaccaagatattcttaactgcttacataaaatagttccggacgagaaacttctccaaagtattgcagaggatcaggttatatttccagcagtcaacgatcaagtgtcctttgagcaggagcacgctgaagaagaacggcggtttaataaatttagatgtttaattgaacaaatccaaataacaggagccagatcaacagcagtggatttttactctgagctatgttcacaagctgatcagataatggagaaaatcgagaggcacttcaaaaatgaggaaacaaagatccaggtacttcctcaagctaggattcatttttcatcagagaaacaaagggaacttttatataagagtctctgtgtcataccgttgaagttattggagcgtgttttaccgtgcgatcgctgtctctcaattattctgctccttcattgtattcaagtcttttttcatgggagacagatgcagccttttctggcccagataacatttcaaggccaattgacacaatattcaaatttcataaggcaattcgcaaagatttggagttcttagatgtggaatctagaaagctcatagatggggatgaatcttcccttcgccaattcatcggaaggtttcgtttactgtggggtctttatagagcacacagcaatgctgaagatgaaattgtatttcctgctcttgaatcgaaagagacactgcacaatgtcagccactcatatactcttgaccacaagcaggaagaagaattatttaaagatatatccactattctttttgagctttcacanttgcatgctgatttgaagcatcctcttggtggtgctgatgcagttggagcgaaccacattcatccatataataggatcgattggtccaaaaagaataatgaacttttgacaaagcttcaaggaatgtgcaagtctatccgggttactctgtctaatcatgtccatagagaagaacttgaattgtggccactatttgataaacatttttctgtagaggagcaggataagattgtaggccgtataattggaagtacaggagctgaggttctgcagtcaatgttaccctgggttacatcagcgcttagtctagatgaacagaacaatatgctggacacatggaggcaagtaactaagaatacaatgtttgatgaatggctaaatgaatggtggaagagatcacctacttcttctggcccttcaagcgatgcctcccatccagaaggatcatttccaggaaaagttcgatcagagtgaacagatgtttaagcctggttggaaggacatcttccgaatgaaccagagtgagcttgaggctgagatacgaaaggtttctcgtgattctactcttgacccaaggaggaaggcttatctaatccaaaatctcatgaccagagccgctggatagctgctcagcagaaatcgccccaacctcagtcagaagatcgcaatggatgtacagtattacctggatgttgtccttcataccgagatccagagaatcagatttttggctgtgagcattacaaaaggaaatgcaaacttgttgctgcatgctgcaataaactgttcacatgcaggttttgtcatgataaagttagtgaccatacaatggaaaggaaatgatgtgcatgcaatgcctgaaagttcaaccagttggtccaaattgccagaccccttcttgcaatgggctatccatggcaaagtattattgcagcgtatgcaagttttttgacgatgaaaggtgtaccattgcccctttggcaatttgtgtcgtcttgggcaaggattgggtattgattttttccattgcatgaagtgcaactgttgcctgggcatgaaattgatagagcataaatgtcgagaaaagatgctagagatgaattgcccaatctgctgcgacttcctatttacatcgagtgcagcagttaaaggtctaccttgtggccatttcatgcattcagcttgctttcagtttcaggcgtacacctgtagtcactacacctgcccaatctgctctaaatccttgggagatatgacagtatactttggcatgcttgatggcttgctggccgcagaagagcttcctgaggaataccgggaccggtgccagcaggatatactttgtaacgattgtgaaagaaaaggaaggtctcggttccattggctgtatcacaaatgcggcttctgcggttcatataacactagagttatcaagattgatagagctgattgttcaacatcagattaa

SEQ ID NO: 893 - DNA, 2589 bp, Oryza sativa
  N_region (514)..(514): n = any nucleotide
cagaacactttatctggacaatttaggataggggggatgacatgcgctgcatgtgtgaattctgttgagggtatcttgaagaaattgcctggtgttaaaagagctgttgttgcattagcgacctcattaggggaagttgaatacgatccttctgtcatcagcaaagatgaaattgttcaggctattgaggatgctggttttgaagctgcactgttacaaagtagtgaacaagacaaggttttgctaggcttaatgggattgcatactgaggtagatgtagatatattgcatgatatcctaaaaaaaatggaaggcttgcgtcagttcaacgtaaatttggtactctcggaagctgaaattgtatttgatccagaagttgttggtttgaggtcaattgtggataccatcgagatggaaagcagtggcagactgaaagcccatgtacagaatccttacatacgggctgcttcaaatgatgcacaggaggcctccaaaatgcttcatcttctttgcnctagcttattcctaagcattcctgtattttttattcgcatggtatgccctcgcatacacttcactcgttccctcctactcatgcacttgggaccattttatataggagacttgttgaagtggatactggtgagtatagtacagtttggtgttggcaaacgattctatgttgcagcctatagggccctgagacatggctctacaaatatggatgtactagttgttcttggcaccactgcatcatacgtctactctgtatgtgcgcttctttatggtgcattcactggatttcatcccccgaaatattttgagacaagtgccatgataatcacatttgtgctatttgggaaatatcttgaggtgcttgctaaaggcagaacatcagacgctattaagaagcttgtagagctggtccctgctacagcacttttgcttctgaaagacaaaggagaaggagattgatgcatccttaatccaacctggagatgtcttgaaagtgctcccaggttccaaggtacctgctgatggtactgttgtttggggtacaagtcatgttgatgagagtatggtaactggtgaatctgcacctatctccaaggaagtatccagtatagtaattggaggcacaatgaatttacatggaatcctccatatacaagcaactaaagtaggatcagggacagtcttgagccagataatctctcttgttgaaactgcccagatgtctaaggctcctattcagaagttcgctgattatgtggctggcatttttgttccaatagttgtcaccttgtccttggttacgttcattgcatgggagcatacccaaattcatgggttgatgaaactagcaattgctttgtcttctctctcatgttctccatctctgttgtggtgatagcctgcccatgtgctcttggtctggcaacgccaactgctgtcatggtagcaactggagttggggctaatcatggggtacttgtaaagggtggagatgcactggagagggctcagaatgtgaaatatgttatatttgataaaactgggacactgacacaaggaaaggctaccgtaacatcgacgaaggtattctcaggaattgatcttggagacttccttactttggtagcatctgcagaggcaagcagtgaacatccacttgcaaaagctatattggattacgcatttcatttccatttctttggcaaactcccctcatcaaaagatgacatcaagaaaagaaaacaacagatattatcccagtggcttctggaagtagcagaattttctgccttgcctggcaaaggggttcagtgtttgatcaatgggaaaaaaatcttggtgggaaatcgtactttgataactgaaaatgggataaatattcctgaagaagctgaaagtttcttggtagacctcgaactgaacgcgaagacaggagttcttgtagcatatgacagcgaactcattggctcaattggaatgactgatcccttgaaaagggaggctgttgtagttgttgaaggcctaaaaaagatgggcatctatccagtaatggttacaggggacaactggaggactgcacaagcagttgcaaaggaggttggcattgaggatgttagagctgaggttatgcctgcgggaaaagctgatgtcgtacgttctctccaaaaggatgggagtgtcgttgcaatggttggggatggcatcaatgactccccagccctagcagcagctgacgtcggaatggccattggtgcaggaacagacattgcaattgaagcagcggactatgtgctggtgcgaaacaaccttgaagatgtcatcacagcaattgacctctcaaggaagacgttcagccgaatccgatggaactacttctttgccatggcgtacaacatcatcgctatcccggttgctgctggagcactcttcccattcaccggcctccaaatgccaccttggctggctggtgcttgcatggcgttctcatctgttagtgtagtatgttcctctctgtggttgaggagatacagaaaaccaaggctcacaaccctgttacaaataactgtagagtga

SEQ ID NO: 894 - DNA, 2568 bp, Oryza sativa
atggtttcaaagtcatatacaaatcttctagatatgagtggtgaagatgtgtttgactttcagcaaccatttagatcgcttcctcgttttgtgacttccccaagcatcacatctaatcctgattgggatacaagtaatgctgatgattcagttggtcctgcatcttgctgtgtaaggaaaataatcgtctccaactttcttccactaaactgtaccaaagatgaagctactggacagtggtccttctcaatggatgacaatcaacttcttgttcaacttaaagatggatttccaatggagagcgaagttgtttatgtgggtagcttgaacgctgaagttgatcctggtgagcaagatcaactttcacagaaacttttcagagaatacaaatgcatacctactttcctcccagctgacctccagcagcagttctatcatggattctgtaaacaacaattatggccacttttccattatatgcttcctatttgcctcgacaaaggcgagctctttgaccgctctctatttcaagcctatgttcgggcaaacaaaatatttggtgacaaagttatggaggccatcaattcagatgatgactgtgtgtgggttcatgattatcacctcatgcttctcccaacctttttaagaaaaaagcttcatcgcatcaaaattggtttcttccttcacagtccatttccctcctctgaaatctataggacactgccagtaagagatgaaattttgaagtctcttctgaatgctgatctcattggctttcaaacatttgactatgcccgccacttcctttcatgttgcagcagattgttaggccttaattacgagtcaaaacgtggtcacatcggtatagagtactttggccgtacggtgagcctcaagatccttgctgtgggtgtacatgttggtcgtcttgagtctgtgttgaggctgcctgccacaattagcaaggttcaagaaattgagcaaagatataagggtaagatggtgatgttgggtgtagatgatatggatatcttcaaagggatcagtctaaaattgcttggcttggaatttcttttggagagaactccaaagctaagagttgtgccagattataaatcctgcaagaagcactggaaaagatgtggaggaagcaataaatgaagccgtctctgtagctgaaaggataaacattaagtatggttctgctgagtacaagcctgtcatccttatcgactaccccataccttcttatgagaagattgcatactatgctgcatctgattgctgtattgtaaatgctgtgagggatgggatgaacttgataccatatgagtatactgtctgcaggcagggaaatgaggagattgataagctcagaggtgttgataagagctcacatcacacaagcacactaattgtgtctgagtttgttggttgctccccatcacttagtggtgctttcagggtaaatccttggagtattgaagatgtagctgatgcattatataaagcaatggatttgactcaatcggagaggaaattgcgtcatgataagcattatcgctacgtcaaaactcatgacgttgcttactgggcgcgcagtttttcccaagatctagatagagcgtgcaaggatcactatagccgaaggtgttggaccactgggtttggtttgaattttagagtcattgctctttctcctggatttagaaggctatctttggaacactttgcttcttcttataagaagactaatagaaggctgatatttatggattatgatggcacccttgtcccccagtcatcagtcaacaaagttccaagtgcagaagtcatttctatccttacaagcttgtgcaatgatccaaagaactgtgtgttcatagtcagcggaagagatcgtactaccctaagtgagtggtttgcttcatgtgataagcttggtattgcagctgaacatggctattttatcaggaatgggaaacaagctcctcagctcaagattgtgaatggaagaacatcgccgagcctatcatggaagtatacaaggaaacaaccgatgggtctgccatagagacaaaggagagtgggctagtttggcattatcaggatgcagatcatgacttcggttcatgccaggcgaaggagctagtgagtcatcttgagagggtgctggcaaatgaacctgttgtggttaaacgtggtcatcaaatcgtagaagttaagccccagcagggtgttagcaaggggattgctgtggacacagtcattcggacggtaatcaacaacgaaaacgcaccggattttctgatgtgcattggtaacgatcgatcggacgaggacatgtttgagagcatcaatgaagccgtctcacgttctgtgtttcctactgctccagatgtctttgcctgctctgttggccagaaggctagcaaagcgaagtactatgtggatgggtgcagtgaggtgatcagattactcaagggtgtaaccgccattacaccccgaagggaggtgatcagccagagtcaagtaacattcagggatatacttgaggttgtcagctga

SEQ ID NO: 895 - DNA, 2419 bp, Oryza sativa
  N_region (517)..(517): n = any nucleotide
atggagtcgtcggccggcggcggcggcggcgagtctccgcctccggcgaagcccgtgctgctccacggggacctcgacctgtgggtggtcgaggcgcgcctgctcccaaacatggacatgttctccgagcacgtacggcggtgcttcgccgcctgcaagccgcccacctcctgcgccaccgccaggcagccgcgccacgcccgcggccaccaccgccggaagatcatcaccagcgacccctacgtcacgctctccgtcgccggcgccgtggtggcgcgcacccgcgtcatccccaacgaccaggaccccgtctgggacgagcgcttcgccgtgcccctcgcccactacgccgccgcgctcgagttccacgtcaaggacaacgacacgttcggcgcgcagctcatcggcaccgtcaccatccccgccgacagggtcgcctcgtgccaggaggtggaggactggttccccatcatcggcaacaacggcaggccgtacaagcccgacacggcgctccgcntccgcctccgcttcaaccccgcggccgacaacccgctctaccgccgcggcatccccggcgaccccatcgagctcgacgaggggggcaaggtgttcgaccacaacgcgtgctgggaggacatctgccacgccatcctcgaggcgcaccacatgatatacatcgtcggctggtcggtgtacgacaaggtgcgcctcgtccgggagccgtcgccgtcgaggccgctgccggaaggcggcgacctcaatctcggggagctgctcaagttcaagtcgcaggagggcgtgagggtgtgcctgctcgtgtgggacgacaagacgtcgcacgacaagttgttcatcaaaacgggagtgatggcgacacatgatgaagaaactagaaaattcttcaagcattcctcagtcatttgtgttctttcacctcggtatgccagcagtaagctgagcattttcaaacaacaggttgttgggactttgtttacccatcatcaaaaatgcgtgctggttgatacacaagcttggggaaacaagcggaagattactgcttttatcggtggcctggatctttgtgatgggcgttatgatacacccgaacataggctttttaaggatcttgacacagtattcgataatgattatcataaccctacatttccgcctagacaaccatggcatgaccttcactgtaggattgatggtccagctgcgtatgatgtcttgaaaaattttgagcaacgctggagaaaggcaacgaaatggcgtgaacgatttagaaaagtgtctcattggaaagatgatgccctgataaagttggaacgtatctcatggatacttagcccttcgcctactattccaaatgatgatattagtttgcgggtttcaaaagaagaagatcctgaaaattggcatgttcagcaggtattccggtcaatagactctggttcgcttaaagggtttcctagtgattgcaaagaagcttcaaagcaggataagagcatccacactgcttatgtccgggcaatcagatccgcccagcatttcatttatattgaaaatcaatatttccttgggtcatcatatgcttggccgtcctatgttaattcaggcaggtgctgacaatctggtacctattgaattggccctcaaaattgcaagcaagattagggctggtgaacggtttgcagtttatgtagtcataccgatgtggcctgaaggagtccctacagcagcttctgtacaagaaattcttttctttcagcaggcacagacaatggagatgatgtatcgtataattgcacaagagctcaaggccatgaatattaagaatgcacaccctcaagattacttgaacttctattgtctgggcaatcgagaagaatcatcatcatcaaatggcagccctgaatctaacgataaaagtgcagcgcgttttatgatctatgttcatgcaaaggggatgattgtagatgatgaatatgttattctggggtcagcaaacatcaaccaaagatctttggctggttccagagatactgaaattgccatgggcgcataccagcctcaccacacatggtctacaaaggggggtcatcctcgcggtcagcgtttgcaggtatacgggtatagaacttccctctgggcagagcatcttgggatggttgatgacctcttcaaggatccatcaagtttggagtgtgtaaattatgtcaatgaaatagcagaagagaactggagaaggttcaccgcagaacaacttataacgttacaagggcacctcctcaaatacccagtcaaggtagaggctgacggtaaggttggtccattgccagaacacgaatgctttcctgacgttggtggcaagattcttggagctccaacttcactccctgatacgctaacaatgtaa

SEQ ID NO: 896 - DNA, 2397 bp, Oryza sativa
  N_region (21)..(21): n = any nucleotide
  N_region (36)..(36): n = any nucleotide
  N_region (39)..(39): n = any nucleotide
atcctgacgggcctcgcgaanccgggaggcggagcnganttcgggaaatactacagcctgcccgcgctatccgatccgcggatcgcgactcccttactcgataaggattcttctcgagtcggcaatcagaaactgtgatgagttccaggtcaccgggaaggacgttgagaaaatcctggactgggagaacagcgcaccaaagcaagtcgaaatcccatttaagccagcccgtgtcctcctccagttacaggatttcactggtgttccagcagtggttgatcttgcgtgcatgagggatgctatgagcaaacttggcagtgacccaaacaaaattaatcctctggtacctgtagatcttgttattgatcattcagtacaagttgatgtggcaagatcagaaaatgctgttcaggcaaatatggagctagagttccatcgtaacaaggagaggtttggatttttgaaatggggttcaactgctttccgtaacatgcttgttgttccacctggatctggaattgtgcatcaggttaaccttgaatatctggccagagttgtgtttaacaatggtgggatcctttaccctgatagtgttgttggaacagactcccacacaactatgatagatggtcttggtgttgctggatggggagttggtggtatagaggcagaagctacaatgcttggccaggtggccatgatagagtcttacctgcgtgccaataagatgttcgtcgactacaaccagcctgaagctgaaagagtgtactcatcttatctggaacttaacttggaggaggtagagccatgcttgtctggaccaaaacggtaataggcctcatgaccgagtgactttgaagaacatgaaatcagattggctgtcttgcttggataatgatgtaggcttcaagggttttgctgtccccaaagaatcacagggtaaagttgctgagttctctttccatgggacaccagcaaagctaaagcatggtgatgttgtaattgctgctataaccagttgcaccaacacatcaaatcctaatgtaatgctgggagctgctttagttgccaaaaaggcttgtgaattaggccttgaggtcaagccatggattaagacaagtcttgcacctggttctggagttgtgaagaagtacttggacaagagagtggtctgcagaaatatctagaccagcttggcttccatattgtaggctatggttgcacaacctgcataggaaattctggagaacttgatgaaacagtatctgctgcaatttctgacaacggatattgtcgctgctgccgtgttatctggaaacagaaattttgaagggcgtgtgcacgcattaaccagagcaaattatcttgcctctcctccattggttgtggcctatgcccttgctggcacggtcaatattgattttgagaaagaaccaattggcatctcgaaagatgggaaggaggtttacttcagggacatctggccttccactgaagagattgctgaggttgttaaatcaagtgtgctacctgacatgtttaagagcacatacgaggcaataaccaaaggaaatcctatgtggaatgagctgtctgtatcagcaagcactctctacccatgggacccgacatctacttacatccatgagcctccttatttcaaggatatgacaatgtcccctcctggcccacggcctgtgaaggatgcttactgtctcctgaactttggtgacagtatcacaactgatcacatctcacctgccggaagtattcaccctgacagccctgctgctagatatctgaaggagcgtggtgttgaaaggaaggacttcaactcatatggcagtcggcgaggaaatgatgagatcatggctaggggaacttttgccaacattcgccttgtgaacaagttcttgaagggtgaggttggcccaaaaaccatccatattccatcaggggagaagctctctgttttcgacgctgctacgtacaagaatgaaggacatgacactattatcctggctggtgctgagtacggtagtggaagctctcgggattgggctgcgaagggtccaatgctacagggagtcaaggctgtgattgctaagagctttgaaaggattcaccgcagcaaccttgctggtatgggtatcattcctctatgcttcaagtcaggggaggacgccgacacccttggattgactggccatgagcgtttcacggttcacctcccggccaatgtaagtgagatcaagcctgggcaagatgttactgtgacgactgataatgggaagtccttcacttgcacacttcgatttgacactgagggtggagcttgcatactacgacaatggtggcattttaccgtatgtcatcagaaagatcgccgagcagtag

SEQ ID NO: 897 - DNA, 2308 bp, Oryza sativa
atgggccgccggggtttggtatctctctggttttttggcttgaaccccgacttgtttgtttgcttgcaggcggcggcgtcgatgaacgtctcggtaggctacttctgcgaccccgaggggctccctgggcttgcacacttccttgtttacagagcatatgcttttctatgctagcgagaaatatcctatagaagacagttactcaaagtatattgcagagcatggtggttcaaggaacgccttcacatctcgtgaacacacaaactttttttttgatgtgaacaatgattgcctggatgatgctttggatagaggtttgcacaatttttcataaatccactgatgtcacctgatgcaattcttaggaaaaccagaaaaacttactgacagatattttgcgaatgagtcagcagctccagaaacatatttgcttggagagccatccatatcacaagtttagcactgggaaatcggaacactttactggttaatccaaataaggaaggattggacatattggaagagcttattacattttatagttcacactattcagccaacttgatgcaacttgttgtgtatgggaaagctagttaaagcagttcccataaaacaaggccacacgttgagaatactgtggccaatcaccccaaatatccagcattataaggaaggtccttgcaagtatgtgagtcatttagttggccatgaaggaaaggggtctctgttttatgtactaaaaaaattagggatgggctatgagtttgagagcaggggaaggtgattggagttctgtgttttcgttcttcagtgttgttatacggctcacagatgtaggccatggaacatatggaggacattattggactgttgttcagatatataacactgcttcagacctctggaactcctaaatggatttttgacgagatccgtgagacaggattccactaccgagacaagagtcctcctagccaatatgttgtcaatatttcctcaaacatgcaggattggctgattgcatcgtctgtgccatcaaagttttcaccagatgctattcagagtatattaaatgacttgactccagataaagttagttcagaatattctgggagtcaaaaaagtttgaagggcagacgaacttaacagagccatggtatgtgggtaaatagagctcccatggaagatttgcacataccaaaacctaacatcttcattccaagtgatctttcattgaagaatgttgaggagaagctgcggaaaacactgttttccatagtgtggtataagcctgatacgatgttcttcacacccaaagcctacatcaagatgtatttccactgtccactgtcccgtagctctccagaatcaatagttcttactgatatgttcacaaggttgctaatggattatttaaatgattatgggctataatgacaaaatgagaacccttctggagactgtcattggaaaaattgctgcatttgaagtgaaggttgaccgttttgttgtgataaaggaaactataacaaaggcgtatgagaatttcaaatttcagcaacctcatcagcaggcatcgtactattgttcattgatattagaggaacaaaaatggacatgggatgaaaaacttgctgcaatttctcatactgaagctagtgatctagagaaatttttgcctcatctgctggggaagacatttattgagagctactttgctgcagattcatcaggatgacctcaaacaaaatgttctacttcagttgcttgcccttgttgctaagcaaccagcctttcaccaattacgttcagttgaacaacttggctacataacatggcttaaacaaagagaaatgattcaggcgtccgtggcttgcaatttacaatccagtcaactgtgaaggatgccagagtggaagcttttcttaagatgtttgaaggaactctatacagtgacgtgaatgctctcatcaatatgaagctggagaaatacaagaatataagagaggaatcagctttcttctggcgagagatctctgaaggaactctgaaatttgatagaaaagaggcggagctcaagaaagaggagctgattgagttcttcgataatcatgtcaaagttaatgcaccacgaaagaagatactcagtatacaagtctacggccgtctccacaccaacgagtacgaaaaggtagttcacgacgagccacagccgcattcctatcaaataaccgatatattcagcttcaggaggtcgagacctttatatggttcattcaaaggaggtattggtcagatgaagttatag

SEQ ID NO: 898 - DNA, 2300 bp, Oryza sativa
atgccaccgatcccatctctgtggatccgcgtcttcttctcctggctgctgctgtcgctgcccgccgcggctgccgccgatttcagccactgcggcggctgcgacgacggcgacggcggcggcggcatatggagcacggacaacatcctgcaatgccagagggtgagcgacttcctcatcgccatggcctacttctccatcccgctcgagctgctctacttcgccacctgctccgacctcttcccgctcaagtggatcgtcctgcagttcggcgccttcatcgtgctctgcggcctcacccacctcatcaccatgttcacctacgagccgcactcgttccacgtcgtgctcgcgctcaccgtcgccaagttcctgaccgccctggtgtcgttcgccaccgcgatcacgctgctcacgctcataccgcagctgctcagggtcaaggtcagggagaacttcctcaggatcaaggcgcgggagctggaccgggaggtggggatgatgaagaggcaagaggaagcgagttggcacgtgcggatgctcacgcacgagatccgcaagtcgctcgatcgccacacgatcctgtacaccaccatggttgagctctccaagacgctcgagctgcagaactgcgccgtctggatgcctagcgagagcgggagcgagatgatcctgacacatcagctgaggcagatggagacggaggactcgaatagcctgtccattgcgatggacaacccggatgtacttgaaataaaggcaacaaaggatgcaaaagttctcgcggcagactcagcgcttgggattgcaagcagaggcaagcttgaagcaggtcctgttgctgcaatacggatgccgatgttgaaggcgtcgaatttcaaaggagggactccagaagtgatggaaacaagctatgctattttggtcttggtactacccgaggatggttcactaggatggggtgaagaggagttggagattgttgaagtggttgctgatcaagtcgcagtcgccctatcacatgctgcagttctggaggaatctcaattgatgcgagagaagctcgccgcgcaacacagggacttgctgagagcaaagcatgaaaccacgatggccactgaagctaggaactcctttcagactgccatgtatgatggaatgcgacggccaatgcactcgatccttggtctagtctcaatgatgcagcaagaaaatatgaaccctgagcaaaggcttgtaattggatgccattgtcaagacaagttagcgttgcgtcaacattgatgaatgatgtcatgcaaacatcaaccgtaaatcgtgagtatttgtctttggtgaggagggcattcaaccttcattcgttggttaaggaggcaatcagtgttgtaagatgcctaactggctgcaaggggattgattttgagtttgaagtggataattctttgcccgaaagggtcgtcggtgatgagaagagggttttccacatcgtcctgcacatggtaggtactctaatacagaggtgtaatgcaggctgtctatccttgtatgtgaatacttacaatgagaaggaagagaggcacaatcaggattggatgctgcgaagagcaaacttctctggcagctatgtgtgtgttaagtttgagattaggattagagagtccagaggtaatcttttgagttcgtcatccagtcggagacttcaagggcccaactctaccagttctgagatggggcttagcttcaacatgtgcaagaaaattgtgcagtgcagatgatgaatggtaatatttggtcagtctctgattcaaaaggccttggagaaactatcatgcttgcccttcagttccagctgcagcatgtgactccggtctctggagcatcctcggacttgttccgatcagcgccaattcccaattttaatggactccaagtcattcttgtggacagtgatgacaccaatcgggccgtaactcacaagctcctggagaagcttggttgcctagtcctctcggttacttccggcatccaatgcatcaactcctttgccagtgctgagtcatctttccagctggtggttcttgacctcaccatgcgtacaatggatggatttgatgtagctcttgcaatcaggaagttcagggggaattgttggccaccgttgatagttgctcttgcggcaagcaccgatgacaccgttcgggatcggtgccagcaggcaggaataaacggtccgatcccaaaaaccagtcactttagcagcactgggagatgaactgtatagagtccttcaaaacaattga

SEQ ID NO: 899 - DNA, 2220 bp, Oryza sativa
  N_region (1316)..(1316): n = any nucleotide
gttttgtctaagaaagaccaacaacaatactggagtcatactgaggaaacatacaactttgttactgttgatcacttctgtgagaaatttaaagcatctcaatactctctaaccaagtgggatctcctcaaggcatgttttgcaagggaaattcttctcatgagaagaaatgccttcatctacataacaaaagttgttcaggctgttattactgggacagtgtttctacggacacatatgggggtcgatagggcccatgctgactattatatgggttccctcttctatgcgctcctccttcttttagttaatggtttccctgagttggctatggcagttaccagacttcccgtcttttacaaacaaagagactactatttctatccggcgtgggcttatgcaatacctgcttttatactaaagattccagtttctttagttgagtcaataacttggacatcaatatcttactacctcattggctatactccagaagcatccagtctatgcctaattggctaaaatggggattttggatctctccattgtcatatgctgagatagggttaacagtaaatgagtttttggcaccacgatggctaaagacacttggaaggagggtaataatggatcgaggactagacttctctagctacttttattggatttccgtcggtgcattggttgggtttattttgttgcttaatatggtgttacctttcacaccacttacaatatcatttcaagatgtgaactactatgtagacacccccgtggaaatgagggagcaaggttacaaggagtgaaagttacaactactgcacaacatcacaggagctttccaaccaggggttctatcagcactcatgggagttactggagcaggaaaaacaactctacttgatgttcttgctggaaggaaaactggtggtgttattgaaggagatatacgagtaggaggttatcctaaaattcaacaaacttttgcaaggatatcaggctattgtgaacaaaccaatgttcattccccacaaatcacagtggaggagtcagttgcatattcagcttggttgcggctaccaacagaagtcgattcaaaaacaagaagaacaattgagttggatgatattagagatgctttagtaggactaccgggggcagtggagcttgtgtccaatccttcagtcatattcatgcttggatgcacgagcagctgctattgtcatgcacaaggtgaagaatgtcgcagacacaggtcgaacagttgtgtgcaccattcaccaaccaagtattgaaatatttgaggcctttgatgnggtactttcaacttttgctaatgaaaaggggtggagagttgatatatgctgggcctcttggattccattcatgtaacgtcatccactatttcgagcccaagatcaaggataactacaacccatcaacatggatgctcgaagttacttgtgcatctatggaagctcaattgggagtagaatttgcccaaatttacagggaatcaaccatgtgcaactagtgaagagtttgagcaaaccagctctaggcacgagtgatctccatttcccaacacggtttccacagaggtttggggagcaactaaaagcttgcatctggaagcagtgtttgtcatattggagaagtccttcctacaacctagtgcgacaacaaggtctattcaccatactagggtgcctgtacggcaccactctttttactggcatcaataactgccaatcggtgatgccgtttgtctccattgagcgctctatcgtttatagggagaggtttgcaggaatgtactctccttgggcctactccttggcacagacgtttcctaactacttgggaatgatgatagtggcactcaccccaaatgtggcatctatattggcatccatgttctacaccctgcagaacctcatgtctggcttcatcgttcctgcaccatggatatggctgtactacacttccccattgtcatggacactcaacgttttcttcaccacacaatttggggatgagcatgagaaggagatttctgtatttggagagactaaatctgtggccgccttcatcaaggactacttcggtttccaccgtgacctactgccactagcagccataattttggccatgtttcccaccttgtttgccatcctttttggtctcagcatctccaagctcaacttccaaaggcgataa

SEQ ID NO: 900 - DNA, 2202 bp, Oryza sativa
atgaggccgccgacgcctctccccttcctgctgctcctcctcctcctcctggtgctcctcctcccgtcgccgtctgcggcggccgcgggcggcgccgacgggtgggaggcgatcggcgcggcggcggcggggggaggccgccgcagggtcgcgtcgccgggagagcaggaggcggccgccgccgggttgctccgcaggctcctcccctcccacgcccgcagcttccgcttccagatcgtctccaagtgcggcgggtcaagctgcttcaggattagtaatgcggatggctcgcgcagaaatggagcagaaattctgatccagggtaccacagcggtcgagctcgcctctggtctccactggtatctcaagtactggtgtggtgcacacatttcttgggacaagactggtggcgcacagctggcctcggttcctttgcccgggtctctaccgcaagtaaaagggacaggagtgaagattgagcgacctgttccgtggaattactatcagaatgttgtcacctctagcttcatttgtctggtgggattggaaaagatgggagaaagaaattgactggatggcacttcaaggaattaatttgcctttagcatttaccgggcaggaagctatctggcaaaaggtttttaaggacctagatgatttttttggtggaccagctttccttgcttgggctagaatgggtaacctgcatggtggggtggaccactatcacaaaattggctggatcaacaattgacactgcagaagaaaatattgtcccgtatgattgagcttggaatggtcccaggttctaccatcgttctcaggaaatgtaccgtctgtgtttaaaaaattatttccatctgccaacataaccaaacttggtgactgggaacactgttgatggtgatcctaggtggtgctgtacttatcttcttgatccttctgatgcattgtttattgatgtggggcaggcgtttatcaggcaacaaatgaaaggacaccttcaacgagaatacaccacccacatggctgttctactcagatgcagctttctggaaggagcctcaaatgaaagcattacttcattctgttccaactggtaagatgatagtccttgatttatttgctgatgtgaagcccatatggcaaatgtcctctcaattttatggtgtgccatatatatgtgcatgttacacaactttggtggcaatattgaaatgtatggcatacttgactcaattgcatctggccccattgatgcacgtacaagccacaactcaacaatgggttggcgttggcatgtgcatggagggaatagagcataatccagttgtttatgagcttatgtctgaaatggcattccgtagtcaaaaagttgaagttgagcaggattggttaaaaatatactcctacaggcgatatggtcaatcaaatgttgaggtggagaaagcttgggggattttgtatcatacaatatacaattgcacagatggaattgcggatcataataacgattacatagttgaatttccagacgaggtgtctgcaagcctaccacatccacatctatggtattccacaaaggaggctatcaaagcccttgaattatttcttaatgctggaaacgatctttcaaaaagtttgacatatagcttgttgacctgacaaggcaatcactgtcgaaattagcaaatgaagtgtaccttgatgccatgaatgcttaccgaaagaaagattcaaatggtctaaacttttacacgaagaaattccttgagctcattgtggatattgatacactactagcttctgatgataattttctgctggggccttggcttgaagatgcaaaaagccttgctaggactgaaaatgaacgaaagcagcagtatgagtggaatgctagaacacaggtaacaatgtggtatgacaatacaaagaccgagccgagttaactacacgactatggccaataaattttggagtggactgctgaagagctactatctaccaagggcatcgaaatacttcagtcgattaacaaaaggcctacaagagaaccagagttttcagctggaggaatggacgaaagattggattgcctactcgaatgaatggcagtccgggaaggagctctatgctgtgaaggctacgggtgatgctttggcaatttccagctcactattcaaaaagtacttcagttag

SEQ ID NO: 901 - DNA, 2018 bp, Oryza sativa
  N_region (442)..(442): n = any nucleotide
atgggattatattcttcttctcgtgcaattctactactttacttttgcacattgttgttcagagcacacggatctcgtaagctttacatagcatatctcggtgatgtaaaacacagccaccccgacgatgtcatcgcttcacaccatgatatgctcaccactgttcttggaagagcaaggaagattctttggcctctatcatccacaactacaagcatggtttctcaggcttcgccgtgatgcttactgaagatcaagcaaagcaacttgcaggaatttccggaagtccttagtgtggaaccaagcaaaacgtatacgacggcgaccactcggagctgggacatgcttggactgaactacagaatgcccactgaactgctccagcgaaccaactacggcgaggagataatcattggcattgttgacactgggagtctgccangtcggcgaaggatggggcagcaacaatgagccgcaagatatcggcgcgcggttacacgccggggtggacgaggacgacctcaagatcgactacctctcgccccgcgacgcgaacggccatggcacgcacacggcgtccaccgcggcgggctccgtcgtggaggcggggtccgggagcaccgccaccgtgctggccgccatcgacgacgcgatccacgacggcgtggacgtgctgtcgctctccctggagaactccttcggcgcgcagcacgccgtccagaagggatcaccgtgtttacgccgccatgaaccttggcctgcgcctcaggtggttcagaacactgccccttgggtcatcaccgtcgcggcgagcaagatcgatcggtccttcccgacggtgatcacgttgggtgacaagcgacagatagtgggacaatctctctactctcaagggaagaactcatcgctcagcggtttcagacgccttgtcgttggagttggagctgaatggcacggatgtcaaaggaagcattgtgctgtgcgcatcttttactctcaacaaaccatctatccttttccaagaagctctaggaaacgtcgtgaaaggcggaggggtgggcatgattttcgttcagtatacgtgggatattgtaagttcgacagccagatgcaacggtattgcgtgtgttattgtggactattacacagtgaaacagatcggaaaatacatactcagtgcaagagttcacccattgtgaagatcgatccagcacgcaccgtaacggggaatgagataatggcaccaaaagtggcagatttctcttcaagaggcccttcaactgattaccctgaaattatcaagccagacatagctgcaccaggattcaacatcttagcagcagtgaaaggcacatacgcatttgcctcagggacgtcaatggctactccgcatgtagcaggcgttgtcgcgctgctgaaagctctgcatccaagctggtcacctgctgcactaaaatcagccatagtcaccacaggcatctgtaactgatgagcgtggcatgcccatactggccgaagggttgcctcggaagattgctgacccatttgactatggaggcgggcacatcaaccctaacagagcagctgatcctggcctgatttacgacattgatccaagcgattacaacaaattctttggatgcactgtaaagccatatgtaaggtgcaatgcgacatcgttgcctgggtattatctgaacctaccgtccatctcagttcccgatcttaggtatccggtcgtcgtatcaagaacggtcacaaatgtagctgaggttgatgctgtttaccacgctgcaatcgagagcccacctggcgtaaagatggatgttgagccacctgttctggtgttcaatgctgcaaacaaagttcatacgttccaggtaaagctttcacctctatggaagctgcagggggactacacgtttgggagccttacttggcacaacggccagaagacagtgagaatcccgatagcagtcaggattacaattcaggatttctacgcagacattgcataa

SEQ ID NO: 902 - DNA, 1883 bp, Oryza sativa
atggggcagtgctacggcaagggcgcgtcggggaggacggcggacgatgagggcggggtggtgacggagcaccagtcgccgccgccggcgaacgggctgccgtcgacgccgccgcggcagcaggcgcaggcgcaggcgcagcaggtggggacgccgaggcggcttgggagtaagtccggatcgacgacgccggggcaccagacgcctggggtggcgtggccgagcccgtacccgtccgggggcgcgagcccgctgccggccggggtgtcgccgtcgccggcgaggtcgacgcccaggaggttcttcaagcggccgttcccgccgccgtcgccggccaagcacataaaggccacgctcgccaagaggctgggtggggggaagcccaaggaagggacgataccggaggagggaggcgtgggcgctggcggcggcggtggaggggccgcggatggggcggagacggagaggccattggacaagacgttcgggttctcgaagaacttcggcgcgaagtacgagctcgggaaggaggtggggaggggccacttcggacacacttgctccgccgtcgtcaagaagggcgagtacaagggacagaccgtcgccgtcaagatcatcgccaaagctaagagatgacaacggcaatatccattgaggatgttcgtagagaagtaaaaattttgagagcgttatcagggcacaataatctcgtcaaattctatgatgcatgtgaggatggcctcaatgtctacattgtcatggaattatgtgagggaggagaattgctagacagaatattagccagaagaggcgggagatacacagaggaagatgccaaagcgattgttgtacagattttgagcgtagtagccttctgtcatcttcagggggtagtgcatcgtgatttgaagccagagagaatttccttttcacaaccagggatgaaaatgctcccatgaagttgattgattttggtctctctgatttcattagaccagcagatgaaaggcttaatgatattgttggaagtgcatattatgttgccccagaggttttacacagatcatatagtatggaagcagacatttggagtataggtgtcataacgtacattctgctctgtggcagtcggccattctgggcacgaacagaatcaggaatattccgatctgtgttgagagctgatcccaactttgatgattcaccgtggcctacagtatcagctgaagctaaggattttgtgaagagatttctgaacaaagattaccgcaaaagaatgaccgctgttcaagcactgactcatccttggttgcgagatgaacaaaggcagatcccgctggacatactcatcttcagattaattaagcaatacctccgcgctacacctcttaaacggttggcattaaagaggcactatccaaggctttaagggaagatgaacttttgtatctcaaactgcagtttaaactgctcgaacctagagatgggtttgtatcacttgacaactttcggacggcactaacgcgatatttaactgatgctatgaaggaatcgagggttcttgaatttttgcatgcgaccacttgcatacagaaggatggactttgaagagttctgtgccgcagcaatcagtccttaccagcttgaggcactggaaaggtgggaggagattgctggaacagctttccagcaatttgaacaagagggcaaccgagtcatatcagttgaggaattagcacagacaggaattaaatcttgctccaactcattactccatcgttcaagactggatcagaaaatccgatggcaagctaaactttctcgggtttaccaaatttttacatggtgtcacaataaggggctcaaatacaagacggcattaa

SEQ ID NO: 903 - DNA, 1875 bp, Oryza sativa
atgaggacggcgcggaggctcgggatccccaccgtcgcggtctacagcgacgccgaccggggggccctccacgtgcgcgccgccgacgaggccgtccgcctcggcccgccgcccgccagggagagctacctcaacgcctccgccatcgtcgacgccgcgctccgcaccggcgccgctatccacccaggatatggttttctttcggagagcgcagatttcgcgcagctctgtaaagccgaggggcttacattcattggaccaccaccatctgctatccgagacatgggcgacaagagagtgcttctaagaggatcatgggtgctgctggtgtaccgctcgtcccagcaagacattgagctgttaaaacttgaagccaataagattgggtatccagttttgatcaagcccacacatggtggagggggcaagaaggggatgagaatagttcaaaggcctgaggactttgtggattctgtattgagtgctcaacgagaagccgcagcatcatttggcataaacacgctgctggttgagaagtatattacccaacccagacatatagaagtccaggtgaagatatttggagatcaacatggaaatgtgattcacctttatgagagagattgtagtctacaaagaaggcaccaaaagattatcgaggaagctccagctggtgaagctgctgtatcagctgcaaaggcgttgaaggcagttggttactacagtgctggaacagtggagtttatcgtggatactctttccggagaattctatttcatggaaatgaatactcggctccagttgaaggttgaacacccagtgaccgagatgatcgttggccaagatcttgttgagtggcaaatacgaattgcaaatggagagtgcctaccattatctcaggagcaggttccgttaaatggtaatacttcttagtcaggacatgcgtttgaagcccgaatatacgcagaaaatgtgccaaggggatttcttcctgctacaggaaccttacaccactacaggtaagagttgaaactggagttgaagaaggagatactgtcagcatgcattatgatcccatgatagccaaacttgtggtttggggtgaaagtcgcaatgctgcgctagtcaagctaaagaacagcctgtcaaactttcagcagattgcaggtttgccgaccaatgttggtttcctccaagaactcgcaggtcatagtgcctttgaaaaaggcctagtcgatacacatttcattgaacgctatcaaaatgatcttctgagtacttctactcaagccttgagtggatcacatgaagcagaagagcttggtgcaattttggctgctgcctgcatttgcaagaaggatcatgtttcctctgaagtgtcacttctggtacgcccatccacctttcaggatgcatcattttgccaagcgtctaatggaatttgagttggatagagaacttggtggatcaagtgatgatcttcttaaactgtcggtaacatatagatctgacggaacctacttcgttgagcatatacacatctggcatgggaagcatcatcatcattacaggcagacgttgagagctgagcagtcacctgatgacagttctcaacctagcgcttcctctgaggcgaggtcacatccaaaggggagtgttttggcaccaatggctggtctggttgtaaaggttttgcttaaagacggggcacgggtggaggaaggtcagcctgtcatggttatggaagcaatgaagatggagcatgttgtgaaggcgccttgtgccggatatgtggaagggctgaaggctactgccggacaacaagtttttgactctagtgtccttttcaccgtgaaggtacgtcacaattattga

SEQ ID NO: 904 - DNA, 1815 bp, Oryza sativa
atggatgatgatgactactcctgggtgcggcgcaccaagttctcgcactccattgttaaatccaactctggcagggagcagtttggtgcattccttgatccgtttgacagttccactgcatggaggcagaaaggattcagtggagagctcatgattcatggacataatttacagccgagggcaaaaggagcagtctcaaagtcacctaggccttcaatcccgttggcgaaatcaccagtttcacaggcagagcggaagctgaaagctaagttttcagatggtgaattgaaacaacgggggaaaattagtgatggctcgttgcgagaagcatcgaaagagaaggatcgcaaggttgggcataaaggagaaggccttagcctggatatttcttgtccaattctggatcggacagttcaggatgacagttcagacacgcttgacttctctttccactcagaagagcaaagtttaaggttgctgagagtatgctcgagtccagctcctttctattcgaaggatacaactacgtttggtgattccaaaatacatagtacgtctgttaagattgttggagagggatcgaagccgaggaggagagcgaaatccccaatgccgacccgtgtcatctctgaagtttttaaggaggccaaagctgccactaagaggttctctagcccacagcggcaaaggaaatctagttctccacattcaccacgttcacccgatgatagtccccggtttggctttccttcaatgagaacaccgggtaacttgaaagctaggagggcctcgtcctggccaaggaactatgacaatggagtggccaaggctgttgcattggatatacttgagagatggacaattgaccgctcacagttactcattggtcaaagatttgcatcaggggcatatagtcgtttgttccatggaatttacaaggagcagccagttgctgtcaaatttatcaggcagcctgatgaagaagaagatgcagaattggctgctaaacttgagaagcaattcactgctgaagtaaccattctggctcggctccatcatcgcaatgtcattaagctgattggggcatgtaatgctccaccggtcttttgtgtcatcactgagttcctgtgcggggggtctttgagagcttttttgcgcaagctccagcgccaaaagcttcctttggagaagatcatttgcattgctttggatattgcacatggtttggagtacattcactcgcaaagagtaatccatcgtgatgtgaaacctgagaacatcttgtttgatggagaatgttgtgcaaaggttgttgattttggagtggcttgtgaagaagtatactgcaactcattggaagatgacccaggtacttacagatggatggcaccagagatgtataagcgcaaaccatatggtcggaaggttgacgtctacagttttggcctcgtattgtgggaattgtttagtggctcgatcccttatgaagagatgactccattgcaggcagcttttgcagttgttaataagaacttaagaccagttgttccttcaagctgtccggcgcaacttcgacttttgatcgagcaatgttggtcttgtcaaccagagaagagacctgagttttcccaagtagttcagatcctcaaaaatctcaaggaggccctggatagagatggaacgcttgacaagatcccaagcaccaactgccaggaacctcctgatcagaacaagaagagactgtccaattggatccaaagactctcgtacagtcaggccgatttctccggacctccaccgccaaagttattgtaa

SEQ ID NO: 905 - DNA, 1805 bp, Oryza sativa
  N_region (74)..(74): n = any nucleotide
atggccgggctcgacggcggcggcgacgccgaggagggggccacgcatgcccgcggcggcggcggcgcgccgcngccgtggcgggagcagctgacggcgcgcgggctggtggcgagcctggccgtgggcgccatgtacagcgtcatcgtgatgaagctgaaccttaccacgggcctcgtccccacgctcaacgtctcagccgcgctcatcgccttcgtcgtcctccgcggtccgcccgttcacgcggcaggagaacaccgtcgtccagacctgcgccgtcgcctgctacagcatcgcagttggaggcggtgggtttggttcttacttgcttgggctcaacaagaggacttacgagatggcgggcgaggacacggagggcaacgtgccggggagctacaaggagcccggcattgcgtggatgactggattccttctcgccgtcagcttcgtcggacttctcgctctcgtccctcttaggaagattgactacaaattaacttacccaagtgggactgcaacagctgtgcttataaatggattccacacacctcatggggatgcaatggcaaaaggcagcaagtaaatggattcaccaaatattttagtttcttttggagcttcttccagtggttttactctggtggagacaattgtgggttctcgcagtttccaacttttggactaaaagcttggcaacaaacttcttcttcgatttcagtctcacatatgttggggcagggatgatttgctcccaccttgttaatctgtctctcctactcggcgccattctctcatggggagtaatgtggccactgatcagtgatttgaaaggggattggtattcagcagatatacctgaaagcagcatgaaaagcctgcaagggtacaaggccttcatctgtgtagctctcatcctagctcgatgaacttcatcgtaatgaagtttttacaacagacaatattccttcctggctagccttctctggttatcttggattaacttttattgcagtaattgccattcccatgatgttccatgagatgaagtggtattatgttgtcatagcatacttattggcgcctgcccttggtttctgcaatgcctatggagcaggcctaactgacatcaatatggcctacaattatggaaagattgccctcttcattcttgcagcctgggctgggaaagactctggtatagttgctggcctagtaggctgtggtttggtgaaatcgctggtgtccatatctgctgatctgatgcatgatttcaagacgggacatctaacattaacatcaccgagatcgatgattattgctcaggccattggaactgtcatgggttgtgtaatttcaccactaactttcttcttgttctacagtgcctttgacattggcaacccagaagggtactggaaagcaccatatgctctagtctaccgaaacatggcgattcttggtgttgagggcttctctgctctgccccagcattgcttgcagctctgctatgggttttttggctttgcagtggcagctaaccttacgagggacctttgcccaccgaactaccgatggcaatgggggttcctttcctggttggtgcaagctttgccatcgacatgtgtatcgggagcctgatagtcttcacctggcatataattgacaaaagcaaagcagcactaatggtgccagcagttgcatctggtttgatatgcggggatggtctttggatcttccctgcgtccttgcttgctttggccaagatcagcccaccaatgtgcatggcatttaggtctacaaactag

SEQ ID NO: 906 - DNA, 1795 bp, Oryza sativa
  N_region (88)..(88): n = any nucleotide
  N_region (94)..(94): n = any nucleotide
  N_region (127)..(128): n = any nucleotide
  N_region (133)..(133): n = any nucleotide
  N_region (234)..(234): n = any nucleotide
  N_region (242)..(242): n = any nucleotide
atggggaacacgtgcgtcggccccagcatcagcaagaacggcttcttccagtccgtctccacggtgctctggaaggcgcgccaggacngcgacnacgcgctgcccggcgccaatggcgcccctgacnnctgcngccagggccggttgccggcgccgccgccgccgacttccgacgcgccgctcgccgtccaaaacaagccccccgagcacgtcaagatcgtctcgaccacgganaccgcctncgccgagcagacgcctccaagtcgagcgccggctcggactccggcgagccgccaggccgcggccgaggtgccgccggtgaagcgcgtctccagcgccgggctgctcgtcggctcggtgctgaagcgcaagacggagagtctcaaggacaagtacagcctggggcggaagctcgggcaggggcagttcgggacgacgtacctgtgcgtggagcgcgccaccggcaaggagttcgcctgcaagtccatcctgaagcggaagctggtcaccgacgacgacgtcgaggacgtccgccgcgagatccagataatgtaccacctcgccggccaccccaacgtgatctccatcaggggcgcctacgaggacgccgtcgccgtgcacctcgtcatggagctctgcgccggcggcgagctgttcgaccggatcgtccagaaggggcactacaccgagcggaaggcggcggagctcgccagggtcatcgtcggcgtcgtcgaggtgtgccactccatgggcgtgatgcaccgtgatctcaagcccgagaacttcctcttcgccgaccagacggaggaggccgctctcaagaccattgactttggtctctccatttcctttcgcccagccaggtcaagtattcactgatgttgttggtagcccttactatgtcgcgccagaagttctgaaaaagaaatatggtcaagaggcagatgtctggagcgctggtgtgataatttacatcttgttgtgtggtgtgccgccattttgggcagcagagaacgagcagggtatatttgaagaggttttgcatggtagacttgactttcagtcagaaccatggcctagcatctctgaaggtgccaaagatctcgtaaggagaatgcttgttagggacccgaagaagagattgacagctcatgaagttttaaggcatccatgggtccaggttggtggtttggctcctgacaagcccctggattctgctgttctatctcgtatgaagcaattctcagctatgaataagctgaaaaagatggctcttagggtcattgcagagaacctatctgaagacgaaatcgccggcctgaaagaaatgttcaagatgatcgacacagacaacagtggacagatcaccttcgaagaactcaaggttggtctgaaaaaagtcggtgctaacctccaagaatccgagatctacgcactcatgcaagccgcagatgtagataacagcggcacgatagattacggtgagttcatcgctgcaactctgcatatgaacaagatcgagcgggaggatcacctgttcgcggcgttccaatacttcgacaaggacggcagcggctacatcacggccgatgagctgcagctcgcctgcgaggagttcggcttgggagacgttcagctcgaggagatgatcagagaagtcgacgaagacaacgatggtcgcatagattacaacgagttcgtggcgatgatgcagaagccgacgatggggctgcagaacagtttcagcatcggcttcagggaggccttgaggatgtcttgagaaacagccactaga

SEQ ID NO: 907 - DNA, 1638 bp, Oryza sativa
atggcgaccgatggcggcgtgttgcagctgcacccctacgccatggccgcggctgccgtggcattggcttcggcgtacatggtgtggttctgggcgctgtcgcggcggctgtccgggccacggatgtggccgctcgtcggcagcctacccagcgtcgtgctgaaccgggcgcgggtgcacgactggatcgccgacaacctgcgcgccacgggtgacgccgcgacgtaccagacgtgcatcctgcctctgccattcctggcgcggcggcaggggctggtgacggtgacgtgcaacccgcggaaccttgagcacatcctgcgcgcgcgcttcgacaactaccccaagggccccatgtggcaggcatcgttccacgacctcctcggccagggcatcttcaactccgacggcgagacgtggctgatccagcgaaagacggcagccctcgagttcaccacccggacgttgcgccaggccatggcacgctgggccaaccgctccatcaagtaccgcctgtggcgtatcctcgacgaccactgcaacgcggccgcaagcgtggacctccaggacctcctcctgcgcctcaccttcgataacatctgcggcctcaccttcggcaaggacccagagacgctgtcccccggcttgccggagaaccccttcgccaacgcttttgacgaggccaccgaggcgacgatgcagaggttcctgttcccgagcttgttgtggcgcatcaagaaggcgttcggtgtcggcagcgagcggagcctccgcgacagcctcgccgtggtggaccgtcacatgacggagaccatcgcggcacgcaaggcgacgccgtcggacgacctgctgtcccggttcatgaagaagcgcgacagcaagggcaaagcgttcccggaggacgtgctccagtggatcgcgctcaacttcgtgctcgccgggcgcgacacgtcgtccgtcgcgctcagctggttcttctggactctcatgcagaggcgggacgtggagcgcaaggtggtcctcgagatcgcctccgttctcagggagacgcgcggggacgacacggcgaggtggacggaggagcctctaaacttcgacgagctggagcgactggtgtacctcaaggcggcattgacggagacgctgcggctgtacccgtctgtgccgcaggattccaagtacgtcgtggcggacgacgtgctgcccgacggcacagtggtgccggccggctcggcgatcacctactccatctactcagtgggaagaatggagagcatatgggggaaggactgcgcagagttccggccggagcggtggctatcggccgacggcagccgcttcgagcctgtcaaggacgcgtaccgcttcgtggcgttcaacggcgggccgcgaacgtgcctcggcaaggacctggcctacctgcagatgaaatccatcgcgtccgccgtgctgctgcgcaactcggtggagctcgtgccggggcacaaggtggagcagaagatgtcgctgacgcttttcatgaagaatggactgcgagtgcacgtcaagccgagggacattgccagctacgtcgagccgtcggagccggcgccgccgcagggctccctcgtgataccgactaccaccgcagccgctgcgtag

SEQ ID NO: 908 - DNA, 1605 bp, Oryza sativa
  N_region (1173)..(1173): n = any nucleotide
atgggcggcggcggcggggagcagcagcagcttgaggtgctccacgccctggacgtggccaagacgcaatggtaccatttcacggccatcgtggtggccggaatggggttcttcaccgacgcctatgacctcttctgcatctccctcgtcaccaagctgctgggccgcatctactaccgcgtcgacgggtccccgtcccccggcacgctccccccgcacgtctccgcctccgtcaacggcgtggccttcgtgggcacgctctcagggcaactcttctttggctggctgggcgacaagctcggccgtaagcgcgtctatggcatcaccctcatgctcatggtgctctgctccctcgcctccgcgctctcctttggccacaccccgacctccgtcatggccaccctctgcttcttccgcttctggctcggcttcggcatcggcggcgactacccgctctccgccaccatcatgtccgagtacgccaacaagaagacgcgtggcgccttcatcgccgccgtcttcgcgatgcagggcttcggcatcatcaccggcggcctcgtcgccatcctcgtctccgcctccttcagggccgccttcccggcgcctccctacggcgaggaccccgtggcctccacgccgccgcaggccgacttcgtgtggaggatcatactcatgctgggcgcgctgccggcggcgctcacctactactggcgcaccaagatgcccgagacggcgcgctacacggcgctcgtggccaacaacgccaagcaggccgcggccgacatgtccaaggtgctgcaggtggtggagatgcgtaatattggtaataatggtggcagcaggaggccgttcgggctgttctccggcgagtttgtccggcggcacgggctgcacctggtgggcacgtcggcgacgtggttgctgctggacattgcgttctacagccagaacctgttccagaaggacatattcagcgcggtggggtggatccccaaggcggcgacgatgagcgcgctggaggagctgttccgcatcgcgcgggcgcagacgctgatcgcgctgtgcgggacggtgcccggctactggttcaccgtcgcgctcatcgacgtggtgggccgtttcaagatccaggccgttggcttcttcatgatgaccctcttcatgctcaccctngccctgccgtaccaccactggacggcgccggggaagaaccacgtcggcttcctgctgctctacggcctcaccttcttcttcgccaacttcggccccaactccaccaccttcatcgtgccggcggagattttcccggcgcggctgcgggccacgtgccacggcatctcggcggcgtcggggaagctgggcgccatcgtcggatccttcgggttcctgtacctggcgcagagccccgaccggagcaagacggagcacgggtaccctccgggcatcggcgtccgcaactcgctcttcctgctcgccgcctgcaacctgctgggcctgctcttcaccttcctcgtgccggagtccaaggggaagtcgctggaggagatgtccggcgacgccgaggcccaggaggaggcgccgccgcccctgcaaactgtactgtag

SEQ ID NO: 909 - DNA, 1584 bp, Oryza sativa
  N_region (37)..(37): n = any nucleotide
  N_region (65)..(65): n = any nucleotide
  N_region (76)..(76): n = any nucleotide
atgtcgctcgaaatccatgaaggttacggggcggcanaagacaccgacctgcacgtggcggcccncggaggggacnccggggcgctgcgccgcgcgctggacgaggcggcggcggccgtggccaccggggaggggagggaggcgctggaggaggtgcggcgggccgtggcggcggagcccaacgaggccggggagacgccgctcgtcgccgcggcggagagggggcacctggaggtggtaagggagctgctcaggcacctcgacgccgagggggtcgccgcgaagaacaggtcggggtacgacgcgctgcacgtcgcggcgagagaaggccgtcatgctgttgtgcaggaaatgttacttcacaataggttgcttgccaagacctttgggcctgcgaatactagtccacttatttcagcagctacgaggggtcacaccgaagttgtcaaattgttactagaactagatgattttggattggtggaaatggctaaagataatgggaaaaattccttgcattttgctgctcgacaagggcacgttgaaattgttaaagcattactcgagaaagatcctcagctagcaagaagaaatgacaagaaaggtcaaacagccttgcatatggctgtaaaaggaacaaactgtgatgtgcttagagcacttgtcgacgctgatccagcaattgtaatgctgccagacaaaaatggaaacaccgccttgcatgtagcaacaaggaaaaagcgagcagagatagttgctgttctcttgcgattaccagatacccatgtcaatgcactaaccagagaccacaagactgcgtatgatatagctgaagccttgccactctgtgaggagtcttctgaaataaaggatattttatctcagcatggcgcactcagatctagggagctgaatcagcctcgagatgagctccgaaaaacagtgacagagatcaagaaagatgtccacacacagctggaacagacaagaaaaacgaacaaaaatgtgcatgggattgctaaggaactcagaaagttgcacagagaaggcatcaataatgcaacgaactctgtaactgttgttgcagtactttttgccacggtagcctttgcagccatattcactgtgcctggtggaaatgccaacaatggagttgcggttgttgttcaggcagcctcctttagaattttcttcatcttcaatgctatagctctgtttacatcattggcggtggtcgtagttcagataacggttgtcaggggagaaactaagtctgagaggaaggttgttgaggtgatcaacaagcttatgtggctggcatcagtttgcactaccatttctttcattgcctcttgctatattgtgctaggccgccatttccaatgggcagcactactagttagtttgataggtggcatcacaatggctggtgttctgggtacaatgacatactatgtggtgaaatcaaagcgcatgaggaagataagaaaaaaagagaagatgtcaagaagaagtggatctagctcctggtatgataatactgagctctcagagactgagcttaaccaagtgtatgccttgtaa

SEQ ID NO: 910 - DNA, 1564 bp, Oryza sativa
atgcagacccttgaatatacaggtgatggatctgtttgcatccgtgggcatcctgctttaaggaaacatacagaacctagtcagttatctcacaaaagttctacatgaaacaaacgtggccgctgcaagagatgttgcaacttggtcaggaacaagttatcttgcacctctggttggagccttcttagctgattcatatctggttgcttctgtcagcagcagttccattaatctctactggtcctcactcatggatcatatggacagatccagtctcttctcagaacatcatattctttgtcggtttgtacatggttgctttagggtatggtgcacagtgcccctgcatatcatcatttggtgctgatcaatttgatgacactgatgaaaatgagagaacaaaaaagagttcttttttcaattggacctatttcgtagccaatgcgggctcattgatctcggggactgttattgtgtgggtgcaagatcacaaaggttggatctggggttttaccatttctgcactatttgtgtatttaggttttggtacttttatctttggctcctctatgtatagatttcagaaacctggaggaagccctcttgcgagaatatgccaggttgttgttgctgctattcacaaacgcgataaagatttgccatgtgattcctcagttctttatgagtttctggggcagagttcagcaatcgaaggcagccgaaaattggagcatacaactggacttaagatagagctgcaatggtgacaccatctgattttgaatctgatggcctactaaacacatggaagatttgcacagtcactcaagtggaggaactgaagattttgatcaggatgttccccgtttgggcaacgatgatattatttgctgcagttctggacaacatgttttcgacattcatagaacaggggatggtgatggagaaacacatcggctctttcgaaatacctgcggcgtccttccaatccattgatgtcattgctgtccttatactagttccagtctatgaaagagtccttgttccagtgttcagaaaattcactggcagagcaaatggcattactccactgcagcgaatggggatcggcctgttcttttccatgctctccatggtatcagcagcattggtggagagtaatcgggttgcggattgcgccaggatgaaaggttttggtgcacaggtggctgttccaatgagcatcctgtggcagggaccccagtacttcctgataggcgtgggagaggtgttctcaaacattgggttaactgaatttttctaccaggaatcaccggacgccatgagaagcttatgtctcgcattctcacttgctaacgtttcggcaggaagttacctcagctcgtttatcgtttctcttgtgccagtgttcacagccagagaaggcagtcctggatggatacctgataacttgaacgaagggcatttggatcggttcttctggatgatggctggcttgtgtttcttgaatatgctggcctttgtgttctgtgccatgaggtacaaatgtaagaaggcttcctga

SEQ ID NO: 911 - DNA, 1561 bp, Oryza sativa
  N_region (1229)..(1229): n = any nucleotide
  N_region (1238)..(1238): n = any nucleotide
  N_region (1256)..(1256): n = any nucleotide
  N_region (1402)..(1402): n = any nucleotide
  N_region (1406)..(1406): n = any nucleotide
cagtgcttgcctgagccgatggacgctcactacggtggcggcatcatccgcaacggcgacttcagcgccggactccagggctggtcggccttcgggtggcaacgaaccggacgcggccgtaccagagcgtcagccagaaggtgctcctccaggacgacacgcactacaccctctcagagcttggttgcaggttagtgacgggatcgccgacgtgagagccgttgtgaagacggccggcggcgacttcatccactccggcggcgtcgaggcgaggtccgggtgctggtccattctcaagggcgggctcaccgccgccgccgccgggcaggctgaactctacttcgaggtggacatatgggtggacaacgtgtcgctgcagccgttctcgagggaggagtggagcgcgcaccacggggcggccatcaagaaggcgaggaagaagacggtgcggctccaggcgagggacgccgcaggcaacccggtcgccggcgcgcggatgcacatcgagcacgtccgcaacggcttccctctggggtcggcgatgagcaaggagatcctgaccaacccggggtaccagcggtggttcacgtcgcggttcacggtgaccacgttcgagaacgagatgaagtggtacagcacggaggcgatcccggggcgggaggactactcggtgcccgacgcgatgctccggttcgccaagagccacggcatcgcggtgcgcgggcacaacatcttctgggacgacccgagcacgcagatggggtgggtgaaggcgctctccggcgagcagctccgccgcgccacggagaagcggatcaagtcggtgatgtcgcggtactccgggcaggtgatcgcgtgggacgtggtgaacgagaacctccacttcgacttcttcgagggccggttcgggtgggaggcgtcggcggcgttctaccgcaaggcgcaccagatggacggcggcgcgctcatgtccatgaacgagttcaacacgctggagcagccgggcgacctgacggtgctccccggcaagtacctccgcaagctgtggcagatcaaggcgttcccggggaacggcaacgccgcccggatgggcatcggcctcgagggccacttcagcgcgcaacccaacatcccttacatccgcgccgcgctcgacaccatggcgcaggccaacgcgcccatctggctcaccgagatcgacgtcgcgccggggcccaaccaggcgcgcnacctcgacnagatcctccggagtgtancccaccacccggcggtgcacggcatcatcctctggacggcgtggcacccgcagggatgctacgtcatgtgcctcaccgacaacaacttcaagaacctccccgccggcgacgtcgtcgacaagctcatctgggattggaagacgcgntccnacgtcggcgtcgccgacgccgacggctactacgagaccgagctgttccacggggactacaaggtcaccgtcacccacccggcggcgaactccaccgtggcgcagagcctcagcgtcgacagggagtccgacaacgagttcaccatacacgtctag

SEQ ID NO: 912 - DNA, 1548 bp, Oryza sativa
  N_region (365)..(366): n = any nucleotide
  N_region (370)..(370): n = any nucleotide
gcagtgtcgtttaagtctagagaggatcaccggaagcagctcgagctcgaggaggcgaggaaggctgggctcgcgcccgccgaggtcgacgaggatggaaaggagatcaatccccatatcccccagtacatgtcctcagccccatggtatcttaacgctgataagccgagtttgaagcatcaacggaattggaaatcggacccgaactacaccaagtcatggtacgataggggtgctaagctttttcaggctaacaagtacaggaaaggagcttgtgagaaaagtcatgcatggaacgacctcgcagtgtgggagctaaatggactaacatcaatatagcaccagatgagaaagtggagtcattnnaacnggattatgatggaaagcgtgatcgctggaacggttacgacccatcgacgtacacccgtgttattgcagattatgaagctagagaagaggctaggaaaaagtatctgaaagagcaacagctcaagaaacttgaggagaaggatggtgaggagggtgacgagaacgtggctagtgaggaggaggatgaagaagatggtttgaagatagatgaggctaaagttgatgagagtgctcaaatggattttgctaaggtagagaagcgtgtacgtacaacaggtggtggaagcactggaactgtgaggaatttgcgtattagggaagacactgcaaagtatcttctgaaccttgatgtgaactctgcatactatgatccaaaaacccgctccatgcgtgaagatccattgccagatgcagaccccaatgataaattctatgtgggtgataaccaaaatcgacttagcggacaagctctggagttcaagcaactcaacatacatgcgtgggaagcttttgataagggacaggatattcacatgcaagctgccccatctcaagctgaacttctattcaagagttttaagatcaaaaaggagaaattgaaatctgaaaacaaagataagattatggagaagtatgggaatgctgcatctgaagaaccaatccctcgggagcttcttcttggacaaagtgaaaaagagattgaatatgaccgaactggtcgaataatcaaaggacagcaggatgtagcccttcccaagagcaaatatgaagaggatgttttcattaataaccatacaaccgtatggggctcatggtggaaagatcatcagtggggctacaaatgctgcaagcagactatccgaaatagctactgcactggcttagctggaattgaggctgctgaagcatcggctgatttgatgaaggcaaatatggcccgcaaggaagctgcagaaggaagaaaagcgactggccacctggggaactgatgtgcctaatgatattgttcttgacaagaagctgcttgatgaagccctaaagaagaggaaagaggagatggatgaaaggaagaggaagtacaatgtgaaatggaatgatgaggtcaccgcggaagacatggaggcttaccgcatgaagagaattcaccatgatgatcctatgagggatttcctccattag

SEQ ID NO: 913 - DNA, 1478 bp, Oryza sativa
  N_region (547)..(547): n = any nucleotide
ccgccggggccggcggccgtgccggtgttcggcaactggctgcacgtcgggaacgacctgaaccacaggttcctcgcggcgatgtcggcgcggtacgggcccgtgttccgtctgcggctgggcgtgcgcaacctggtggtggtgtcggacccgaagctggcgacggaggtgctgcacacgcagggcgtggagttcggctcccgcccgcgcaacgtcgtcttcgacatcttcaccgccaacggcgccgacatggtgttcaccgagtacggcgaccactggcgacgcatgcgccgcgtcatgacgctgccgttcttcacggcgcgcgtcgtgcagcagtacaaggccatgtgggaggccgagatggacgccgtcgtggacgacgtgcgcggcgacgcggtggcgcagggcaccggcttcgtggtgcgacgcaggctgcagctcatgctgtacaacatcatgtaccggatgatgttcgacgcgcggttcgagtcggtggacgaccccatgttcatcgaggccaccaggttcaactccgagcgcagccgcntcgcgcagagcttcgagtacaactacggcgacttcatccccatcctccgtcccttcttgcggggctacctcaacaagtgccgtgacctccagagcaggaggctcgccttcttcaacaacaactacgtcgagaagagaagaaatgcaggaaggtgatggacactccgggagacaggaacaagctccggtgcgcgatcgaccatatccttgaggcggagaagaacggcgagctgacggcggagaacgtgatctacatcgtggagaacatcaacgtggccgccatcgagacgacgctctggtccatcgagtgggcgctggccgaggtcgtcaaccacccggcggtgcagagcaaggtccgcgccgagatcaacgacgtgctcggcgacgacgagcccatcaccgagtccagcatccacaagctgacttacctgcaggccgtgatcaaggagacgctgcggctgcactccccgatcccgctgctggtgccgcacatgaacctggaggaggccaagctcggcgggtacaccatccccaagggatccaaggtggtggtgaacgcgtggtggctggccaacaacccggcgctgtgggagaaccccgaggagttccggcctgagcggttcttggagaaggagagcggcgtggacgccaccgtcgccgggaaggtggacttcaggttcctgcccttcggcgtgggccgccgcagctgcccggggatcatcctggcgctgcccatcctggcgctcatcgtcgggaagctggtgaggagcttcgagatggtgccgccgccgggcgtggagaagctggacgtgagcgagaaaggcgggcagttcagcctccacatcgccaagcactccgtcgtcgccttccaccccatctctgcctgaactcatcgaatccctttgaatcaagttcgtgccatcagtcgataa

SEQ ID NO: 914 - DNA, 1462 bp, Oryza sativa
atggtgctcgaggttcgccgcgcagctcgccgccctccctcccacagatcgatttcgccgagctctgattcacttatttatcgctttttttgcgtggctcccctctccgcaggcgacgatgatctgcatagacaactcggagtggatgcggaacggcgactactcgccgtcgcgattccaggctcaggccgacgccgtcaacctcatctgtggcgccaagacccagcagtccaacccggagaacacggtgggcgtcatgacgatggccggaaagggcgtgcgcgtgctcgtcactcccaccagcgacctcggcaagatcctcgcttgtatgcacgggacttgaagttggtgctgaagcaaatttggctgcagcaattcaggttgctcagctggctctgaagcatcgccagaataagaggcagcaacagcggattatagcttttattggaagagccctgtgaaatacgacaagaaagttttggaaacaatcgggaaaaagctgaagaagaataatgtggctcttgacatcgttgactttggtgaaaccgatgatgataagcctgagaaactggaagcgctaatctctgctgtgaacagtagtgatagcagccacatcgttcatgtccctcccggtgaaaatgccctttccgatgtgcttataagagtactcctatcttcactggtgaagaaggtggaagcggttttgctgcttctgcagcagcagcagcagctactggtgcagctggatttgaatttgatgtggacccaaatgtagatccagaattggcactcgccctgcggttgtccatggaagaagagcgagcaaggcaagaggctattgcgaagaaggccgcagaagaatcttctggtgctgaaaataaggaccatgcctcaagctcaaacgctgattctgttatggcagaagcggaacctgcctcaaatgctgctgatgataaaaaagatcagccgaagaggaagatgatgatgctcagctactacaacaggctcttgcaatgtcaatggaggagggttcttcaggggctgcagcggctgatgctgctatggcagaggctgctgtagatgaccaggacttggcactagagctcttcaaatgtctgtccaggacgcaggcgggtctagtcagtctgatatgagcaaggtgtttgaagacagatcatttgttacatccatccttaactctctccctggtgttgaccccaatgacccctctgtgaaagatttgctggcatcattgcatgggcagggcgagagcaagagaagaaggaagacaaatcagacaagccagaagatgagaagaaataaatcaactcctttgtgtcttccttgtaagatttcagtatgctgtcttacctccatatccgatatgcatgttttgcatatagtctattcagcccttgatgactatcgttctggttgtacgatatcttctactataaactag

SEQ ID NO: 915 - DNA, 1452 bp, Oryza sativa
atgttgatgaaaaagtatgagatggggaaattactcgggcaaggaacctttgccaaggtttaccatgcccgtaacaccgagacttctgagagtgttgctatcaagatgattgataaagagaaggttttgaaaggcgggctcatggatcagatcaaacgtgagatttctgtgatgaagttggtgaggcatccaaacattgtgcagttatatgaggtcatggctaccaagactaagatatattttgtgctggagcacgtcaaaggtggagagttgttcaacaaagttcagagaggaagactaaaggaagatgcagcaaggaagtacttccaacaactgatttgcgctgttgacttttgccacagcaggggtgtttatcaccgtgatttgaagccagaaaatcttcttcttgatgagaacagcaatctgaaggtttcagattttggcctaagtgctcttgctgattgcaaaagacaggatgggctgctccacacaacctgtggcacacctgcttatgttgctccagaagtgatcaacagaagaggctatgacggtgctaaggctgacatatggtcttgtggagtgatactctttgtgctattggccggctatctacctttccatgataagaacttgatggatatgtataagaagattgggaaagcagaattcaaatgtccaagttggtttaataccgatgttcgaaggctcttgctcaggatacttgatcctaacccaagtacaaggatctcaatggacaaaatcatggaaaatccttggtttaggaagggtctcgatgcaaagctgctcagatataatctacaaccaaaggatgcaattcctgttgatatgagcacagattttgactccttcaatagcgctccaacattggagaagaagccgtccaacttgaatgcttttgatataatttctttgtcaactggacttgacctctctggtatgtttgaggagtctgataagaaagagtccaaattcacatccaccagtacagcttcaacaatcatatctaagattgaggatattgccaagggcttgcggttgaagctcacaaagaaagatggtggactgttgaagatggaaggctccaagcctggaaggaaaggtgttatgggcattgatgcagagatattcgaggttaccccaaactttcatcttgtggagctaaagaagacaaatggtgatacacttgaataccgtaaggtcttgaaccaagagatgagaccagctttgaaggacatagtctgggcttggcagggtgagcaaccgaagcagcagcagcagccaacgtgctaaaaaactttgacaagggcaagttttttgcaatttgagtcgacttccaatcgtttatgtatttctgcagcttttgttcctcttgttattcattttcattcctcatgtattgttaatattaatatcgatgctatcttcaaatga

SEQ ID NO: 916 - DNA, 1445 bp, Oryza sativa
gatctcgacaagtccacttccaccagcgcgtccatgaagaagctgcaggaggacggcgctctcccttgtcgcgggaccatggagagagaaccaggagggtttaaacagcaaaaccgtggagcaccgcgtcggttaggtgatgatcagcggccctacgacggcaagcaacgtccccatccctctttgtgagaaggggaaggctgatcgcgaggctacgatcatcgctctccctctgactgacgtcatcgggccgctcgtggaccaccaggcagcggcctcattgaaagagggcattgccaaggaggcatctgacattgctgctgctgctgctgctacaatgagtggcagcaacattccgaagagagggaggaagttctcctctgtgccttgggaatcgtcggaaggcgcctaccccattgccccggcctcagcgccggcaaaggctggtgacacttggtgagaatccagcgcgtctcctgcagcggcttcgacagatgtcgtggtcgtgcccaggagccgtgaggcgacgcccagcggccctgccggcagccttgtgcctacttgcggcccgcccgctgacgtcctcacctggggggagttccaaatcgagatggagcgcatcctccaggcagatgctcacggcatagggcgcgagattgaggaggttaaggcggcggcggcggcgtcgtcggcgaacgaacgcgctgacaagctgacgcgtgacctggcggaggtccgcgaggacctccagaagatgagggagctggtggccggcaacgagcggcagcggcaggggctcgagcaccacatgtcgacgtcgaggatgtccagcagcgcgggcagcctgagtcgccggtagtcgtttcggcacttgcgctcgagccatatgtgctgcaggactacgtagatcagaacttgtccatggaagcgagcatggcgacgacttccttagagatcgtcggatccaatattggaggacaaagttcgaggtggctgaactcgagaggactatggtagaagttaagaaggaccgagccgtagaagcactccgaggtcgcgaggtgtggttcaactcgtacctcaggagctattgtacggccatggccggagtctgcagggaactccgagtacctcgcgggcaccccgaggagtcagcggctggatacatctcgtggctgaatggggcctgtgctcagcttgaaggcatcggcaagcgtatcgatgaggcccttaagcaggagtgtcgtcgatcgagccaatatgctggagggcacgtgttggcctgtatccagtatcaccacccgcagctgcacctcgagttcctccacgaagggttttctccttctcggaggactcccgcagagatagataatctggcgaagtcgattgcgccgcttgcagagaaggtcttccagtccatggactggcgttggccttcctggtag

SEQ ID NO: 917 - DNA, 1437 bp, Oryza sativa
  N_region (38)..(38): n = any nucleotide
  N_region (56)..(56): n = any nucleotide
  N_region (498)..(498): n = any nucleotide
  N_region (1200)..(1200): n = any nucleotide
atggatcccgccgccggctcgccggatccggcgccggngccgggggcgaccacctncacggcggcgaccgtcctcgacggcctcggcgcggaggtgctcgcggtgatgtcgccggtctccatctgcatggcgctggtcgtgctcctcatctccctcctcgcgccgccctccgctccggggtccgccgcggccgccgcgcagccgccgccgccggtcaccgccgcgacgctcgtctacctcgagagccccaccgacaccccggggcagaagctcgtcggcgcgctcctcgacgccgccgtcttcgtcgccctcgtcgccgtcgtcaccttcgtcctcgtcgcgctctactactaccgctgcacgggcttcctcaagaactacatgcgcttctccgccttcttcgtcctcttctccatgggcggcgccatcgccgccgccgtcctccgccgcctcggcgccccgctcgacgccgccaccgcgctcgtgctcctcttcaangcctccgccgtcggcgtcctctccgtcttcgcctccgcggtccccatcgtcgtgcgccagggctacatggtcgccctcgccgtcatcgtcgccgcctggctctccaggctgcccgagtggaccacctgggtcatgctcatcgcgctcgccctgtatgacctcgtcgccgtgctcgcgccgcggggtcctctcaggatgcttgtggagctcgcctcatccagggacgatgagctccctgcgctcgtctacgagtcgagaccgacggttgggccggcctccggttcttcctcctacgcttcagccatgggatcagttgagatgcagccggtggccgatcccggtcgatcgggtggaaatcagtatgacagagtagagcaggaggatgattcgagccgcgccgtggtggaaatgagggatgttggtggtagccgatcaagcattcgtgagaggaacctcgaaagggaggcgccgatggcggtatcggtatcagggcattcatcgaatcagggtgggagttcacagcatgctgtgattcagattgagcagcacgaggaaggagagacagtgccattggtatcagcggcatctgccaacaatgcagcccctaatgaggagcacagagaaaactcttcttcagactctggtatggagttcgagatgttcgagtccaccaggggcatcaagctgggacttggtgatttnatcttctacagcgtgcttgtggggaaggctgcgatgtatgatctgatgacggtgtatgcgtgctaccttgccatcattgctgggcttggctgcacccttatcttgctgtcaatatgcaagcatgcattgcctgcactcccgatctccatcttgctgggtgtcacattctacttcttgactcggttgctgatggagccgttcgtcgttggctcttcaaccaacttggtgatgttctga

SEQ ID NO: 918 - DNA, 1404 bp, Oryza sativa
  N_region (59)..(59): n = any nucleotide
  N_region (64)..(64): n = any nucleotide
  N_region (244)..(244): n = any nucleotide
  N_region (655)..(655): n = any nucleotide
  N_region (666)..(666): n = any nucleotide
  N_region (696)..(696): n = any nucleotide
  N_region (704)..(704): n = any nucleotide
atgccccctcgccgcccatttgcaggcggccccccgcacagtacaaaatcgccctcgcngaggncggcaagggggccgcctgcaaaattccatgccccccctcgccgcccatttgcaggcggccccccgcacagtacaaaatcgccctcgcggagggcggcaagggggccgcctgcaaatttcgttgacggccgtcgcccgagagcgaacggccgtctgccacgtcattttcgccgccctctgngagggcgatttttaaaaatcgccttcccagagggcggtaggcgactacttccgtcaattttcaaaatagaaaattatttttgtaaaacttttaataaaaaaattaaaaataaaaaaattcgtgctccgtgctcccttcccgcacacgcgacccaccagcaagaaggcaccaaaacgaccacgagcacgcgccaccaacaccggccgcggcggctgcaggacataggaggatatcgcgagatatcacgggcgcgcggccgaaaaagcgcaggctaccacgcgagaagcgaacgcgacccggcaccaccacacctctcctccagctcgcggtctcctcctcctcggctcctcccaaaaaagagctctagaataaaagagaaggggaaacccccccccaaatcccaggccgctnggctcaccgantgctgcatcggatcggatcgggacggcgtngcgacccnaaatttggatcgtggcgctacgctggccggcgccgccggaaacaacgtcggcaaggtcctccagaagaagggcacccacatcctcctcccctctccttcaagctcaaggtgattagggcgtacgcgttgaacaggctctggatcagcggattcctcatggacatgtgcggcgccgcgctcatgctcaccgcgctctcgcaggcgccggtctccgtcgtgcagccgatcgccggctgtggcctcgccatactctgcgtgttctcccatttctacctcaaggagtccatgaacgggctcgactgggtcgccatcacattggccggtctaggcacgatagggagttggtgttggaggcgaggagcagaaggttcttctcaacacttggcttcatatctacaaaaggcaaaggcgtgaacaagagttgtcagtgatatctaagacaggattcgtgatgtctgaaatgggttttccaaagattgttgtaccggctgccatttcttgtagtgtgggctgcagtgctgtgggatttgtttatcagttcatgcagactcgaggtctgaagcatggaagggcaattgttgtgtccacttgtacatcagttgcatctattgtgtctggcgttgtagctggtatgattgcgcttgatgaacatcttcccacagctcccacgggccgcttttttctcttacttggatggtaa

SEQ ID NO: 919 - DNA, 1354 bp, Oryza sativa
gacagccgcgggaaccccaccgtggaggtcgacctcgtcgccggggacgggcggctgcaccgctccgcggtgcccagcggcgcatccacggggatctacgaggcgctcgagctccgcgacggggacggggcggcgtacggcgggaagggcgtgctcaacgccgtccgcaacatcaacgaggtcatcgcgcccaagctcgtcggcgtcgacgttgatgcaatcatgctagacattgatggaactccgaacaagtcaaaattgggtgccaatgctattcttggagtctctttaagcgtatgcagggctggtgctggtgcaaaggaagttcctttatataaacatattcaggagttggctggaacaaaggagcttgtcatgcccgtcccagctttcaatgtaataaatggaggtagccatgcgggcaacaatctggccatgcaggagttcatgcttttacctgtgggagcatcttcattttctgaggctcttcgcatgggtagtgaaggtttaccatgccctaaagggcatcattaaggcgaaatatggtcaagatgcatgcaatgttggagatgaaggtggctttgctcctaatgttcaagacaacagagaaggccttgtcttgcttatggatgccattgagaaggcaggctactctggaaagcagattaaaattggaatggattttgcagcatcagagttccttacaaaggatggaagctatgacttaaactttaagaatcagcctaatgatggagctcatgttctttcagcccagcgtctctgtgatctgtacaaagaatttgtcaaggatttccccattgtatcaattgaggaccctttcgatcaagatgactggagctcatgggcatcattgcagtcttcagttaatatccaaattgtgggggatgatttactcgtcacgaacccaaaacgtattgcagaggctattggcaagaaggcttgcaatgctcttttgctgaaggttaatcaaattggcactgtcactgaatcaattcaagctgctcttgattcaaaagctgctggttggggcgtgatggtcagccacaggagtggggaaacggaagataatttcatcgcagatctggctgttggtttagcaagtggtcagcagatcaaaactggtgctccatgccgtagcgagagactggcaaagtacaatcaggtaaatattcttatcctgttccatatccatttttcaccaacctatactgagattatgtacttccacatgtcatttcctgattctacctcaagtttctccctcgctattttccccattacaccatactatgttttgttcctgtacagcttctgcggatcgaaatggagctag

SEQ ID NO: 920 - DNA, 1334 bp, Oryza sativa
atggatgggcgagggagaaagcacaggattttgatggtgtcagatttcttctttccaaactttggcggcgtggaaagccacatctattatctgtcgcagtgtctccttaagcttggccataaggtgattgtcatgacgcatgcatatgggaatcgttctggagtacgatatgttacaggtggcttgaaggtttattatgttccatggaagccattcctgatgcagaatacattgcctacattattcttgacatttccgattgtgaggaccattcttattcgtgagaagatctctgtggtgcatggacatcaggctttctcaacattgtgccatgaagcactgatgcatgctaggacgatggggtacaaagttgtcttcacagatcactcgctttacggttttgctgatgctggaagcattcacatgaataaggtgctgcagtttactcttgcagatattgatcaggccatatgtgtctctcacacaagcaaagagaatactgtcttgagatcagggatatctccagagaaggttttcatggttcctaatgcagttgatactgcaatgtttactccctctccagatcgcttgagctgtgatgaaattgttattgttgtgataagtagattagtgtatcgaaagggtgcagaccttcttgtggaagttattccagaagtatgccgtctttttcctaaggttcgctttattgttggaggtgatggtccaaaacgtgtgcgaattgaagaaatgagggagaagttttcccttcaggatagagttgagatgttaggagctgtgcctcatgctcaagtgcgatctgttctgatatctggtcatatttttttgaacagagttcgcttacagaggccttttgtatagccattttggaagcagcaagttgtggattgttgacagtaagtactagagtcggtggtgttccagagttttcaggttttaccagatgatatggtagtacttgcagaaccagctcctgaagatatggtacgagctgtcaggaaggctatcgatatgcttcctggcatagatccccaagttatgcatcttcgaaaaagaacagagattgtgtatgatcgtgcaatgcagtcaccacaaacagatttgctagaacgccttccacgagatacctcagatgtggagcttgggcaggcaaactgttttgtcttgttatgatcatcaactacctactatggtgcctcctagaatatctgcagcagcccactgaaggtattgaagaggtcccagatatcaggccagtacatgctcgtttagaatcagtagatgatacatgtgaaactcaaggaaaaggaatttag

SEQ ID NO: 921 - DNA, 1329 bp, Oryza sativa
atggcgccattccagctgcgcttcggcctccggatgtccccctcgcgctcctccgacgaggaggaggaagacgacgaggacgaggaagggttcgagtacgaggagatactgagcgacgacgggacggactcgccgccgccgctgatgatgcaggcggagaagggagggggagggctggtcggggcggtggtgggggcgctgcggaggtcgctggtgatgtgcagcgccgggaaggtcggggaggaggaggacagcgaggacgaggaagaggaggggatggagatcgggcggcccacggacgtgcggcacgtctcccacgtcaccttcgaccgcttcggcggcttcctcggcctccccgccgacctcgagcccgaagttcccagccccacgcccagcgccagtgtaaatgtatttggtgtttcaccaacctctttgcaatgttcatttgatcacaaaggaaatagcgtgcccacaatactgttgatgatgcagaggaagttgtatgaacgagagggacttaagatcgaagggatcttcagaattaacgcagagaatagccaggaaatctgtgtcaggaaacaactaaacagtggtgtggttccagatgaggttgacttacactgccttgcagggttgataaagtggaagccgcattacctcgattgggctatcaatctgatggctgatgttgtggagcatgaaaactacaacaagatgaatgctagaaacatcgctatggtctttgcgccaaacatgactcagatggccgatccattgactgccctgatacatgcagttcaggtcatgaatttcctcaagacattgatcttgaagactttaaaggaaagagaggcagccggaacacctaagacaacggaaccatgctccggttctccaaacggacaagataaacctccgacgccagagaatttggagagacccatcatttgttcagatcagaaaggcatagataaacctatgtttgatatggctacttgtgatcagctgctgtttggacctaaacaattccttgatcatcgtgagaacaacaaatttgaaggaccggagaagcatgacataggccaaccgaagcgccatagcgaagcttctcctcttggtaatgattcgaataaccaagtcagcagccctggaaaagaatttggcaacagaaatgtggaaggcctgttcgacaaatttagttttaggaaaggtgtcgagaggctttgcaggcaccctgtgttccagttgagtaggtccatgaagaagtctgcagacgttgtggtctttgatgctcctggagaagcaagacaagcttggggtttgatatga

SEQ ID NO: 922 - DNA, 1295 bp, Oryza sativa
gggcacttggtcgtcgaagggcttctcattgccgcaatactcttccagctctccaggaagagctacaagcctccaaagaagccactcactgagaggcaggaggttgatgagctctgtgatgagtggcaaccagagcctctctgcccacccatcaaggagggagctcggattgaggctcctacattagaaagttgatcagtgctgctggaccgcatacaattgttgatggaaaagaagttgtaaactttgcgtcagcaaactaccttggtttgattggcaatgaaaagatactcaaattgcaggattcctgtattggttcggtggagaaatatggcgttggatcatgcggacctcgtggcttttatggaacgattggatgttcaccttgactgtgagactaaaattgcaaagttcctgggaacgcaagattcaatcttgtactcctatgggatatcaaccatcttcagtgtgattcctgccttttgtaagaaaggagatataattgtagcgatgagggtgttcattgggcagtacaaaatggtttgcagctttcaagaagcactgttgtttatttcaagcacaatgacatggcttcacttgcgagcactctggaaaaactaactcatggaaacaaacgtacagaaaagattaggcgctatattgttgtggaagctatttaccagcagaattctggccaaattgcacccttggatgagatagttcgattgaaggagaaataccggtttcgtgttattttggaggagagtcattcttttggcgttcttggcaagtctggacgtggccttgctgaacattatggagttcctattgaaaaaatagacattatcactgctggaatgggaaatgcattagctactgatggtggtttctgtacaggaagtatcagagtggttgatcatcagcgtctaagcagctccggttatgttttctctgcctcgttaccaccatatcttgctagtgcagcaatttctgctgtggacgcagagttgtcagatgtacaggggcttgaaattgctagtaatatattgtcacctattgtcttcctcaaattgaagacatcaacaggttctgctgttgctgacctggagctccttgaggttatttcagagaagttgaaggaagattcagtcttcattgcagcgacgaaacgatcgagtttggacaagtgtcgtcttccggttggaatccgcctattcgtatcagctggtcacactgaatctgatatcctcaaagtatctgaatccctgaaaagggttgcagcatcagtgctctag

SEQ ID NO: 923 - DNA, 1293 bp, Oryza sativa
atgggcaacgccggtagcaacggcggagggggttcccctggtcaccgccgacgaggctccgccgcccagggccacggccaccatcaggtccacggccaccaccaccagccgtcctcgcctcccccgcctccgccgccggagtcgtccccgagccactacgtgttcgccgccgccacgccgtaccctccgccgcagtacaccaaccccaacctgccgcggtactaccctcagtacgggaactactacccgccgccgccgtccctgcaggtgcccctcccggcgccgtacgaccaccaccacaggggcggcggcgcgggggtgcccgccggaggggagttcccgccgtcggcgcacccgcaacactacccggggtggcctggggtctctgggcggccgcacccctgcggattgcagccggccatgccgacgccgtacgtcgagcaccagaaggctatcacaatccgcaacgacgtcaacctcaagaaggagactcttcggattgagcctgatgaggagtgcccgggccgcttcctcgtcgccttcacctttgacgccacccttgctggaagcatgactgtttacttctttgcaaaagaagagctcaactgcaatctaacggcggtgaaagaagacctgattaagcctgttactgtaagcttcaaagagggtcttggtcagaagttcagacagccttctggcactggaatcaacttctccgtgtttgaggattccgagttattgaagcagggggacatggatgtatatccacttgcagttaaagctgaaacaaccatgcctgttgatcaaaagttggaaggagaagatcaaaagatgaaaactccaaactcacagatcacacaggctctgtttgaaaagaaagaaagcggtgattatcaagttcgagttgctagccagatcctttgggtcaatggaactaggtatgagttgcaggaaatatatggaataggaaactcggtggaaggcgatgctgatgccaatgatcctgggaaagaatgtgttatttgcctctcggagccaagggatactaccgttctcccatgtaggcatatgtgtatgtgcagcgagtgtgccaaggtcctgaggtaccagacgacccggtgcccgatctgccgacagcccgttgagcggctacttgagatcaaagtcaacaacaaagctgaagagcagcagcagccgtcacccgattcaccgatcaaagtcaacagcaaagccgaagagcatcagcagcagccatcccaatcgctgccaatcccacacagggaagaggtgtag

SEQ ID NO: 924 - DNA, 1283 bp, Oryza sativa
tacgcgaagtttggcagcgtgttcaccgtaagcgtggccggattgctgaaggcgacgttcttggtcggaccggaggtctcggctcatttcttccaagggttggaatcggaggtcagccatggcgacctgttcgagttcacggtgcctatgttcggcaaagaggtcggccatggcgtagacaacgccacccggatcgagcagggtcgattctttgctgaggcactgaagccgctgcaggactactttgcgaaatgggggcaacacggcacggtcgatctgaaacatgaactggagcaactactactgttgatctcaggccgatgcctcctcggcaaggaggtgatggggacgaagttcgacgaggtctgcaacctgttccgcgatatcgagggtggcgtgaacctgatgagcgtcttcttcccctacaccccactcatcccttccaaccgccgccgcgacatggcgcgcgagagactccacgccatcttctccgacatcgtgagatcccgcaagcagcagcagggagatcaggaggaggtcaatgacaaggacgtgctccagagctttatcgattccagtccaggtacaaggccgatggtcgcgccacgacagaggcggaggtcgctggcctcatcaccggcgttctcttcgccgcgaagcacacgagcacccataccagcgtctggaccggcgctcgcctgctcacccacgagaagttcctggccgcggccgtcgacgagcaggatcagatcgtcagaaaacacggcatcatcaatggcagaatcgtcacagatcactatggtttcctgatggagatgcacatgctgcacatctgcatcaaggagacgctccggctgcaccctccggcgccgatgatcgtcaggacagccctcaggcagttcaccgtccggacgagagaaggccatgaatactgtgtcccggcagggcacaccatggctagccctatagtgatcagcaaccgtgtgccttacatctacaaggatgctcacctgtatgatccagacaggtttggtcctagaagagaggaggacaaggtcggcgggaaattctcttacacatctttcggcggtggaaggaacagctgcgtcggcgagaactatgcttacatgcagattaaggcgatctggagccatttgctgagaaactttgagctcaaattgttgtctccatttcctaagacggactggagtaagcttgtgcctgagccccaagggaaagtgatggtaagttacaagagaaggcaattgcttcctacctcttaa

SEQ ID NO: 925 - DNA, 1282 bp, Oryza sativa
  N_region (42)..(42): n = any nucleotide
  N_region (47)..(47): n = any nucleotide
  N_region (54)..(54): n = any nucleotide
  N_region (141)..(141): n = any nucleotide
  N_region (289)..(289): n = any nucleotide
  N_region (291)..(291): n = any nucleotide
  N_region (546)..(546): n = any nucleotide
ccgcggcgggtggcgttagagcacgggctcctcgagatcccnaagcnggtgttnccggagggcacgctgacgcagaccctggcccgggtgggcgccgcggcgctcgcggaggcgctgcagatcccgcgggagctggcggcnctggtgctcgggacgctcgccgcggtgctccccgcggaggaggaggcggaggacgccgacctccgcgacgtgctcctcttcctctacatccagtcctacaagcgcctcgtcccgcgcgcgcacaaggattcgcccgcggtcaccgacntntggccctccacctccgccttcgatggctacctctccgcgctctccccgatccagaacagtcgccggtttatgccttcacaagcagatgaagaagctcatcaattatcttatctgcaaaagcatatggtcaacattctgagtcttttggcagattctgttgatggagagggcgatgagtctatgtttgagcatctcggatttttatttcagttttctgaagggactcctttaagccaagtggctacattttttgcnaattctgatccagacatgcctgctgcacctgttcccgctgctcaggagggtttctccaaaacttctgtagtgaaacaagcatcagatatcaaagggcattcaataaaggttttgaactgccatgactctgttatctacatattagctcctgttaaatatgccactgtctatgggtgttctgacactactatcgttcttggtgctgttggtaagaaagtggagcattgtgaacgagtgcaaatcattgcagcttcaaagcgaatttgtatcgccaattgtcgtgaatgtatcttctacttgggagtaaatcaccaaccgcttattgtgggtgacaaccataaattacaacaggttgctccattcaatacttattatccacaattgggagaacatttggtgcaagttggtgtggattctaacatcaacaagtgggaccaaccttttgtgctgggagttgttgatccacatgattcattatctcatcctgcaggggtttctgatgtccaagctgaatctgctacttgtctagatcctgatctattcaccaactttttggtatcagattcccagttggtttgaggcacaaggacctacaaaatataatccatttacattgcctgaagtttattgggcatcccaaaggaaaaagcggaaaaaagaattggcatctgcccttcatgcccaattcaaggactggctatacggtaatactcacctattgataaaatttgcttag

SEQ ID NO: 926 - DNA, 1267 bp, Oryza sativa
atgctcccctccgccgcccccgccgccgccgccggagaagaagaagaagaaggcgagcggcggccgtgggagccgcccttcgacgcgtcccagccggcgccgcccatctcctaccccatcaccacgctcgcggcgctcgcctcccgcgcctacctctccgaggccggcaacttccacctccccttcaaccgcgcctcctcctcgccccgggccgcgccgctcccgccccggcgccgcatcctcgcgtgccacgacttccggggcgggtaccgcgacgacgcggcgccgcaggggggccacgacccgggcgcctacgcgctctggcactggcacctcatcgacgttttcgtctacttctcacactacctcgtcacgctcccgccgccgtgctgggtcaacgccgcccacctccacggcgtcaagaaggttttggggacgttcatcacagagtgggagaaaggtgcagagatctgcgaggagatgcttgctacggaggcttctgcccaaatgtatgctgaaaggctaacagagctggctgcttacttgggctttgatggctggctggtaatcactttcatgatcaatattgaggttaaactcgacatacaattcattgataacctgaaagaatttatcaatcatctaaccaagacaatgcatgctgctgttcctggatcattagtcatatgggtgcccttgactggcagaataagcttaacgagtataacaagccattctttgacttgtgtgatggactgtttagcaattatacttggaagtatccacaagaatcagctgtagttgctggtgaaaggaagtacgacgtgtacatgggtattgatgtttacggacgaaacactttcggtggtggtcagtggaataatgttgcccttgatctactcaagaaagatgatgtctcagctgccatatttgcacctggatggtggtggggtcttgttcaagaatcatggggtgttcttcagagttatccaaaacagttgcctttttactctgattttgatcagtctactttctttcagggtcatggttaccaggtatcaattgaaggggtcaaagtttatggtgctccatgggacaatatttcttgccaaagtttccaggtaaaagccgatgaacgctctggtttagggttgtcactggatttgtcatccggaaacaatgagagcagttccattcttattgctattcatgaagtacaatgtctatgttgagaagccttggagttgccagcgtacaagtcttctat

SEQ ID NO: 927 - DNA, 1258 bp, Oryza sativa
atggggggccggaagcgcgcgctgctggtgggcatcaactacccgggcaccaaggcggagctcaaggggtgccacaacgacgtggcccgcatgcgccgcgccctcgtcgaccgcttcggcttcgacgaggccgacatccgcgtcctcgccgacgccgaccggtcggcgccgcagcccacgggggccaacatccgccgggagctcgcgcgcctcgtcggcgacgcccgccccggggacttcctcttcttccactacagcggccacgggacgcggctgccggcggagaccggccaggacgacgacaccggctacgacgagtgcatcgtgccctccgacatgaacctcatcacaggatttcacagaactcgttcaaaaggtcccagatgactgcttattcaccatagtatctgactcctgccacagcggtggtctacttgacaagaccaaggagcagattgggcacagcaccaagcagaaccaggcccagcagatcaagcgagaagaacgttctgactctggcaccggcggtttccgatccttcctcaaagaaaccctcaaagaaacagtccgggacgcgttcgagtctcgaggagttcacatccctcaccagagcagccgccgcaacgacgacgaggatgaggagccacacatgggctcatcctcccatggtggcgatcgcatcaagaaccggtcattgcccctctcgacgttgattgagatgctcaaggagaagaccggcaaggacgacattgacgttggctcgatccggatgacgctgttcagcctcttcggtgacgacgcgagccccaagatcaagaagttcatgaaggtcatgctgaccaagctccaggagggccagcacggcggcgtgatgggcttggtgggcgccctggcgcaggagttcatgaaggctaagctggagggcaaccaggaggcggacgccctcgagccggccatgaaacaggaggtgcacagcgtccacgaggcgtacgccggcacgacggcgagggtgagcaatggcgtgctgattagcgggtgccagaccgaccagacatcggcggacgccacgacgcccaagggcgtgtcctacggcgcgctcagcaacgccatccagaccatcctgtcggagaagagcggcagggtgacgaacaaggagctcgtgctgagagcgcgcgagttgttgtccaagcaagggtacacccagcagcctggcctttactgcagtgacaagcacaccagtgtggccttcatatgctga

SEQ ID NO: 928 - DNA, 1182 bp, Oryza sativa
  N_region (40)..(40): n = any nucleotide
  N_region (64)..(64): n = any nucleotide
atgagtgacaatctgatggacaaggttagcgcctttggcnagcgtctgaagatcactgggtcanaggttagcaagaagatgacggctggcatgtcctccatgagcttcaagatgaaggagatcttccaggggcagactcccgcggacaagattgtggaggaggccacctcagagaatttggacgggcctgattggtcggcaaacctggaaatctgtgacttgatcaacacggagaaagttaacagtgtcgagctgatccgtgggatcaagaagcggatcatgctgaaggatgctagggtccagtacctctccttggttcttcttgagaccattgtgaagaactgtgagaaggccttctcggaggttgctgctgagagggttcttgatgagatggtcaggttgattgatgatcctcagacagtggtaaataacaggaacaaagcccttatgcttattgaggcatggggagagtctggtgatgagcttcggtacttgcctgtctatgaggaaacctacaagagcctgaaatcaagaggagtgcggttccctgggcgtgacaatgagagcttggcccccatatttactcctgcgcgttcagtagctgaagctgaagttgatgcaaacttttcccagcagaccttcgaagatgtgcaagtgcatacatatactgctgaagaaacgaaggaagcttttgatgtggctcgtaacagcatagaacttctttcaactgttctttcatcctctcctcagcaggatgctttgcagcaggatgacttgacatccactcttgtgcaacaatgctaccaatctcagcacactatccagagaatgattgagactgctggagacaatgaggccatgctttttgaggccttgagtgtgaatgatgagatccaaaaggtgctgtccaaatatgaacagatgaagaaacccgcagcgtctgagaacgcagaacaacggccggtagtcataccaattgccacagaacatgaagattctgctacggtcggcaatgaagatgccctggtcagaaaaccagctggttctcgagcaaggtcaggtggagatgatgatatccttgatgatctcgatgagatgatatttggcaagaagggaggaagcagttcccaagaagggcccaaaaagcaggatccgaagaaagatgacctaatcagcttttaa

SEQ ID NO: 929 - DNA, 1178 bp, Oryza sativa
  N_region (175)..(175): n = any nucleotide
  N_region (239)..(239): n = any nucleotide
atggcgtactaccggaagctcggggagagctccaacatgtcgatcgatagcctcaatagcctgcagaccagcacgcatggcggtggctccgtggcaatgtcggtggataacagcagcgtcgggtctagtgattcccacaccaggatgctcaaccacccgggcctcagggggcatntcgcagccaattactcggttgggcacagcattttccgccccgggcgggtgtcgcatgcgttgantgaggatgcgcttgcacgggcactgatggacccgaggtacccgactgagacgctcaaggattacgaggagtggacgatcgatttgggtaagctccacatggggatgccctttgcacagggtgcatttgggaagctatacaagggcacctacaatggggaggatgttgccatcaagcttttggagaggccagaggcggatccggagagagccgggctaatggaacaacagtttgtgcaagaagttatgatgcttgcaactttgaggcatcccaacatagttaaatttattggggcatgcaggaagccgatggtttggtgcattgtgacagagtatgcaaagggtggctcagttaggcagtttctgatgaagaggcagaacaggtcagttccattaaagcttgctgtgaagcaagccttggatgttgcaaggggcatggcctacgtccatgctcttgggttcattcatagggacctcaagtcagataatctcttgatttctggcgataaatcgattaagatagcagactttggagttgccaggattgaagtcaaaaccgaggggatgacacctgaaacaggaacctatcgttggatggccccgaaatgattcagcacaggccatatgaccagaaagtagatgtctatagctttggcattgttctatgggagctcattactggcatgctccctttcgctaacatgacagcagtacaagctgcatttgctgtggtgaacaagggtgtccgtccagccataccacaggactgcttgcctgttctcagtgagatcatgacaaggtgctgggatccaaaccctgatgttcgccctccattcaccgaagtagttaggatgctggagcatgctgaggtggtgatcctgagcacagtccgcaaggcccgatttcggtgctgcatctcccaaccgatgacaactgattga

SEQ ID NO: 930 - DNA, 1163 bp, Oryza sativa
  N_region (257)..(257): n = any nucleotide
atgtcccgcgccgtcgagccgccggcgccgaggccgtgcggcacggagggtggcccgccggtgaccgcgacgaggctgaggctgcgcgacggccgccacctcgcctactgcgagagcggcgtccccaaggaggaggcccgcttcaaggtcgtcttctcccacggcttcaccggctcccgcgaggacagcgtccgcgcctcccagcgcgccgtggtgccgccgccgccgccgccgcggatctgcgggtcgcccggtgngccgcccgtggcggcgccccgggtgcggctgagggacgggaggcacctggcgtacgcggagtccggcgtgcggaaggaggacgcgcggtacaaggtcgtcttctcccacgggttcacgggctccggcctcgactccgtccgcccttgccggtcggaggtggctgaggagttgggcgtgtacatggtaggctttgatcgcgctggatatggtgagagtgatccaaaccccaatcggtctgtgaagagcgctgccctcgatgttgaggagcttgcggacgctctaggattaggccccaagttctatgtgatcggtatctccctcggctgccatgctgtttggggcgccctcaagtacatcccagaaagaggattgctggagcggccatgatggcaccggtggtgaactactggtggccggggttccctaccgatctggctgccgaggtgtacaacaagcaggaagtgggtgaccagtgggcgctgcgtgtttcacaccatgcacccagcatcctccactggtggatggagcagagctggcttcccacctccaccgtcgtggctggcaccactcccctccccaacaagcgtgatgccgagatccgcaaaaatatgaaggcggatggctcgttccagaaggcgacacaacaaggcattcatgagtcgtactaccgtgacatgatggtgatgttcggcaagtgggagtttgacccgatgagcttgccgaagccgccatgccctgtgcatatctggcagggcgacgaggacgggcttgtgccggtggtgttgcagagatacctcgttagccggctcagctgggcgaactaccatgagctccccggaaccgggcacttcctgtctgcggttcccgggcttggagacaccgttcttaggaccattttcggttga

SEQ ID NO: 931 - DNA, 1158 bp, Oryza sativa
  N_region (923)..(923): n = any nucleotide
atgatcacagataatgcgattctggcttttgaatgttttcactctatacaaaagaatagaaagcctgagagcgctgcttgtgcttataagcttgatctttcaaaggcttatgatcgggtggattggggttttttggagcagtctctgtataagctgggtttcgctcaccactgggttagatggataatggtttgtataaccacggtgagatactctgtcaaattcaatggaactctgctctctacttttgctccatcgcgaggtcttcgtcagggagacccgctatccccctttctatttctgttcatagccgatggactatcattgctgttggaagacaaagtggctcagggagctctctcgccagtgaagatttgtaggcaagccccggggatttcacacttgctttttgctgatgacacacttttgtttttcaaagctgataacgttcaagcccaggctgtcaaagaggtcatttctgattatgcttcagcaacaggccaactcataaacccggcaaagtgctcaatcatgtttggggaatcctctccgctgcagactcgggatgctattagagtgaccttgcaaatagctaattctggctttgaggacagatacttgggcttcccaacccctgaaggaagaatgtgcaaagggaaattccaaagcttacaggaaagaatctggaaaaggcttattatctggggcgaaaacctgttgtcgagtggcgggaaggaggtgcttataaaatctgttatccaggctattccggtatatgtgatgggcatctttaagctaccggagtcagtatgtgaggagttaaccaagttaacacggaatttttggtggggtgtagaaaaggggaaaaggaaaacacattggaaatcctgggagtgtttaactcggccgaagagcaacggggncctgggttttagagattttcgtctcttcaaccaagcacttctagcacggcaggcctggcggctcattgttaatcctgacagtctatgtgcaagggtactcaaggcaaaatattttccaaatggttcccttgtggatacaagttttggaggaaatgcctccccggtgtggaaagcaattgagtatgggctgtcacttcttaaggaaggaattatatggagaatcggggaatgggaa

SEQ ID NO: 932 - DNA, 1147 bp, Oryza sativa
  N_region (975)..(975): n = any nucleotide
ctgagccgggagtcggtggtggacgtcgccggcgtcgtctcgttgccgcgggagcccgtccgcggcaccacgcagcaggtgcaggaagtggagatccaggtgaagaagctgtactgcatcagcaaagcgactccgaatctccccatcagcgtcgacgacgcggcgcgaagcgaggaagacgtcgtgaaggccaaggctgtcgggcaggacaagcgcttggacttcagagtgatcgacctgcgcacacctgcaaaccaggcgatttttcgtgtccaatgcgaaatcgaaaacttcgttggcatccacacgccgaagctgatcggcgggtccagtgaaggcggcgcggcggtgttcaagctggactacaacggccagccggcctgcctggcgcagtcgcctcagctccacaagcaaatggcaatttgtggtggattcgagcgtgtgttcgaggttggccccgtgttcagggcagaagactccaacacgcaccggcatttgtgtgagttcgttggacttgacatggaaatggcaatcaaaggccactactctgaggatgttgtggataggctgtttgttgctatgtttgatcatctgaacaagaactgcgccaaggaacttgaggccattaacaggcagtatccgttcaaacctttgaagttacccaagacactgcgcattgagtatgacgaaggcatccggatgctcaagggaagctggggtccacgtggaggccatgggagacctcaacacagagtctgagaagaagctgggcgagctggttcataccaatatgacactgatttctacatgctctgccggtacccgtcggcggtgaggccattctacaccatgccctgctccgacgacccacgctacagcaactccttcgacgtgttcgtccgagggggaggagatcatctcgggagcgcagagggtgcacgtcccggaggtcctggcacgacaggcggaggagcnggggatcgacgtcggcagcatcgccgcctacgtcgacgcgttcaggtacggcgcgccgccgcacggcgggttcggcgtcgggctggagagggtggtgatgctcttctgcggcctcggcaacatcaggaaggcttctctcttcccacgcgaccccaggaggctgaacccctga

SEQ ID NO: 933 - DNA, 1120 bp, Oryza sativa
  N_region (154)..(154): n = any nucleotide
  N_region (159)..(159): n = any nucleotide
  N_region (197)..(197): n = any nucleotide
  N_region (200)..(200): n = any nucleotide
  N_region (232)..(232): n = any nucleotide
atgtttcacccacccctccaaaaacaactcgtcgccctggcccgtgtctctctcctccccttccccttccctttctccatttttgcaaggggaaaaaaagagaggagagagagagagagagagagggaggaagcttcgagccctagcaatggcngggtngtacgaggaggcggtggggctgctgcggcggccgggcngtngcggagatcggcggtggacgtgctgctgtgcncggtgccgatctgggcggccgtcatgatcgggctcgtcatcggctggtggcggccgcgatggacggggctgctctacctggggttccgaagccgcctccgcctcctctacgttcccccgggcctcggcgcgcgccgcctctggctcgcctgcaccgcgctctccgccttctccgtcgtcactgagaaggacctagaacacctcgtacaacttcttgataacaaggagagtggggatacaacatggcagcatttgatggaacgtaccacttccaacatgacttacaaggcctggcgccgtgagcctgagtactgtagtcgcactatttttgaggatgctactcctgagcttgttagagatttcttctgggatgatgaatttcgtctgaagtgggatcccatgcttgcatatttcaaaattttggaggagttcccccaaaatggaactatgattattcactggataaaaaagttccctttcttttgcagtgaccgtgaatacatttttgggcggcggatatgggaatctgggaaaacttactattgtgttacaaagtcaccgaaacaagatggacagcaatccgcatgtgaagtaacgctggtccactacgaggacatgggcatccctaaagatgtcgccaaggtgggtgtccggcatggcatgtggggtgctgtaaagaagttccagtccggatttagagcataccagcaaatgagagacacagagaacaccctctctcgcagtgccatcatggctcgagtaaccaccaagcgactggaaatgggtggtgttcggtggcgcagtggctgccgtctgcgtgctcaacactgggcttgttgggaaggctctcctcatcggagctgcatcaagaaggcaggcgaagaagtga

SEQ ID NO: 934 - DNA, 1108 bp, Oryza sativa
aatgggtacatccggatcgactgctacggcgggctcaaccagctgcgacgcgatctatgtgatggaattgcggttgcgcgccttctcaacgcaacaatggttctgcccaagtttgaggttgctgcctactggaatgaatctagagtggatttgcagacgttttcgatgttgattacttcattgagcaaaccagaggttatgtggaagttgtgaaggacatgcctgaagagatagcatcaaaagagccctttaaggttgattgcagcaaacgaaaaggacattttgattacgtggaaacggtgcttccagctctcttggagcatcagtatatttcactgacacctgccatgagccaaagaagagacagagaaatccttcatacgcgaaagcttcttactgccaaggctgctacaatgcactgcggttgaataagaatgtggaaacaaaagctattgagcttctccaagccataccaaaacctttcttgtctcttcacctgagatttgaaccagatatggttgcctacagtcgatgtgtatacactggtctgtcttctaaatcactcagtgcaattgaagctgcacgtggggaggacaggaaggcattgactggtgaggctgcccttctgtggaggaaccgtggcaagtgccctctaacaccaagtgaaacagcatttatacttaaagcattaggtatccccacagacacaaacatttatttagctgctggcgatgggctaatggaacttgagggcttcacttccatttacaaaaatatatacactaaatcatccctcctaactcatgatgattttgagaagatgcatggcaatacaaaagctgctcttgattactatgtttcagtcagcagtgatgcttatgttgccaccttctttggaaatatggataagatggtaactgcgatgagaacaatgcaagggcaccagaagactctggtcttgagtaggagggcctatgcaaactacacagctgttggactttcaggggagcaactagctatggccatgtgggatgcccatcgagaggaatatatcatggggaggggatcagcccttcctgagcagtgcttctgtgagttcaaattgtaa

SEQ ID NO: 935 - DNA, 1091 bp, Oryza sativa
atggcgcggcgatccgcccccctcctccgccgcatcctctcctccccggcccccgccccggcgcaccatggcggcgccggcgcgcgccgcacggtgacctacatgcccaggccaggggacgggaacccgcgcgccgtgacgctgatcccgggggacgggatcgggccgctcgtgacgggggccgtgcagcaggtgatggaggtgatgcacgcgccggtctacttcgagacctacgaggtccgcggcgacatgcccaccgtgccgcccgccgtcatcgagtccatccgccgcaacaaggtgtgcctcaagggcggcctcgccacccccgtcggcggcggggtctcctccctcaacatgcagctccgcaaggagctcgacctctacgcctcgctcgtcaactgctccaacttccccggcctccccaccaggcaccaggacgtcgacatcgtcgtcatcagggagaacaccgagggggagtactcggggctcgagcacgaggtcgtgcccggcgtcgtcgagagcctcaaggtgataacaaagttttgctctgagaggattgccaaatatgcttttgagtatgcttaccttaacaaccgaaagaaagtcacagcagtgcataaagcaaacatcatgaagcttgctgatggtttgttcttggaatcttgccgtgaggttgcctcaaagtatcctggtattcagtataatgagatcattgtcgacaactgctgtatgcaacttgttgcaaagcctgagcaatttgatgtcatggttacaccaaacctttatggcaatttggttgctaacacggctgcagaggtaatgtgggtcaggaccatgctgtctttgagcaaggtgcttctgcaggaaacgtcggaaacgagaacatcttagagcagaagaaagcaaaccctattgcgctgcttctatcatccgccatgatgttgaggcatttgcagttcccgtcattcgccgaccggctggagacggcggtgaagcgtgtcattgcggaaggcaagtacagaacaaaggatctaggcggcaccagcaccacccaggaagtcactgatgcagtaatcgccaatctggattag

SEQ ID NO: 936 - DNA, 1060 bp, Oryza sativa
atggaagccaggaacggccatcggatcccgccgacggaggagaaggtcatcatcgacacggatccagggatcggtacactaattctgatttctccacttctcctacctgcatctgtgactgtgatccatccatccatcttgacaattactaattcatatcaattcccagatgacagcgtggcgatcatgatggcgttcgaagctcccggcgtgaaggtcgtcggactcaccaccatcttcggcaactgcactacctcccacgccacccgcaatgccctcatcctggcaggccgtcctgaggtgccggtagcagagggcagcgctgagcctctcaagttgcagggagggaaacctcacgttgctgattttgttcatggatcggatggacttggtaacacgtcctttcctgatcctaccaccaccaacaaagttgagcagtcagctgcagagtttctggttgataaggtatcagaatctccaggagagatctctgtactcgccttgggccctctcactaatatcgcattggccatgaagaaagactcctcctttgcaagcaaggttaagaggatagttgtgctgggtggagctttctttgcagctgggaatgccaccccttcagctgaagcaaatgacccagaagcagctgacatagttttcacttctggggcagatatctacgtagttggccttaacataacaacccaagtctacttcacaggacaaggatatgttggagctaaggaactcgaaagggaagcacgcacaattcctttgtgacatctgcaagttctacagagactggcatgtccactcctacggcgtcgatggtccgcacatgaaacatctctcctttccttcttacaagttcaggctttgggaaattaacgttccagctcacatttgtgtgatttcttcagctctttttctccatgatcctgtgagtttcaccgcgctagttcaccccgagtacttcacgttcaagaagggcgtggtgagggttgagacccagggcatctgcaaggggcatacttccatggacatgggactgaagaagtaa

SEQ ID NO: 937 - DNA, 1032 bp, Oryza sativa
atgggggtcgcggcggcggcgggccggctcctggcggcggtggactgggagcgggaggcctacccggcgtaccgcgacttcttcgcgctccccttgttcgccgtcttcttcctcgtcgtccgctacctcctcgactgcttcgtcttcgagattgtttttcttttattttcgtttcagtggattggaagaaaacttatatttggaaaggaaaaggttgattatgagaaggaggaaacaagaaagaagataagaaaatttaaggaatcagcttggaaatgtgtctatttcctatctggagagattttatctttgtcagttacatataatgagccttggttcacaaacactaaatatttctgggttggacctggtgaccaggtttggcctgaccaaaagataaaaaacttaaggctgtctatatgtatgctgctggattctacacatattccatatttgcacttatgttttgggaaacaaggcgttcagattttggcgtgtcaatgtcacatcatgttgcaactgttgcgctgatagttttatcttatgtgttcagtttgctagagttggctcagtagtattggcaattcatgatgcaagtgatgtgttcctggaagtagggaaaatggccaaatatagccattgtgatttgcttgccaatgttgcatttcttcttttcgtcgtttcatgggttcttctccgtctcacatattttccgttctggattctcagaagtacaagagctatgaagtcttgttgaccttggacaagaagaagcacaattttgatggtcctatatattactatgtgttcaattctctcctattttcactacttgttcttcacatatattggtgggttctgatatatcggatgcttgtgagacaaatcaagacaagaaatgttggagatgatgttcgatctggtaagctctgcccccttagaatcttgtttttgcacaggatgagcatgcaaaattgcatggtcttattttcagtcccatctgcattgggacaagacaaagtctgcttataa

SEQ ID NO: 938 - DNA, 1022 bp, Oryza sativa
gagcgggaggcggccaagaaggccatcgccgaggcgccgccggtgatcaaggagatcgtcgtgcaggtcgtggacaccgacaaggtggactcgctcgccgccgaagtcgcccgcctcaagcaggagctgttgatcaagtgcatatctgaagatcttgggttctctattggaaggcctattgccgcatacctcatctaccgatgcctgatccactggaaatcatttgaagaggacaggacaacagtttttgatcgcattattcagaagataagtgctgcaattgaggacaacaatgagacattagcatattggctatccaattcatgcacactgctgctgcttctccaaaaaacactgaaaatcaacggggcagctgctttggctcgtcagaggcgaagagcatcacccctgaagacgccacagcaggttgaagccaagtatccagctcttgctttcaagcagcagctcactgcattgctggagaaggtctatggaattatcaggcacaatttgaagaaggaactgtccccactgcttggtctctgtattcaggcacagcaagcttctatggcacattggcagagcatcatcaaaattcttacaaattcgctgaatgtcctaaaatccaattatattcatcaatgttcaactcttcaacagagtcttctgctacggcgtgaatgctgttcattcagtaatggagagtatgttaaagctgggttggatgagctagagcactggtgcttttggctgactgaagagtatgcaggttcttcctgggacgaactgaagcatattaggcaggccgtagcacttctgatacttgaagagaagcacagcaagtctctcaaagaaatcactgatgagtactgcccacttagcatgcagcagctatacagaatcagcacaatgtattgcgacgacaaagtataccgttctccatcgatgacattgcaaagctgatggttcacatcgacatagcagatatggatctgccacccctgattcaggagaacaagggc

SEQ ID NO: 939 - DNA, 1010 bp, Oryza sativa
  N_region (187)..(187): n = any nucleotide
  N_region (211)..(211): n = any nucleotide
  N_region (733)..(733): n = any nucleotide
atggtcaagaacgccatccagtacgccgtgggtggacgcgttcgcggccgagccgttcaagggcaaccccgccgccgtatgcctcctggaaggggaggatgccgcggcggcggcggacgagcggtggatgcaatccgtcgcagccgagttcaacctctccgagaccgccttcctcatccgcgacccntcctcctccgcagccgccgccgangccgccccgcggttccgcctccgctggttcacccccgtcgccgaggtaggtgaatctctgcggccacgcgacgctggcatccgcccacttcctcttcaccaccgtcctcgcgaagcagcagcacgccgccgccgccatggtcgagttcgtgacgaggtccggcatcctgaccgccaagaaggttcctgctccgccgcctccggcgaacgatggcggcgtcccgggtgaggagaagctgttcatcgagctggatttccccatgatcgatctcgtggagtacgattccgcggagacgctgtcgattccggagactctgaatggcgcccgagtcgtggaactttcttccggaaaagaggttgctgatattatccctaacattaatgaaattaaaaaatgtgatggtagaggagttattgttacgggaccagcacctgctggatctgattatgacttcttttcacgattcttctgcccaaaatttgggatagatgagaggatcctgtgtgtggaagcgcacattgngttctggcaccttactggggtggaaagctggggaaacaaaaacttaacggcgtttcagtcaggcttcgccaaggagtggaacattgtacttggagctggacggcgagaacaggagagtccggatccagggagaagctgtcactgtgatggccgggactctcttggcgtagcatctctctctgtcagagtgtctggcgatctgcttgctcttgtatgcttgagagttcagcggagaaattgttgttgttcgacgcgtaccgcgaacgattgtaattga

SEQ ID NO: 940 - DNA, 1008 bp, Oryza sativa
atggggggttccaaggcggaggagaagcccgccggcggcggcggcggcggcgaggattggtggtgctaccagttcggcaacaaggaaaaaggggatttttgattctttggcttgtgatccattattgattaaggaatatgatgttgggcagcaggacgcattgattgtgaagtcctctaagaaatcacccctcgcattgagaatggttgttttcgctatgactatgatctgcgggatatttatctgcacgatgtgtatgaagcaactaggaagtgatagcttgtctagaatagtgaagatcgaggttgcagaacagctatgcaataagtctgcaatcctgcattcagaggttcactttgtgcattacccacaaccgataacttatagcagaggagtgaatgcaagtgtacacctgtccggttcttcgcgattatctcgtcacaacgttctggaagtggctggtttgaaactcttcttaacagccatatgaatgttagctccaatggtgaaattttctcttcaaaagaaaggagaagtaacatttcatctataacaaagacactggataaggtgtacaatttggattggaatagtagtgcttctaagaatgaatgcactgctgctgttggcttaaaatggatgcttaatcagcagggtcttgtggcaaatcatgctgatatagctgactacttcaatcgaagaggagtctctgcaatatttctcttcaggtggaacctcctccgtcagttggtatctcaacttgcgaataatcatgacagatacctcaagcagttgaatggaacgcacaaggcccatgttcacacggcatatgagaaacttcttgatgtcctggatttcctcaaagtgccaaggagcaaactagtcagccgacacgtgaagatacacaccaaaccactttcggagcaaattgaaaattgggatgaagtctacaatgctctaaatggcactcagtatgagagcttcttgaatgctgactacagaatatga

SEQ ID NO: 941 - DNA, 1006 bp, Oryza sativa
  N_region (811)..(811): n = any nucleotide
  N_region (817)..(817): n = any nucleotide
  N_region (824)..(824): n = any nucleotide
  N_region (847)..(847): n = any nucleotide
atggcgcttgacggcgccgcggcggccgtgtccacgttcggcgccgtgacggtcgaccagagcggcgccggcaacttcacgaccgtctcggacgccgtggcggcggcgccgacgaacctcgacggcaccaagggctacttcgtgatacacgtcaccgccggcgtgtacgcggagaatgtggtggtgcccaagaacaagaagtacgtgatgatggtcggcgacggcatcgggcagacggtgatcaccggcaaccggagcgtcgtcgacggctggacgaccttcaactccgccacgttcgacacatgcagctgtgctcgggcaaggattcgtggcggtgaacatgacgttcaggaacacggccgggccggcgaagcaccaggcggtggcgctccggtgcggcgccgacctgtcgacgttctaccagtgcagcttcgaggcgtaccaggacacgctgtacacgcactcgctccggcagttctaccgcgcctgcgacgtctacggcaccgtcgactacgtgttcggcaacgccgccgtggttttccaggactgcaccctctacaaccgcctccccatgcaggggcagagcaacaccgtcacggcgcaggggcgcaccgaccccaaccagaacaccggcaccaccatccagggctgcgccatcgtcgcggcgcccgacctcgccgccaacacggcgttcgccaccaccaactacctcggccgcccgtggaagctctactcgcgcacggtgatcatgcagtccgtcgtcggcgggctcatcgaccccgccgggtggatgccgtgggacggcgactangcgctnagcacgntctactacgccgagtacaacaantccggcgccggggcggacaccagcaggagggtgacctggccggggtaccacgtgctcaacagcaccgccgacgccggcaacttcaccgtcggcaacatggtgctcggcgacttctggctgccgcagaccggcgtgccgttcaccagcggcctcaactga

SEQ ID NO: 942 - DNA, 997 bp, Oryza sativa
atggtgaaggagacggggtactacgacgtgctaggggtgagcccgaccgccaccgagtccgagatcaagaaggcgtattacatgaaggcgcggcaggtccatccggataagaaccccaatgacccgaaagccgcggagaatttccagcaggcactaggagaggcataccaagttcttagtgaccctacgcagcgccaagcttatgacgcacatgggaaatctggcatctcaacataattgatccagcagcaatttttgcaatgctatttggtagtgagttgtttgaagattatattggtcaactggctatggcatcaatggcttcacttgataatttcggtgaagctgttcaaaaggaaagggaagagaaacttgcagagacactgaaaaaccgactgcacatttacgttcaaggaaataaagaggaatttgtccagcttgctcaagctgaggtgaccagacttagcaatgcagtcttgtgcagcatatggcactgttatgttaaacactatcggctatgtatattcgagacaagctgcaaaagaacttgggaagaaagcaatattcttgggtgttccatttgtagctgagtggttcagagacaaaggccatttcatcaaatcccaagtaacagctgcagcagttgatgcagttgcaagaagacttgaagaagtatcttagtgctgaaggccattacacagaggaggaactagaaatgttcatgcaaaaccacaaaaaggttatggttgattccttgtggaagcttaacgttgctgacatagaagccaccctatcacgagtctgtcaaatgcaggtgcttcaagatggaagcgtcaggagggaggaactgcgtgctcgtgctaaaggactgaaaacattaggcaaaattttccagagcccatatgtggaggccccacagtttggaggaacctattacccattcaatttcccaatgccaacagctccacctggtgcgcagagggatccaattccatga

SEQ ID NO: 943 - DNA, 986 bp, Oryza sativa
  N_region (243)..(243): n = any nucleotide
  N_region (269)..(269): n = any nucleotide
atgccgggcgtcggcgtgaagatctacagcgtcttcttcaagttcctcctccgccacaagctccagttcggggtctcctgccgcgcggacgaggccacggcgccgtcgaacccggccttctccgcggcggacggcgtcgcctccaaggacctccacatcgaccccaactcctccctctccgtccgcatcttcctcccccagttccacggcggcgggttcgtgtccgggagcagcagctccgcngccaacgacgccttctgcaggaaggntggcccaagatgtgcgacgccatcgtcgttcgccgtgggatacaggcttgcgcccgagagccgctatcccgccgcgttcgatgacggggtcagggtgctcaggtggatcgccaagcaagcgaatctcgccatgatgagcaagccgtggattgctgcccatggtgatccggcaagagatgtgtactacttggtgtaagctgtggtgccaatattgctaattttgtcactcggaaggcagtagaagatggaaagctatttgaccctatcaaggttgttgcacaggttctgatgtacccattcttcataggaagcgttccaacacactcggaaataaggcttgcgaactcatacttctatgacaagtccacatgtatacttgcttggagattatttttgtcagagaaggaattcagcctggatcatcctgctgcgaatcccctggctcctgatagaggagggccaccactgaaatgtatgcctccgaccttgacagtcatcgcggaacatgactggatgagggatcgagcaattgcatactcggaggagctccgcaaggtgaatgtcgatgcacctgttcttgattacaaggatacagttcatgagtttgcaaccctcgatgttttcctcaagacaccgcaggcccaggcctgtgccgaggacatcgccatatggatgaagaaatacatatccctccgaggacacgagttctcgtattag

SEQ ID NO: 944 - DNA, 985 bp, Oryza sativa
  N_region (84)..(84): n = any nucleotide
  N_region (170)..(170): n = any nucleotide
  N_region (172)..(172): n = any nucleotide
  N_region (182)..(182): n = any nucleotide
atggccgccgcgctcctctcgctcctcatcctggtgccgcccatcgggctcctcgcggcgctagcgttcctggcgcgcctaggncgcgcggatcccgctcaagggccggcacgtgctcatcaccgggggtccagcggcatcgggctcgccatggccacggcggcggcgangnagggggcccnggtgtccatccttggccccggaacgccgcaaggcttggaggaggcgcgcggcgccatccgggccgccacggggcgggacgtcggggtccacgccgccgacgtgcgggacgccgacgccgtggcgcgcgcgctcgccgaggcgggccccgtcgacgtcctcgtctgcaaccacggcgtgttcgtcccgcaggagctggagaagcaggagatggaggaggtcaagtggatggtggacatcaacctcatgggcaccttccacctcgtcaaggcggcgctccccgccatgaaggaacgcacaaaggagacgcgcctcccggcgtccatcgccatcatgtcctcacaggccggccaggttggagtttatgggtacaccgcttactcagcgagcaaatttgcgcttcgtggattgggtgaggccttgcagcatgaggttattgcggacaacattcatgtctcgttgatcttccctcctgacacagagacaccgggtttcgctgaaggagaataaaaggaggccagagttgaccaatatcatagcaggatcatctggtggcatgaaagctgatgatgttgctaggaaggctttagatggcatcaaatccggaaagtttattgtaccctgcaatttcgagggagcaatgttagctgtagctactgctggtctatccccacagagttccccgctaacagcattcctggagattattggtgctggagtcatgcgatttgcagcaatttgcttccaatttaattggttcatgaccatcgagaactggtatgccaagaacaagaagcatgcgtga

SEQ ID NO: 945 - DNA, 977 bp, Oryza sativa
atggctacaggtgttctgtgctccagggaatttgctctctgcctggcttgtgtgctcctggccgtgccattgctagtggctcaggacccttcaagcctgagcttggagcactactcaaagacctgcccgaattatgagcatgtcgtccggactgagatggaatgtgctgtgcgtgcggattcccgcaatgcagctctgatgcttcgtcttcatttccatgactgtttcgttcagcagggttgcgatggatcagtgctgcttgacgacactgcgaccctgattggagagaagaaggcagaacagaatgtcaactcgctgaaggggttcgagctggttgacaagatcaagcagaagctggaagctgagtgccctggaacagtttcctgtgcagacttgcttgccattgcagcgagggacgcagttgtgctgggttggtgggccttactgggatgtcccagttggaagattggactccaagaaggcaagcctggacctagcaaacagggacattcccactgctcaacagggccttgtcaccctcattgccaagttctgggagaagggcctcgatgccactgacatggtagcccttgtcgggatcccacacaatcggattcgcccggtgcgccaacttccgggacaggatctacggcgactacgagatgacgaccaagtacagcccgatctcccagccctacctgagcaagctcaaggacatctgccccctggacggcggcgacgacaacatcagcgccatggacagccacaccgccgccgccttcgacaacgcctacttcgggaccctcgtcaacggcgagggcctcctcaactccgaccaggagatgtggtccagcgtcctcggctactccacggccgacaccgtcagcaagtactgggccgacgccgacgccttcttcaagcagttctccgactccatggtcaagatgggcaacatcaccaaccctgcaggtggtgag

SEQ ID NO: 946 - DNA, 965 bp, Oryza sativa
atggaaggcgcggcggtggacgaggtggtgcggcgcctcgtggagggcgggcgcggggggaggcaggtgcagctgtcggaggcggagatccggcagctctgcgtcgaggcgaagcgggtgctcctgtcgcagccgaacctcctgcgcatccacgcccccgtcaagatctgcgggtgatatccatgggcaatttgttgatcttctgaggctgtttgatttgggcggttatcctccaacttccacttatcttttccttggagattatgtggacagaggcaaacaaagcttggaaaccatatgcttgcttctggcatacaaagtgaagtatcctgataagattttcctgttaaggggaaaccatgaagatgcgaaaattaacagagtgtatggtttctatgatgaatgtaagaggcgattcaatgttcgactgtggaagattttctgtgattgcttcaactgcttgcctatggcagcactcattgacgataagatactctgcatgcatggtggcctctcacctgaactgaatagcttggatcaaataaaggatatcgagaggcccactgagattcctgactatggtcttttgtgtgatttagtttggtctgatcctagtcctgactcagaagggtggggagagagtgacagaggtgtttcctgcacttttggtgcagataagcttgtagaatttttggagaagaatgatcttgatcttatatgccgcgctcatcaggttgttgaggatggctacgagttctttgcgcaaaggagattagtgacaatcttttcagctccaaactattgtggggaatttgataatgcgggtgctctgttgagccatagatttaatgtgttcttttcaaatcttgaagccaaatgatacaggggctccacattgcaaggaaaaccaacttacaaacaaggtgaaaatatcaagtttaaattcacttacatctttttcataa

SEQ ID NO: 947 - DNA, 963 bp, Oryza sativa
  N_region (422)..(422): n = any nucleotide
atacaggggtgcctcatctgtttaactcttggtcttggatgggctgttgctgcacttgttaggggaatagttttgcatttctttgtgatgatgtcaatgagcttgagcactctgttcaagagaaattacctagggtctctgtaatcatgccgttgaagggctttggtgaacataatttgcaaaattggagaactcagcagatcacatctctttatggggggccactggaattcctgtttgtagtagaaagcaaagatgatccagcttatcatgctgtttcacgtttgatagcagaatacaagcaggacaagttggaggcaaaggtggttgtagctgggctctcaacaacatgtagccagaaaatccataatcagttagtacattggcgttgaaaagatgcataaggacagcaaatatgtttngtttctggatgatgatgtgagactgcaccctgggacaattggagctctcacaaaagaaatggagaaaaatcctgagccttgttcaattggatttgcaactggtgggaagactttctttttgtggggtggctgcatgatgatgcatgctgatgattttcggcaagacctatatggcgtcgtcagtggattaagagatggtggggcagcataaaaggctcatatcttcaccacctgttgcagtgtttccacaccctctttcaagtgatcttagtttctccagtggaattacctaaggaaacaaacttttgttcttgaatcatatgtatcaaaggttaactggatgatgaaccgtgcactatttgcatcgcactgctatttgtcctggggatttgtttggccctatatcatggctttgttgttaatatgcactctcacagaacttgtttcaatgtggaatttgacaaaggtggaaattcaactgtgcaacatgttgtctcccgaagggccaaaagtctctcttggttcttataactggggactc

SEQ ID NO: 948 - DNA, 957 bp, Oryza sativa
atggcgatgaagaggggagccacggccgcgctgtggctggtcgccgccgtcgccggcatgctcctgcacgccgacgcgcagacgctcgtgtacaagtactacgcccagaagtgccccgccgccgagtccatcgtgttcgacgaggtccagaaggcgtggaacgccgaccggagcatgccggccagcctcctccgcctccacttccacgactgcttcgtcaacggttgcgacgggtcggtgttgctggaggcgagcgacgggcaggcggagaagaacgcgcagccgaacctgagcctgcgaggctacgacgtcgtcgacagggtgaaggcgaggttggaggcgacgtgcaagcagacggtgtcgtgcgccgacatcctcgcctacgccgcccgcgacagcgtcagggtcatgaccggcggctacaagtacgaggtgcccggcgggaggccggacgggacggtgtcgcgggcgagcatgaccggcgacctcccgccgccgaagcagcggaacgtggaccagctggcgcggtacttcaccagcaagggcctgaccgtggacgacatggtggtgctctccggcgcgcacacgctcggcgtcgccaggtgcggcacgttcgggtacaggctgacgagcgacggcgacaagggcatggacgccgcgttccggaacgcgctgaggaagcagtgcaactacaagtccaacaacgtcgccgccctcgacgccggcagcgagtacggcttcgacaccagctactacgccaacgtgctcgccaaccgcaccgtgctcgagtccgacgccgcgctcaactcgcccaggaccttggcgagggtcacccagctcaggggcaaccaggcgctgttcacgagcagcttcgccgccgccatggtcaagatgggcggcctccgcggcggctacgccggcaaggtccgcgacaactgccggcgggtcaggacatga

SEQ ID NO: 949 - DNA, 953 bp, Oryza sativa
  N_region (58)..(58): n = any nucleotide
atgggctgctccatctcggggctcaacgccctctacgacgcggcgacgggcggcggcnacgtgtggatcaacgagcgccgcttccgcgtcctgcgccagattggggagggcggcttcgccttcgtctacctcgtcagggaggatgggacatatgctatgaagaaggtgctgatacagagcaaggaacagctagatctggtgaaggaggagatccgtgtttcgtcattgttcaaccatcctaacctgcttccgcttcttgatcatgccgtgatagcagttaagggagattggaaccatgaagcctacttgctcttccctgtctatatcgatggtactctgtttgacaatgccaaagtcatgcaatccaggaaggaattctattcaacaatcgatgttttgagaatattccaacagcagctctgtgaaggactgaagcacatgcacagttttgatccaccatatgcccataatgacgttaagactggcaatgttcttataactcacagaaaaggacaagcacctcttgcaactttaatggattttggaagtgcaaggcctgcaagaaaagaaatccgttctcgtgctgaagcattacgattgcaggaatgggccgctgaacattgctctgcgccttaccgtgcacctgaactgtgggactgcccaagtcatgccgatatcgatgagaggacagacatctggtctctaggatgcaccctttatgctatcattacaatgtttcaccatttgagtatgctctcggtgaatctggaggaagcttgcaattagccattgtcaactgcacgctgaagtggccggcaggacccagccctccttaccctgatgcacttcatcagtttattacctggatgcttcagccacaacctgcaatgcgccctcacatcgatgacataattctacatgtcgaaaagcttatggaaaaatattcgtcttaa

SEQ ID NO: 950 - DNA, 910 bp, Oryza sativa
atggcatcagacaagtgctcatcgtttctactagcagcggcagcggctgcagtgctcgtcctcgcgtcggcgccggtggctcattcgtggagcaaggagggtcacatgctcacatgccgaatcgcgcagcaggatctgctggagccagccgcggcgcacgcggtgaggaacctgctgacggaggaggcggacggcgacctgtcggcgctgtgcgtgtggccggatcaggtcaggcactggtacaagtacaggtggacgagccctctccacttcatcgacacccctgacaaagcctgcagcttcgtctactcaagtacgcttaggatatgtgcgtcgctggcgcgatcgcgaacttcacctctcagcttatgcactataatcacggcagcgccgatcgcaaataacatgactgaagcactgctattcttgtcacacttcatgggagatgttcatcagcagccaatgcatgttgggttcacgagcgaccaagggggcaatacgattaatctacgctggttcaggcacaaatccaatctccatcatgtgtgggatagggagatgatactcacagctattgctgaattctacggcaaggacatggatgcgtttcaaaaggaccttgtgcacaacttcaccacggggaacgtggtctgatgacgtatcctcttggggagactgcgaggatctcctgtcttgctcaaccaaaacaggtacgctacagagagcataaatttggcttgcaaatgggcgtacaacgatgtccgtgaaggcgaaactctgtcaggatgactacttcggctcacggctcccgatcgtgacacgacgaatcgcgcaggggggagttaggctggccatgttcttgaatcggctcttcggggagcacaaccgtgacgtcgcatcaccagcctga

SEQ ID NO: 951 - DNA, 904 bp, Oryza sativa
atggcgcggagtgccttcttcttccactgcgtcgccgccgtcgcggcgtgcatcgccgcgacggccgcggcgctcagtggcacggccacgttctacggcgggagcgacgcctccggcacaatgggtggcggcgcgtgcgggtacggcaacctgtactcgacggggtacgggacgaacacggcggcgctgagctcggcgctgttcaacgacggcgcggcgtgcggcgagtgctaccagatcacgtgcgaccagtccaactcgaagtggtgcaaggcgggcacgtcggtgaccatcaccgcgaccaacctctgcccaccggactactccaagccgagcaacgacggcggctggtgcaacccgccgcgccagcacttcgacatggcgcaacccgcctgggaacagatcggcgtctaccgcggcggtatcgtccccgtcaatttccagagagggtgtcgtgcacgaggaaaggaggggtgaggttcaccatcaacgggaacagctacttcgagctggtgctgatcaccaacgtgggcgggccggggtcgatcaagtcggtgcagatcaagggaacaaagacggggtgggtgaccatgtcccggaactggggcgccaactggcaagccaacaactacctcaacaaccaggccatctccttctcggtcacctccaccgccggcaagacgctcgtcttcgaggacgtcgcgccgtccaactggcagttcggccagacattcaccagcggcgtgcagttctactagctagcggctcgcgcgcgcgcgcggcggcgcatgagccgccgccgccgtcgcgcgcttgcccaacggcgagcggcgcatgccacctgccgccatttccgttcaatttttgcatttggaaaacttgtcaaaaagaccagcttatttag

SEQ ID NO: 952 - DNA, 867 bp, Oryza sativa
tcgacggacaacgtgaaggggatcgtcctggcgctcctctccagcggcttcatcggcgccagcttcatcatcaagaagaagggcctccgccgcgccgccgtcgcctccggcatccgcgcaggtgcaggggttggtgggtactcgtacctcctggagcctctatggtgggttggcatgatcaccagtaagattgtgggagaagttgccaatttcgtcgcatacgccttcgctcccgcggttcttgttactcctcttggagcactgagcataattgttagagtgcagtgctggcacattttatcctgaatgagaggttacacgcgcttggtgttcttggttgtgttatgtgcatcgcgggatcagtggtgattgttattcatgctcctcaggagcaagagattacttcagttagagaaatctggaacatggcgatacagcctggctttcttgctatatgttgcttcagttatagtggtggtcttcgtgctagtgttccatttctcccctctatatgggcagtcaaatgtgttgatctacactgccatttgctctttgatgggttctctttcggtaatgtaatgagtgttaaagctcttggtacatccttaaagttgacgtttgaggggacaaatcagttggtatatccagagacttggttctttgtgcttatagtggccacttgtgtgctaacacagatgaattacttgaacaaggcacttgatacatttaatactgcaattgtatctccaatctattatgtaatgttcacaacactaacaatacttgcaagcgtcataatgttcaagttgtctggtaccattttgttacatgtgacgaaggattatgaaaggattccgcaatcaagaa

SEQ ID NO: 953 - DNA, 832 bp, Oryza sativa
atgcgcggcgcgctgctggcgctcgcgctgctgctcaccgcgacggccgtcgtgccgctgctcctcctcggagaggccggggacgacggcgtcggggccgtcgccgccgcgccgccgttcaacgcgtcccgcgtcagggcggtgtcgtggaggcccagggtcttcgtctacaaggggttcctctccgacgacgagtgcgaccacctcgtcaagctgcagaggtcgatggtggcggacaacaagtccggcaagagcgtcatgagcgaggtgcggaccagctccggcatgttcctcgacaagcgccagaaggatccagtggtgagcaggattgaaaaaagaattgcagcatggacctttcttcctgaagcagatactccgatacgagcatgggcagaagtatgagccgcactttgattatttccatgacaaggtcaatcaagcactgggaggccaccgttacgcgacggtgctcatgtatttgtccactgtcgagaagggaggcgagactgtgttccccaatgctgagaaaccagttaaaggcgacacggtgctcttctttagccttcatatcgatggcgtaccggacccgctcagcctccatgggagctgcccagtgatagaaggtgaaaaatggtctgcaccaaagtggatccgtatcaggtcctatgagcatcctcctgtctcaaaggtgacagaaggatgctccgacaacagtgcacgttgcgcgaaatgggctgaagctggagaatgcgagaagaacccggtatacatggtaggtgccgagggtttgcccggcaattgtcggaagagttgtggcgtttgtgattcctag

SEQ ID NO: 954 - DNA, 825 bp, Oryza sativa
  N_region (571)..(572): n = any nucleotide
  N_region (719)..(719): n = any nucleotide
agcatatttcttgcacaatctgatcatcttccctggaagcgcaagcgcaagggccgccggtcgccggcgacgagaagacgccgcgcgggtgggcgccacggaggtggtacttcttcagcctgcacgaccgcaagtacgccacggggcagcgcaccaaccgcgccacccgctccggctactggaagccaccggcaaggaccgcgccatcgtcacccgccgccgcgccgccgccggagaggccgtcgccggcggcgaggtggtcgggatgaggaagacgctggtgttctaccaagggagagccccccggggcagcaagacggagtgggtcatgcacgagttccgcgtggacggacatgccgttgccgaccacccctcctcgtccacctcctcctcctcatctaatcttctcaagaggaggactgggtgctgtgcagggtgttctacaagagcagaacggctacaccaagggcagtagtctccggtgaggctgccgtgtcactgtccggtgagctcagcttgccgccgccgctgccgccgcccgttgcccccgccgtcgtcgacggctacaccnncggcggctattacgagcaagacagctcagctgggtaccaccaccaccaccaccaccggccgccgccgtcggcagcattgccgttcaaggacctgacggacttcagggacctgctgagcaacatggcacaaggcggcggcggcggcgntgccgccgccaagacggaggggttccatcttggctggagcgaggaggagtcctccggctacgtgcagcagagcgccatggcgtcgcaggcgtggaacccgttctag

SEQ ID NO: 955 - DNA, 823 bp, Oryza sativa
atgctagtgtggactcaagtcgacgaaatcgtcttcccggtttacaccacggtacctatctcggctggtccatcaatgaccggaaatgagaacgccgtggctataaccccgggcaactccatgtcgaaggatcctcccgccgtagcggagaacgaaacgtcgacgtcatacgagcctgagaagtgtcctatccacaagtccaggaaacacaacttgcaagcttgctgggtttttctctggaatccagcgtacttctctaactcgtgatgtctattgtcctattcacaagatgaagaatcacgacttctcaagctacaaggtccttctctgcgccattaagacgccgcttcctaaggtccagcaatcaaaaatctctcttaaggatgcagacaaggaacaaggagcgacgttgatctcggatcgattcattggagtaatcgacatcgatccccacgagtcgtcagtcctacacttgctcgaagactatggctcatcatcctccagtacaccacgcgacgtatttgccatcggtgggaccagcacgtctgcacacgctaacgcagaggcggagaatcaagcggtcacaccggcccaacacctcggcaccatcaacgcaatactgacagaaaccccctatgatcctgtacttaacgatgatctcgcatgatggacataacgactacaggaatcggtagccaatctcagtaacgcgttcgaggaggccgctaccagagcacaaccagaacatccgatagctgacgacgcattgagacgcaagaacgacaagccaaagacggggggagagaagaagccagccaaggat

SEQ ID NO: 956 - DNA, 797 bp, Oryza sativa
gtacagattgcaggtaaactcaatagcataataagggagcaaggtcttcgagatgttggacagctagagcaagatcttgtatttggtgatgctggaactaaagaattaatcaattttttgaggacacaattgagtcgtgaaaacaagttgcgtttgctgatgatctatgcagcaatcaacccagacaagttcgaaagtgacaagggtgaaaaattgatgcagttggcaggattatccactgatgacatgattgctgtgagtaatatgcgttgcttatgtggccctgacaccaaaaagtcctcgggaggaggttttacgtttaaatttgatgttcacaagagaaaggagcgaactggggaagaatctacatgggcactttcccgattttatcctgttctagagttgattgagaagcttagcaagggagaattaccaaaagacgaatactattgcatgaacgaccctagcccaagtttccacggtctgccaatgagcagctcagtcagaactagcccagctcaccaaccagctcattctatgagatccagacggacaggtggtacatgggctcggccacgtggctctgatgatgggtattcaagagtgattcagtgctgaagcattcgtcgagtgacttcaaaaagcttggtcagcgtatatttgtgtttgtcattggtggcgccactcggtcggagcacaagcttacatccaagctaaagcgggaagtcatacttggttcatctagtctggatgatcctccccagttcatcacggtaagtactttatattgtttctaa

SEQ ID NO: 957 - DNA, 786 bp, Oryza sativa
ggaagccagtgcaattcggctacacaaacatttgacggagttgacctgatgggtgaaaggttggcaaatgaggttttatcagttgtagaacaaagaagaggtgtgaagaagatctcatttgtggcacactctctaggtggccttgttgctagatatgctatagggaggctttatgaaccaaataacaaaactaaatcttcttcggagaagagcagagatgaaggtgagcgcttggagggtttcattgctggcttagaacctatgaattttataacctttgcctcaccgcatcttggttcaagtggaaataaacaggtaagactaatatcctttattgtttataaactagacagcagctccctttcttatgtggcctgcctttcctggaaagaagagcttcggaaactgcacatttgcttgttgggagaacagttatgcagatcagcgttgcgctctttcaaacgacgtgtggcatatgctaataaagatatggttgggtggagaacgtcatcaatccgtcgccaacatgagctaccaaaagtatgtcttagaactatattcatgcctaaagaaacctatggaattattacatatttcttttctgttctctttaaattgttggtttacctttcttctgcggttctgcctcttctcagcatcgacttcttgttcgtgatgagaaatatcctcatattgtccatgttgataaaggagcaacgaacagtaatgaagcagaagctcgttctgatctttatgacccagaaggtatatttttctgtttgttag

SEQ ID NO: 958 - DNA, 774 bp, Oryza sativa
atgccggttgccggagcggggtggtgggatctcgtgaacggctcgacggcgtggcaggacgggatcttcctctccctcgccgctctctacggcctcgtcgccgcatcctccttcatccaagttgttaggatacagtacagagttcctgaatatggatggacaacacaaaaggtctttcaattacttaatttcattgtgaatggagcagcatgttattcttgatcttccggggcttgcattcttcacaacgtatgcaatgttggcacttttctgggctgagatatcttatcaagcacgtggtctagagactgaagggcttagatcaggtttctacactattaatggtgtaatatatgtgatacagctgtgggcgttgttgtggcacaatccaaacccatctatgatagtcctttcgaagttgttcattgcaggcctatccttttctgcagccttgggttttctgctatatggagggagggcaggcttttcttcatgctgaagcgttttcctattgagtcaaaagggaggcagaaaaaactgagggaagttgggagagttgccactatatgcttcctttgtttcttggcacgatgcattatgatgtgctttgatgcatttgacaaaaaagctgaccttgatgtgcttgaccatccaattcttaatttcatctattacctggttgaaattcttccttcatctcttgtcctgtttattctgaggagaatcccttcgaagctacggctcgcccagtatcatcccctcaacagtggctag

SEQ ID NO: 959 - DNA, 739 bp, Oryza sativa
  N_region (305)..(305): n = any nucleotide
atggcggctgctggtgaagcttcaggaggcagggacaagtaccggtcgttcatgtacggcgagggagagaaggacaccgtgtggaggcttggatcccctccaaactacgacgtcgtcaacaagctcttcgaggaagagagaaccaagtaggaatggccagaggggtctctggaggagaaggtccagaggttgctgaagacctgggagatggagctcatccacaaggtgcgacccgaggaccagaagagcgtccactcgcagaaattctgcgcgagcaccaacggggatgagatttctgagccggnaggaggtgatggctatcggcggctacaacgcgttcctgcagacgaaactgccgccggagcaccgcatctatgacccggacaatgagacgctggagtccggcatggccacgttcttgacggcgttcccgcgtggctttgccatcgaggtgctcgacgtctacagtggtccaccacggatcgtcttcaagttccgacactgggggtacatggaggggcccttcaaggagcatcccccccatggcaagcgggtcgagttctttggcatctgcatcttccatgtcgacgaggagatgaaggtggagaagacggagtacttctacgagcgcggcaatttcctcgcgagcttcttgagcacgcctgctgctgctgctgctgctgaggctgcgtcaggctcaggatgccctgtcatgggaggaaactgaagcaatgggtaa

SEQ ID NO: 960 - DNA, 729 bp, Oryza sativa
atgtcgacggaggcggagaccaccagcgccgccgccccggccccggccccggcccccgcatcggcgccggcgcggtgccagcggataggctgcgacgccacgttcaccgacgacaacaaccccgacggctcctgccaataccacccctcccctatgtttcatgatggcatgaaacagtggagttgctgtaagcaaaaaagccatgattttagcctatttttggctattcctgggtgcaaaactggaaagcacacaactgagaaaccaatcacaaaagcagttcctactaaaccatcaaaggcagttccagtccagacttcgaagcagagtgtgggagctgacacttgctcaaggtgccgtcaaggtttcttttgctctgaccatgggatcacaacccaaggcacaaataccaaccgctaccagtgatactaacatggtacctgttgagaagcctgcagttccaccaccaaagaaaaaaattgatctgaatgagcctagggtttgtaagaacaaaggatgtggtaaaacctacaaggagaaggataatcatgatgaagcatgcgattaccatccaggacctgcagtttttcgcgacaggattagaggggtggaaatgttgtgatattcatgtcaaggaatttgatgaatttatggagatccctccgtgcacaaagggttggcacaatgctgatgccgcatgaattttcaccatgccccatcttggaataa

SEQ ID NO: 961 - DNA, 684 bp, Oryza sativa
atgggctctaagaagcggtcgcctcagcatccggccgccgcggcgccccctcccgccgtcggcggcggcggcggcggcgaggtctccggcgatggtggcgcctcgacggcgaacgggccggtggtgccgaagccgtcggaggtggcgccgttcctgacgaaggtgtacgacatggtctcggaccccgcgaccgacaacgttatctcgtgggccgagggcggcggcagcttcgtgatctgggactcgcacgccttcgagcgcgacctccacaggcacttcaagcacagcaatttcaccagcttcatacgccagctcaacacctatcctgatagatgggagtgggccaatgaaggttttattatgggccaaaaacatcttctgaagaccattaagaggaggaagaagtcttctcaggaatcacctagcgagatacagaaggcgcctgtcaaaactgcacctggtactgaaaatattgagataggaaaatatggtggccttgaaaaggaggttgaaacccttaagagggataaagctcttctcatgcagcagcttgtagatctcaggcactaccagcaaacatctaaccttgaagtgcagaatttaattgaacggcttcaagtaatggaacagaaccagcagcagatgatggcacttctagcaatcgttgtccagaatccctagttt

SEQ ID NO: 962 - DNA, 680 bp, Oryza sativa
atggcgcgaggcaaggtgcagctccgtcgcatcgagaacccggttcaccgtcaggtcaccttctgcaagcgccgtgccggcctgctgaagaaggccagggagctctccatcctctgcgaggccgacatcggcatcatcatcttctccgcccacggcaagctctacgacctcgccaccaccggagaaccatggaggagctgatcgagaggtacaagagtgctagtggcgaacaggccaacgcctgcggcgaccagagaatgggacccaaaacaggaggcaatggtgctcaaacaagaaatcaatctactgcagaagggcctgagaggtacatctatgggaacagggcaaatgaacacatgactgttgaagagctgaatgccctagagaggtacttagagatatggatgtacaacattcgctccgcaaagagatgcagataatgatccaagagatccaagcactaaagagcaagaggaaggcatgttgaaagctgctaacgaaattctccaagaaaagagatagtagaacagaatggtctgatcgacgtaggcatgatggtagcagatcaacagaatgggcattttagtacagtcccactgttagaagagatcactaacccactgactatactgagtggctattctacttgtaggggctcggagatgggctattccttctaa

SEQ ID NO: 963 - DNA, 645 bp, Oryza sativa
gcagagttgctgcgggagaacaagcggatgctggataaatccatcagggagatcgagagggagaggcagggcctgcaggctcaggagaagaagctcatcgccgagatcaagaaggtggccaagcaaggacagatgggagccgtaaaaattatggcaaaggaccttatccgcacaagacatcagatcacaaaattctatgccctcaagtcccagctacagggtgtatctcttcgaattcagcagacattgaaatcgacacaagctatgggtgaggccatgaagggtgtcacaaaagccatgagacagatgaacaggcagatgaatctaccagctctgcagaagataatgcgggagtttgagatacaaaacgagaagatggagatagtcagtagcacaatgaatgatgccattgacgatgctttggagggcgatgaggaggaggaagaaacagaagaactggtaaaccaggtccttgacgaaattggcatcgacgtcaactcagagcttgtcggggctccttcaaccgctgttgctgcaccggttggagcaggaaaggttgccgctcaagctgaagccgctggaggtggggacggtgggatagatgacgacctacaggcccggcttgataatctgaggaagatgtga

SEQ ID NO: 964 - DNA, 639 bp, Oryza sativa
aggtcggccaaagagattgaaaccaagcatcggcttcacgctcaagaaattgctcattcactggatcttaggaaatatgatggaattgtttgcgtcagtggagatggtgtacttgtagaggtggttaatggtctgctgcaaagagaggactggaacacagcaataaaaataccattaggcatcatcccggcaggacaaggttttttagtgtcttgatgcttacttgggggtctggtagctgatatcgatattgagtcagagaagtacaggtggatgggcagtgctcgtcttgacttctatttgcggcggtacaatgggcgtgttctttttgttccagccccaggatacgaaggacttggtgatcatgagtggagatcactggatggcccatttgtttcggtttgggtcagtggtgttccttttgctagtgaaaatgtcatgacagcaccagaagcaaaggagccgggaatgcgggtgggcagcaccaccaagggcggcatcatcgactccgatggcgaggtgatcgcgagaggggatggatcacacactggcgacgagatagagcacctgatggcctatggccctcccatccaactgacggtggatcagggcttggccaccattttctcccctagatga

SEQ ID NO: 965 - DNA, 632 bp, Oryza sativa
  N_region (505)..(505): n = any nucleotide
atggcgatccgaatcacggtgtcctactccggctacgtggcgcagagcctcgcccctttcctgcagacctcgaagtggctcccctgctccgacgacaccaagacggccttcgcagcggtgactgtgcctctgctctacagctcgtcgctggccgagccgaggtccatcccgtccaagtccatgtacccgaccttcgatgttggtgaccggattctcgccgagaaggtctcgtacatattccgggagccggaaatcttggacattgtgatcttccgtgcaccaccagctcttcagggctacagctcgggtgatgttttcatcaagagagttgtggccaaggcaggcgactatgtcgaagttcgtgatggcaagttgattgtcaacggagtagtccaggatgaggaatttgtgttggagccctcacaatttacggagatggaacccatggttccagaaggttatgtgtttgtgctgggagacaaccgtaacaacagcttcgattccnataactggggcctcttcctgtgaggaacattattggaagatctgtgtttcggtactggcctccatcaagaataacagatacaatatacgagcctcgcgctgaatattctgtggctgggttgtcgtga

SEQ ID NO: 966 - DNA, 628 bp, Oryza sativa
ggaactttttggtgctgggagcgagacatcagctaatacacttcaatgggcgatgactgagctcataatgaatccaagagtgatgctgaaggcacaagctgagttaagtaacgtcatcaaaggaaagcaaacgatatctgaagatgacttagttgaattgaagtacttaaaacttattatcaaagagaccttaaggttacatcctgtagtgccactacttctccctagggaatgtcgggagacatgtgaggtcatgggttacgatatccccataggtactactgtgcttgttaacgtatgggcaataggtagagatcctaagtattgggaggatgctgagacattcatacctgaacgatttgaggatggccatatagacttcaaaggaacaaactttgaatttataccgtttggagctggacgaaggatgtgccctggcatggcatttgcagaagtaatcatggagctcgctctagcctcattgctttaccactttgattgggagctccctgatggcatctcgccaaccaaggtggacatgatggaggagttgggtgctacaattcgaagaaagaacgatctttaccttattcctactgtccgtgtgcctttgtcaactgtcttatag

SEQ ID NO: 967 - DNA, 622 bp, Oryza sativa
  N_region (423)..(423): n = any nucleotide
  N_region (497)..(497): n = any nucleotide
atggattcgcacgtaggcaagttattcgattcggtgggctcgatcttccgcggcagcgacaccctcccctggtgcgaccgcgacatcatcgctggttgtgagaacgaggttgcggaggctgcgaatgaagaacagaagaatgagagccttatgaggctttcgtgggcgcttgttcactccagacagcctgaggatgtgaaccgcggcattggaatgcttcaagctggcagcttctttggacaggtctaccagtccactgcagacaagggagaagctctacttactggctgttggacactacagaactggtgattatacaaggagtcggcagcttttggaaagatgcttagagcaacctgactggaggcaagctctcactttagacggtatgattggcatggctattgtcactggtgccttcgnacttgtgggacttgttgctggtggaatcatcgctgccgcttcttcttcatcctcatcatctaggaagaaattgnggaccccatttcaggtgaataagatgtcaagatgggcaagaaatcgatgtaaatatgcgcatcttgctgtcatacttgttgcaaccgtatactcacgtctccatttttcagtccttttaccatga

SEQ ID NO: 968 - DNA, 573 bp, Oryza sativa
atggccatcaagaggcatctgatggcgcgcaccacggacgtcttcatcgccaccttccccaagtccggcaccacatggctcaaggcgcttatattcatgtcatggaacattgatgtggctgtccggcaattctgcgatggcatctcgcatttcgggccgttttgggagcacgtcctcggctactggcggtggcacgtcgagatgccaagccaggtgttcttcttgacctacgaggagcttgccgctgacacgcttggcctattgagacgtttggccgagttcgttgggcacccgttcacggttgaggagcaagaggctggagtggataggaagattgtggagatctgtgccatggagagcttgtcgaggttagaggtgaatctgtcggggacaactgactttatcgagaaagacgtaccgaacaacatattcttccggcgtggagtagtcggagattggaggaactatctgacaccggagatggcaatgaaaattgatgagatcatcgagatcaagtttgaaggaactggcttgttgtttcatccacagcttttacgacaaaaaggagaatag

SEQ ID NO: 969 - DNA, 557 bp, Oryza sativa
atgcagctggagatttcgccgagacagaggagccagcagcagaaggaggaggaaggcgagcaccagcagcgcgccggcgaggaggcggtgggcgccgtcttcagcattgagccgtgggtggacgccgcggcggtgctggtgccgccgcttaacttcgccgaggtgaacgacggcatcttccgctccgggttccccgccgccgacaacttcgcgttcctcctctccctcaagctacgctcgatcgttacctgtgcccggagccgtacccggaggagaacacgcggtttctggagcagaacggcatcaagcttcaccagttcggtattgacggcagcaaggacgtaaggaatcaaccggtgctcatccactgcaagagaggcaagcaccggactggctgcgtcgttgggtgcctgagaaagttgcagaaatggtgcctaacttcagttttcgacgagtaccagcattttgcagcggcgaaggcgagaagtactgatcagagattcatggagctgtttgacacatccagcttgatgcacctgacggcctcacagtgttaa

SEQ ID NO: 970 - DNA, 543 bp, Oryza sativa
aagcgttgtgagtcgataaacacgatggtgtcatttctgtggtggataattgggttctactgggtggtgtctggcggggatgtgctcgagcaagatgctccaaggctgtattgggtttttctagcatttgatgtcttcttcgctgtgttttgcgttgctatggcctgcttcatcgggatcgcattgtgctgctgcttgccttgtgtcattgcaattctatatgcactggctggccaggtaaataagaagaactctgcatttgagaaattttcctcttctctaccttggtactaccaacattgttgatacatattgcttacttcgttctcttcgaaatatggagggtgcatcagatgcggatattggctttcttcccagatatagtgctgtatctgcctctcatcatatgaggatggagcggagctatctgccctcccttgcaaccatcacttccattggacatgtattaccaaatggctacgcatgcatgcaacctgtccactttgcaagtacaacattcttaaaggcagtgaaagtgcatga

SEQ ID NO: 971 - DNA, 535 bp, Oryza sativa
atgtctaggtctgtggagcctcttgttgtagggcgcgtgattggggaagttcttgatacctttaacccatgcatgaagatgatagtgacctataactccaacaagcttgtatttaatggtcatgagctctacccatcagcagttgtgtctaaaccaagagttgaggtccaagggggtgacctgcgatctttcttcacattggtgggttatgacagacccagatgtgccaggaccaagtgatccttatctaagggagcaccttcattgcatttacgcaggattgttactgatatacctgggacaacggatgcttcttttgcgcgaggtcataagctatgagagtccaaagccgaacattggcatccataggttcatttttgtgctcttcaagcagaagcgcaggcaaactgtaattgtgccatccttcagggaccatttcaacacccgccggttcgccgaggagaatgatcttggccttcctgtggctgctgtctacttcaatgcccagagagagactgcagccaggaggcgctga

SEQ ID NO: 972 - DNA, 513 bp, Oryza sativa
atggcggcggcgggggagtttcttgggttcgcggcggcgaggaggggggcgcacaggagttcgaccggctcgacgacgaacagctcatgtccatgttctccgacggaccccaagagagtcaagaggttttcaggattttggcaaacaggcagtcggcgcagcggtcaagggtgagaaagttgcagtacatctctgagcttgagcgcagcgtcaccactctccagctgcagatggaggtgtcagcactgtcacctcgtgtggccttccttgatcatcagcggtcgctgctcaccgtcggcaacagccatctcaagcaaagaatcgccgccctcgcacaagacaagatcttcaaagatggctcaccaggaggctctgaagaaggagattgagcggctacgccaagtgtaccaccagcagcagatcaaggccaccggaggcgccgacatcgccacggcggcctcaatgcaggccaagcatgagctgctggcgtgcgagggagcggcgatgcgatag

SEQ ID NO: 973 - DNA, 506 bp, Oryza sativa
atgcagagatatgatcttgatcctgctgcaaaagctgctgcagcaactgttttggcatctaaactgggtgctgattctggattgagagtcttcttgggagatgagtcgaatagggatgcaacattgagtaaaagtaatgatgcccaaactactggaccgaggcaaagaaaaccaggacacttgagcaacagcactggaaggacatacggccctgagtcattaggcggttcatatgcctatgatggtaatgaaggtgtcaccactccaaatcagaggactgttgaccacttcagaggtccagctggtaatgatgggggatggctcgcacgagcagctgctctgcttgtaggggaagatccaactcagtgctatgcgttaatatgtggcaactgccatatgcataatggtatggtcttgcaaggaaagaggactttgcattcattacatattactgcccgcactgtaatgccctcaatggaccacggcagcatgatgagcatgaaatg

SEQ ID NO: 974 - DNA, 485 bp, Oryza sativa
  N_region (168)..(168): n = any nucleotide
tgcaactcattcgtggagttggagccagccatctttactctaaaatccccagccaccatcctccctattggaccacttcgtaccgggcagcgttttgctcatcaggttgggcacttttggcaaaccaatgatgacacatgcctctctttccttgatgaacaaccctanggttctgttgtatatgtggcatttggcagtcttactatcatgagcccaggacaactaaaggaacttgcactagggctagaggcttctggtcatccatttctatgggtagttaggcctggacttgctgccacaggaacaggtgctagcgcaccctgcagttgggtgctttgtaacgcattgcgggtggaactcaacggtagagagcattcgtaatggagtgcccatgctatgttggccatatttcaccgatcagttcacaaatcaaatatacatttgtgatatttggcggattgggctaaagatggtgcaaacctgtg

SEQ ID NO: 975 - DNA, 477 bp, Oryza sativa
atgacgccgcagcggtctccggcggcggcggcggcgggggaagggggcacgccggcgctgcactacctgagcgggccgtacggggacacgacgtacaccaaggtgttcgtcggggggctcgcgtgggagacgcggagcgaggggctgagggcgcacttcgaggcgtacggggagatcctcgaggccgtcgtcatcaccgaccgcgccacggggaggtccaagggctacggattcgtgaccttccgggacccagactcggcgagaatggcgtgcatggacccgtacccggtgatcgacgggcgccgcgcaaactgtaaccttgccatcctaggccgtcctgggccagacatacctttcgaggccggtcatcccatacaatggaggtgtggcggttccagggggcatgtatgtgcaaagcccaacatatcagcaacccccctacaactatccacaggcatttgtatatccttcttatgg

SEQ ID NO: 976 - DNA, 477 bp, Oryza sativa
tggcaaggagcaccacaaagtccctcttcttacattgtcaagaagatcttgcggttggaaataccgacagatgcttaccctaatccttagttcaattttattggtcgccttcttggaccaaggggaaattcgttgaagaggattgaggcctctacaggttgtcgtgttttcataagaggaaagggctcaattaaagaccctaacaagaaggaggagcaacttaagggaagggctgggtatgaacacttggatgatcccctgcatatcttgattgaagccgagttacctgccaatgtcattgacgctagactcgcaaaagcacaagaaatcctagaagagttgttgaaaccagtggatgaatcgcaagattactacaagagacagcaactccgagaacttgctttgttgaactcaccacttagagagggtagtgcttctccattcagtaatggtggcatgaaacggatgaaacaatga

SEQ ID NO: 977 - DNA, 471 bp, Oryza sativa
atggaagggcagcagttcgcttggggaagggaggagggagggtggaggaaagggccatggacagcgcaggaagacaagctgctggttgagtacgtgaggcagcacggcgaagggaggtggaattctgtcgccaagatcacaggcaggtctgaagagaagtggcaagagctgcaggcttcgttgggtgaactacctgagacctgacctcaagcgaggcaagatcacgccacaggaggagagcgtcatactcgagcttcatgccttgtggggaaacagaggtggtcgacgatcgcgcgtagcctgcctggcaggacggacaacgagatcaagaactactggaggacgcacttcaagaagggcaagccgtccaagaacatcgagcgcgcgagggctcggttcctgaagcagcgccgcgagatgcagcagcagagccagctgatgcaaaccggccagcagcagcagctcggccaa

SEQ ID NO: 978 - DNA, 456 bp, Oryza sativa
ttggacaggattgaacaagatgatgaattgacttatgagttgctggtgctagaaactaacttgtttcttagcggccttggcctgcatgaccagcacagagatatgagaatggatattgacaacatgtcttatgaggaactattagcactagaggagcgaatcggttctgtcagcactgccctatctgatgagcagcttgtgaagtgtctcaagcgaaatgtgtataagttaccaaattcagatcttgaagcgaacagagctgtactagatgacgccaagtgcagcatatgtcagcaggaggaatacattgagggcgaagaagttggtaggatgcagtgtgagcatcaataccatgtgtcctgcattcatgaatggcttagacagaagaactggtgtccaatatgcaaaacttcagcaataccttcagagatggacaaggggggcacatgaatatag

SEQ ID NO: 979 - DNA, 453 bp, Oryza sativa
atgcaggcgtacatggtgggagagcacggggacagctcggtggcgatatggtcgagcatgagcgtggccgggatgccggtgctcaagtcgctgcgggagagccaccagagcttcgacgaggaggccctggagggaatccggcgagcggtggtggacagcgcgtacgaggtgatcagcctcaagggctacacctcctgggccatcggctactccgtcgccagcctcgccgcctccctcctccgcgaccagcaccgcatccaccccgtctccgtcctcgcctccggcttccacggcatcccccaagaccacgaggtcttcctcagcctccccgcccgcctcggccgcgccggcgtcctcggcgtcgccgagatggagctcaccgaggaggaggcccgccgcctccgccgctccgccaagacgctctgggagaactgccagctgctcgacctctaa

SEQ ID NO: 980 - DNA, 432 bp, Oryza sativa
  N_region (5)..(5): n = any nucleotide
  N_region (9)..(9): n = any nucleotide
ttggncggnggaaagcgggtgcgccccgtgcgggcggtcgccgagctcgggagcgcctcgggcaccggcggggtcgccgccgggcaggtcgccgacaaggagagcgagggcctccccgtcagcctcgccatgctggagtacatccacgtgcacaagacggcgaggctcctcgaggccgccgccgtgtccggcgccatcgtcggcgggggcgcggacgccgaggtggagagggtccggcggtacgcgcgctgcgtcgggctcctcttccaggtggtcgacgacgtgctcgacatgacgagcacatcggagcagctcgggaagacggccgggaaggacgtcgaggccgacaaggccacttacccgaagctgctcggcgtcgacaaggcccgcgagtacgccgccgacctcctcgccatggccgaggcggagctc

SEQ ID NO: 981 - DNA, 419 bp, Oryza sativa
atggcttcgccggagccggccgcgggggcggacggcgcttcggctagccagacggccgtggtggagccgatccggttgccgacgccggaggagatcaaggggcaggacatctggaacaactgcgccgtccgcagcgtcgtcagtggagtcatgggggggtggtttaggcgtgcttatggggctattctttggagctttggaaaacccaattacagcagaggagatgacagcaagacaacaaatagtataccaagctaaacagatgggtaggcgaagtataagcaatgccaaaacctttgcagtcatgggcctgattttctctgccgctgaatgtgtcatagagaaggctcgcgcaaagcatgacactaccaattcagcggtggctggctgtgtcacaggaggggctttagctgcaaaag

SEQ ID NO: 982 - DNA, 301 bp, Oryza sativa
cgcattgcggttctaggtgccagcggttatactggagctgagattgtcaggcttctagcaaaccatcctcaatttcgtatcaaagtgatgactgcagatagaaaagctggcgaacagtttggatctgtatttcctcacttaataacacaggatgcagatttttcaaatgtggatgcagttttttgttgcttgccacatggtacaacccaggattttcgattgcgtgatatcaatgagtacgctgagtggtatggccattctcatagggcaccagaacttcaggttttcctcgactacttaa

SEQ ID NO: 983 - DNA, 1659 bp, Oryza sativa
atggagagcatgaggagcttcctgacgcacctgaccgagacggagcctcccggcggtgagcacgacgagcaggtctggacgtggatgaagcaggtccgggagcttgcgcaggactgcagcaactgcatcgacacctaccggcagcacggtgacctagcggtccgccaccccagctggagccgcggtgccggcatcctccagcgctacatctactgggctccttggatggtcgagaagttgctcgcccagcactacgcggccatctggctgcgcgagctcaaggaccgtgcccacgacgtcggccagcgtcgcttgaggtacggcgtggaggtccccggcaagccatcatccaaggcggcaggaggggcaccgtcgtcggtgcggtctgaagaagcttctccgtcaaccactagtgccaccacaggagcacaggcaccagacgaggaagatgaagacgaggaggaggaggagcagcaagaccaagaatacgactcggctagtaaagtcggttggcattacgggaccatcgtcatcttcatcgccatcattaccatccatcgccattgtaccaccaccaccacccagagtagctcaaggtggtgcaacggaggagccaatgcacgcgatgctttggcttccatggagaccacccatttcgaccgctctgtgtggatcaacctccaggctttgcatctccaccgctcttggcaccaaatcagcaccgaggccatcctctgctacatcctgcgtgaatgtgaatctctcaagaagcgaggcaaagatcatggtcaggtggacgaccgggatgatcaatgggaggcttactattattacagatgggacatattgtatgatatccatagggacttttatcgacaggttaatcctaagatggaagaaatcgagggtaatattactaagaacagtgctgcagaagaagaacaagaagagaaaagtaaaggagaagctgcatatggaaaccagactgaagacgaaatcccctcaacccctgatggtagtatgtcacgccccaaactagccccgaacggcggccagaactttcagaaacaactaagtgagtgcttctcaacgacacggacgagaaagtgcgtctcatccggtcggagcagtgaaattgtaaggattgattcttgtcggtacgagaggctccctgccaatcgttcaccgacaccggctgtaccaacaaccacacgcgagaggctccctgccaatcgctcaccaactccagctgtatcaacagccacacgtcaagcacatcggcacgaaaggctccctgctaatcgttcaccaacaccggctgtaccaacagccacaagccaaacactgaacagaattctcacccaacagcagttcacaaaagggggtacactttacctacaagacgtcactaacccgggtcacccagcccgtgcagaacggccacgtctggtgattttgaggctttcacgacaaagcatttcgaaagctgactcagggtcatcttatgccaacgggaggggtcccacggacaaacaccaggaatcggtccttaaggcgagaacgggaagaccgcacctccagtacgtctcccgcaccatcttgagcttcttcttcgaaatctgcgtactgcgagtctttgggctccgaaactacacgtga

SEQ ID NO: 984 - DNA, 771 bp, Oryza sativa
atgcgccggcgatccccgccggcgtggtcgtatcggcgcatacacatcctgttcctcctgctactggccacttcgtcatcctccgcctcggccgctaacttcacctgcaccaccgtgcaggcggcgtgccagtccgccatcgggtacacgacccgcaacgccaccacctacgccgagctcctctccctcttcaacacctccaccctcgccgagctcctccgcgccaacggcctccctcccaccgctatgccgcctgacacggccatccccgccgcggccaccgtcaccgtccccttccgctgcctctgtaatgttgccaccagagtcggccggtcagactaccggcccatctaccttgttgggtcgcaggacgggctcgacgcgatcgcgcgcaaggtgttcgacggcttcgtgacgtaccaggagatcgcggacgcgagcaacatccccgatcccaataagatattcgtcgggcaggagctgtggattccgctgccctgcagctgcgaccaggtggatggccacaacgtcacgcacttcgcttacaaagtccgcgccgtggacaccacgtcggcgatcgccgccaagtttggggtcctcgagtccacgctaatgaggatcaatgggataaccgatcccaaaaacctagtccaggggcagattcttgatgtcccaatacctggtaatgatacaatggcacgaatggctcggaagcatgaaggtaattgccctctcttatttgattttgctgaatgcgcatgtgggaaataa

SEQ ID NO: 985 - DNA, 765 bp, Oryza sativa
atgtccatatataggctgcgttcgggagcacttgttcccaactccttccctcttgttttccacgcgcacgcttttcaaactgctaaacggacacccaaaaaatacggcctttgttgtgggacacccgaagatcgtgtgtttgctcgtggacactcgaaaaatgtggcccacttgtcaatctctctttctcgggctcgccggctggaacacgccgtcctcgccgagctaccgctccggcttgtactccaagcagtcctcgccccatatggcagcgagccgccccatggcatacgcgttgtacgtcacggaccagccggcatggacgagcgtgccgtcggggagcgtgtcatccgccgcgcacgcctgacgccggcggtgcatctcccggagcgcgtcgaacccgaacagctcgctcgggcacgcgccggtcgccttcctcaccacatggaccacgtcggcgatgcgtgccatgacgtccggctgggacgacaagagccagaagaaccagctcaaccccgacgacctcgtctcgcaaccagcgatgaggaagatgaggacgatgtcgcggaggacctattcgttgtgcttgtcactcgccacgaacctcgacaggacgtcgtctctatcttgcacggacgcgctctggcgccgggcacggatgatgtccatggcgaaggcgtgacgttggcgatggccttcctcagggctcccgcaggagttcgccttttaccttcgcgaggaatgcttaataggaaggtatactga

SEQ ID NO: 986 - DNA, 699 bp, Oryza sativa
atggccggccgtgcgacggcgacggcgacggcggcggggaaggacaggtccagcttcgccgtcacctgtagcctcctcagccagtttctcaaggagaagaagggcggcggcggcgggctgcaggggctcggcctcggcttgcggccggcgccggcggcgccgcccgccgcgggagctggaggtgctttccggccgccgccgaccaccatgaacttgctgtcggggctcgacgcgccggcggtggaggtggagccaaacacggcggaaacagcggccgacgagctgcctctcatcaaggccccggccgatcagcaaagcgacgaaagtgcaagtgaggcagctggagagaaggctcaacagctgaccatcttctacggtggaaaagtagtcgtctttgagaacttcccgtccaccaaggtcaaggatctcttacaaatcgtaagcacaggcgatggcgtcgacaagaacaccggcaccgcggcaacgcagagcctgccccgacccgcacacaacagtcttcccgatctgccgattgcaaggaggaactcgctccataggtttctcgagaagagaaagggcaggatgaatgcaaatgctccataccaagctaactgcaccgctgcaccgtccaagcaagctaacggtgacaaatcttggcttgggtttggccaagagatgacaataaagcaggagatatga

SEQ ID NO: 987 - DNA, 633 bp, Oryza sativa
  N_region (210)..(210): n = any nucleotide
  N_region (222)..(222): n = any nucleotide
  N_region (324)..(324): n = any nucleotide
  N_region (328)..(328): n = any nucleotide
atggtgctcactcgcagcaacgggaatggccctaacaacaacaacaacaacaacaacaatggagagaatcccacacttgcccaagtcctggctcaacaggcacagcttatgaacatgatgatgcagcaactccagaaccagcagaaccagggaaataaccatgcacctccccagaacaagttagcagaatttcttcgtgtgaggccgccnactttctctagnaccactaatcctgttgaagctggtgattggctgcatgccatagagaagaagttggatttgcttcagtgcaccgatcaggagaaggtctcatttgcatcacancagntgcatggccctgcctctgaatggtgggatcacttccgccttaacaggactactgctgaacctatcacttggcttgaattcaccgctgctttccggaagacgcatataccatcgggagtggtgtctctcaagaagaaggaattcaggtcgctcactcaggggtctcgctctgttaccgagtatctgcacgagttcaatcgtctggctcgttatgctccggaagatgtgcgcactgatgaagagcgtcaggagaagttcttggaaggacttaatgatgagctttcttacttcttggaacgcacttaa

SEQ ID NO: 988 - DNA, 588 bp, Oryza sativa
atggcgaggacggggcggcgcggggcggcgccgccgttgctgctggcggcgacaacgccgacggggttctgcgagaccaatggagtggacgttgacgcgctgcggggtctgatgcagcaatggaggaactacccgtcgagctggaactccggcgacccctgcggcggcgggtgggacggcgtcatgtgcagcaacgggagggtgacatcgctcagtggcgtggccaaacagagtggcggcaccaatggtcatggcatggcaagagctgccccatggcgatcgttgctgttgaaatcgtcaaccgggcgccaatgtggcagttttgccacgcccgcgatccgggacgccacaagcaccgatgggttctgggagttcatacggctggtgcagcagtgtgtcaatagcagccgggatgtgcgcccaaccatggtcgccgtcgagaggaggatcgaagacatcctgaactcggttgtcaggtcatccaccaccgggttcatgactgccggaggcgacacacccagcaacgagccaaatcgtgaagataacggaaacgagccaaatcccagcaacgagatcgccagggactag

SEQ ID NO: 989 - DNA, 534 bp, Oryza sativa
atgcgtacaatgctgtgccgcgatgcaacggatgcaaaaatcctgcatcgctcaataccaaaagctcaaacctcatacttccacgtcatcatcaattgtaaaccgttggatgaatgcgttagattgcttctcagccgttggatggaacgcagcatagagcccaatccatcaagcatcggtgggcctaatatgagataccggaaaaacccaccaggcccaaatacaagtaagcccacggcccagaagaaattactactgcctactcgtctcactcccaccaccggagaaggctccggcgagaaagggcggaggggagagagagtccgctccggcgccaccggcggcggcggcggcgatgtccgcccccatggattcccccaggacgatgggagaaatccgcggccgctgtttaccctccagaacccagggggtccagccgaggcttccatggaagcatctgcgacatggttttgcaaatcattttgcggcagtttggatttctccaatctgcgtgcagttttctcactcgtctga

SEQ ID NO: 990 - DNA, 522 bp, Oryza sativa
ttgtgcgatcttctcaaatcgagggttgcatcgcctgaatttcttgaaaaactcgataatattcagaagtcggtatatcaaaatggtgcagtagatgaaactatatcatgggatatcataagtgcggcagacatatgggacgacattgacaagggtatgaacattagtgatgattcagaggatggatatgttctcattaaacaagaggacatagttgatggtattgcaagcttcatggctgcatacttgctgtcgctgaaacaaactaaggacttgacacctaatcaacttcaacaagaaaaacttaactcccaccttccatttttgccagctcttagcaagaccttttcagctaagaagaggaaaagcaagcttcagaaagcatgggatggaacaaaagttatttataatatagcatcatggagtgcaactgctattggcatctaccagaatccagcaattctaaaagcagcaactgctgccttctggacttcctgccgtgtagcatccaagtttctgtga

SEQ ID NO: 991 - DNA, 517 bp, Oryza sativa
  N_region (444)..(444): n = any nucleotide
  N_region (449)..(449): n = any nucleotide
  N_region (452)..(452): n = any nucleotide
  N_region (459)..(459): n = any nucleotide
  N_region (468)..(468): n = any nucleotide
  N_region (474)..(474): n = any nucleotide
  N_region (480)..(480): n = any nucleotide
  N_region (504)..(504): n = any nucleotide
  N_region (507)..(507): n = any nucleotide
atggcactgcatcaaacccttctcctcctcctcttcgtctccatcgccatccaccgcgccgtcgcccagaccaccacctccaccgctgtccgcggcgacggcaaccggttcgtgacctactccttccccagcttcgccaacgcgctgctccacctgcaggccaacctcacggtgctcaacaacgccagcatcagccagggcgccctccagatcacccccgatagcagcaacagcgccgacggctacctcgtcaaccagaccggccgcgtcttcttctccacccccttcaccctctggtcgccggcggctggtggtgggggcaatggcaatggcaatggcacctatgtcgcgtcgttcaacatggtgttcagggtgaacatattccggacgaacaccagcgaccccggcgaaggcgtcgcgttcgtcgtggcgtccgggctcganccgcngcntcccggnagctacagnggcttnctcggnctcacgaacgcgtcaccgacggcnacnacgcgaaccg

SEQ ID NO: 992 - DNA, 345 bp, Oryza sativa
atgaatgcagcggtggccctgaacacgatcatgaggagatggggcaaggaggcatcatcggagtggaatgttagcggtgatctctgcagcggtttcgccgctgacaaaaacgactgggattactatcccaacatcaacccattcatcaaatgcgattgcactttcagcaacaacacactatgccgcattacaaaactgagggtaaataagttggacgtggttggtcaaataccttcagagctacagaatctcacccgtctagagaacttggacttgaactataattacttgactggtttcattccatcattcatcggaaaattcacttcgatgaaatacttgtag

SEQ ID NO: 993 - DNA, 318 bp, Oryza sativa
atggctagcgccccgaaatggcaagcgaaatgtgcaaagaaaccaggagctagcggccggcgcggggatctcacactccaaccgatcgaccgagctagcaagcaaacaactgaaaccggcatgcatgcaatgcgacgcaatgtgatgcgatgcgacgcaatcatgaaccatgcaccgccagtcgtgacttgcggcaatggcaccgaattgaatgacttcgaactaacgattcgcgttggaatttgcgtcctgtactggaacactgttggatcgatcgggttcgcgcgcctgaccactctttggtgcagcgagctgtag

SEQ ID NO: 994 - DNA, 303 bp, Oryza sativa
atgggtttgggtttcttggatgtttatgtggatgaggttgttgggttgctgggtgagatcagattaggcaggaaggacctgcctactaagctggaggctgactcatcaacgctggatgaacggattgaggatgaagagaatgaagagatggagcaagaaatgaagcacgatgagaatgatgaagaccccattgatgaacctgacctggacaaagatgatgatcttcctgagcctggcgagcactctgctgataaggatgaaagatctgaggatgtggccaatggcatcgtgccatctgactga

SEQ ID NO: 995 - DNA, 5850 bp, Oryza sativa
  N_region (1448)..(1448): n = any nucleotide
  N_region (3396)..(3396): n = any nucleotide
  N_region (3681)..(3681): n = any nucleotide
atggatagggcgtcgaatttcatacctggtccttatcaagaactcgtggatgccaaaccaattagatcgttagctcctatgttccctgcacccttgggaatcaatgtcaaccagtcaagcaccccgcctttggtatgtgtcactccggttggccaatttcctgtcggttttggttctggaatccttcctacctttggttcaactactgccttcactaccacagcaaatggggtttcttatacaagctacaccaataatggagctattgatgccactcctatctcggcatataagaccagaccaggcattgtatcacttgatggcgatgaaccttactcaggttcagcatctggacggaagtccaagagatcatctggttcagctgctgatggttcaaatggagttaagttcaagcgccctaagccagtttacaagaattttgttgctggcaaggagcttgcctttttaccaccttcatccagtgatcccagggaggttgtggaagcagtccacatgacctttgaagcacttaggcgtagacatctgcaactggatgaaatacaagagactagcaaacgggctgacctgaaggctggcgccatcatgatggcaagcaatatcagggctaatgtgggaaaaagggtaggacttgttcctggagttgaaataggggatattttctatttccggatggagctatgtatcatcgggttgcatgctcctagtatgggtggcattgattatatgagtgctaaatttggaagcgatgaggattctgtggcaatatgtattgttgcagcaggtggctatgagaatgtggatgatgacacagatacactggtgtacagtggttcaggtggcaatagtaggaacagtgaggagaggcatgatcaaaagcttgagagaggtaaccttgctctggagaggagcctgcataggaagaacgagatcagggttgtgcggggcttcagggatccattttgcctgactggaaaaatctacatatatgatggcctctataagattcaggagtcctggaaggagagaacaaagtctggtatcaattgcttcaagtacaaactgctgcgtgagcctggacagcctgatggagctgcattgtggaagatgactcaaggatggatagacaatccagcaagcagaggcagggttatattacctgatctatcatctgcggctgaagctctcccagtttgccttgtcaatgaggtagaccatgagaaaggacctgggcatttcacctatgccagtcaagtcaaatacttgaggcccctcagttctatgaaacccttacagggttgcggatgccagagtgtttgcctgcctggtgatcccaactgtgcttgtggacaacataacggaggtgacttaccttacagctcatcaggacttttggcgtgccgcaagccaataatttatgaatgcggtgntgcttgccattgtactacgaattgccggaacagagtgacccaaaaaggggtcagatttcactttgaggtcttccggactgcaaatcgaggctggggtcttcgctgctgggatcccattcgtgctggtgcatttatctgtgagtatactggtgaggtcattgatgagctcaaagttaatctggatgacagtgaagatgattacatttttcagactgtatgtcctggtgagaagacattaaaattcaactttggtcctgaattgattggtgaggagagtacatatgtatcagctgatgaatttgagccactgcccatcaagattagtgcaaaaaagatgggaaatgtctcacgtttcatgaaccatagttgttccccgaatgttttctggcagccagttcagcatgaccatggagatgacagccacccacatatcatgttctttgcactgaagcacattcctcccatgacagaactgacttttgactatggtgttgctggatctgagtcttcagaacttcctgcctgtacccccagattcgagctctggtattattccctgagaatgacgatgggtttcaacatgaactgtgaagagacagtcacttttctttcaaaatgcacatgtaggtcactaatgatgcacgagagcgacagcgatcctgattctgacaggacacactggtatatgagcaatagcgatgacgagtcatttgttgataaagataaagattgcagaaggagcaccgtagccctgctgttgaagaaaggtccatggacatcttgggaggactccatcttagagaagtacatcaagaagcatggtgaaaggaactggaagcttgtgcagaagaacactggcctcttgaggtgtggcaagagttgccgtcttcggtggatgaaccatctgaggcctaacctaaagaagggggctttcagcaaggaagaagagaataaaattattaatcttcatcgcaaaatggggaataagtggtctcggatggctgctgatttgccagggcgtactgataatgaaataaagaactactggaacactcgaataaagaaatgcaagaacaatcgttcgcctttgtatcctgctaatgtatgcaacgatgctttgaatgaagatcaacatgagtctgctgaccccaacgttagggagaagctgaccaataatcatctagaagatactactagtatgtattctgcaccccagttttcagatgcttccatcagtaatatacttgataggagacttgcatcaaaagattatgactccatagaagatcaaagaaaccaaatagaagttgtagcaaaatatgagattccacttcctgtgttgaaaacaacgaacaatgacatatttccatcagcctctatctttgccaaccatggtatttcaaatggcaatctctctgctttgtccacaactgatgctttgcagatggagctccctttaatccaatttgatccaaacaaccagttcgtttactcaagggcttatgcgatgcacctaacaaactttgctttattaaatgatcaatcagaagaattactaaatgatactgatgtattgaactatgtggtgatgaaagaagagctttctggagggagtttgagtcctactattaatatgccatgtgaagcacataactccatggctgcctctaatgagctggtagtgccacaatatgaaggagatgctccacctcttcaagatgatttcacatcatatttctatttgaatgatactaatctatccatattcgaagacacaaatgaattgtttttggaaaacaagttggatactaaagattcgattcgattccatttcgataccattccatggccgccgccgccgccgccgcgggtggcccgcggccgcgatgagccccgacgcggccggggcgggcccaccgtcgtcggagctcgcccgcgtcggcagccntcggggggaaggctcgtggccgccgacgaggcccgcgcgtgcctcgcccgccgcctccacgccgcgctccaggttagggaggagtcgcggcggcagggcgcggcgctggacgagatgcgggcgcgggtggagctccggcgggcgcgggtgggggagttgctggtcgccaggagggacgcggcccggggcgtcgaccgccgcagggagcagctccaggcgcagatcgaccgcgtgctgcgcctctccggcgccgtcgccgccgcgagccggcggctgcaggatgcnaaagaagcgttgtctggagagaaggcgcggcttggggatttgcagaggctgttaaggatgaggcagcagagtatgattggccaggttgctgcattgtaccctgtgaaggtattccatgatctgccgcatgggcgaaacctcaattccaatactaatggagcacataggtctctttcggaagaaaatggaacacttccagaagagaatggaacacatctactcaatgttatcaaactaccacaaatacatgctttgacatttttgggttggcaaattggtaagcaaagaagaaaacaaaatgatatatgtgagaaggatcttcagcggtccgcagctgttctgggatatgcagcgcatgcaattttgctcatagcctcctatcttcatgttcccctccgataccctttgcactttggaggatcgcgatcttatgtgagtgattgtttgccttcagctgaaacagcatccattgcttcagcagagcgtacatgtatcaacatgaccgacccaaaactgacagtttacccccttttcgtggaatgtcaagaagatgaccccactaaggcatcctatgcaatctacttgttgcacaagatttgtgctgtcaagttgatagaggacaaggccatgggtgtcgaggcagatcatggtacgccatgtataaggacgatcttgaggtgttcaatcaggatgagctacagatatgcttctgaaaactgggttctcctcttcccggtcctgctgctctacctgctattcagatcttcgccgggtttcttcgctttccttctgtcccactctcctgtaatcatatgtgccgctcttatccttggtgtgctgataagccatggcagcacaaacgttgctgagatcaaggaagaacggaaatctgtcgccgaggtttcggatcccaagtatgcagatttgtccaggaatatccatttggaagcaaacaagggattttcggcaaaagagaacacggcgagcttaaatgacggtgaaatcaaagatggcttgaattcttccagagaagatgctatcgaagttgttgagatggtgggcaagataagtcatgatagaggatcaacagattcacagagtgatgagatgaaagtagattcagaagataaaccggctggtacctgtaaatggggccgtgccttttctgttcgtcgcaggaagaagctttctgatattaaggtagagcctatcaatgctgctgtggacagtccattagactcatctttggattcaccatttggtagagttggctgccatgatggttcaccaggttttgatcatgatcagacagagggtaccactcctggtactcctagaacacgcattgcttctgtcctggacgagattgaccctctttccagtgctgattccccccatcctgatcccatccaaaatgatgactcggacaaccacatgtcccttcaggattctagaactgtgagagataataattatgaatctgacaagagcaaggccaacaaaaacgatgacaagaatgtcagcactgatcctgcatttcttggaaccgtagatgatgataagaatgtcatggatcttgggtactctgaggtggaaaggcatcgtaggttagagatcttgatggttaagagaagatcaaggaagaacatagtatttgatcctgacagtaacttagacatcgataatgataaggtttgcaagagaaacccatctgatattctttcttgttctgatgagacagaatttcctggctcagctccatccgttctgcatacatggaggaatccgtttgatcatccttttgagcaatcagatgaaagtgatctacatgaacatgtcgcaataccccaccaggacatgttcttcacaaggcatgaaagcttcagcattggcagccaggggagacgtccctcaagatttaagccaccttttatcatcgaagcaatggacattgatgagccaagtgcaagtgatttccagagacaattcagtgacaaaagtgcgtctacattgagtacagttactgaatctgatatcatttcttcagttgctgatcaagaggacataagtaacaacataaaaaatgactctagtagagagtatgaatcaccagagctacctacaatacctacaatgggaagtgatattatatgtgttggaggcacatga

SEQ ID NO: 996 - DNA, 2833 bp, Oryza sativa
ctggtctctcctcatgcttcaaatccgcaccagtggcggggtggacaagctcgggctcctacttctcaatcgaatgggccacctacaccccaataaggtggtggttgtctcgccgccacttccactctcactcggcgccgacatcgtctcggccgtcatcgtcatcgtgggcgccgcgtccatcccggacacgcctaacagcttcacgctgcgtgggaggctcaacgaggcccgcgacttgctgtggcgcatccgcagggccggggcggccaccgccgacgtcgacgccgagctcaaggatatcgtccgcgttgccgaggaggaccggaggtacgagtcgggcgcgttgtggcggcttcttcgttgcaagtaccggccacacctggtgatggccgtgctaatcatgccggcgacaagggtgctgatcggtgccagcgtcaccgtggccttcttgctcctgctcgccttcttcttcatcatcttgccgcgcggcggcacaccgccggaggtggtatcgtcgtccaaggagggcgggatccgggggcgtcgcgatggcggcggcgtattccaggttgagagctatggggagaggtgcgagcacgtcgccgaggaggatggccatgatcgccggcgattcccgcgtggctacgtcgactacctgtacctgttcgactgcgtgttcggtgtggagcggcgggttcttggctacggcgtgatggcggcttggctcgccgtgctgttctacctgctcgaaattaaaaagctcaagattgcacatcagcgcacacggcatcatcgccgacgaaccaccaagatcccgacgcgagccagcttcctcttctctcgtcgccatcgtcccgctcccgttcccactccctccccgccgccgactgcctccagtcgggactatccaagaagagccgcggctgagcggggacgaggagcctcgccctcctcatcggtgctgaacgggcgcgagtggacggagcggcagccggacatgtcccccgacgccgatgcagttgatggagatgtgccgccgactgcgctgcgccccgatgccgccagccgccgccgctcaccccgtcctcccgccgctgctggcaatgaagaaagagagaacgtaggagaggactcactgacagatgtgcccaggccggactttgagaacatcatgggcgagtacggtcgtaccgatgaacacttgaccctccgtatggccgttgatgttaccgagaaccaccaccctcctctcgacaccgccaaagtcaaaaagcaaagcgtcacgtcacgtagcgcagagcggctgcaactcaatgccagcgctgacgtagccgtaggtcgccgggcgacgcgcccactaagatatcgagcagttccggagcctgctcagggggctgggtgcggccgctccggcgatcgccggagaagaagggtggttggaatctggttcgatccggcccgatttggcggagggattcgaacgcggcgtattgggataggaagccgcgccggtggatttgttcgagcagatttggctgctgggggtttgtgtgatgggagatcaggcggcggcggatgcggcggcgagatggtgaccgggagctttagcaggagcacgtcggcgcggctcacagcgaggggcggcgtcgggagcccgcgggtgtcggcggcggcggccgcgcaccgcaagtggtggtggtgggcgccctcggggccgtcgttcgagtgcgctgccttggccttcttcctttcctccgtcgcgctcgtgctcgcctgcgcgctgtatctgtatctcttccggaggtaccctttgtacaatagctccgattgcccgtttgtggagaggggattcaattgcctggcaaatgggaggaaggacaccggctacctgaaatggcggtggaagccaaggggatgcgacttgccgcggttcagtgccagggatgtgttggaacggctgagggggaagagggttgtgtttgtgggggactccatgagccggacacagtgggaatctttcatctgcatgctcatggcaggggtggagaatcccaagactgtttatgaggttaatggcaatcagatctcaaagactatccggtttttaggagtgagatttgcgtcattcaacctgaatgtagagttcttccggtcggtgtttcttgtacaacagagccctgcacctcgcagtagcccaaaaagggtccgagcaattctcaagcttgataagatggataatatcagccggaaatgggagaatgctgatgtgcttattttcaactcagggcattggtggactcccagcaaattatttgatatgggctgctattttgaggctggaggtttgcttaaactaggtacatccattaattctgctttcaaaatggcacttgaaacatgggcttcatgggtgaaggaaaaggtggatttaaaacgaacacatgtctttttccgcacgtatgagccatctcattggagtggttcaaatcaaaaggtatgtgaagtaacagaatttcctacagctgaggccaaaggagatgacagaagtgaatttggagatatactcgctggggttgtggtgaacatgagcgttcctgcaactatcttgaatgtgactttgatgggggccttcagaagtgatgctcatatcgtgctccttatacacgcctccggggttacagattttgtatcattgtctattttgcgttttagacagaacatcacaatcggcaacctggaaccagtaggctacgtggaagaggatgtgaaaaaaccacccatctctattcgacggccgcgacatcatcctgtggggagcgagctgtggtga

SEQ ID NO: 997 - DNA, 2805 bp, Oryza sativa
atggggatccgtactgtccgggcgattcgagctgaggatctaattgtagcaagtgctggggatgataaaaagatctcattatggcacaaaaaaggtcaaaatgtaggacagctaccaacatcaactgttgatcgtggggatgacatagaggagtgcatatattctatcagttttagcaacaagggttcacgatatctttgctctggtgggagtggccacatcgttaggatatgggatttgcagcggaagaggtgcatcaaatggttaagtggtcacactgacaccattacgggtgtgatgtataattgcaaagatgaacatttggcttcaatcagcatgaagggggatcttattctccataatcttgcttctggagcacgtgctgctgaacttagtgacccaaatgggcaggttttgagagtccttgactattcacgtaatagtaggcatatattggtgacagcaggagatgatggttctgtgcatctctgggatacaactgcaagaactccaaaggtctcatggctgaagcaacattctgcacccataagtggtgtctgtatttcgccctccagtgataagataattgctacagttggcctggacaagaagttgtacacactcgattcagggtcaagacgaccaacacacactattcctcacgaggcccctttctcatcattggcatacaatgatgatggtacaatattggctgcaggcacaaatagtggtcgtgtggtattttatgatgttcgaggaaaacctcagccattgactattcttcgtgcatacaatagctcagaggctgtgacaggtttatgttggcaaaggtcaaagcctgtcattgttaacgagaatagttcttctgaggttgctcttctgggtgggagtagtgaagaatctgttctcatgccagatcccttgccttcagcaacttcagcttttcattctggaggtgtcatcccaaatcttcggtcttctttggctgcaaacccaagtggatttctttctacctctacctcgtccactgtggaggaaactccatacaggacacggccattgtctggtggaccattatcaaagctacaggctcctcgtagtaacttcagtctaaaggatgatatggatgtattctctccacttgtagatgttcaacctttcacaccgtccagtggcagcctgtgggatgaccatgggagtgatgaaacaaaaaaggatgataaacttggagagaagaaattgtcgacaactagaaaattcccgtttattgaagacaataatgagccacatccaatctcagactggaagtcaatttccaattcaagacaggatgatgcctcatcagcaaccactacatccatgccatcatggaagagtgaactatctatcacttcacctgagacagcaactggaaatgcattatccgataggttaactcaccgccaacaagtctcgcgctttggggcttcagcctttcagactggcagctttgcatttgcaggcttacaagattcagctccaacaactggtaactcactgaaaggttctctaacaagtaatattttaatgaacctacaaaacaagggtgtcttgagcaatgcacgcccttccctggacatatcaacttctagcctccagagttcactgtcctcaggcttaatggccaagactatgccaccagtaaactccgaccagcctggagcagcacaatctagttctcaatggagaccctcaacatatactgatagagtgagcacatcgtctgttttcagtgaaggattagcatcagcctttggttcaccaaaatcaaagaagactggggcagaaacaaaagatgaactgctcagcagtcttctatcaagacaagaagcagcagctgcctcttcatctgccaaccttgtagcaaacaatggggtggtgccaccacaattgccaacatcaggtttgtcagctgatcaacagggagcttcatccttctcacttcagtatgtgcagcggatgcttgaagaatccctagggtctgttcagaagtccatccatgaggacgctttagccgattgtacttccctcatgaactgcgactttgcgtttgttagtagaaggcgatgtgtggagtttggatttaatattacaggcgcagccatgttcaacaggctctttggtaagcccaaggagcaggccaatgctagtgcgttggccacgcttgataagttaaatgagacccttgacatgctggagaagaaggagaaagtcttagagaaaaaggcagccgcagaactggagagggctaaggagttctcaaaagcaaagaataaaagagcggctatccaatccttgaagagaaaaaagctttatgaacaacaaattgagcagctagggaacttccagttgagaattcatgatcagatgatcatgttagaagctgcaaaagctacgacagaaaccgttgatgctttgaggactggagctgcagctatgaaagcaatgcaaaaggcgacaaatattgatgacgttgataagactatggatgaaattaatgaacagactgaaaacatgaaacaaatacaagatgctttgtcagcccctcttggagcatctgctgattttgatgaggacgaactagaggcagaactggaagaactggagggagcagaattggaatctcagcttctcgagcctgttgcagctccacctgtgcatccagtgcaggtcccaggcaccaggataccaactcgccctgctccacagaaagcatcagctgaggaggatgagcttgcagccttgcaagctgaaatggcattgtga

SEQ ID NO: 998 - DNA, 2733 bp, Oryza sativa
  N_region (1743)..(1743): n = any nucleotide
  N_region (1860)..(1860): n = any nucleotide
atggcatgcaatgaatcgatcgagagccgcatcatcctcaccgaccaatccaatttaaggttggttagcctagctttggatgagcagaagggcagcgtgatcctgtgcacaaccaagaaccaaccccaacacatggaagctgcggcaggggcaggaggagccattggaggtagtggtcgcgaggcggcggcggaggaggaggacggcggcgagcagtggctagaggaggaggcggaggcggaggcggtgtactgcgccgtggggaaggaggcggtgaaggaatggaaggcgaacctcatgtgggtgctcgccgccttcccctggaggaggaggaggagccgcatcgtcctcatccacgtccaccgcccgccttcccgggtcaatatgatgggggcatgggtcccagtaagtcagcttgcagaggaggaggtgaatgcatacaggcagctggaggaggagaggatcagcaaagtcttagatgatctcttggacatttgcaaaagtcaaaaggtcaatgcgagcaagatcatcttctcctgcgacgacatcgcgagaggcctcctccagctcgtcgatgatcatgggatcactgatcttgtcatgggagcagcatctgacaaggcctattcaaggaaaatgcgggcgccgagatctaagaaagctcggaaggtgcaactgaaggcgagcccctcttgcaagatctggtttgtctgcaaaggaaaccttatctgcactagggaggtgaacgaaggactcaatagaacaggatcatcgacaactagcacaactccgaggtcgagcacttctgattactcgaggtcgagatcctcgccacgagtgcacagcctaagcagcgagcaattcggtatgcaggatccagccgaaccgacgacatcatcagttgatcagactcctatcagggaggacaatgccatggaccgtggcactgagggttttaatcatgaagcagttgctgttgctagttcatcaacagtcccagtgtctgaaaatgtagaggctgtacagagatcagctgctgctgttgtgcagtctctgcaagaaattgaagaggactcaccaactccttcagggcatggttcggaggatgctggtgatgtgagcgatgcgtacgacaagttcaaggatgctgtgatagaagccgagaacctcaggcatgaggcatacgaggagactcgccggcgtcaaaaggtcgagcgcgacctcgccgacgcgacaagaattgcgaacgaagcggagagctcgcagcagagggaggcgaggcatcggaaggaggtggaggagaggctggcgagggagcgcgcggccatggagcaggacaggcgagagctcgacgacatactcgagcagacacgcgaggtggacgcccgcgccgccgagctcgagctccagatcacgagctccgagcggatgatgagagacctcgaggccaagctgtcggaatcgtacgacctcctccaccagctccggcgagagcgccggcgcgacgatgtgccggcggaagcaatggcgggaagcgaggctggtgaccagagactgaccttcttgcggctcggcttgccggagctggaggaggcgaccaaccatttcgacgaatctgtcaggatcggaggcggcgacggcagccgtggcagcgtgtacaggggcgacctgcgcagcatggcggtcgccgtcaagatgatcggccgtgacgtcgccgtcgacgaggtcggtttctgccgcgangtggaagccgtcggcagggcgaggcacccgaacctcgtcacgctcgtgggcgcgtgcccggaggcccgcgccgtggtgcacgagttcgtgccgggcgggagcttggaggaccgcctngccggcgccgcgccggcgctgccgtggcacgagctgtgcggcgtggcgcaccgggcatgctccgcgctggcgttcctccactcgacgcagccacgggcgacggtgcacggcgacgtccggccggcgaacatcctcctgggcgaggagtgctgctcgagcaagcttgccggcctcggcatgtgcaggctggtgcggagctccggcggcgtggcgctgtcaaggccggcggtgggctacgtggacccgcggcacctggcgacgggggagatgaccccggaacgcgacgtgtacgcgctgggcgtggtcctcctccggctcgtcaccgggaagccgccgttgatggcgaagcaggaggcgcgggaggccgcgggcggcagcaaggcgtggcacgaggtgttcgacgcgagctctggaggctggccgttggaggtcgccagggaggtggcgctcgtcgggctgaaatgctgcgacgtggaggaggagccagcgggagctcgccgtcccggcgaacttctggaggaggcatgcggcgtgctggaggcggcgatgagcgcggcgccggggaggtcgtggtcgtcggtgtcgtcgtcgtcggacggcggtgagggcggggcgccgtcctacttcgtgtgcccgatcttgaaggaggtgatgcgggacccgcagatcgccggagacgggttctcgtacgaggcggaggcgatcagggagtggctgcgcagcgggcgcgacacgtcgccgatgacgaacctgaagctgccccgccgcgagctcgtccccaaccatcccctccgcgacgccatccaccactggcgcctccgccgcgccatgcgaaccaactttactactggattagatagctactactactag

SEQ ID NO: 999 - DNA, 2189 bp, Oryza sativa
  N_region (248)..(248): n = any nucleotide
  N_region (271)..(271): n = any nucleotide
  N_region (279)..(279): n = any nucleotide
  N_region (308)..(308): n = any nucleotide
  N_region (1478)..(1478): n = any nucleotide
gtcgtccggcgaagggccgcaagaaggcggcggagaatcccggcggccgccgccggaagggcagcgcggccagcacggcggcgaggctcatggagaagatcatgcccagcgcggcggcgatgaagcccagggccaagaagaaggaccagtacctgctcaagcgccgcgacgacgcgcgcgccccgccgccgccgtccatgccggacgccttcccggcggcgcccatggcccccgctctcgacgacgtnccgccggggtttcccttccgatnccccggangccgcggtcggcgacggcggcgcgcccanggacgcggccacggccgccgcggcgccgaagaaggcgaccaagccgaagaaggcaccgcccgcaaacgcgaacccgaggaacccgctgacgccgccgccgctgccgccgcaggcggcgttgccggcgagcctaagaagaagaaaaagaagaagctcgccgagctcaacggcgtggcggtcgccgccgccggcaagccggggttattgcctgctaaggtagaccatgatctgaagcaggtaatatccgagcttcaaagccttcctctcgttgcctcctatgtcgccggccgccgcagcatctctgacgaagctcgctccttcctcctcgccttccgctccaagtctttcaagaagagccatgagaacgatccacccgaggacaacaaggcctctaagcccaatgccgccaccgccgccgacggccagaagccgccggcgaagaagaagccggccgcgaggcccggcgacaccaccgccgcctccgccaaggttgccggcgtcaagcgcgccccgtctgatcgccaggaggagcttgccaccaagaagaaagccaagctcaacaagatcaagacgctcgccactgacaagaaggccgccggtctggagctcgccgccgcggcgcctgcggcggcgaggaagaatgatgcgatcgctgccaggaagaaggagaaggagccggctctggctccggcgatcaagacgccatcgccgacggcgctgatgatgaagttcccgccgaagaccacgctgccatcggtggcctccctcaaggcgaggttcgcgcggttcgggccgctcgacgtcgacggcatccgcgtctactggaagtcccacatgtgccgcgtcatctacaggttcaagtccgacgccgacgtcgcgctcaagtacgcgcgcgccaacaccaccatgttcggccaggtcgcgcccaactactacctccgcggcgtcgagtcggacggcgacctcgccgccgacgctgcacctccgcctccgcagcagcgctccgagcttcgcctcatggagacggccccgttcaggcccgggacctccggcggcaactgcgcgccgctgccgctgtccagggccgtgccggcgcgcgcggtggttgggcagcagcccaagtcgatcctcaagaagacggtcaccgacgacggcgcgccgtcggcggcngcgctccgtgatgccccgcgggtgaagttcatgctcgacgccggggacagcaagctcgagccgccgccacctgcagcgccggcgaacggcggcggagacgccgccgcgccgctcgccaagagcgccaccaagtcggtcgggttcgcgcaacggcttttccagccgccggcgcgcccggcacagcacccccacctgcagccgccggcgcgtccagcgcagcagcctcctcgcccgccggtgacccagccactccctccgccgccgcctctccatcagcaccagccataccaacctcgccacaccgacgcgctgccgctgccgctgccgctgccgccgccaccgccgccgccattctccgtgcagcagcagcagctccctccaccgccaccataccacctccgccacagcatcgacggaatgcaccaccagctccccggaccaccgctgccgccgtcgtaccagcatcgcgccgccggcggcgtcgtcttccccggacagcatcagcagcagccataccgccccaacaacgacacccagctcggcctccccggcgccggcgccgccgccggtgacgtcacgccggcgtggaagagaggagggagagagttcgacgaggagttgatgagggtgatgcggggaatcgccaagatggtggagccattgacggacaagaacggcaacttcccctaccacctcttcacctcagcttga

SEQ ID NO: 1000 - DNA, 1893 bp, Oryza sativa
  N_region (1854)..(1854): n = any nucleotide
atgggcaccggcggcggcagggtcgccctcgacggcggcggccggcgccggaggaagctggacgaagaggatgatgaggagtatgtggcggacgacgacgaggaggaagacgaagacgaagacgaggaggagtaccaacaggccgccgccccctccgacgacggcgaggaggggggcgacgacgaagcggagccggaggacgaatctgatgcggatttcgtcggggacgaggaggaggaggaggaggacctcgaagacgaagatgatttggaggaggtcaaggcgccgcgccccaagcgcccgcccaaggggaagccgccgccgagatctcgccgtcggaggcaaaaggacgacgacgatgactacgaagaggaggaggaggaggacgccgacttcgatccggacgtggacgaagacgacgaggaagaggtagatgaagatgaagaggaatttgagcaagatgacgacgattccgatgattttgccccgattcgcgtcagaaagaccagcaccaagaaccacgtggccaagcggaagccaccacccggccgtaagaagaagaagaggaaaccttctagggtttctaaggcaaagcctaagaagcccacctcagggcgccgccggaggaagcgatgggccaccgatgacgacgaggaagaagaggacgatgcggatttcatcgtggaggacgatcaggaagaagaggaggacgaccaccgcccaaagaagaaggccaaggctgctaggaagaccagggatgtcacgccggagccggatgtcgaggcaagcgcatggccggccgtcgaatcagacacttcagaattcgaattcgtgacatctgatgaagaagctgctgacaaggaagcaccagccgctgaaccagcaaaaaccaaggggaagaagggcaggaagaggtggggatctgggtcagagtcatcatctgattctgattatgtcatatcagagcaggaactgaaggatctggaagtctccatgcctccagatgcagctctgcaatcacctgcaaccctgccgcgccggacctttctttcaaggagggtgggggagaaggggaaagagcctgaagaggcttggaaacagacatgtgggatatgcctctcggaagaacagagagccacgatacagggtgtgcttaattgctgcgcacattacttctgcttcgcttgcatcatggagtggtcaaaggtggagtccaggtgcccattgtgcaaacgccgattcacaacaattaccaagtcatcaatggcagatctagggcttggatcaaggaaagctgtcattagggtagaaaaacgtgatcaggtgtatcagcccacagaagaggaaatgagacgttggttggatccgtatgaaaatgttgtatgcatagagtgcaatcgtggatggaagaccaagtaccagaaggaaactgggtactgcggaggatgtagatccggtggggagggcccctctgcacaggatacggtggttcactgcagagaaagtaataccaaccctgccaacagtagttctggatcatttggctcagccacaccaagtggagtgttccagagaccaccaccaatcaacacccaaccttctctacaaggattcgatctaaatctctcaccaagagaaacccctgatgaagataagcgagaagagtcacatgtttcagctgatgctgtttcgactcctactggaaggcatgccactctcgataggaggcgggcctttaaccgacgaattcgcatccttctatttagaccaagggtcacacctaatgggtggcagaatccgattcagtctgacaggacaataccagagaatgaacaaaatccacagagcacgtcnactccaactgaagtgaaccccatcatgttccagggatag

SEQ ID NO: 1001 - DNA, 1872 bp, Oryza sativa
atggaggactggatgccaccacccacacccagcccgagaacactcatgtcaagcttcttgaatgaagattttgtctctggttcattttccaatattttcagtgatcatgagagcaacaaaccccaggatcagtttgagagaaacagagagcttgtggatttgagtaaggaagtgccttcccaattcgcaagacccgcattccagagggatgcttccctggatcatagcttggtcagtcctacacagagatcaaactcgcatggtggtttggcagagcgcagggctgcgagggctggtttcagtgtcccgaaaatcgatacatcccgtggtggttcatccacagtaattcgatcgcccgtggcaattccaccaggtcttagtccaacaacacttctcgagtcaccggttttcctttacaacgcaatggcacagccttctccaaccactggcacactgccatttttgatggcttcaaatgctaagtcaacaataccgtcagctaccaagatggacgaagattgcacatttggcaatgacactttctccttccaaccgcatgtagggtcgagacggccaaatttctccgctgcagaaaagggtcccaatgcttgtcaccaaaaccaatcgctgtcgaatatccatcagcgggaatccagtcttcagtcaagctttactgcagtcaaagatatcactgatgaaaaaaacattaaaacaaagacatctgactccatgtttggtgataaccactcttctgatgaacaagatgatgagactaaccaaaatggagaaaactctatgccacctccgaaccaccgttcaggtgtccctctgtcacataccaatgatccagaagtgaatgtcctagagaaccgcggttcacagacatgccataactctgcatccttgtgggacaatgccaaaaatgattgccttcaagatgttcaaagtgaagttattgaaacaagaacagctgcttgtcttccagtatcaaccaattgtgatacatctatcatggagtcccaagatgcagttgatgtgtcgtcaacactatctaatgaggaggatgatagggcaacgcatggcacggcttctatagagtgcaacggggatggagatgagactgattccaagagaaggaagctggatgctttgacagctgcaactgctgctattaccaccaccagtaacattgacatgggagctgcggcatcgagaggtgtccgggagcctcgtgttgttgttcagacaacaagtgaggttgacatccttgatgacggttaccgctggcgcaagtatggacagaaggttgttaaaggaaatccaaacccaaggagctattacaaatgtacgcaccaagggtgttcggtgcgcaagcacgtggagagagcatcgcatgatctaaaatccgtcatcacgacgtacgaggggaagcacaaccatgaagttccagctgccagaaatagtggacatgggagctctggatctggaaacgctccatctgcaccgcaatctaacggctctcagcgcaggcaagaacaagggcaagccagcttcagccagtttggtggcgcggctcccttcagctccttcgttctcccaccaagaaaccaatttggaccatcggcgagcaatttcccctttgggatggtcccgccaggcatggcgattcccatgccatctctagggtctcttgctccagcaaagatggctggtcatccatccaccatgcagggctaccaggggctcatgattccggaaggagagatgaagacagagcccatgtcgcagctcggcttccccgcggtaaaccaatcttcatcatccttccaacagatgatgaacaggcctccatcatttggacctcagatgtaa

SEQ ID NO: 1002 - DNA, 1689 bp, Oryza sativa
atggccgcggacgatgccgcgcggagcagcagaaggatggatctgaacctctacctcggcctcccccgcgccccgcgcctgcgccgccccgatctcggctccgacctcgcgctcggcaccccgatgctctcctcctcgccttcctcctcggcggcctcggccgacgcgccgccgctggagacggagccgctccacccgccgtactcaccgccccccgccgagcttgtgcgccccccgacacctctgcccgagccgtacgacccgtcggctcccgaggcgcacccgccctacgtgccgcctcccgtgccgcccccggaggcgatacctgagctcgctgacgaccttgagttcggcttctcccacccgccgcttctgctgcggcccagcgagctgcttgggtgggtagaccggccatcgtcgtcgacggcctcctcttccttccgcccggagcgtgtcgaccgctaccgtccccccgtgatctgcctgaatagccgccagagtcgctgcctccgtccaagacggttcaggtcggaccttccgcctctcggctcggaggcccctgccctggagaacgacgctgcagcacaaccgccaccgcaagagcctatgcaagatacggttgaagagaacaaggtggtcgccgatggcgctatcgtgggtgcctcagaggaggagccagccgaacgtggcaagagcgttgcgatgtttgagtgcaacatctgcttcgagatggcttccgagcctgtggtaacttcgtgtggacatctcttctgctggccttgtttgtaccaatggctgcatgtccactcaactcacaaggagtgccctgtctgcaaaggcgaggtcactgaagggaacatcactccaatttacgggagagggaattcgacttcggacgcggaaaagaaggttgcggaggagggaaatgtatcaggccctacaatcccaccaaggccacatggcaatcggctcgagagcttccggcagaaattccaccatttgcgcccgatttctagaaggcttggcgaggcacatgggatattgtcttcttggaggcgcatacttgatcagcagattatgaatagtgtgagtaggtttgaggggcctcctgaatcaactgtccaggaaatgattgatcatgctcatcatgctagccgtttaggtcgaattactactagaatgagggcaaggaggttgcagagggaagccgaaaactctacatttgttgcttcttctgctgcggagagtgggctgccagcaaacagcacatcggatctgcctaggcgtagctcaagtccattttcctcggaaagaattgatttattgcaacactttgttgaccttgcaagcacggaaagattggcaagcgctgtgagtgaccttagaagaatggttaggccgagcccttatggagcatcaacttcatcaaatccaccaaatccaccaaataccgagctgctgccagttgatgggaatcatgttgccgttgcactagctgcagatcaagcttccaattcaagcaccatggctgtaattcaggaggatgctgcttttactgaaagcacaggggaaccaagtaatgcagggtcttcgagatccctgaggaggagaggaagaaatgatgccttaggttctttggatgtggatggtgtgggactacaccggaacaagagaaggcggctgaactga

SEQ ID NO: 1003 - DNA, 1461 bp, Oryza sativa
  N_region (468)..(468): n = any nucleotide
  N_region (474)..(474): n = any nucleotide
  N_region (660)..(660): n = any nucleotide
  N_region (686)..(686): n = any nucleotide
  N_region (691)..(691): n = any nucleotide
  N_region (696)..(696): n = any nucleotide
  N_region (1252)..(1252): n = any nucleotide
  N_region (1254)..(1254): n = any nucleotide
  N_region (1291)..(1291): n = any nucleotide
  N_region (1358)..(1358): n = any nucleotide
atggcgccctccttccggctctcttctgcacccgagtcggccgacgaagcaacagctcataataaggagatatacgaccaactccgacgagtcgcagagacctttccgtcggctcccagcctcatcggcctcccgtgcagtcgccacccggacgggtggtacacgttcacgaatggggttgtgagctccatggtgatcaaggagcacctgacggcgcgcgccaccgacatcttcctcaccaccttccccaagtccagcaccacttggctcaaggcgcttctgtactcgactctccaccgcggaactgacgagctggtggcgcacagcccgcaccagctcgtccctttcctcgagtcccaggtgttcgccaatgaccggatccctgacctgagctccttaccttcgccgcggttgtttatgacgcacatcccatcccagtcactgccagactccgtcgctgcatccggntgtaangtggtgtacctttgtcgggaccccaaggactgcttcgtctcgctctggcacttttggaacaggttcatgccgtgggacatcgacgaggcgcaccggcaattctgcgatggcgtctcgcagtttgggccgttctgggagcatatcctcggctactggaggtggcacgtcgagaagccgaaccaggtnctcttcttgacctacgaggagctcgncgccnacacnctcggccagttgagacgccttgccgagtttgtcggatgtccattcacgacggaggagcagaagcacggggtggataggaatatcgtggaggcctgcgcattggagaacatgtccggattagaggtgaatcggtcgggaacgatcaccatagtcgatagcactgtcccaaacaacacgttcttccggcgtggcgtggtcggagattggagaaaccacctgacgccagagatggcaaggaggattgatgagattacaaagagcaagtttaaagggactacacacacttcatggcttcctcctcaactgccgaagcggccgacggaacgtctcacatggaaatctatgaccaactccggcaagtcgtggagaccttcccggcggcagtcagcggtcatcggccaaccatactgtcgccaccctgacggatggtacatgtccaggcggggggttgtgagcgccatggccatcaagaggcatctgatggcgcgcaccacggacgtcttcatcgccaccttccccaagtccggcaccacatggctcaaggcgcttatattcntntcatggaacattgatgtggctgtccggcaattctgcnatggcatctcgcatttcgggccgttttgggagcacgtcctcggctactggcggtggcacgtcgagangccaagccaggtgttcttcttgacctacgaggagcttgcagctgacacgcttggcctattgagacgtttggccgagtttgttgggcacccgtttcacggttga

SEQ ID NO: 1004 - DNA, 1146 bp, Oryza sativa
atggcgtaccgccggaagccgcagcctccgcagacgccgccgtccttggaccaccaccaccaccaccacaccccctccggttcttcgggttatgaatacacatccatgaagaacttgaatgaggctaagtacggattttggggggcccttgctcggaaagccaagtcttttctggacgaggatggttcaccagggcagtatgattccccggcgaggcagcagccgtcaagagatgcgccgccggttggtgtccagagattagcagcacagtctaaacttttgacttttgctaatgatgttaacacttattctgtcatcatgtatacacgctcacaacaaccaccgtctgaaacatggaaatccgagacacctccatctcataagaggtccgaggccatagcttcctccctcaactatattggtggcacaataaaaagtgcacttgaagaaggccggacgattgtagaaaataaaacagccgacattattcatgaaacacgcaaattgaacataagaagaaaaggagctggctcaactacacaaggagaagctccacaaagatttactcaaaggaatcttccacaaaatccacttgactacgaaactcaattgaaggcatctcgcgacgttgcaaatgccatggcagcaaaagcaaagctgctattacgtgagctgaagactgtgaaggccgatttagcttttgcaaaggaacgttgcgctcagcttgaagatgaaaataagattttgcgggaaagtcacgataagggtgataaccctgaagatgatgatctgatccgcctccaactagagacactattagctgagaaggcacggctcgcacatgagaattcggtgtacgctcgagagaatagattcctacgagaaattgttgagtaccaccaacttactatgcaggatgttatatatgtggatgaaggcattgaagaggtcactgaggtctaccctacacaagtattaccacctgcaccttctcgggctggttcaggccttggtcgctctgtaaccccagctactcccaagactgccagctcatcaccttcatcaacatccattgttgtaccagaaacttgtccggtcgttccagcctccccaaagtcgctttctcggacttcatctaagcaatag

SEQ ID NO: 1005 - DNA, 1146 bp, Oryza sativa
atggatgacaacgtggaaaactatatcaatttcctatcagatgattgcttgatttgtatatttaacaagcttgaaagtgaatcggacaggaatgcttttggcttaacttgtaagaattggtttaaggttcgaaacattgcccggaaatcaataattttccattgttcttttaaccctaaagtatataaggagcacgccaattgcctttcaaagttattggcccgctcaccttatcttaacttggtctccctcgctgggcttacagaactacctgacacggctttaaatcagctgagaatttccggagcatcattgcagcccctttctttctactgctgctctggtattacggatgatggtttagaggtggtctcaatcggatgccctaatttggtgagtcttgaactctaccgctgctttaatattacagatcatggtttggaaaatctttgcaagggctgccatgctttgaagagtcttaacctgggttactgtgtagccatttcagatcaagggattgctgcaatctttaggaattgcccgaatatttccacaattatcatagcatattgcagaggtttatccggtgttggattcagaggttgtccaggtacactttctcatctagaagctgagtcgtgcatgctttctccagatggtttgttggatgtagtgagtggtggtggactggagtatctaaatttgtacaatttgaaaagcccaactggacttgatggcctggacagagttggttatgcgagaagtcttcggtttttaaacctcaggatgtgccgttaccttaccgatgattctgtgacggcaatagctagcgggtgtccattgattgaggaatggagcctcgctgtctgccatggagttcgcttgcctggatggtctgcgattggattgctctgcaacaagctgagaatcttgcatgttaaccgttgccgaaacatttgtgaccaaggtttgcaggctctaggggatggctgtgtatgccttcaagttctgcatatccatggatgtggcaagatcactaataatggtctggcatcatttagcattgctaggcccaatgtgaaacaaagggctgatgaagtcatgtgcattggcccctccattgaggatttattccgattgcaatga

SEQ ID NO: 1006 - DNA, 1125 bp, Oryza sativa
  N_region (678)..(678): n = any nucleotide
atgtctaagagctacattactgctttatcaaatgatgatgataataatgacactcctatcataaatgaaaatcctactgtttgtctaaactttttaccaggaaacagatgcttctttgatgcttcttggaaggacaatctaacaggttttggcctctttcttcataatccaattaatcatcaagctatctttgtgcaggggaaatcaagtctctacaaatcaccaatgcaagcagaacttgcagccttcaaacttgctctcttcatctgtgatttccttaaaattgcaaatcctctttttctttcagacaatcaagagctaacactgttacttcaaaatactgattacatcaatcagaattgccactggagccttttacctcttcttgcacttttaaaaatttttgcagaagtcattcttcatttcgccgttaaacttgtgaaggagaagaacctaggcgaaattgtgaacgtgatttcccacgatattttgggggattggccattaatttatgggccttccactgtatttggttcgcggaccgaccgacagctcgctaatgattccggcgtgatgttgctgcgccgcctggccgcgtccgccctccgccgtggcggcgccaacggcggcgtcctggccgccgtccgcgccgagatcgcgcatgagctctcctcctcnaccccctcctctcccccgtcgctccaatcccaggacattcccgacttcgccaccgtgtcggacccgccgcgcgggcaggaagtgctcctgcgccgccgggatgcttccgaggaggtcctcgtgtcggcggtgctcgagccgctgcggttcgaaggggaggagcccctgcccagggacgcgctcatgaaggtgttcgtcagtaagcctgatgtgaagccggtgatgcggttcgactgccgcgcgtttgcagatgaaggtgatggcggctctgctgactatgatgttactaatgcttgttatcacccgtttgctggcgacgctggggaagacaagtatgaagggcctgagttcagtgggctcataaacttggagttcctccaagaaatctggaaaaacaagcactttcatggcattttggtggagctctgtaattctagtgaccggtag

SEQ ID NO: 1007 - DNA, 1113 bp, Oryza sativa
atggcgtcgaggagcatatcaagctgcacaactgagacggcaaaaggcatccacaggttcgagatcttcagttacagcatgatgaacaccgaagccgaagacgactccatccggtccggcgtcttcaacgtaggaggattcgattgggcgttgctttactaccctgacggcatcgacgacgacagcaagggctacatcggcgtctacctcgagctgatcagcaagaacggcgagccatgggcactcgtcgacgtgaatctgatcaaccagctgcaacccgggcaacctcgtcagctgttcaccaagaccgatgtgcctaccccgttcagatcttcaagctttcaggagtctaccttggggtctctcaagtgcatgaagaggagcgatattgagagcactccagggttcatcgtcaatgactgcatcgtgatcgaatgcaatgttactgtcatctatgagccaaaagtgtctaaaaccagggcattgtgtgacgctgaaactagttcggcattgcgcgagatcgaggtgcctcctatggagatatcgtcggatttcgccaagatgttgaaggacggtgtaggagcagatgtgacattcagagttggagaagacacattccgtgcccacagggcggtgctagctgcgaggtctccagtatttcatgctcagctctgtggaccgatgaaggagaagaaggagacacaaatgcaggagataaccatccaagacatgcagccatctgtcttcgaggctttcctctatttcatctacaccgattgtgttccaagaatggatgatcttggcaatggtgagaagatgcatttgatgatgcatttgcttaaggccggtgaccggtatggattggagaggctcaggatcatgtgcgagagatttctagctacgaacctcgacacggagcatgtatctgcgatactgggtctagctgacttgctagatctcaagaagctcaaggaagcttgcatggagttcatggtcccatctgagagaatggatgccgtggctgcaagtcaagggtaccagcagctgaagagagcatttccctctctggcgtttgaagtgtgggagaggaggagccgtgttcgcaggaattaa

SEQ ID NO: 1008 - DNA, 1062 bp, Oryza sativa
atggctcaccgccggatcgcgctcgccgtcctcgtgacgctgctcttgtcggcgttccgcccttgcctggcgcaacagagcaacgacgacacgagcaaacaccaccggagcgccacggccggcgggttcacgccgaccaccgtcgtcgtgctcgtggctctcatcaccgccttcgtcctcctcaccgtgttctccgtcctcatcaaccgctgcgcccaggcgcgcgctcccccgcgccgggcgttccgcagcacggcgtcccatcagcccgtcggcggcgccgccgccgcgtcccgcgcctcgcgtggcctcgacaaggaggtcgtggaggcgttccccacggcggtctacggcgacgtgaaggcgcgcatggcggcgaagtcggggccgctcgagtgcgccgtgtgcctcgccgagttcgcggacagcgacgagctacgggtgctcccggcgtgctgtcacgtgttccacccggactgcatcgacccctggctcgccgccgccgtcacgtgcccgctctgccgcgccaacctcacggcgccaccggtgtcgctcgccgccgccgagagctccgacctgacggcgccggaggaggcggtgcaggaggaagagtcggaggagctcgacgaggcgtccctgatggccaccttcacgccggaatccgtcatcgacttcggcgcgacgcacgaccatgaattcgacagagcagggtaccctcactaccggaggacgcagtcggccatggacgccgcgccggaccggcacacgctgaggctaccggagcacgtcatgaaggagctcgccgccgaccgcaggcaccggcgcgccgcgagcctcgccgggtacccggacagcgtggagaggacgccgaggtggctgacgtcgctctggcgatcggtgtcgtggcagaggcagagccgggcggactgggacgccggagaggagcacggcggcagcaaaagggttcacccggtcgccggagctcaggacgagacacccagcgggtccggctccgatgggagcaaggagaactccgattctgacgcgttaaaccgagtttga

SEQ ID NO: 1009 - DNA, 1047 bp, Oryza sativa
atgtacgaccacaacacgcagaggcctaggggctttggattcatcacctatgactcagaagatgcggtggacaaggcactgcacaagaacttccatgagctgaatggtaagatggttgaggtcaagagagctgttccaaaggagcaatcacctggacctgctgcacgttcacctgcgggagggcagaactatgctatgagcagggtccatagcttcttgaatggtttcaaccagggttataacccaaaccctattggaggttatggcatgagggttgatggaaggtatggtctgcttacaggcgcacggaatggattctcttcatttggccctggttatggaatgggcatgaattctgaatctgggatgaatgcgaattttggcgccaattctagttttgtcaataactccaatgggcggcagataggttcattctacaatggtagttcaaacagattaggtagtcctattggttatgttggtcttaatgatgattcaggatcactattgagttcaatgtcaaggaatgtttggggtaatgaaaatctgaactacccaaacaaccccacaaacatgagttcttttgcaccatctggaactggaggtcaaatgggtattaccagtgacggtattaattggggagggcctactcctggccatggaatgggcaacatttcaagccttgggctggctaaccttggccgtggagctggagacagttttggcttgccttctggcagctatggaaggagcaatgcaactggtaccattggtgaacccttctctgcaccacccaatgcatatgaagtgaacaatgcagatacatatggcagcagctccatttatggagactcaacttggaggttcacgtcatctgagattgatatgcctccttttggtaatgaccttggaaatgttgatccagatatcaaatcaaacataccagcaagttacatgggcaactatactgttaataataatcagacaagcagagcctcctcgaccgccatcgtgcccccaatctccttgactaccgccgcgacatga

SEQ ID NO: 1010 - DNA, 1023 bp, Oryza sativa
  N_region (497)..(497): n = any nucleotide
atggcgtctgagctgaacagcagaatagtcaagctaactgttggggactttggaacaggagcaacatgcgagagaactgcaataccttctcgtcggcgatgggcgaggagggacaaggcagccgggacgagggacggcggggtgaggctgatgctgccggagagccgcgagcccgcgacggacgaagctgatgcggggcgaggagcacgccggcggacggagatgaacgccggggacgatggccgccggcggttcatcaagagaattgaagaccttgttgttgtgtcgtttccaaatattccacatgacggcaaggaggatagagcgccagactcgtggagtggcgggttgtctgggtggagggatgtcccagacaccttcaagctgcggcagggaggcgatctgttgttcgtccaggccaaagttgaggtgggggtcggaatgccacacgcgcgcgcgcgcgccgggccgggccgtgggcgaggcgaggcgaggcntggctggctggcggcgtgcgcgggtgatcaggtttttggggagtgcctcctgcacgactgctcatcgccatgtctggagttgctgccgccgctattggcggaggtggtgcgccgccgccgacaggagctgcgccgccgccgacgccgacaggagctggatccggagctggtgcgccaggaggaggaagaggctaagttcgaggcttcggattgcctgttccgtggagcattgatcagtgtactcgctgacaacatagtggacgtgtacatgcacatgccttctgggaaggacatgtgggatgcacttgaggccaagttcggagtttttgacgccggcagtgagctgtatgtcatggagcagttctatgactacaagatggtcgatgaccgttctgtagtagaacaagctcatgagattcagatgctggctaaggaacttgagaacaacaactgtgagttgctggacaagtttgtggcgggtggcattattgccaaactaccaccttcttggtcggactttgtgtaa

SEQ ID NO: 1011 - DNA, 1020 bp, Oryza sativa
atgaagttcggtgcaatatatgaagagtatcttcgggaacagcaagacaaatacctaacaaagtgctcacatgtggagtacaaacgtctcaaaaaggtactgaagaaatgtcgagttggtcgctcattgcaagaagactgccccaatggtgaccagcaggaggggaacaacgaatctccagatatttgcaaatgcaattcatgcacattgtgtgatcaaatgttctttacagaacttactaaggaggcttcagaaatagctggctgtttcagctctagagtacaacgtctcctaaatcttcatgtcccttcaggatttctacgctatatttggcgtgtaaggcaatgtttcatagatgatcaacaaatcatggttcaagaaggcagaatgttacttaattatgtaaccatgaatgctatcgctatccgtaaaattctgaagaagtatgacaaaatacatggttctgtcagtggtagagatttcaagagcaagatgcaaactgatcatattgaactgttgcagtccccttggctgatagaactgggtgctttccatctaaactgcaatagttcagatattgatgaaactgtggggttccttaagaatgagttcttcaagaatttttcctgtgatttgaccgaagcacgaccactaatgactatggctatttctgaaactatgaagtatgagtacagcctaacttgtccaatttgcttggatactttgttcaacccatatgcacttagctgtggccatctcttttgcaaaggctgtgcttgtggagctgcttctgtgtacatctttcaaggtgttaagtctgcacctcctgaggcgaagtgtcctgtatgccgatcggatggtgtctttgctcatgctgtgcatatgactgaacttgacttgctcatcaaaacaaggagcaaggattactggagacagagactgcgagaagagcggaatgagatggttaagcaatccaaagaatactgggactctcaggctatgctgtcaatgggaatttga

SEQ ID NO: 1012 - DNA, 948 bp, Oryza sativa
  N_region (444)..(444): n = any nucleotide
  N_region (691)..(691): n = any nucleotide
atggccaagctgatcctcgccaccttcgccgtcgtgttcctggcgctcgccgccacctccctcgcaggcgaccccgacatgctccaggacgtctgcgtcgccgattacaagtccctccgaggcccgctgcggctgaacgggatcccgtgcaagaggctggagaacgtgacggcgaacgacttcttcttcgacgggctgacgaacgccgggaacacgacgaacgcggtggggtcgctggtgacggcggcgagcgtggagaggctgccggggctgaacacgatgggggtgtccatggcgcggatcgactacgcgccgtgggggctcagcccgccgcacacccacccgcgcgccaccgagatcatgttcgtcgccgagggcaccctcgacgtcggcttcgtcaccaccgccaacaagctcttcacccgcaccgtcagcaagggggangtgttcgtcttcccgcgcggcctcgtccacttccagaggaacagcggcaacacgtcggcgctcgccatcgccgccttcaacagccagctccccgggacgcagtccatcgccgacacgctcttcggcgccgcgccgccgctgccgtcggacacgctggccagggcgttccagaaaaatgcttgtacgttgcaacaggccagtgcaagaacagggaatgccaagagtgaggtcttgatggctttcggangggttaatgactgcaaggatgacccaaaagcaaccgacaattatggatactatgacagaggaggcaagaggaacaaagttggcgaaaggcttgtaggcaggattctgtcgggaagaggcctggacacaaggaagattgtgaaggcaatgaaagcaaggaggtgtaagataaacaccacttttgtgacactggatgtgaaaccactgcagcaaccacgactatcagggacaacaatattgccaaatgctggggagtaa

SEQ ID NO: 1013 - DNA, 873 bp, Oryza sativa
atggagagcgactgccagttcttggtggcgccgccgcagccgcacatgtactacgacacggcggcggcggcggtggacgaggcgcagttcttgcggcagatggtggccgcggcggatcaccacgcggccgccgctgggagaggaggcggcgacggcgacggcggcggcggcggcggcggtggcggggagaggaagcggcggttcacggaggagcaggtgcggtcgctggagacgacgttccacgcgcggcgggccaagctggagccgcgggagaaggcggagctggcgcgggagctcgggctgcagccgcgccaggtggccatctggttccagaacaagcgcgcccggtggcgctccaagcagatcgagcacgactacgccgcgctccgcgcccagtacgacgccctccaagcccgcgtcgagtcgctcaggcaggagaagctcgccctcgcagaccaggttcgtgcgccattgccgaccaatcatcagctatacctgctgcatacgtgcacgcatggtgacaatgcgcgctttgccttcttgcaggtggatgagctgagggggaagctgaacgagcggcaagaccagagcggcagctgcgacggcggcggcgccgaaggggacgacgacgacaagaggaatagcgtgatgaacgcgagcagcagcggcctcgtggaggaggactacgtgagctgcctcgcggtgccggtggtggacgtctcggaggacggctcggcggcgtgcggcgggtcgtcgtacgagtacgaccatcacctagactacttgggcggcggccagctgcccgatccgttctgcggcatgccggatctgtgggagatatggccaatggtggaatggaacgcagtagcatga

SEQ ID NO: 1014 - DNA, 843 bp, Oryza sativa
atggcgctgaccaacttcatcctgacggtggtgggcgtgggcacggcggtgctgctgctgcggagcgacgtgaagcagtcggcgtccatcttccgccgcaacgtccgccacatccgcaagtggctcgaggaggagtccgccgccgccgccaagatgcaactccggaggcgaggcgtccaattaatccgttcatctcccgcgacgcgatgcttctcgtcggcaaaacttcctctctccggcgccgctcgccgcctccgactcaccggcacgaccgcgcggctccacatggacgccggcgaccagtcgccgaaggaggtgtactccgtgtgggcgctcccgcccgagcccgtccgcgcgcggctccgcggcgtcatggccggcctccgcgccgcgcacggcgggccggcgttcgagccgcacgccaccgtcgtcggggccatccgcctccgccgatccgccgccgtagaggcgctccgcgccgccgccgccggcgtccggccctacaccgcccgtgtggtcggcgtcgcccgcggtgacttcttctaccagtgcatctacctcctcctcgagcccacccccgaggtggtggaagcgagcgatcattgctgtggccactttgggtacgagagatcaaccccatatatgccacacgtcagcctcttatatggagacctgacagatgaggagaaggaggtagcaaggaagaaggtagaggagatagacaaggagatttgtggattgcagtttgagatctccgagcttgcgctgtataggacggataccgaggacaaaagcttggagtcatgggaattggtggagatctgccaccttgagaggaagtga

SEQ ID NO: 1015 - DNA, 756 bp, Oryza sativa
atggcgggcgacggcgaggcgatcccggaggcgtggaaggagcttgttcgctccctgggaaccgagcagctcgtcggcgccatctacgtcgccctcgacgacttcaacgcgcgggagcgcgacacgatcccgcccgagctatggcggcggctcggcgaccgcagcgccgcctacaggaaccctttcgtgagcgatggaggatcgagctccggctccggctccggcgaggttgagaggatcaaggtcaagctcgtggccgtgggcggggaagacggcagcggcggcggcggcggcggcacgagcgccgactcgtcggaggatgccgtggtcgacttgctacgcgacctgcaggccgtgccgatgacgttcgagacgctggaggcgagcaagatcagcaagaccatcagcggcctgaggaagcactcgtcgtcggagaagaaggcaaacacggcggcggctggccacgtcaagacgccagcggcggcgccgaagacggcggcgtgcagcaagcgcaaggaggcgcccgcgccgccggagatggacgaggcgaagctggaggcggcgaggaagaagctgagggagcgttacacagaggaagagacggcgaagaggcagaggaagatacagatcatcaacaacgcgccggggaaggcgaagcagcgccccgccgtcgtcgagcagcggcggcgcgtggtccgggacacggtggtcgccgtggcgagccgtgctcctgtgcgttcctctctccggatgtag

SEQ ID NO: 1016 - DNA, 753 bp, Oryza sativa
atggagccatcatcacaacctcagccggcaattggtgttgttgctggtggatcacaagtgtaccctgcataccggcctgcagcaacagtgcctacagctcctgctgtcattcctgccggttcacagccagcaccgtcgttccctgccaaccctgatcaactgagtgctcagcaccagctcgtctatcagcaagcccagcaatttcaccagcagcttcagcagcagcaacagcgtcaactccagcagttttgggctgaacgtctggtcgatattgaacaaactactgacttcaagaaccacagcttgccacttgctaggataaagaagatcatgaaggcagatgaggacgttcgcatgatctccgcagaggctcctgtgatctttgcgaaagcatgtgagatattcatactggagctgaccctgagatcatggatgcacacggaggagaacaagcgccgtaccttgcagaagaatgacatagcagctgccatcaccaggacggatatgtacgatttcttggtagatatagttcccagggatgacttgaaggaggagggagttgggctccctagggctggattgccgcccttgggtgtccctgctgactcatatccgtatggctactatgtgccacagcagcaggtcccaggtgcaggaatagcgtatggtggtcagcaaggtcatccggggtatctgtggcaggatcctcaggaacagcaggaagagcctcctgcagagcagcaaagtgattaa

SEQ ID NO: 1017 - DNA, 630 bp, Oryza sativa
atgttgctcaagctcttgctcgccgtcgtcccgctcgccgtcatcgccggcgtgctcgtgtacgtcgccggcgtcccgtgggccatctccatcgtcgtcctcgtcgtcgtcttcgtcgtcgtgcacagggcgcgccgtggcaggtcaccggcggcgggaggaggaggaggaatggtccgggatgatcaagaaccgacggtggcgcggccggcggcgccgagcgccgtcgtcgttgtggtggcgccgccgctgccaccgccgctcccgatccaccgtgtgccggcagcagcggtgcagccctccgcgccgccggtcgtcgccgacgacgtggcgctcttggcgtacgcgtacgagaagaagaagaagaagaggagagggagcgacggcgacagcggcggcggcgacgacggcgacggcggcggcgaggagtgctcggtgtgcctcggcgagatgaggcaaggggaggcggcgaagcggctgccggtgtgcctgcacgtgttccacgaggagtgcatcgacatgtggctcggatcgcacgccacgtgcccgatatgccgctctccggtggacgccggcgccgtggcggcgcgggtgcaggtgcaagtgcaagtgcaagtgctatcatgttag

SEQ ID NO: 1018 - DNA, 615 bp, Oryza sativa
atgtctgggatggacggcagcggtgtgccagaaaccgccggagtggaggcagcctccagctcagatgcccgcggggacaaccgacacatgccgtctgaggactgtgtcgccggcatcaactcggctctccaacatccgacggtgcggttcctgagggagcaaatggagaaggccggttgcccagtgctaccgcggatgatcagggcgatgaactgcatgtctaccaatcacaatggttcctacggtagcgggctggggataactgtgtgctgtgatcacatgcggtctcaagatgagataaatcagctattaattcatgaattaatacatgcctatgatgactgtgttgtcaagaacatggattggaagaactgtgctcaccatgcttgctctgagattcgagctaatcaccttagtggtgactgccattataaacgtgaattgttgcgtggcttcatgaagataagggggcacgagcaagaatgtgttaaaaggcgggctctcatgtctgtcaagaacaacccgtactgctcagggacagctgcaaaagatgcagttgagtctgtgtgggatatatgctacaatgatacacgcccatttgatagggttccatga

SEQ ID NO: 1019 - DNA, 493 bp, Oryza sativa
ctctcgtcgtgtgaagtggaatgaagacaacctgtatgagattgaatcaaataaacctgttaggcagaagataactgagcctaagacaccatatcaccctatggtagatgatgatgggtcattgtcaccaacgcgtccttttgacaagtgtctggatgagactgttaatgctgaagctattttaactgctttaaatggtgtggcttcttcaagcaaaactgatccaaaggatgatggttgggcatcctcagatgatgatgcagatgccatggaacaagatgatgatccagaagctgaaaagtcaagactgagtttcaaggaacatcgtcgtgctcactatgatgaattcctcaaggtgaaggagctgatgcgctccggatcgctgattgacgatgaggctgatgaggatgatagaggtgcaaaaggcagccaagccaaagctgtaggaaagaagccagcaggctgtgacagcacacccccaccgcaaacatga

SEQ ID NO: 1020 - DNA, 1636 bp, Oryza sativa
atgtggacattaacaaactctatcttaacatctagtcgatcactactttacttcactataaaaggaccaacatatatcaccatttctcacaaaagcattgagttcagtcccacaaaaacatggcaaccatcaaattccctatagttttctccgtcgtttgcttgttcctcttgtgtaatggttcgttagcccaacttcttagccaaagtactagtcaatggcaaagttctcgccgtggaagtccaagagagtgcagatttgatcggttgcaagcatttgagccgattcgcactgtaaggtcccaagctggtacaactgagttttttgatgtctctaatgagttgtttcaatgtactggagtatttgttgtccgtcgagttatcgaacctagaggtcttctgttacctcactactccaatggagcaactttggtatatgtcatccaagaggcagaggtataacaggaccaactttcccaggatgtcctgagacctatcaacaacagtttcagcaatccgagcaagaccaacaattggaaggccaaagccaaagccataaatttagagatgaacatcaaaagatccaccgttttcaacagggggatgtagttgcattgcctgctggtgttgctcattggtgctacaatgatggtgatgcaccaattgttgccatatatgtcactgatatatacaatagtgctaaccaacttgatcctagacacaggggatttctttttagctggcaacaataagataggtcaacaattgtatagatatgaggcaagggacaattcgaagaacgtctttggtggatttagtgttgaactacttagcgaggctcttggcataagcagtggagtagcaagacaactccagtgccaaaatgaccaaagaggagaaatagttcgtgttgagcatgggctttccttgctccaaccatatgcatcgttgcaagagcaacaacaagaacaggtgcaatcgagagactatggccaaacacaatatcaacaaaaacaacttcaaggtagttgctctaatggtttggatgagaccttttgtaccatgagggtaaggcaaaatatcgacaacccaaacctcgcagatacatacaaccccagagcaggaaggatcacatatctaaatggccaaaagttccccattcttaatcttgtacagatgagtgccgttaaagtaaatttatatcagcagaacgcactcctttcacctttttggaacatcaacgctcatagtgtcgtgtatattactcaaggtcgtgcccgagttcaagtcgtcaacaacaatggaaagacagtgttcgatggagagctccgtcgtgggcagcttctaattataccacaacaccatgtagtcattaaaaaggcacaaagggaaggatgctcatatattgcattgaaaaccaaccctgactccatggttagccacatggcaggaaagaattccatcttccgcgcacttcctgacgatgttgtagcaaatgcatatcgtatctcaagagaagaagctaggaggctcaagcacaacaggggagatgagttaggtgtgttcactcctagtcatgcctacaagagctaccaagacatatctgtgagtgcataaccaagaaatgtcaatcatag

SEQ ID NO: 1021 - DNA, 1042 bp, Oryza sativa
atgaagatcattttcttctttgctctccttgctattgctgcatgcagcgcctctacgcagtttgatgctgttactcatgtttacaggcaatatcagctgcagccgcatctcatgctgcagcaacagatgcttagcccatgcggtgagttcgtaaggcagcagtgcagcacagtggaaatccccttcttccaatcacccgtgtttcagctgagaaactgccaagtcatgcagcagcagtgctgccaacagctcaggatgatcgcgcaacagtctcactgccaggccgttagcagtgttcaggtgattgtgcagcagctacagctacaacagtttactggcatcaacttcgatcagactcaagctctagcccaagctatgttggccctaaacttgccgttaatatgcagtatctacccaagctacaacactgctccctgtagcattcgcacggtcggtgaatgaagatcattttcttctttgctctccttgctattgctgcatgcagtgcctctgcgcagtttgatgctgttactcaagtttacaggcaatatcagctgcagccgcatctcatgctgcagcaacagatgcttagcccatgcggtgagttcgtaaggcagcagtgcagcacagtggcaacccccttcttccaatcacccgtgtttcaactgagaaactgccaagtcatgcagcagcagtgctgccaacagctcaggatgatcgcacaacagtctcactgccaggccattagcagtgttcaggctattgtgcagcagctacggctacaacagtttgctagcgtctacttcgatcagagtcaagctcaagcccaagctatgttggccctaaacatgccgtcaatatgcggtatctacccaagctacaacactgctccctgtagcattcccaccgtcggtggtatctggtattgaattgtagcagtatagtagtacaggagagaaaaataaagtcatgcatcatcgtgtgtgacaagttgaaacatcggggtgatacaaatctgaataaaaatgtcatgcaagtttaa

SEQ ID NO: 1022 - DNA, 1489 bp, Oryza sativa
atggcaactattgcattctctcgattttctatatgcttttgtgtccttctcctttgccatggttctatggctcagatatttagtctaggcataaatccatggcaaaatcctcgacaagggggttctagggagtgtaggtttgataggctccaagcgtttgagccgcttaggaaagtgaggcatgaagctggggttacagagtactttgatgagaagaatgagcagttccagtgcaccggtacattagtaattcgtcgcattattgagcctcagggccttcttttacctcgatactccaacactcctggcctagtatatatcatccaagggattgacctttcctggttgcccagcaacttaccaaaagcaatttaggcattttggtcttgaaggaggaagccaaaggcaaggaaaaaaattaagagatgaaaaccaaaagatccaccaatttaggcaaggagatgttgttgcacttccttctggtataccacactggttctataatgagggtgacacccctgttgttgctttgtttgtttttgatgtaaacaacaatgctaatcaactcgaaccaagacaaaaggagttcttgttagctggtaacaatatagagcaacaagtgtccaacccctcaatcaacaaacattctgggcaaaacatattcaatggattcaacactaagctattaagtgaggccttaggcgttaacatagaggtgaccagaaggctacaaagtcaaaatgaccgaagaggagatatcattcgagtaaagaatggccttcgattgataaaaccaactatcacacaacaacaggaacaaacacaagatcaataccaacaaattcaatatcatagagagcaacgatcaacaagcaaatacaatggcttggatgagaacttctgtgcaattagggcaaggttaaacatagaaaaccctaatcatgctgatacttacaaccctcgtgctggaaggattacaaatctcaatagccagaagttctccattcttaaccttgtccaaatgagtgctacaagagtaaatctataccagcagaatgctattctctcaccattctggaatattaatgctcacagtttggtgtatacaattcaagggcgtgctcgagttcaggttgttagcaaccatggaaaggctgtatttaatggtgttcttcgtccagggcaattactaattataccacaaaattatgtggttatgaagaaagcagagcttgaaggatttcaatttatcgcgtttaagacaaacccaaatgccatggtaaaccacatcgcggggaagaactcagttctccgtgcaatgcctgtggatgtgatagctaatgcatatcgcatctcaaggcaggaagctcgtagcttgaagaataataggggagaagagattggtgctttcactcctagatatcaacaacaaaaaatccaccaagagtactcaaatccaaacgaaagtgagactcaagaggtgatttaa

SEQ ID NO: 1023 - DNA, 1213 bp, Oryza sativa
atggcggcgatgatggcggtgacgacgatggtgacgaggaacaacgccgtcggcggcggcgcggtggcggtggtggacaggaaggggtgttggagttccctcgccggacggctgcgccgccgctgttcgccagcgtcgggctcagcttgccgtctgcggcgaagggccgggacaactgcgacgtcgcgcggcagctcgccgccgcggaggccgaggaggcggcggggaagaagaggcagggcaggaagatgaagggcggcggcgggctgctgtcgctgaggaaggtgagggtgaagatcgggaacccgcaccttcgccggctggtgagcggcgccatcgccggcgccgtgtcgcgcaccttcgtggcgccgctggagaccatccgcacccacctcatggtcggcagctgcggcgccggctccatggccgaggtcttccgctggatcatgcgcaccgagggctggaccggcctcttccgcggcaacgccgtcaacgtcctccgcgtcgcccccagcaaggccatcgagagcatttcacctacgacacggccaagaagtacctcaccccggaggacggcgagcctgccaagatccccatccccgtccccctcgtcgccggcgccctcgccggtgtcgcctccaccctctgcacctaccccatggagctcgtcaagacccgcctcaccatcgagagaaggacgtgtacgacaacgtgctgcacgcgttcgtgaagatcgtgcgggaaggcgggccgggggagctgtaccgcggcctggcgccgaacctgatcggcgtggtgccctaagcggccacaaacttctacgcctacgagaagctgccgccgtctgtaccgccgcgccacggggcgcgccgacgtcggcccggccgcgacgctgctcatcgggtcggcggcgggcgccatcgccagcacggccaccttcccgctcgaggtcgcccgcaagcagatgcaggtcggcgccgtcggcggccggcaggtgtaccgccacgtgctccacgccatgtactgcatcctccgcggcgagggcgccgcgggcctctaccgcggcctcggccccagctgcatcaagctcatgcccgccgccggcatctccttcatgtgctacgaggcgctcaagaaggtactcgtcgaggaggaggcggcgccggagctggaggcggagtgcgcggaggagatcaaggagaaggttgcgtga

SEQ ID NO: 1024 - DNA, 1187 bp, Oryza sativa
  N_region (242)..(243): n = any nucleotide
  N_region (266)..(266): n = any nucleotide
  N_region (420)..(420): n = any nucleotide
  N_region (423)..(423): n = any nucleotide
atgggtgtgaagtggaaaggtggtggcgcgctcctcctgctcgccgccgggctgctctggtggccgtggcggcggcggcggcggaggaggagggtcggcgggaccgaaggaggagctccggtggtgcaagaagcagtgccggtgggaggccgggcaggaccagcggcagctgagggagtgcgaggagcagtgtctccagcggcagcaggaggacgacgacgacgacgagaacacgcacggcnncggcggcaaggagtgccgccgcnagtgccgtggctaccgcgacgagccgtggcggaagcaggagtgcatgaggcagtgcgagtggcgccgccacgagcagcaccaccagggcggcggccatggcggatccaggccggactgccgtgagcagtgcgagcaccagcaggactggtgganaancagcgctgcctcatggactgccgccaccggcgacaggaggtcgacgccgacgacgacaaccaccatggcagagacccctgctacaagcagtgccgccaccaccacgaccagtggaagaagcaacaatgcatggaggagtgcagataccaccagcgccaacaagacgccgccgtcgacgtcgacgaggaagacgacaaccacggcggcgatcgctgccgcaagcagtgccagcaccaccatgaccagtggaagaagcagcagtgcatccaagattgcaggtaccatcaccgccaagaagacgacgtcgtcgaggaagaagacggccatggcgatcagcaatgccgcaagcagtgccaacaccaccatgaccaatggaagaagcaacaatgcatgcaagactgcaggcagtggcggcgccaggaggaggaagaggccgccgtcgacgaggaagaagaccacaactacggcggcgagagagagcaacactgccgcaagcgatgccagcaccaccacgaccaatggaagaggcagcaatgcatgcaggactgcaggtacaggcgccaggaggaagacgacgtcgtcgacgatgacaaccaccacggcggcggcggcggccatggcggcgaccactgccggaggcaatgccagcaccaccgcgagtggcacgagaggcagcggtgcatgcgagactgccacgagcgccgccatggatgggccacggtggccgccgaagccatcctccaggcagtgtaattaaaggtaac

SEQ ID NO: 1025 - DNA, 518 bp, Oryza sativa
  N_region (272)..(272): n = any nucleotide
aagatttttcacaaactaagcaaaatatggcttccaacaaggtagtgttctcggtattgctcctcgtcgttctctccgtgctcgcggcggcgatggcgaccatggcggaccaccaccaagtctacagccccggtgagcaatgtcggccaggaataagctatccgacatactcactcccgcaatgtcgaacattggtgaggcgccaatgcgttggccctggcgcggccagcgccgcggacgagcaagtctggcaagactgctgccggcagctngccgccgtcgacgacggctggtgcaggtgcggggcgctcgatcacatgctgtcaggcatctacagggagctcggcgcaaccgaggccgggcaccccatggccgaggtgttccccggctgccggagaggggacttggagcgcgcggcggcgagcctcccggcgttctgcaacgtggacatccccaatgggcctggtggtgtctgctactggcttgggtatcctaggaccccaagaaccggtcactag

SEQ ID NO: 1026 - DNA, 1992 bp, Oryza sativa
ttttgtgggaatggggaattcttgccaaaatggaacctatgggaacaattaccagaacagcaaccggtttcagaatgaccgttttgcttctcggtacgttgatgggaatgatactgaggattgctactcgggctcgtcaagggccagcttagcgggtgctctgcggcaagggctgaacctaaagtcccctgtccttggatacaagactccaaatgtaagggagctctatactcttggccgggagcttggacagggacagttcgggaaaacatacctctgcactgagattagcacagggtgtcaatatgcatgcaagactatcttaaagagtaatctccgatgtgtgtcagatatcgaggacgtgcgccgtgaaatccagataatgcaccatctttcgggccagaagaatatagtgacaatcaaggacacatatgaggatgagcaggccgtgcacatcgtcatggagctctgtgcaggtggtgagctcttcagcaagattcagaagcgaggtcattacagtgaacggaaggctgcagagcttataaaaattatagttggcatcatagaaacatgccattcacatggagtgatgcaccgggatctcaagccagaaaatttcctcttactggacgcagacgatgaattctcggttaaagcaattgactttggtctatctgtgttcttcagaccaggtattatcaggtcaggttttcagagaggtagtgggaagtccatattatattgctccagaggtattggagaagcgttatggaccagaggctgatatatggactgctggagtgattctctatgtattgctgactggtgttcctccattttgggcagagatacacaaagcgggatatatgaaaaagtactggatggacgtattgattttaaatcaaaccggtggcccaggatatctgacagtgcaaaggatcttataaaaaagatgctctgcccttatccatcagagcgtttgaaagcccatgaagtgctaaagcatccatggatatgtgataatggagtggctactaatcgagctctggatccaagtgtacttcctcgtctcaagcaattttctgcaatgaataggttaaagaaattgtctctccagtccagattattgctgagcgtctttcagaagaggagattgttgggttaagagaaatgttcaaggctatggacaccaaaaacagaagtgtggttacatttggtgagcttaagggactgaaaagatacagctcagtgttcaaggatactgaaattaacgacttaatggaagcagctgatgacaccacctccaccatcaactgggaagagtttattgctgcagcagtgtctcttaataaaatagaacgtgagaaacacttgatggcagcctttacatactttgacaaagatggaagtggttttatcacagttgacaagcttcaaaaggcttgcatggaacgtaacatggaagatactttccttgaagagatgattctggaggttgatcaaaacaatgatggtcaaatcgattatgctgaatttgtcacaatgatgcaaagcaacaactttggacttgggtggcaaacggtggaaagcagcctgaatgtagccctgagggaggcaccccaagtatactgaactcctgtcgcctggcacccccaagaattcagtttgttctcctgagcctttcatctgtttatcacaacacatagttgtggatttgagagaagagagccaagactagatggtttatcagtaatcaccctatagcagtggtggaagaagactctcttagtacctaatagcatataaatgtgtggtctaaagacatcgtatatgtatgaacctcataagttcgttcgttcgttcgtttggttggttggtttgctaccctgctatctaataataatatcaataatacccgaagaacccctcttggttctgcatatatctctgtgctggtgttgttaattgtgtttattttcctgcagtttttaa

SEQ ID NO: 1027 - DNA, 1642 bp, Oryza sativa
ggagaagtacatattcaagcatcctcaacctaaaagaccaaagtcattgcggatatacgaaactcatgttggaatgagtagcacgggagccaaagatcaacacgtatgcaaactttagggatgaggtgcttccaagaatcaaaaagcttggatacaatgcagtgcaaataatggcaattcaagagcatgcatattatggaagctttgggtggtaccatgtcaccaatttctttgcaccaagtagtcgtttcgggaccccagaagatttaaagtcattgattgataaagctcatgagcttggtttagttgtgctcatggatgttgttcacagcagccatgcgtcaaataataccctagatgggttgaacggttttgatggtacagatacgcattactttcatagtggttcacgcggccatcattggatgtgggattctcgccttttcaactatgggaattgggaagttctaagatttctactatccaatgcaagatggtggctcgaggagtataagtttgatggtttcagatttgacggtgtaacctcaatgatgtacactcatcatggattacaagtagcatttacggggaactacagtgaatactttggatttgccactgatgctgatgcagtagtttacttgatgctggtaaatgatttaattcatggactttatcctgaggccataaccatcggtgaagatgtcagtggaatgcctacatttgcccttcctgttcaagatggtggggttggttttgattatcgccttcatatggctgttcctgacaaatggattgaactcctcaagcaaagtgatgaatcttggaagatgggtgatattgtgcacacactgactaacagaaggtggtcagagaagtgtgttacttatgctgaaagtcatgatcaagcactagttggtgacaaaactattgcattctggttgatggacaagaggatatgtatgattttatggctctggacagaccggcaacacctagcattgatcgtggaatagcattgcataaaatgattagacttatcacaatggggttaggaggagaaggctatcttaactttatgggaaatgagttcggacatcctggaatggattgattttccaagagctccacaagtacttccaaatggtaaattcatcccagggaataacaacagttatgataaatgccgtcgaagatttgacctggggtgatgcggactatcttaggtatcgtggcatgctagagtttgaccgcgcgatgcagtctctcgaggaaaaatatggggttcatgacatcagaccaccagtacatatctcgaaagcatgaagaggataagatgattatatttgagaagggagatctggtatttgtgttcaacttccattggagtaacagctattttgactaccgtgttggttgtttaaagccagggaaatataagaggtggtcttggactcagatgctggactctttggtggatttggcaggatccatcacactgcagagcacttcactgccgattgttcacatgacaacaggccctactcgttctcagtttattctcctagcagaacctgcgttgtctatgctccagcggaatgagaacaccaagaggcagcatgcaagtgtgtgcggctgctag

SEQ ID NO: 1028 - DNA, 1590 bp, Oryza sativa
atgcaattcatgatgccattggatacgaatgcttgtgcacaaccaatgagaagggctggtgagggtgctgggactgagaggttgatggaaagattgaatattgggggcatgactcaggagaaagcactgaggaagaggtgctttggtgatggagttactggaactgcacgatgtgtgttcacatcagatgctgatagagacactcctcatcttcggacacaatcctcccgaaagaattatgctgatgcaagccacgtttctgctgtcattttgggtggaggcactggagttcaactctttcctctgacaagcacaagggctacccccgctgtaagttcctgttggaggatgttacaggcttattgacatccctatgagcaattgcttcaatagcggaataaataaaatatttgtgatgactcagttcaattctgcttctcttaatcgccatatccatcatacataccttggtggggggatcaactttactgatgggtctgtgcagaggtattggctgctacacaaatgcctgacgaaccggctggatggttccagggtacagcagatgctatcagaaaatttatgtggatacttgagaggatcattacaatcaaaacaacattgagcacgttgtaatcttgtgtggagatcagctttacaggatgaattacatggagcttgtgcagtgcagaaacatgtcgatgacaatgctgacattaccatatcatgtgctcccatcgacgggagggaagccgagcttctgactatggactggtgaagtttgatgattcaggccgtgtgatccaatttcttgagaaaccagagggtgctgatttggaatcgatggaaagttgataccagcttcctcagctatgcaatagatgacaaacaaaagtatccctacattgcatcaatgggaatttatgtcttgaaaaaggatgttcttttagacattctgaagtcaaaatatgcacacctgcaagactttggatcagaaattctcccgagagctgttttagagcataatgtgaagaggcatgtgtcttcacagaatattgggaggatattggaacaatcaaatcattttttgatgctaacttggccctcaccgagcagcagcctccaaagttcgaattttatgatccaaaaactcctttcttcacctcacctcgatacttacctccagcaagattggagaagtgcaagagatcaaagatgcaataatctccgatggctgttcctttagtgaatgcaccattgagcattctggtcattggaatctcttcacgcgttagcatcgggtgtgaactcaagaggataccatgatgatgggtgcagatcaatatgaaactgaagaagaaacttcaaagctattgtttgaaggcaaggtcccaattggtataggcgagaacacaaagataagaggaactgtatcatcgacatgaatgctagaattggcaggaacgtgatcattgcaaacactcagagggggtccaagagtctgatcaccctgaagagggatactacataaggtctggaattgtggtgatcctgaagaatgcaaccatcaaggacgggaccgtcatataa

SEQ ID NO: 1029 - DNA, 810 bp, Oryza sativa
  N_region (547)..(547): n = any nucleotide
atggctgatcagcacagaggagtgatcggcggcggcggctacggtgaccgtggtggccaggagcagcaggagaagcagcccttcatgatgacggctctgaagacggtgaccgcggcgacggccgggggctcgatgctggtgctgtccgggctgatcctggccggcaccgtcatcgcgctcacggtggccaccccggtgctggtcatcttcagccccgtgctggtgccggcggccatcgcgctggcgctcatggcggccgggttcgtcacctcgggcgggctcggcgttggccgcgctctccgtgttctcgtggatgtacaagtacctcaccgggaagcacccgccgggcgccgaccagctggaccacgccaaggcgaggctcgcgtccaaggcccgcgacatcaaggaggcggcgcagcacgcgcatcgaccaggcgcaggcgtcttagggcggcctgccgcggcgaggcgccgcttctgctagctagctcgatcgggcggcgcacgggacggcgccggccggcgcgcgtgcgttcgccgtggccangcccacgctggctactcctcttatctgctgagctctgtaaatgcatgcgtacatgtttaattaagcttggtcgcgtagtactctcctatgtaatatgtcccctagattatctaagaggcgatcgtgcatgtcgggcgcctggtacgtgtggtctggtggatgtcgtgtttatggtcatgatgaataaaatgcagtgttccttcgataaatctagtggttgtactgtttttttttttaacgataagggcatgagttccgcatag

SEQ ID NO: 1030 - DNA, 363 bp, Oryza sativa
atgtcgaacaaggctacggattcttcccagctcatcgagcagaagttcgccatggccaagcagagctcccatggaggcggccattgccgggctgaaagcagcggccgtcactgctgtctgcaccgcgatccccacctttgccagtgttcgtatgtccaagtgggcaaaggccaatctgggcaacccagtcgccaagacagtcatcatcacctacggctgctggcatggcctacttcatcgccggggagaagaaggtggtggagctgtccaggaagcactccctcgaggctgcaaaggccagggctaaatctgaatatactctcacaaaatcgaactagatttgcagcaatatggcatcaatga

SEQ ID NO: 1031 - DNA, 6255 bp, Oryza sativa
  N_region (3110)..(3110): n = any nucleotide
ggcttggtgcacctgacttctatccccagacattgagttgtgcagaagagaccttaaccaaagaatatgtgcaatctgggtacaaggataccgttgaaggaattgagcaggaagccagagagattgtactcagtcagattccatacttgagcaaaccagatattgctacaaaatgcaaggagaggcactaaagaagcggttcagagcgatcaatgaatctcgtgctcagaagaggaagcaggctggccaagtttatggggtccctctttctggctcgttgctgacaaaacctgggatgtatccagagcaaatgcatagcaatgaagacacacgcagaaaatggatcgagaggcccttgtgcaaccaaacaggcgtctatggtcattagcagagcaagttcctcgtggttttcggaggaagttactctttaattatcttatccgatataatgtcccactgttaagagcatcatggcttgtgaaggttacttaccttaatcagcaggttcaaacatcatccaataatgtttcatctgctgctcctgatagtttgcgatctcagcactggacaaaggatgttattgaatacttgcagctgcttttggacgaattgtgttctaaaaatggcttttttggacttccatcttctcaagaacagtcattgccatgccttgttgctggagacagcccaattaagttaaaaaccggggcatcacctgctagtgcagatgttgaggagccttcgctacactttaaatggtcgtatatgattcgtattgttcaatgtcatctcatggaacaattacttgttccgtcgttacttatcgaatgggtatttaatcagctccagcaggagagagactcaactgaggttttagaattactcttgcctattgtactttctttggttgataccataaccctctcacagacatatatccacatgctggtggaaatactgattcaacgtctcagtgatgcttctcctggcagcttaagtgttaagaataacccaaaaaggtcatccattacctctgctttagttgagttactgcagtacttgatacttgctgttcccgatacatttgtttctttggattgctttccacttccatcagttgtggctcctgatgtatacggtaaaggtgctcttctgaaaatagcaggtggtggtaaaattgctagctctaggagacagaatgcatctcgacacctctcttgtggttatgccatttgttcagttcaaagacgtgcatctgatctttctttagttgctaatcctaatcttcaagttcgtggggcagccaacgtagtgcaagctttggacaaagcacttgtaactggaaacttgacagcagcatatacatcagtattcaattatctatcagataccctgatggaagaaacatggattaaagaagtcagcccttgcttgcgatcttctctgatgtggatgggagctgttgagttatcccttgtctgctctgtgtttttcatttgtgagtgggcaacatgtactttccgtgattgccgtacatcacaatgccaaaatgtaaaattttcaggaagcaaagatttctctcaggtctatatggcagtttccctgttgaaggataaaatgaatgagataaataatttatcttcttccaagagcagcagtcagcttgcaatgaaggatcaccttaaaagtgctactctgaatcattcttctatcaaggtgacagcaatggagactgcttctggatttagagacagtacaggtagcattgatgagaataacaaaaaggatatcttcagcagcccaggtccactgcatgacattattgtatgctggttggatcaacatgagattagtgatgcttcgggatttaaaagtgtggatgttttcatgactgaacttattcgcagtggtatattttatcctcagacatatgtgagacaactaattgttagtggaatcaccatttggaatgatagcttgtttgatctggaaaagaaaacgaggcattacaaaattctgaagcacctgccagggttttgcttatttaatatccttgaggaagctaagattgctgaagatcaagtcctttatgaaattgtgtcaacatattctagtgagcgtcgacttgtgctttctgagctttcaagtggtctggctactgatgcaaatgttgaaggcagggtccctttgagttcctgccttcagaaacagcctgatcttctaatggattcaacagatgataatcatggcagagtggcagttcaagtagaagaggtaaaacttatgatatcaggtctgttgaatttgggatactctacactcttggctgaatcaggaagagaagaaacaaaaaaaaccaagaaaggacaaacagatttggtagactcagaagaagatgttgggcatgcaaaaactggctgtaaggatagtagtaggaccaagagacagaagttggataagaacgtgtttcctttccaagggtccccattggttcaatcagatgaggaagatttttggtgggtaaggaaagagcagaagcaggaattgtttactgttgaaacaatacatcagtcaattgaacaaacaagtggaggtaaggcaacagtagtgcaaaagacacaaaatatagcacaacttgcagctgctagaatcgatggtagccagggggcatctactagtcacgtgtgtgataacaatctgagttgtccccaccataaacctggcactaactctgacattcttaaagacgctgatcatatgagtatgttgactctggctgaagttggcaaatcacttaagagacttagattgcttgaaagaagatccatttcaatctggctgctgaagtccataaaacaactaattgaaggagatgaagtgaaacattctaaggctaataactccataagtgcctccactgtgcagcatagtggtaaaattgcatctggatggaggtttggagaagatgaacttctgtcagtgctgtacataatggatacatgttgtgatttactctcctctgtaaggttgcttatatggcttctatcaaagatttatattggaaggaccacatctggtcaagttggaagaggtgttatgcacccaaaacntaaagaaaaccaagttttccaagtagccgaagcttttctgttctcatccttgctcagcaggtatgagaacatccttattgcaatggatcttttgcccgaggttttgagtgtttcaatgaatagaactgttcataagtcaggtgaaaggcagtctacttcagtagcttttgcttatgctcgatatttcttaaggaaatacagagatgtgactagtgttgctaggtgggaaagaaattttaggtccacatctgataaaaggctgcttgctgaactggatagtggaaagtcaatcactggtgattcaattatttctggaatttcatcagcagactgtatcagacaaaatggaggagcaaatccagatggagatcattctttagttgcttctgctgtttctgcaattgttgacaatgctgggcatgcaatagctaaacacttggatatttcaggtggtaacaatccaggtgttacctcaattaattcattaaacttgattcaacacattttggatatccacataaactctctggccttgctaagagaaactttaggtgatcgatttagtagaatatttgaaatatctcttgctgttgaagcttcttcagctgttgcagcatcttttgctcctcctaaggctcaccgcagtcaacagtcttctgagacccatgatgaaagtggaaatcatgcaaatgaagttccaagtaatccgtcaaaatgttttaatgttaaggctgtaaaagtttctgctgctgtttctgcactagttgttggagctattatttatggggttgtcagtctagagcggatgatggtggtcctaagattaaaagaaggtttggacattctgcagttcttaagaatttccaaagctagcacaaatggtgtgacccactccattggaaatttcaaaattgacagttccactgaagttttggtacattggtttaagattctaatagggaactgtaagacagtttataatggagtgatcgcagagattctaggtgattcttatgtccttgccttttcaaggttgcaacggacgcttccattgggtatagttcttcctccagcttattcaatatttgctatggtcctttggcgaccatatttatatgacaccagtacatcgaatcatgaagacattcagctttatcagtctctactgggtgcaattagtgatatcacaagacatcagccttttcgagatgtctgcttccgtaacatgcatcttttctatgatcttctggctgcggatgttggtgattcagagtttgctgcaatcgttgaacttcgaagccctgatgaatgtttgaaagctctttcacctcttcgtgcccgggttttcctgaatgctcttcttgattgtgaaataccagtaacaatgagagacgatggtacatatgctttagagcctggttgtgcagaagctagtaccaagaatgatgtaaagtttccagagaggcttatagaaattctgaatgtcctacagcctgcaaagttccattggcaatgggttgagttgaggctgcttttggatgagcaatctcttattgagaaaccaaagaatgtgccatatgtaaaagcacttcgatccctatcccctaatgctgagaattttaccctctctgaaagggaaaaggggcttactgaagttattttgtctaggctacttgtcagacctgatgctgctcctctatactcagaacttattcaccttcttggaaagctacaagagtcattcgtgatgggtatcaaatggttcttacaagggcaagatgttcttttgggaaacaactctgtaagacaacagcttgttaacttgactcagcgcaaaggatttccaatgaagacacagttttggaagccatggggatggtcaaaattagtcggatatgctaatgctaataaaagctccaaaaggaagttagaagttacttcaattgaggaaagagaagttgatggcttgattgattctagaaaatccagtaataggaagtcgctaaatgtgggtacaagcccagaagggcatggatctacccaaaaatattttactcaggaagcccttgctgagttagttttgccatgcatagacagaagttctagcgagtttcgctttgtatttgctggtgatttgatcaaacatatgggtgtgatcagtgagcatattaaagcagcagtgtggaacggtattaataaactgaatagttcaaatccttcaggaaatgaaggtttgagtaaacccaatggccgcaaaggaatcttcagtggtagtccgaatatcaggaagcatagccctgtacctaatgattcaactactccttccgcatcagctttacgatcatcaatatggttgcgcctgcaattcatcattaggctacttccagtaattattgcagacagagtaacatgaggcaaacgctagcttcctccattattaagcttggttggaacacgtgtggtctatgatagatgcagatatcacttgaactcttacatgcgatgatgtcctgcttgattgtccaagtgaaagcctattcgataggcttttatgtgtcctgcaagctttgcttggcaatagctcaactctaagtctggctgaagactaagctcaagctccaagccagctgttaaatttttgcgtgatctttctgcaattgataaagaggtcactaagagcttgcagttgcagtgtgcacttagatctgcatggagtgtgcacagcaacaatcaggcggcggattcaagtggctatgccgattctacctacttcccgcctctcctccataacatgtggtcctcctcgtactgtctcatctgctgcatcatatcaccgattccagtgcagtacatctgctgcagggcctcactcaacaatttcccctcaattggattcctaccaatactctcaagaagatgcaaggcagcgttgccttcatacaggagtcctaacatggaaatagatccttggactttgctggaagacggtacaagctgtccaaataccaacagtggacagcgaagcttctgcaaatggtgttaccggtgaccactgccaatctgaaagcttgcagcttatctcaagtagatattcgtgtcaagggtgaggaggactgacctgacttacattggctctctggtatga

SEQ ID NO: 1032 - DNA, 3079 bp, Oryza sativa
  N_region (62)..(62): n = any nucleotide
  N_region (183)..(183): n = any nucleotide
  N_region (215)..(215): n = any nucleotide
  N_region (217)..(217): n = any nucleotide
  N_region (837)..(837): n = any nucleotide
  N_region (958)..(958): n = any nucleotide
  N_region (972)..(973): n = any nucleotide
  N_region (1003)..(1003): n = any nucleotide
  N_region (1501)..(1501): n = any nucleotide
  N_region (2523)..(2523): n = any nucleotide
atgcagatgctgctccacgccaattccctcctcctcctcgcgccgacgacctcgcggctctncgcctccgcctcgccggggagatcggggacggcccggccgctgcctccgccgcaggggcacgcgcattccgcccgcgccgccgctcgcgggacacggaggccgcccgccgtcgccgcagcntgccgcggacgccgatggcggtgggggaggantncgccgccgccgtggcttcccagcaggggttcgtgacggatgcgagggcatactgggtgacaaggtctctgattgcctggaatgtaaacgatcaagacacctccctcttcctgtatgcaagcagagatgccacgatgcacgtatctgatggggccattcatgggttatgattcaaaaattgaactcgaaccagaacatgccagccttccagacaatgtggctgagaagttcccgtttatcagaagttacagaaccttcagagtccctagctctgttgatgtcgcgagccttgtgaaatgccaactagctgtcgcttcttatgatggctcatgggaggcatcaagatgttactggattgcaactacctggtgtattggatgacatgtttgcttatactggaccacttggtgcagttttcagtgataaagatgtcgacctctacctttgggctcctacagctcaggtctgcttgcaaaacaggatgttagagtatgcttctatgatggtccagcaggacctttactgcaaactgtgcaactcaaggagttaaatggtgtttggagtgttactgtaccaagataccgggagaaccagtactatttgtatgagtaggtactggcntctagtatcatcacagttgagaaatgtttagctgatgatccctatgccagaggggctttctgcatggcacacggacttggttggttgacatatagtgactttagccagcttcctgggatgnattgtcagatgagnngcaaaccttgagtccttctctgacatagcntctatgagttgcatattcgtgatttcagcagtgctcatgatagcacagtggactgtaactctcgtggaggatttcgtgcatttacatttcaggttgttcagacttaatttactgaacgatttctgtttcaccacctataacaaaacatcctggtcgcattatggaaactgtgatgcaggattcagcaggaatacgtcacctgagaaaattgtctgctgctggcttgactcatgttcatttgttaccaagctttcattttgctagtgttgatgacaacaaaagcaattggaaatttgttggtaaggatgaggctcagctggcaaaactccctccaggttcagatgagcaacaagctgcaatagtatctattcagcaagaggatccttacaattgggggtatggtatgaccctgtactctggggggttccaaaaggaagctatgcaagtaacccagatggtcctagtcgtattattgaataccgacagatggttcagcanggcctgaatcgcataggtcttcgtgttgtcatggatgttgtatacaatcatttagactcaagtggcccctttggtgtctcctcagtgcttgacaagagattgttcctggatattaccttaggcggaacgttaatggtcagatcgaaaatagtgcggctatgaacaatacagcaagtgagcatttcatggttgataggttaatcgtggatgaccttttaaattgggcaataaattacaaagttgatgggttcagatttgatcttatggggcatatcatgaaaagtaccatggtaagataagagcaaaatctgctattcgaagccttacgagggatgtacatggagtggatggttcaaagatatacttgtatggtgaaggatgggactttggtgaggttgcacaaaataagcgtggaataaatgcatcccagattaatatgagtggcacaggaattggtagagtttcaacgataggatccgcgattctgttaatgggggtaatccatttggtaatcctctacagcaaggcttttctaccggtctgttcttggagagcctaatggatattatcagggtaatgaagcagataccaggcgtgaacttgctacatatgctgatcacatacagcagatcggactagctggtaacctgaaggattatgtactaagaactcatactggagaagctaagaagggatcagacatttacacttttgatggatcaccagttggctatacttcatcccctgtagaaactataaactatgtttctgctcatgataatgagactctgtttgatattgtcagtataaagagaccccaattggcctatcgattgatgagaaatgcaggataaatcatttggcttctagcatgatcgcattatcccagctctttcagggaatacctttcttccatgctggtgatgagatactgagatctaagtcacttgatcgagattcatataactctggtgattggtttaacaagcttgattttacatatgaaacaaacaattggggtntaggacttcctccaagagataagaatgaagaaaattggcatttgataaaaccaagattggaaaacccatctttcagacctttgaaaaatcacattctttctgtcttcgacaattttgttgacatcttgaagatcagatactcctcaccgctctttcgtttaagtacagcaagtgacattgagagcaaagggttcgctttcacacacaggtccctcgatggtaccaggagttattgtcatgagcattaaagatgctcaaaatgaaaaatgtaaaatggctcagttagataaaaacttctcttatgtcgtgacgatcttcaatgtctgtccacacgaagtgtctattgaaatccatgatctcgcttcgttggggcttgaattgcatcctattcagttcaggtgaattcatcggatgctctagtcaggcagtcagcatacgaggcgtccaaaggtcgattcaccgtgccaagaagaacaactgcagtgttcgttcaacctagatgttgatgcctttgggaaaacgttcatattatgtcgaaaaatatgaatgaagataa

SEQ ID NO: 1033 - DNA, 2720 bp, Oryza sativa
  N_region (21)..(21): n = any nucleotide
  N_region (555)..(555): n = any nucleotide
  N_region (2162)..(2162): n = any nucleotide
  N_region (2216)..(2216): n = any nucleotide
  N_region (2244)..(2244): n = any nucleotide
  N_region (2628)..(2628): n = any nucleotide
atggacggggagcaagaggcncggtggctggcggcgcagggggtcgccgtaggtgccgacatggtcgcggcggcgctccggcagctggagttcctcgcggcggtggaccgccgccggtggctctacgaggggccgctgctcgagagggccatccacagaggtacaaatcatgctggcttcctctcctttccaagcacactcaggctgctgttgtagatgggcctttagttgttcctcttgattgcgaatggatatggcactgccatcggcttaacccggtactgatcttctccaggaactggatgataaaagtacaatacttaaaggactgcaagagattgtatggcagaatactcgacaatagcaatgttcagtcttcgattagagcagaatccaagcaccagtctgagaaggtttgggctgagcaatatcctaaggagccctttgagctggagtacacaagctcttctgacaactcaatttatgcaaatgctggagctgcagaggacatttcttatgatttggtcgcagctgttaagagacagtcttctttcntctaccagtatcaggttgacacaccaactatgcatgatcagcgatttctggaagaagctttagctcggtacaaaggattcttgtacctgatcaagacgaatcaggagaacaaaatgaagctctttcgcgtgccaacctatgatgtggatgtcatctggcacactcaccaactgcatcctgctacctactgccatgatatgctgaagctcattggacgagttctggagcatgatgacaccgatgacgatcgatcagaaggaaagaagctcgatactggattttcagggactaccaaacagtttgagaatgcctttggtgcaagatactggaaggctggtgctatgtaccgtggcaacttgccgtctcctgtgacatccaatcctcagatgtttattagtgaggtggatggtgaatttagtgttggcaaagctgagtcgcaaattaccattcttgaaacaacagttatagagttattcttgcaaattgtggacatcaagaacttgccacctgcaattccaaaggaaaatgtgtacatatggttcacaaagaatcaaccagacatgttcatcagtgatggtggcaggctggatatctctacaaaaacagggaagtcgattggagccagtatccaatgtgagcctactggtgaactcattctaacagtactggttgatcgggaatcatcatcgaagaaacccaaaaagattgggaagatttctatccctcttcaagagtttacatggtctgattccaagctctcctttgagaggtggtttgaattgaaacctcatgatgggcatgccagttcacctatcgtcagccttcgagttgctgcctcttccactgtcccagtgaaggctcagcaggttcttagcatgatcaggacagaacctttctctcttaagagttttctgtcaccgaattccatcaaggatcaaaagatgagctgctggactcactttgtgtatgattgcaatactgaacttatccgtcttcaaattagcgccttcatctcagggatcagaaggcaaagaacggcatggttgtcgctcgggagttggtcggagtaacaaagtcatcaaagaaaccatttaagctagcagagttcgtggacaacaagtggtcactgagcaactctaacttatgcatcactaatgacatgaaaccaagcaaggatggctctatacttgagctcaaatgtgacaacaaaacgatcaaactctaccagggaaagaggctagaatttcaacggaagtgctgcaacaatcacgcagaggagaatgcttcagctattactgctgtgaagttctctgctgaacatccatatggcaaagcagttgcattgcttgacaccaaatctgagctgataatggtagtaaatgaggattggtttctgcttccttggatcgtgatgtcgttcctgttccaagacatcaatgtcgaagacggctcgaagctcatcggtggcgccattgctcagaaaggcgcgatctctgagcccgacactgctgccatggcgatgtcagccgagacggtggctgctcctgctaactgcggcacttgcggcacggcgtgcgacagtaacatggcaggcgacaaggtggtgnccgccgcgagatgcaaggccgcgcgatgcaaggctgtcgcggcaagcggcggcngcggcggccaggcagagtcggctgggtncggctcgggatgcggcggcggctgtggcggcggtgttgccaaggtcgttgaggccaccaaggctggcgtcggcggccatggcaagtccggtggatgtggctcgggctgcggtggtggctgtggcggcggcgggtgcggcgccatggccgtcgagagctccaaggatgatgtccatgcgaagtgtgcaggttgtggctcaggctgcggcggcggctgtggcggcggctgtggcggtggcatggtcatggaagcctccaaggctggccatgtcaagtccggcgggtgcggctcaggctgcggcggcggctgtggtggaggctgcggtggcggcgtggccatggaaagctccaaggctggccatgtcaagtccggcggatgcggctnaggctgccggttgtggcggcggcatggtcatggaaagctccaaggctgtccatgtcaagtccggcggctgcggcggaggctgtggtggcggc

SEQ ID NO: 1034 - DNA, 2412 bp, Oryza sativa
atgtcgtcggccgtcgtcgcgtcatccaccacgttcctcgtcgcgctcgcctcttcggcgtcacggggagggcccaggagggggagggtggtgggcgtggccgcgccgccggccctgctttacgacggccgcgccggaaggctagccctacgggcgccgcctccgccccggcctcggcctcggcgtcgggatgcgggcgtggtgcgccgcgcggatgatggggagaacgaggcggcggtggagcgggcgggtgaggacgacgacgaggaggaggagttctcttcgggcgcctggcagccgccccgctcgcgtcgcggcggcttcggcaaggtcttgaagcggaggggcaccgtcccgcccgtcggccggtacggctccggcggtgatgcggcgagagtgcgcggggcggccgcgccggcgccggcgccgacacaggacgccgcctcaagtaagaacggagcgcttctcagcggccgcgacgacgacacacctgcctcacggaacggatcggtcgttaccggcgccgacaagcctgccgccgccacgccgccggtgaccataacgaagctcccagcgccggactcccccgtgatccttccatccgtagacaagccgcagccggagttcgtcatcccagacgcgacggcgccggcgccgccaccgcccggttcaaatcccaggtcgtccgctcctctccccaagcctgacaattcggaatttgcagaggataagagcgcaaaagttgttgagagtgctccgaagccaaaggcgactagatcttcccctattcctgcggtagaagaggagacgtgggatttcaagaaatattttgatctgaacgaaccggacgccgcggaggatggcgatgacgatgatgactgggctgattcagatgcgtcagattctgagatcgaccaggatgacgattcgggccctttggctggggagaatgtcatgaacgtgatcgtggtggctgctgaatgtgggcttggagatgttgcaggtgctttacccaaagctttggcgaggagaggacatcgtgttatggttgtggtaccaaggtacggtgattacgcggaagcccaggatgtaggaatcaggaaatactacaaggctgctggacaggatctggaagtgaaatatttccatgcatttatcgatggagttgattttgtgttcattgacgctcctctcttccgtcaccgtcaggatgacatctatggggggaacagacaggaaatcatgaagcgcatgattctgttttgtaaggctgctgttgaggttccttggcacgttccatgcggtggtgtgccctatggggatggcaacttggtgttccttgcaaacgattggcacactgcactcctgcctgtttatctgaaggcatattacagagacaatggcatgatgcagtacactcgctctgtccttgtgatacataatatcgcttaccagggccgtggcccagtagatgaattcccctacatggaattgccggagcactacctggatcacttcaagctgtacgaccccgtcggcggcgagcacgccaacatcttcggcgcgggcctgaagatggcggaccgggtggtgaccgtgagccccggctacctctgggagctgaagacgacggagggcggctggggcctccacgacatcatacgggagaacgactggaagatgaacggcatcgtgaacggcatcgactaccgggagtggaacccggaggtggacgtgcacctgcagtccgacggctacgccaactacaccgtggcctcgctggactccagcaagccgcggtgcaaggcggcgctgcagcgcgagctggggctggaggtgcgcgacgacgtgccgctgatcgggttcatcgggcggctcgacgggcagaaaggtgtggacatcatcggcgacgcgatgccgtggatcgccgggcaggacgtgcagctggtgctgctgggctccggccgccgcgacctggaggtgatgctgcagcggttcgaggcgcagcacaacagcaaggtgcgcgggtgggtggggttctcggtgaagatggcgcaccggatcacggcgggcgccgacgtgctggtcatgccgtcgcggttcgagccgtgcggcctcaaccagctctacgccatggcgtacggcaccgtccccgtcgtgcacgccgtcggcgggctgagggacaccgtgtcggcgttcgacccgttcgaggacaccggcctcgggtggacgttcgaccgcgccgagccgcacaagctcatcgaggcgctcggccactgcctcgagacgtaccgcaagtacaaggagagctggaggggtttccaggtgcgcggcatgtcgcaggacctcagctgggaccacgccgccgagctctacgaggaggtccttgtcaaggccaagtaccaatggtga

SEQ ID NO: 1035 - DNA, 1884 bp, Oryza sativa
  N_region (384)..(384): n = any nucleotide
atgtacttgatttctggagatggcttccaagatattgtaattaaaaacacatccctcacagcttccatagacgctactaaagtttgtggtgcatatcaaagaaactattgttgacaagagcatggcatcaacaggcattgcagtgagcccaagcaacaacgatgctttggacctagctgttgcacaattagatggtgatcaatcttcatatcatcatacaccagaggtcttcttactctaccttgcagttcccggtgttcctctagccaaaatgcaagtacttgagtctgattcggttgccgcagtgaagcttcggatccaaaacagcaaaggatttgtggcgagaaaccaaaggttggtttttcgaagggcagagagctctcnacgcaatgatagcccatatcccgtgactatggggttgaaggtatgggaagtgtgcttccatctcgtggatccgactatcagatccacgacgaaccgctgtgaggactgtttatggaaggaagtttaaattccaagtggaccaacgtcgaaatgctagatatatgaagcaagagatttcaagaaatgttgaaagtcccaatggtattggagagagcatgactttggtcaatggtgaaaagcttgatgaaagcacattaatctccaccatttgtgagaccaacacttctgataccgattttcttgcaaacaagtcagaaaattttaatggaaatgaaatagaagaatcttttgagcaattatccatttcttctgacattggaaacaatttacaatttgatgatgccaaggagaaatatcccctgattgaaccagttcttgtcaacccaagtgttacccttactccaaaaattacgggtatgatcgaagctacacttgctgggctagaaatggagcacacacctgtgatgtcctcagagggcactgggggagtctacttcatgctagattcatcaggccaagagtatgttgctgttttcaagccaataaatgaagagccaatggcaaaggacaatcctaatggctaccctttgtccagtgatggggaaggattaaagagaggaacaagagtcggtgaaggtgcattcagggaggttgcagcatacattcttgaccatcctattagtggttatcgcgtgagcgatgaactagggtttgctggtgttcctccgacagttcttgttcgatgtttgaatggttatgttgatcagactaagtatgattgcgcggagaaagaaccgaaaattgggtccttgcaaatgtttgtgaagaattctgggagttgtgaggagtttggtcctagggctttccctgtgcaagaggtgcacaagattgctgttttggatatgaggctagctaacacggatcgccatggcggcaacatactgattcgtaaggatgagaatgggcagattgagctgataccaattgatcatgggtattgtctgcctgaaagctttgaagactgcacatttgattggctttactggccccaagcacgccagcctttcaatgttgaaaccctggactacataaagtcacttgacgaggaagaggatatcaagttgctcaagctcaatggttgtgaaccatcatctaagtgtgttcgtgtttttcgtctaagcaccatgatgttgaagaagggtgctgtgagaggtctaactccatatgagatcggtaacatgttgtgtagggagaacattacaaccaaatcaaagattgaagagattgttgaagaggcagagcatgttgttcttcctgggataggtgaaaaggcattcatggaagccatctcaggtatcatggatcgctatctcaatgaactcttcaaatgaaatgctcctcaagatgactgtgaattatggtttcgagtgtgtgtgataa

SEQ ID NO: 1036 - DNA, 1704 bp, Oryza sativa
  N_region (338)..(338): n = any nucleotide
tttgtaattctttaatttgttgcaaccatgaatgtattggcatctaagatcttcccttcccgctccaatgttgccagcgagcaacaacaatcgaagcgcgagaaagcaactattgatgacgctaagaactcgtccaagaacaaaaatcttgaccgcagtgtcgatgagagagtgtgcttggaatcattcttggaggtggtgcagggactagattgtatcccctcaccaagaagcgtgccaagcctgccgtgcctctgggtgccaactacaggcttattgatatccctgtcagcaactgtttgaacagcaacatatccaagatctatgtgctgacacanttcaactctgcctctctgaaccgtcacctgtcaagagcctatgggaacaacattggcgggtacaagaatgaagggttcgttgaagtcctcgctgcacagcagagcccagataatcctaactggtttcagtcagggtactgcagatgctgtaagacagtacttatggctatttgaggagcataatgttatggagtttctaattctggctggagatcacctttaccgcatggactatgaaaagttcattcaggcacacagagaaacagattctgatattactgttgctgccctgccaatggatgagaaacgtgcaactgcattcggcctcatgaaaattgacgaggaagggagaatagttgaatttgcagagaaaccaaaaggagaacaattgaaagcaatgatgggttgacactaccatacttggccttgacgacgtgagggcaaaagaaatgccttatattgctagcatgggtatctatgtgattagtaaaaatgtaatgcttcagctcctccgtgaacaatttcctggagctaatgactttggaagtgaagtcattccaggtgcaacaaacatcggaatgaggggtacaagcttacttgtatgatggttactgggaagacattggtaccattgaggcattctataatgcaaatctgggaataacgaaaaagcctgtaccagatttcagcagtttctatgaccggtctgctccaatttatacacaacctcgacacttgcctccttcgaaggttcttgatgctgatgtgacagacagtgtcattggtgaaggttgtgttattaaaaactgtaagatacaccattcagtagttggactccggtcctgcatttctgaaggcgcaataatagaggactcattactcatgggagctgactactacgagagactgaagcagacaagaaactccttggtgaaaaaggtggcattcccattggtattgggaagaattgccacattagaagggcaatcatcgacaagaatgctcgtattggagataatgtgaagagataatcaatgttgacaatgtccaagaagctgcaagagagactgatggatactttatcaaaagtggcattgttaccgtgatcaaggatgctttgctccctagcggaacagttatatgaagtagctgcgtaatatgtgatggggcatcggcgacgagcaccaggcgggcattataagaagaataaaagcagttcaaggcactttattccctttttttttcttctgttcttcctctattgtgttaggataaatgtaatggtagaagcaactgtttttcagatgttttgggagtgaatgataccgtgcttgaattttccatgttttgctttgcctctgcttga

SEQ ID NO: 1037 - DNA, 1273 bp, Oryza sativa
  N_region (520)..(520): n = any nucleotide
  N_region (523)..(523): n = any nucleotide
  N_region (527)..(527): n = any nucleotide
atgtcgtcgtccctgctcactgacctcgttaacctcgacctgtcggagagcacggacaaggtcatcgccgagtacatatggggttggtggtactgggatggatacgttgtctggacctgttgatgacccaagcaagcttccaaagtggaactttgatggctccagcaccggtcaggctaccggtgacgacagtgaagtcatcctccagtatgcttcttgtttgtactctttgatttgattacaccttgccctcaagccatcttcagagacccattcaggaaggggaagaacatcctggtaggtcatgtgtgactgttatgcgccgaatggcgagccgattccgacgaacaaccggtacaatgcagcaaggatcttcagtcatcctgatgtcaaggctgaagagccatgggtatgggattgagcaggagtacacccttcttcagaagcacatcaactggcctcttggctggccactaggtggctatccaggccctcagagggtccgtactactgtgcggcnggngccnataaatcgtacgggcgcgacatcgttgatgcccactacaaggcctgcctgtttgccggcatcaacatcagcgggatcaacgcagaagtcatgccggggcaggcagtgggagttccagattggccctgtcgttggcgtctccgcagggatcatgtctgggtggcacgctacattcttgagttacagaggatcactgagattgctggcgtcgtcgtgtccttcgaccccaagcccattccggagggagactggaatggcgccggtgctcacaccaactacagcagcaccaagtcgatgaggagcaatggcggctacgaggtgatcaagaaagcgatcaagaagcttggcatgcgccaccgtgagcacatcgccgcctacggcgacggcaacgagcgccgcctcaccggccgccacgagaccgccgacatcaacaacttcgtctgggggcgtagcgaaccgcggcgcgtcggtgcgtgtcggccgggacaccgagaaggacggcaaagcaggttacttcgaggacaggaggccggcgtccaacatggacccgtacctggtgaccgccatgatcgccgagaccaccatcctctgggagcccagccacggccacggccacggccaatccaacggcaagtgaggaggagtcgcctcgcccgggttgatgaactgctttctcgcgttctgggtttcatggaaatctgtgtgtgtgtgttctctgacgctggtgctgttagaaacttccaataa

SEQ ID NO: 1038 - DNA, 1234 bp, Oryza sativa
atgaggaggatcacgtggctcgcgacggcggctgcggcgctgtgctgcctcgtcgcggcggcgagtgcgacggcgcagtgcaggttcccggccgtcttcaacttcggcgactccaactccgacaccggcggcttctgggccgccttcccggcgcagcaggcgccgttcggtatgacctatttccgccgccccgccggccgcgcctccgacggccgcctcgtcgtcgacttcctagcagtgcaagcgatggggcttccgctgctgagcccttacctgcagtccgtcggctccggctaccgccacggcgccaacttcgcgacgctggcgtccacggcgctgcagccccaacacctcgctgttcgtcaccggcatcagccccttcttcctcgctgtccagctcaaccagatgaaggagctgaggaccaaggtgctcacctccaatggcaacaacggaccaacttcctgcacctgatgttctgcacaatgctctgtacacaattgacattggtcaaaatgatctcacctccaacctgggatcacagagcattgagacggtcaagcaaagtctccccttcagttgttagcaagatctcctctactgtgcaggcaggaattgtacaacattggcgctcgcaacattatggtgtttaacatggcgcctatcggatgctacccggcattcctcacgaaactcccgcataccagcaatgacatggatggatatggttgcatgaaaacctacaacagtgcagtgacctactacaatgaactgctgaacaatagcttggccgaggttaggaagaagctgcaggatgcatctattgtgtatcttgacaaacacgctgtgacgctcgagctgtttcgccatcctaaagctcatggggctgaagtatgggactaaggcttgctgcggatatggtgatggggcttacaatttcaacccagatgtgtactgtggaagcagcaaattgctgaatggccaaacggtaaccgcaaaagcttgtgctgatccacagaactacgtgagctgggatggaatccatgcgacagaagctgcaaacaagatcatagcatcttccttgatgagcggctcatattcatatccaccttttgatctttccaaactttgccacctacagcccatagcataatcacagcaccaatctagtcatacttagttgctgaaaccagaatatgacaggaaagcacatcttctggaaaagagatgttgtaa

SEQ ID NO: 1039 - DNA, 981 bp, Oryza sativa
  N_region (594)..(594): n = any nucleotide
atggcgcacttccagggacagcagcacggccacccggcggcgcgcgtcgacgagtacggcaacccggtggcggccggccacggcatcaccgggacgcaagaggcaggcgccggagggtacggcgccgccggcaacgttgcgcagcctcagcatgcgttcggcggcgcaaccgacgccgggggttatggccggcaggccggatacggcgcaaccggcaccggcacccacgacgccgcgggctatggtggttccggtcagccggcgtacggcgctaccggcactggcgtccatgacgccggtggtttaatgcctgggcacactgccgggcatggtaccaccggcaccggagtccaccacggcgccggcgccggtttacccgcggggcagaccgccgggtacggaacaaccggcgtcaccggagctcagcacggagctggtggactaggaaccgggcacacagccgggtacggaaccaccggagcccaccacggcgccggtggcttgggcaccaggcacatggctggacacggagccaccacaacacccgacaccatggcatacggaaccaccggcacaggggcgccacacggcgcnaccgccggcaccggcgcgtatccgcacgcaggcggccagttccagccggcgagagaggagcacaagaccggtggcatcctccgccgctccggcagttcaagctcaagctcgtcgtctgaggacgacgggatgggagggaggaggaagaagggaatcaaggagaagatcaaggagaagctccccggcggcaacaagggcggccagcagcagccgacggccactgcggcgaccggcggatatggtgccggcacgggacacaccgccgccgctggtacaaccaccgacgccggcgggacggcgtatacaccgacgacgcagccgacgcacgagaagaagggtatgatggagaagatcaaggagaagctccccggtggtggccatcactga

SEQ ID NO: 1040 - DNA, 924 bp, Oryza sativa
  N_region (64)..(64): n = any nucleotide
  N_region (143)..(143): n = any nucleotide
  N_region (865)..(865): n = any nucleotide
  N_region (870)..(870): n = any nucleotide
  N_region (897)..(897): n = any nucleotide
  N_region (913)..(913): n = any nucleotide
agccgcggtaattctgccgcgaatgccgccggtaatgggacccagggcggttccctccggaaangtccccgtcggcggcggtgccgcaagagcaagcgctcgtcggcctcgtcggcgtcggcgtcggcggcgtctcctcctgntcctgcggtgggcgccgcgccaccggtggtgccggcgctgtcgtcggcgatcagcaagctgctgcagtcggagcccatggcggcgccgtgcgcggacttccccaacgtgctcccgaccttcgtgtccaccgggttcgagctccccgccgccgccggcgaccgcctctcgctggggtcgttcggggcgttcggcaacctgtcggcggcggtggcggctcccggcggtggtggtgggtcgtcgacgaccacgtcgttcatggacatgctgaggggagttggagggcttttcgacggcgtcggcaacagccatcagatgggcggcaatggcggcggcggaggcagctactacgcgcctctcatcaccggcgccggcaatggcatgctgatgccgccgccgccgctgccgccattttctggttctctgatgcagcatgggatgcaggggctgttcgccaatcatgcgatgggaggaggtggtggtggagtgatgaacgccggcgaggacggcagcgtgatggcggggctgggaggaggccagtggccgccggcgcttggtggtgcagacgagcagcagggcggcggcgacggtggcgaagctgtgatgacgaaggacaccggcggcggcgcatcgtcgtcggcgtcgaggccggactacttctacggctggaacagcgccgccggcggcttcttcgctggaggctccatcggcggcaaggccgccntttcnaccggagcaacgccatggcagggcctnattgaaaacaactcgnccattatttaa

SEQ ID NO: 1041 - DNA, 918 bp, Oryza sativa
  N_region (553)..(553): n = any nucleotide
atggcgtcgcagcagttcccgccgcagaatcaggagacgcagccggggaaggagcacgccatggatccccgccccgaggccatcatccagagctacaagccagccaacaagctgaagtcttctccgttcatgtcacgttcatgtcgtcgttcgtcggtgcaggacaaggtggcgatcgtgaccggcggcgactccggcatcgggcgggcggtgtgcctgtgcttcgcgctggagggcgcgacggtggcgttcacgtacgtgaaggggcaggaggagaaggacgcggaggagacgctccgcgcgctgcgcgacatcagggcgcgcaccggcgccaaggaccccatggcgatccccgccgacctcgggtacgacgacaactgccgcaaggtggtcgacgaggtcgccggcgcgtacggcggcgccatcgacatcctcgtcaacaacgccgccgagcagtacgagcgcccctccatcaccgacatcaccgaggacgacctggaacgcgtgttccgcaccaacatcttctcctacttcttcatgtcgaagcacgccntgaagcggatggggtgcagcatcatcaacacgtcgtcgatcaacgcgtacaaggggaacaagacgctgctggactacacggcgaccaagggcgccatcgtggcgttcacgagggcgctggcgctgcagctggcggaggaggggatccgggtgaacggcgtcgcgccggggccgatctggacgccgctgatcccggcgtcgttcgcggaggagaaggtgaggcagttcggctcccaggtgcccatgggccgcgccggccagccgtcggaggtggcgcccagcttcgtcttcctcgccagcgacgacgcctcctacatgtccggccagatgctgcacgtcaacggcggcgtcatcgtcaacggctag

SEQ ID NO: 1042 - DNA, 705 bp, Oryza sativa
  N_region (162)..(162): n = any nucleotide
  N_region (345)..(345): n = any nucleotide
  N_region (359)..(359): n = any nucleotide
  N_region (387)..(387): n = any nucleotide
  N_region (391)..(391): n = any nucleotide
  N_region (415)..(415): n = any nucleotide
  N_region (419)..(419): n = any nucleotide
ccgtccagcctcaccggcaagagtccgtacttctccaacaaccacggcaagctgttcgagctcaccggcgacaattgccgccactcaagaagctcgactgcagatcggcctcgcaacatcacccgcggctcgatgattgcgccgaactacaacacccgcgcnacaagctcgccgtcgtcctgcagggcagcggctactttgagatggcgtgccacacgtgtccggcggcggctcgtcggagcgccgggagcgcgagcgcgagcacgggaggaggagggaggaggaacagggagaggaggagcacggcgagcccggggagaaggcgaggaggtaccacaaggtganggcgcaggttcggnaggagtcggtgatcgtgatccccgcgtngcanccggcgacgatcgtcgccagcganggcnagagcctcgccgtcgtctgcttcttcgtcggcgccaaccacgacgagaaggtgttcctcgccggcaggaacagcccgctgaggcagctcgacgacccggccaagaagctcgtgttcggcggctccgcggcgagggaagcggaccgcgtgctcgccgcgcagccggagcagatcttgctgcgcggcccgcacggccgcggcagcgtctccgacatgtaacgcgacgcgacgacgtcccctgcacccggcgcgcgtacgccgagcagctgtgtgatcgagaggaataa

SEQ ID NO: 1043 - DNA, 646 bp, Oryza sativa
gccggggaagcgaacaacctcgcgccgtggaagtccctgcccgaggagtgcgccgcctacgtgcgggagtatctcaccggcgtggcctaccgctccgacctcgaggtcgtcgcgcgggaggcctccgcgtacgcgcggaccgcccgcgtcggggacgacggccgcgacgcgtgggtgttcgacgtcgacgagacgctcctctccaacctcccctactacgccgaccacggatacggagcttgaagctgtacaatgaggttcgcgaccttggattcaagaccttcttgctcacgggccgcagcgaggggcaccacggcgtcaccgtcgacaatctcaagaagcagggcttccatgattgggacaagctcatactaagaagacggcgacgatatacaaatcggagaagaggaaggaaatggaagaggaggggtacaggatcctaggcaactccggcgatcaatggagcgacctgctgggtttctccacgagcgctcgctccttcaagcttcccaatccaatgtactatattccatgacggaacagaagagggaaagagagggcgggtgagaaatgcggcgtttatttgatgcattttctcacccagcccattcaaactgactggtggagaaaaagaaattcacaataa

SEQ ID NO: 1044 - DNA, 422 bp, Oryza sativa
atggcctccgaaggcgccgtgagcccggcgttcgcctacaccgtcgtctacgtcaaggacgtcgccaagtcggccgccttctactccgccgcgttcggctacaccgtccgccgcctcgaccaatcccacaaaggtgggcggagctggagagcgggacgacgacgatcgcgttcacgccgctgcaccagagggagacggacgcgctgacgggcgcggtgcagctgccggactcggccggcgagcgggggcccgtggagatctgcttcgactacgcggacgtcgacgcggcgtaccggcgggccgtggacagcggcgccgtgccggtgagcccgccggagcagaagagctggggccagaaggtcgggtacgtcagggacatcgacgggatcatcgtgcgcatgggcagccacgtccgcgcgtag

SEQ ID NO: 1045 - DNA, 321 bp, Oryza sativa
atgggaaagctttatggtttgttctgggttatggccttggtattggctacggtggctggtacaaaatccgatgagggttgcagtcgtgatcttcaggacttaattatggagtgtcaaaaatatgttatgaatcctgcaaacccaaagatagaaccctcaaacgcatgctgtagcgtaatccaaaaggcaaacgtcccatgtttatgctccaaggtcactaaagagattgagaagatagtgtgcatggagaaggtcgtgtatgttgctgactattgcaagaagccactacagcctggctccaagtgtggaagtaagctttaa

SEQ ID NO: 1046 - DNA, 366 bp, Oryza sativa
atggcgagatcaagcggaggacttgcaatggaggcaaccaaggagacccagcagcagcagcagcagaggaagccggacgccggcgacacggtgcagctgccgatggacaccagcccgtacgtgcagtacaagaaggacgacggcctggaggactacaagctgcgcgcctacggcgcccgcggccacctccccgtctccgacgtcccccacggcggctgcggcaccgacgcccccaccatccccggcaccgccgtccccgtcgccacacagcgccgccaccaacaaggcgacaccgccgctgccgccgccggcaccggccgcgttgacaccgccaccgacgccatcaatcaccatggcgtgccatag

SEQ ID NO: 1047 - DNA, 2145 bp, Oryza sativa
atgccgcgtcgccgcccacgcgtcgttatcgtcgttgcccactcgttgtcgtcaccgcccactcgtcgttgccgtcgggggtcggtgatgagaacatcaacaccaacgatatatccacgcctccacaagtacaacttcaacgtcctattactcgcgctcgtgcacgtcaactcaactatcaggaacaatggagagaatcaaatgggtgaggattcgcgcggggtggattcggactgcagcacagtcccaacttttgacggtcgccatgacttcatgcgaactctgatttgggcgtgcaagtactatcaagtctaccttcaaatggatctagcctcttgtccatatcagttctggagcagccgcaatcttcatttttctaccgagttcttttctgtccacgttgcttgttcatcttgttcttgctggttctcgattgcttacaccgcctctggagttggtgtaacgattgctaaggcgcaacatccctggatagttgtagtcggatcgccaacgtcactccatccaatctacttatccctctcatcgaaatatcgggacaccctcaagcacatcagtcggcgccgccgcgaagggggcagcccgagcgacggggacgacgcggcagccgctagccaccagcacgcgcacgccgcccactcgtgctcggtaccgagagaggaagagaaagagagggagaggagagaaagactttcgcgagccgtatcgtatccattggatggagccctagagcaacaagaagaagccaagaatatttgcgccatggagggtggtaattccagcaagggcgccatggagggtggtcaccgctgccgccgcccaaacgtcgacgacgatgaccagatcgaggagggagagatctgctacgactgccacgtctcgggctccgagaccgacgacgacgagcaccacagacgcgccgtgctccctccccgcgacaatggcgatggctgcgcggagcacaaacggtgccgcctcgacaatgctgctacggcgcccgcaccctctgccgggccggtgctgaccaccagcaacggaagcgccatcgtcgccatcgcctccgctgccgccgccgcagcagctgcggcgtcgacaatggcgcgggaggtgttcgcgtgccgcatctgccggaaggagttcgacacccggaaggccgtggacgggcacatgagagttcaccgtcagcaatccattgccacccccaagtataatgccgcagacaactctcgtgtcactgtggtcgctgagcccagaaccgatcttgatctttccggtccacacgggagcagcagcgcgccgccgtcgccaccagcgccggccaatcctcccaatcataatcaggccgtcggtcaccaaccagcggctgccgcgccgaacgccggcgtcgtcgtcgtcgtcgaaggggcgccgcaaaaaagtctaccatacatgtgcaagatgcagggctgcggcagggcgttccccacgcaccaggggctaggtggccacgctgccggccaccagaacaggagcaaggcagcggcggcggcggcctccgagcagggcagcagcggagcgggggccgacgggtgccacggcggcgccgacagcagcaagcatcggtgcagagaatgcggcatggagtggaagacaggtttcgcgctcggcggccacatgaggaagcaccaaactaaggagacggtgaccgtgaacgagaaggagccgaatgtcgctggcaagcacatctctcttggaccaccacctttgccggaccttactccggccgccgctgaggtaacttcgtcggaaccacttgatcagccaccactactgtcaatggtggtgggtgcagaagttgcagcaccggcgctgcttgcgctggccaacgaggcagcggcattgccgccacaggatgatcaggcagaggaagaggcggctgcagaagccgctgcaccggccgaggcagcggcattgcgaccggttgaggcagggcagaggcggccgatgttggagcagcaccagaggagccgctgctggcgcctattgccggcatgggaaccgtgcgtattttcggttttttggttgagaagccggcacctggagacggcagtggaggagagggttcagcgcctgcatagatcgtcctag

SEQ ID NO: 1048 - DNA, 768 bp, Oryza sativa
atggagcaaactttggacgtacctagatcgttgaggctaccgacaccaaaggctcaacaacaaatggatgaattttggagggatcgacaaaaagagattgagacaacaaaggactttagcgagcatgcgatccctatggcccgcttgaagaagatcgcatcttctcaaaagggtaacatgatgatgtcctttgacatgccagcattcttatcgaagatgtgtgagctcttcgtacaagaacttgctgtgcgtgcatgggcatctgctcaatcccataaccgttgcatcatactagacacggatattgctgaagccattgcctccacagagtcttatgactttcttgttgatatcctccataatcaccccatccctattactcctagtttaatgccaccaatttctcactatataccgttccaatatccatccttatcacaagaagtgtccacgatgatggcttccgcacccatagtgaatagatcaatgttgctcattcacaacatagcaaggggtctaggcttacaaggaaacaatatcagcacattcgccaacaataatatcccagacaatattattggttgtagtagccccgcggttcttgcaagtatgatgagtcctgctttactagacgttgcaggggcatcactaaatccgccaaactcttactccatctgcacgatgaacatgatcaactcgagtgatcccagtggatctagcattggtgacattaaatgtggcaaatcaggcaagtctggctccctctga

SEQ ID NO: 1049 - DNA, 3315 bp, Oryza sativa
  N_region (2606)..(2606): n = any nucleotide
  N_region (3036)..(3036): n = any nucleotide
  N_region (3042)..(3042): n = any nucleotide
atgccgccgcgctggcgcgccacggcgacgaggcttctcgtgctcctcgcgtgcgcgtgcgcggtgttcgtcccgcggtgccattgcgtcggcgaccagggcgaggcgctgctgcgatggaaggcgtcgctgctgaacgggacgggcggcggcggcggcgggctggactcgtggagggcgtcggacgcgagcccgtgccggtggctcggcgtgtcgtgcgacgcgcgcggcgacgtcgtggcggtgaccatcaagacggtcgaccttggcggggcgctgccggcggcgagcgtgctgccgctggcgaggtcgctgaagacgctggtgctctccggcaccaacctcaccggcgcgatcccgaaggagctcggcgacctcgccgagctgagcacgcttgacctcaccaagaaccagctcaccggcgctatcccggccgagctgtgccggctgaggaagctccagtcgctggcgctcaacagcaactcgctgcgcggcgccatccccgacgccattggcaacctcaccggcttgacgtcgctcacgctctacgacaacgagctgagcggcgccatcccggcgagcatcggcaacctcaagaagctccaggtgctccgcgccggcgggaaccaggcgctcaagggcccgctgccgccggagatcggcggttgcaccgacctcacaatgctcggactcgccgagaccggcatctccggcagcctcccggcgacgatcggcaacctcaagaagatccagaccatcgccatctacaccgccatgctcaccggctccatcccggagagcatcggcaactgcaccgagctcaccagcctctacctctaccagaacaccctctccggcgggatcccgccgcagctcggccagctcaagaagcttcagacggtgctcctatggcagaaccagctcgtcggcacgatcccgccggagatcggcaactgcaaggagctcgtgctcatcgacctgtccctgaacgagctcaccggcccgatcccgagaagcttcggcggcttgccgaacctgcagcagctgcagctcagcaccaacaagctcaccggcgtcatcccgccggagctctccaactgcacgtcgctgaccgacatcgaggtggacaacaaccagctcaccggcgcgatcggcgtcgacttcccgaggctgcgcaacctgacgctgttctacgcgtggcagaaccggctcaccggcggaattccggcgagcctcgcgcagtgcgagggcttgcagtcgctggacctctcgtacaacaacctcaccggcgccatcccgagggagctcttcgcgctgcagaatctcaccaagcttctcctgctcagcaacgacctcgccggtttcatcccgccggagatcggcaactgcacgaacctctaccggctccggctgaacggcaaccggctttccggcacgatcccggcggagatcggcaacctgaagaacctcaacttcctcgacctcggcggcaaccgcctcaccggcccgttgccggcggcgatgtcggggtgcgacaacctcgagttcatggacctgcactccaatgctctcaccggcacgttgcccggcgacctcccgcgaagtctccagttcgtcgacgtctccgacaaccggctcaccggagttcttggcgccggcattgggtcattgccggagctgacgaagctgaacctcgggaagaaccggatctccggtggcataccgccggagctcggctcttgcgagaagctccagctgctcgacctcggcgacaacgcgctctccggtggcatcccgccggagctcgggaagctccctttcttggagatttcgcttaacctcagctgcaaccgcctctccggcgagatcccgtcgcagttcgccgggctcgacaagctcggctgcctcgacgtctcgtacaaccagctctccggtagcctcgagccattggcaaggctggagaacctcgtcacgctcaacatctcctacaacgccttctccggcgagcttcccgacacggccttcttccagaagctacccatcaacgacatcgccggcaaccacctgctcgtcgtcggctccggcggcgacgaggccacccggcgggcggccatctcgtcgctgaagctagccatgacggtcctcgccgtggtcagcgcgcttctcctcctgtcggcgacgtacgtgctcgcccgctcgcgccgcagcgacagcagcggcgccatccacggcgccggcgaggcgtgggaggtgacgctgtaccagaagctggacttctccgtggacgaggtggtccggtcgctgacgtcggcgaacgtgatcggcacggggagctccggggtggtgtaccgcgtggggctccccagcggcgactccgtcgccgtgaagaagatgtggtcctccgacgaggccggcgcgttccggaacgagatcgcggcgctgggctcgatccgccaccggaacatcgtccggctgctcgggtggggcgcgaaccggagcaccaagctgctgttctacacctacctccccaacggcagcctcagcgggttcctccaccgcggcggcgtcaagggcgccgccgagtgggcgccgcgctacgacatcgngctcggcgtcgcccacgccgtcgcctacctccaccacgactgcctcccggccatcctgcacggcgacatcaaggccatgaacgtcctgctcggcccgcgcaacgagccctacctcgccgacttcggcctcgcccgcgtcctctccggcgccgtcgactccggctccgccaaggttgactcgtccaagcctcgcatcgccggctcctacggctatatcgcaccagagtacgcgtcaatgcaaaggattagtgagaagagcgacgtgtacagcttcggcgtggttgtgctggagatcctgacggggagacacccgctggacccgacgctgccaggtgggacccacctggtgcagtgggtgcgggaccacctgcaggcgaagcgggccgtggcggagctcctcgacccgcggctgcgcgggaagccggaggcncaggtncaggagatgctgcaggtgttctccgtcgccgtgctctgcatcgcgcaccgcgccgacgaccggccggcgatgaaggacgtggtggcgctgctgaaggagatccggcggccggtcgagggcggcgccaccggcggcggcgaggggaaggagcagaatgccgccgccgccgccgccgcgcctccggcggccgagcgacggtcgccggcgaggagcacgctgccgaagggcggctcttctagctgctcgtttgccatgtcagattactcgagttga

SEQ ID NO: 1050 - DNA, 3190 bp, Oryza sativa
  N_region (161)..(161): n = any nucleotide
  N_region (264)..(264): n = any nucleotide
  N_region (606)..(606): n = any nucleotide
  N_region (1818)..(1818): n = any nucleotide
  N_region (2130)..(2130): n = any nucleotide
  N_region (2132)..(2132): n = any nucleotide
  N_region (2141)..(2141): n = any nucleotide
  N_region (2145)..(2146): n = any nucleotide
  N_region (2164)..(2165): n = any nucleotide
  N_region (2216)..(2216): n = any nucleotide
  N_region (2327)..(2327): n = any nucleotide
  N_region (2336)..(2336): n = any nucleotide
  N_region (2343)..(2343): n = any nucleotide
  N_region (2555)..(2555): n = any nucleotide
  N_region (2641)..(2642): n = any nucleotide
  N_region (2648)..(2648): n = any nucleotide
  N_region (2735)..(2735): n = any nucleotide
  N_region (2759)..(2759): n = any nucleotide
  N_region (2777)..(2777): n = any nucleotide
  N_region (2798)..(2799): n = any nucleotide
  N_region (2814)..(2814): n = any nucleotide
  N_region (2816)..(2816): n = any nucleotide
  N_region (2844)..(2845): n = any nucleotide
  N_region (2853)..(2853): n = any nucleotide
  N_region (2856)..(2857): n = any nucleotide
  N_region (2859)..(2859): n = any nucleotide
  N_region (2863)..(2863): n = any nucleotide
  N_region (2873)..(2873): n = any nucleotide
  N_region (2909)..(2909): n = any nucleotide
  N_region (2915)..(2915): n = any nucleotide
  N_region (2921)..(2921): n = any nucleotide
  N_region (2939)..(2939): n = any nucleotide
  N_region (2951)..(2951): n = any nucleotide
  N_region (3077)..(3077): n = any nucleotide
atggcacggggctctgctctgctcgacggcagtgtactgccgccttcccgcatcgtgaacgagaggcatgccggactgccgcgccgcttcatgccggagtccgccaccggtcgggagatagtgatgctgggcgaggggcgcccggcaccagactacccggngcggtccatcttcttcctccccttcgcaatggctgggctggtcccgccattttctcatttcttcatggatgtcctggagttctacgatctccagatggcgcanctcacccccaatgcggtgatgacattggccatcttcgcacacctgtgcgagatgttcattggggtgcgcccctctcttcagctgttccggtggttcttcaccgtgcagtcggtgtcaccgccgtcggtggttggcggctgctacttccagccgcgggggccggtgttgaaccgctacatcccctgcgtcctccgcaagaagtgggacgactggaagagcgactggttctacaccccccttgccgacgaagcgcgcctccgacttccaagccagcccccggcgcaggtctccagctggcgggcgccggtagatctgggggaggactacgacgccgtcctcgancgcctggcgggcctgcgatcccaggggctcaccggggccatggtgtacggcgattatctccgtcgccggattgcgccgctccaacggcgcgcccggagcgcctgggagtacactgggcctgaagactacatgcggacccaccagggaaccaagatgggattgggctcctgaggacttcaagatcgtagtccaaagggtgctgaaccttagctccgcggaggcgtctcgccttcctcaggagatcctccccctctgcagcgatcccgaccgcgtctccattctaaccattatgatgggggtcggggcctcagaggagagagcccctaagggccacgacggcgcgggcgagcgccgccggggggaacaacctgccccaggagggggtcgtgcttctgggccccgcgtcgggggctcggggagcagccgccctgccgacacccaggggaagaggaagctgggaggtacacctcccccatctcctccccgagggggcggggcggcgcgtgccagcagtcggcgcccggagggggccgcgccgacgtcgcagcccgagggggtgcgcaagaagaagcggctccgcaagacgggggagacggaaccatgccggggaaacctgatttcccctccaaggtggtcattcaaccgaccccctcgcaggttcgtctcactctcattgcaaccatctttctccaaaaagaagttttttcttgctcactttgttcgtcttctggctttttcttctgcttcagcgatgtcccgtcgcattcctcccgccaccccaagtccggccagtccgaggccgaagatccagcggccgcagaggagcggaggcgagagtctgaccggcgtgaagccgcagcccgccttcgggaagctgaagaggccgcccgggaggccgcccgggttcgccaagcggaggaagctgctcgggaggaggccgcccgggctcgccaagccgaagaagctgcccgggaggaggccgcccgggctcgccaggctgaggcgacagctgctgctggcgcgtcacttgggcccactccctcgggcggtcctcaggcgacatcctccgaggcggctcgcgacgaggccgcgggcgcatcgcctgggcctacctcaccgggcgacgcccaggaccaaacgggcccgggggacatccccgagcccagcgcatcctccggggggccaagccgcgtcgcattttctccaaggcgncttttctcctcatcttccgtcgccccggtgagcgccgagcccattatgcaggccttggccgccgcaaacaccgcggtgctagatggatttagcgcccaggtggaggccttgcgagcggaacgagcggagctcgaggccgcatgggcgcgcgtcgaggaggggcggcgctcggtggacgccatggtggaggtgggccgtaaggctcacgccgccacatctcggagcttgaagcccgcaaggcggcgctggcggagatcgcccgagaggtggaggaggagcgagaggccgccctcgtcgccaccaccgcgatgntngaggcgcangacnncctccgccttcaacacgnnagctgggaggcggagctgaagaacaagctcgacgccgcccaaggggttctngactccgccgctgcccgagagcggcgggcaacggaggccgaagcggcgtcccggcggcgcgaggaggcccttgaggcccgtgccatggcgctggaagaacacgccggcacngtggagaanggcttcncggaccgcgaggccgccactgctctccgggagacgacgctggcggcgcacgaggccgcctgcgccgaggaggagtccgcgctccgccttcgcgaggatgcactcgctgagcgggagcgagctctcgaggaggccgaggccacgacgcaacggctggcgaacagcctctccctccgcgaggcggcgcaagaggagcaggcgcgccgcaacctngaatgcgtccgtgccgagagagccgcgctggagcagcgggctgccaacctcgaggcacgggagaaagagctggccgcgagggcgcnnatcggnggggcggctgcgggcgaaagcgacttagccgctcgcctcgcggctgccgaacacaccgtcgctgacatgcagcgcgcgctggattcntccatcggggaggccgaggccctncgcttggcgggcgagatngggcccgacatgctttggganncggtctcccgcatgnancgcgccggtcggcaagcgggcctctggnnaggccagncgnngntgcnccccaccaanctggaaggcctcgctccgcacctcaacaggatggcntgggtnctcgancaactccccgaggagctngagaagaccatnaagtcatcctcgagggacctcgcgcggggagcggtcgaactcgtgctggcgagttaccaggcccgggaccccaacttctctccatggatggcgctggaggagttccctcccgggaccgaggacgangcgcgcgcgcgcgtccgggatgccgccgaccacatcgtcaacggcttcgagggctcggcccctcggctcgcgttcgcccccagctccgacgaggagggcgatgccagcggtga

SEQ ID NO: 1051 - DNA, 2987 bp, Oryza sativa
atgtcgggcaagacagctctggcgggcacagaaccaacggtcaataaacctgacgggcaggacagctccgtcgggcacagaaccgatgtcactaacaatccccaacacgaaaaagatgtcgggaaggtaccggagtcgagcgaggaatcgtggcgcacactgagcgacccatttgagctagaactagcgcaattgcagtatgaaagacctgaggatgacccggattatattcctatcgagcaggcgaaaaaacgtggcgagaagggcaggaacctcatgtcgaaggagacgtactacattcttgctctcgacgatgacggcaaacccgtcgagccgcaacatgtaagggcgaagtttagcacctcatgcggtgcgctggcaaagcttcatgggcctctcaacgtggacaaatggaagcacgttagcattcacatcaagaacttaatgtgggaaggtctgcaggagcaccttatttatccgcctgggtcggaggcacttggccggaaatttgcactgcaaacaattgcccatcggtggtgacagtgaaagtcggacatgaacaccaattatgttcagaagaataagactccatttgaagaattgggcaccattttagcagctgagtgggacaagttcgtggccaagatgacaactcctcaagctctagaaaggaggaagaagatgtcggacctggcgaagaagaacatatatccacacgggttagggtcaagtggatacgccggtcacgagaagaaatggcaaactacggaagaaaagtttgcggccgaagacaaacctttgattgtgcagcccctaaataagcaaactagaaattgggtgtgggcaagaacttcggggcaagtgacagaagagggtgagatgctgttggactgtccggacatccagaacgtgaccacgtctctccaacaaatcgtccagaaggaagaccgggtgagttcgtccctcgacagcagcatgatgagctgactgaagctttgggaactgcagaacactccggtagggtcagaggaaagtcgtgcaggatgaattggaacgtagggtttccacaggaagcccaaagttacaagaagcgcgacgcctacaaggccaagatgcgccaggaaatcacagatcaagtcatacaacaagtcacccaacaattctacagtcttgccgcacaacatcctcaagccttccctgacctggttcctcatggttcgcagtcgacacagatcccaagctctgtcgggtcggtagaaaatacaacctacccgatagatagtataactggtccgacaccatgcagccttgtcgttccgatagggagagcgggaaaaacaaaggaggttgcgtctggattggcgataccggggagacagttccataacagcccaattccggcggactatgcaagggttcaggtcgcacgtgttaatggcgaccagatgtcattggagcttgacatcccaacaccagaggggattgaacttctcggggatgcggttagccagttaatactctagcatcgtcgtgacatcatcctcactggatagttcacgttgacgacaccagctccatcggtgccaattacggctgcacctcctgcaccgccgtcccctccgatctgcactaccccacccggatctccactcccacagatatcaccacttagaggtccttctccacctccacaacaagtagcacctaactccccaactcccctacctcggcagccgtctcctgctcctcagtcgtatcttgctctaccccttgacgaacatgtgccacctccacagccagatacatcaaaggagcagccaaaaacctgtgaagcccgcaagctcatacccattatggtatccgcatacaacaaggaaaaaatggtagagtataagacacggatggttttgcaatctttcaagggtcgagggggtccgctaaagccaattggaccttatcagtattcggacgcacagatgagcgttgtaggtcttactgacaaaatgcaatcttggacctccgatgaagtgcctaaggagtatgaatatggcaagccgtttttgccgttcaacttgatgtgtgaactcccatggccaatgaggttgatgcatgagtggtacttgagggcaagtgagttaggtctcgggatgattactgtgcatgtcccggaaggcgctttcaaggatggacctaacgcaaacttcgccttcagtttcaaggacctccacgcattctttaagatggataaaatgaatatcaatctcgtcggcgcatggtgcctgttagcattccatgctgaaagaaccggggcctcaatcggttacgtaaatccaacgatggtttgcgagacggcccacactgtgcggatatcggaggatagtgcggtactaaagaataagacacctcaggagaaaaatgattacatcaagcgtctgcataagagaaagatggccgaggtgggaaattacttggccacctcatttctcgcacattccgacaaacgagtcatcatggtcccctaccactttggcactacatactattcctcgtctatccaatggaccaaaccgtcgtagttcttgatccggcggactatgacaaggacgcgtacatgaagttcctatgcttgttgaacttctatgcttgttgatctttgttataagcaacctagcttgacgaacctatacggttattacgtgtgcgagatgctcagggttaatgggagatacagaactgagtttacagatatagcacaagccgggttcgatcagaaaacgcttatcaacttgtgcgcggacttgtgccggttcattcgtcgcgacatctgcaatcatctaggagagttccatgatcctcatagcgaacttgctacggaccccaaattcaagaatctaagagagtgggagaggcaacatgctgtggactaaatggatgtatttgtcgcgggggatacttgtaataaacactatactttctatgtaatatga

SEQ ID NO: 1052 - DNA, 2981 bp, Oryza sativa
  N_region (381)..(381): n = any nucleotide
  N_region (699)..(699): n = any nucleotide
  N_region (969)..(969): n = any nucleotide
  N_region (1119)..(1119): n = any nucleotide
  N_region (1200)..(1200): n = any nucleotide
  N_region (1339)..(1339): n = any nucleotide
  N_region (1380)..(1380): n = any nucleotide
  N_region (1571)..(1571): n = any nucleotide
atggcacggggctctgctctgctcgacggcagtgtgctgccgccttcccgcatcgtgaacgagaggcacgccggactgccgcgccgcttcatgccggagtccgccaccggtcgggagatagtgatgctgggagaggggcgcccggcaccagactacccggggcggtccatcttcttcctccccttcgcgatggctgggctggtcccgccattttctcattttttcatggatgttctggagttctacgatctccagatggcgcacctcacccccaatgcggtgatgacactggccatcttcgcgcacctgtgcgagatgttcattggggtgcgcccctctcttcagctgttccggtggttcttcaccgtgcagtcggtgtcnccgccgtcggtggttggcggctgctacttccagccgcgggggccggtgctgaaccgctatatcccctgcgtcctccgcaagaagtgggacgactggaagagcgactggttctacacccccctcgccgacgaagcgcgcctccgccttccaagccagcccccggcgcaggtctccaactggcgggcgccggtagatctgggggaggagtacgacgccgtcctcgaccgcctggcgggcctgcgatcccaggggctcaccggggccatggtgttcggcgattacctccgtcgccggattgcgccgctccaacggcgcgcncggagcgcctgggagtacactgggcctgaagactacatgcggacccaccagggagccagatgggattgggctcctgaggacttcaagatcgtagtccaaagggtgctgaatcttagctccgcggaggcgtctcgccttcctcaggagatcctccccctctgcatcgatcccgaccgcgtctccattctatccattatgctgggggtcggggcctcagaggagagagcccctaagggccacgacggcgcgggcgagagccgccgggggggncggcgcccggagggggccgcgccgacgtctcagcccgagggggagcgcaagaagaagcggctccgcaagatgggggagacggaaccagcccggggaaacctaatttcccccccaaggtggtcattcaaccgaccccctcgcagcagagangtcccgtcgcattcctcccgccaccccaagtccggccagttcgaggccgaagatccagcggccgcagaggagcggaggcgngagtctgaccggcgtgaagccgcagcccgccttcgggaagctgaagaggccgcccgggaggccgcccgggttcgccaagcggaggaagctgctcgggaggaggccgcccgggcaggaggaggccgcccgggctcgccangctgaggcggcagctgctgctggcgcgtcactcgggcccantccctcgggcggccctcaggcgacatcctccgaggcggctcgcgacgaggccgcgggcgcgtcgcctgggcctacctccgggcgacgcccaggaccaaacgggcccgggggacatccccgagctcagcgtatcctccggggggccaagccgcgtcgctttttctccaaggcggcttttctcctcctcttcngtcgccccggtgagcgccgagcccattatgcaggccttggccgccgcaaacaccgcggtactagacggatttagcgcccaggtggaggccttgcgagcggaacgagcggagctcgaggccgcatgggcgcgcgtcgaggaggggcggcgctcggtggacgccatggtggaggtgggccgtaaggctcaccgccgccacatctcggagctcgaagcccgcaaggcggcgctggcggagatcgcccgagaggtggaggaggagcgagaggccgccctcgtcgccaccaccgcgatggtcgaggcgcaagacaccctccgtcttcagcacgcaagctgggaggcggagctgaagagcaagctcgacgccgcccaaggggttctcgactccgctgccgcccgagagcggcgggcaacggaagccgaagcggcgtcccggcggcgcgaggaggcccttgaggcccgtgccatggcgctggaagaacatgccggcgccgtggagaggggcttgatggaccgcgaggccgccactgctctccgggaggcgacgctggcggcgcacgaggccgcctgcgccgaggaggagtccgcgctccgccttcgcgaggatgcactcgccgagcgggagcgggctctcgaggaggccgaggccacgacgcgacggctggcggacagcctctccctccgcgaggcggcgcaagaggagcaggcgcgccgcaaccttgaaagcgtccgcgccgagagaaccgcgctggagcagcgggctgccaacctcgaggcacgggagaaagagctggccgcgggggcgcgcatcggtggggcggctgcgggcgaaagcgacttagccgctcgcctcgcggctgccgaacacaccgtcgctgacatgcagcgcgcgctggactcctccaccggggaggccgaggcccttcgcttggcgggcgagattgggcccggcatgctttgggacgcggtctcccgcatgaagcgcgccggtcggcaagcaggcctctggggaggccagacgacggtgccccccaccaatctggaaggcctcgctccgcacctcaacaggatggcttgggttctcgagcgactccccgaggagctcgagaagaccattaaggcatcctcgagggacctcgcccggggggcggtcgaactcgtgctggcgagttaccaggcccgggatcccaacttctccccatggatggcgctggaggagttccctcccgggaccgaggacgaggcgcgcgcgcgggtcggggatgctgctgaccacatcgtcaacggcttcgagggctcggcccctcggctcgcgttcgcccccagctccgacgaggaaggcgacaccagcagcgaggacggcggtggcgacgaggccggcgaccctttgccagtccggccgggggcttag

SEQ ID NO: 1053 - DNA, 2959 bp, Oryza sativa
ggaggtggcacaataagtgcttgcggaggggatggtttggctgggggaggtggtgggcgtgtttctgttgatgttttcagtaggcatgatgactcccaattttttgttcatgggtgggaggagctcaggttgtctggacaatgcaggtgcagctgggactctttatgaagaagtgcctaagagtattactgttagcaacaataacttgagcacacaaactgatacagtttttctagaacccccatatgatccactctggacaaatgtttttatcaagaatcatgccaaagtttctcttcccttgcgttggagtcgtattcagcaggctcaaggacaaattagccttctatctcgcgctacattaacttttggcttgacacactatccatattcagagtttgaattgttggctgaggaacttcttatgagtgattctacaattaagattcaggtgtttggtgctttacgaatgtctgtaaagatgcttcttatgtggaactctagaatgttgattgatggtggcagagagtcaggagttgcgacttctttactagagggtagcaatttgatagtgttgaagtcatcagttatacattctattggcaatcttggaattcatggtcaaggcatcctgaatttatctggagatggagatacgattcaggcgcaacgtcttattttatcacttttctacaacatagtggtaaaccaaagctgaactgtgaagatgagagttgtcctatggaaatctttcatcctcctgaggattgcaacctgaacacttcattgtcttttaccctacaggacattgttgtttctggccttgtgcaaggaactgttattaatttcaacagagcaagaaatgtcactgtgagatcatctgggaccattagtgcaacaggattaggtaatgggttctttggagcaatctcttccactactctcccttgctggttcaatagaggcgaatggtggcagttttgctggtgcggtgactcatgctgcaaatgaaggacctggtggtggttccgggggcacaattcttctatttgtgagggcattgtccttggaggagggctctgtactttctagcgctggtggggttggaagtaatggtagtggcggaggtggaggtggccggattcacttccactggtctgacattcccactggagatgattatattccctttgcaacagttaatggatcaatacttgcaagggttttccgggtgaaaatggaacagtgacaggaaaagattgcccaaaaggtctttatggcacattttgcaagtgtcctttaggaacatataagaacattactgggtctttgaagtccttgtgttctccatgccctacaaatgagctccctcatcgtgctgtctacataagcatccgagggaggtgttactgaaaccccgtgcccatacaaatgtgtgtccgatagataccgcatgcctcactgttttactgctcttgaagagttaatatacacttttggtggaccttggttgtttggtctgtttctctcaggccttctttttttattagcccttgttttgagtatcgctcggatgaagtttgttggcactgatgagttgcctggaccagcaccaactcaacatagctcccaaaattgatcactcttttcccttcctcgaatcactcaatgagctggaaaccaatagggccgaagaatctcactgtcatgtgcacaggatgtatttcatgggtcccaacaccttcagtgaaccttggcatctaccacacaccccacctgagcagatttctgagattgtgtacgtcgatgagataaatgctctcgcagcatatcagtggtgggaaggatcaatttatagtatcctgtgtatactttcataccccttggcatggtcttggcaacagtggcgcagaagaagaaaattacaaagattacgtgaatttgttcgatctgaatatgatcattcatgtttacggtcttgccgtcacgtgctctttatgaagggctgaaggttgctgctacaccagatttaatgctgggttatttagatttctttcttggtggggatgaaaaaaggcctgacctcccccctcgtcttcatcaaaggttgccaatgtcattaatctttggaggcgatggaagttacatggctccattttcacttcacagtgacagtgtggtcacaagtcttattagtcagtggcaccgccttgttgctggattgaacgcccagttgcgtttggctcgtcgtggaaatctaaaagccacatttcttcctgtactcaaatggcttgaaactcatgcaaatcctgctttgaacacataccgcgtgcgtgttgaccttgcatggttccaagctacagcactaggttactatcaatttggtctagttattcattctgtgggaccattcagtagtggccttcaagctcaaggacaagagagatttattttaccctctttctcttatattgcacaataccaaaccagttgggcatcagcaggatcttgttggtttggtgatctctatattgcttcttgcagatttcagcttagtattgcttacttttctccagctatattcatattctatgatcgatgtgttgttagtgctgtttgttcttcctcttgggatactggcaccctttcctgctgggataaatgctctatttagtcatggaccacggcggtcagcaggtcttgctcgtgtgtatgcgctgtggaatattacatcattggttaatgttgtggcctttgcgtgtggacttgtgcattacaagtcttcagccaaaaggcatccaagcatgcaaccttggaatttgggcggtggtggctgttcccaacaggacttgtgttatgtaaatgcatccaagcaagacttgtcgattggcatgtctctatcttagagatccaggatcgtgcagtttatagcaatgacccaaccatattttggcagtga

SEQ ID NO: 1054 - DNA, 2748 bp, Oryza sativa
atggcggcgtgcgggccgtggggccgcaaccggagggtcggcgccggcgacgcgttcgaggccagcgaggtgaggcgggacgggcgcagcaggatgatgcccgcgtgcgggccgtggggggcgggccatggcggcggggacccggcgctcgagagggagctgtcgcgggacggcagccactacagcatctccagcgccatcctcccgtcgctcggcgcgcggagcaaccgccgcatcaagctccgccgcttcatcatctccccctacgaccgccgatacagagaatctgggagactttcctcatagttcttgtagtctactctgcgtgggtctcaccatttgaatttggcttcattccgaagcctacgggggctctagctacagccgacaatgtggtgaatgcattcttcgcggttgacatcattctgaccttctttgtggcttatttggataaaatgagctatatgcttgaagatgatccaaagaagatcgcatggcgttatagtaccacatggcttgttcttgacgtggcctccaccatcccatcagaatttgctcgcaggatactaccttcaaagcttaggtcatatggatttttcaacatgcttcgtctgtggcgtctccgcagagtcagctctctgttttctagttttctaggttggagaaggatagacacttcaattacttctgggttcgatgtgcaaagctcatttgtgtcacactttttgctgtgcactgtgcggcatgcttctactatcttcttgctgataggtaccccgtcccaacttctacgtggattggcaattacatggcagatttccatgaacggagcttatggattcgctacgtaacatcagtctattggtcaatcaccactcttaccaccgtgggctatggggatctacatgcagaaaatacaagggagatgatcttcaacattttctacatgctctttaaccttggtttgaccgcttatttgatcggtaacatgaccaatttggttgtccatggcactagtcgtactcgaaactatagggatacaatccaagcagcaacaagctttggagtaagaaatcagctaccacctcggctgcaagatcagatgatttcacatattagcttaaaatacaggacagattcagaaggtcttcaacaacaagagatccttgattcactgcctaaagctattaaatctagcatttctcaatatctgttcttccatctggttcaaaatgtttacctgtttcaaggagtctcaaatgatctgatttttcaactggtaaggatagagttctttctgtagctgtgtttttgtagttgcgtactgttacagaatggtttcggagatgaaagctgaatattttccacctagggaggatgtgattttgcagaatgaagcacccactgacttctacatcttagtttctggtagtgtgcaggtgatacaagtggctacgtcaggagaggttgttggagaaattggggttctttgctacagacctcagctattcacagttcgaacaagatccttgtgccagttgttgcgtttgaatcgtacagcttttctcagcattgttcaatccaatgttggggatggaactatcataatgaacaaccttattcagctgatgcagttccttaaagagcagaaggagaacagtgtaatggctggtgtcgtaaaggagatagagagtatgctagctcggggaaatctggatttgccaattacactctgttttgcagtaactagaggagatgattttttgttgcatcaacttcttaagcgtggtatggatccaaatgagtcagataatgacgggcataccgcactgcatatagctgcttccaaaggaaacgagcaatgcgtcaggcttctattagaatatggagctgatccaaatgccagaggactcagaaggaaaagttccactgtgggaagcgctgtgtgagaagcacgccgccgtcgtgcaactattagtcgaaggcggcgcggatctgtcgtcgggtgacacgggcttatacgcttgcatcgccgtggaggagagcgacaccgagctgctcaacgacatcattcactacggaggcgacgtgaacagggctcgccgggacgggaccaccgccctgcaccgcgccgtctgcgacggcaacgtccagatggccgagctcttgctggaacacggagccgacatcgacaagcaggacggcaacggctggaccccgagagccctcgccgagcagcagggccacgacgacatccagctcctgttccggtcgctgatcgggaggttcaacagcgagcccatgatgaagaacatgatccacgaagacgccgacctgcccagccgggttctccccgagaagctccggaggaagcgggtcaccttccagaactccctcttcggggtcatctcgtcgtcgcaggcgcagcgggagaccgaccacccgctctcgaggggtggcctcgcggcgacgggctccccgaacccgagcagcggcagccgcaacgccgtcatcagggtgacgatcagctgccccgagaaagggaacaccgccgggaagctcgtgctcctgcctcagacgctggacatgctcctcgagctcggcgccaagaagttcgacttcgcgccaaccaaggttctcaccgtggagggcgccgaggttgacgaggtggagctcatcagagacggcgatcatcttgtgctcgtcagtaatgaatgggatgcagagaagatgaaaggcaagagctag

SEQ ID NO: 1055 - DNA, 2730 bp, Oryza sativa
  N_region (121)..(121): n = any nucleotide
  N_region (211)..(211): n = any nucleotide
  N_region (2179)..(2179): n = any nucleotide
  N_region (2332)..(2332): n = any nucleotide
atggcgagtgcccctctcctctcgtggacccggcaagcgctcccagtcgctgacacgggttcggtgctcgccggcggtggcgctggcgctcgtcgtggcggcggcggccgcggccgcggcnacggcgaagctgtacagcccggcggacaggatcctggtgaactgcgggtcgacgacggacgggctggacgcggaggggcgcaggtgggtngcggacgcgacgaacgacacgtggctgacggactccggcaagtcttcgatcatggcggccgccgacgagctggagacgatgctgccgtcgtccatcccctacatgacggcgcgggtgtttaccatggacacggtgtacaacttcacggtgaacccgcgcgaccgccactggatccggctccacttctacccgtcgtcgtacaacgggctggagccccaggacttccggttctccgtcttcaccaccacgggatacacgctgctccacaacttcagcgtctacttcaccaccaaggcgctcacccaggcgtacctcatcagggagtactcgctgccgcgtgtcccggagggccacttcggcgtcaccttctcgccgtcgcccatgatgaacgtcacctacgccttcgtcaacggcatcgaggtgatctccatgccggacatgttcaacaacccggccaccatggtcggcttcgccgaccagaccgccgacgtctccgccgccgcgttccagaccatgtaccgcctcaacgtcggcggcgcctacatcccgccgtccaacgactccggcctcacgcggccgtggtacgacgacacgccgttcgtccagggccccctgcgcggcctcgtctacaacgccggcccgcacttccacatcaagtaccccagcgacgccgccgagtacgccgcgccgccggaggtgtacctcggcggccgctccatgggcagggaccagcgcctcaaccagaactccaacctcacctggagcctccacgtggagtgcaacttcacctacgtcgtgcgcctccatttctgcgagctccagctcatccacggcaaccagcgggtgttcgacatctacatcaacaaccggacggcgcagacggacgtggacgtgctggagatggcgacggagcgcggcgtgccggtgtacaaggactacgcggtgaggctgagcaacgacaccgccgacgagcatctgtgggtggcggtgcacccctcggtgatgctccgcccgcagttctacgacgccatcctcaacggcctcgaggtgttcaaggtgaacaacaccggcggcagcctggcgtcgccggaccccgtcccgtacaagctgctcgcggagaaggagctcggctggggcgggccgccggagttctccaccgacaacccggccaacatggcgtcggtgatgggcggcacggcgggcggcgcggcggcggccgggatcgtggcggccatctgcgtggtggtgtacagcaacaagaggagcaagaagctgggcggcggcggcgccgactcgcacacctccgcgtggctgccgctgtaccactcccacaccagcggcaagtcgtcggggcacatcacggcgaacatcgccggcatgtgccgccacttctcgttcgcggagatcaaggcggcgaccaagaacttctccaacgacctggccatcggcgtgggcgggttcggcgtggtgtaccgcggcgtggtggacggcgacgtgaaggtggcggtgaagcggtccaacccgtcgtcggagcaaggcataaccgagttccagacggaggtggagatgctctccaagctccgccaccgccacctcgtctccctcatcggcttctgcgaggaggacggcgagatggtgctcgtctacgactacatggagcacggcaccctgcgcgagcacctctaccacaacggcggcaagcccacgctgtcgtggcgccaccgcctcgacatctgcatcggcgccgcccgcggcctccactacctccacaccggcgccaagtacaccatcatccaccgcgacgtcaagaccaccaacatcctcgtcgacgacaactgggtcgccaaggtctccgacttcggcctctccaagtccggccccaccacgctcaaccagtcgcacgtcagcaccgtcgtcaagggcagcttcggctacctcgacccggagtactaccgccggcagcagctnaccgacaagtccgacgtctactccttcggcgtcgtgctgttcgaggtgctcatggcgcgcccggcgctcgacccggcgctgccgcgcgaccaggtcagcctcgccgactacgcgctcgcctgcaagcgcggcggcgcgctgccggacgtcgtngacccggcgatcagggaccagatcgcgcccgagtgcctcgccaagttcgccgacacggcggagaagtgcctctccgagaacggcaccgagcgccccaccatgggcgacgtgctctggaacctcgagagcgcgatgcacttccaggacgcgttcgacgccgccgccggccgccccgtccccgcgctcgacgccgccgccggcagcagcagccacctcgacgacgggagcacggccagcatcaacacgctggccacgtcgtccacgtcgcacccgcacgagccgtgcgtcgacgttgtcttggagcccgacgacgtcgtcgcggagcgcgccaccttctcgcagctcgtccagcccaccggccggtgacagtgacaccactacggcactaccacaagtga

SEQ ID NO: 1056 - DNA, 2626 bp, Oryza sativa
atggggagcgatctgaaggagatgaagtacaggcggaggattgggctcgacgagcgggcgcaatgcagcgagcagagggcgctcgactggcacgcgctgaagcaggacccagtggagttgctccgcaagctggacgagctgagggagcagatcacgaggacctgccagatcgtcgagccgccgcgggagcaccgtcgggcgggccgacgagcgctctcgctgctccctgagaaccctgagccgccaccaatgccagggtatcaccgctcacgctatggtggtgggcggtatgggcacggcttgccgccgagcccctacgagccgctgcgccctgagattggggagaggtactccagacagtcaagtgggcggtatcggcagtatcaagggaggcaatgggatggctgtggagttggacatgggaattacaatccttcttatacatgttcctgtccgcattgtctacatggacagagaactgcaccacaagaagagcacattccaatggcgagatactttgctgggcagcatgagtgctaccggtttgaaaggtcgccatctgtctcatcggactatgaccggaggtccgtagcatcatcattgtactcgcatcggtcggtttcaaagaagagagcagagtatttccggaagaaggcagagcatctttgccgtcctgtttatggcgccgccccttttgttgtgtgcagttcttgttatcagctgttgcaggttccaatggaaaagtgtatgggaggaatcggctgcagtgtgggtcttgctctcagattgtcagtttgaagcgtgaggagaaagttatccccttctcaccatcagcatccttttgtgtgcccaaaattgagcaaggttcaaatgatcaaactaggcgagattttgagcaccagctcaatgagtttgccaattctgccttttataatttgaatgagcatagcagcatgcaaatcaacatagactttggtgatgatcattcagtttcttcttccattagtcatgacaggactgagaaaggatgtggatcaagcaggagcattcagttaaaaacagatgggctcttgttgtctccaagcagatctggagatattgagagcccgaaggatatattatgcgaaagagatgctgaatgtcaggtagaaccttcagatgctcgagtcagcccatgttccccagttttagaggacaaacttgttgatccattgtgcagccaggaaaaggataataatagtgaggacctaggcatggctaatatatctgatgtaaattgcaaaggagaacacaaagttaatgatgatgatgatgggagtcttagtatgggaagtgaacagaagagaaaggaatgcgatgaagattcccttgtagatgaaagcatgtgcaaaacccatgaacagaagagcaaggacgatcactctagccctgaagatgttagcaaaactcatgaatttgatagtacaaaagataatattagcagtgctgtagatggaaatgaaaagcatgagtttgaaagcaaaaaagatgataccaatagtcttgaaggtgaaagtttgaacaaggaacatgagcaaaagagcaaagaagacgaaaatagtggccttgaaggtgagaatgttaagaaggggtttgacaaaaacaacaaagaaagtgaaaatagtgcccttgaagaatgccaatgccccccttgaagatactagaaatgcctctgatgcggcaagcttaagcgagatatctgaagaaaagaaaacagaggaagaaaatggaagtttggaccagccttttgttgaagatggcaatgcctttgcagagagtgggggatcatcatttaatgagcgtacaaattctggttttttcccgtggttcttctgagactgcattagaagaagatcagccctcaactggaaagagtggggattcgtcattttttgctggtttcctgaagaagggtttcaaggacctttctttatttaatcagtccatggacagcgttaaggtttcaattaatggccatcctatctctgaaagagctcttaagaaggcagagaaaaaagctggtcctgttgagcctggctcgtattgaggtacgactaccgtgctgggttttggggtgtcatggggcgagaatgtatcggcattatccctccattcataagagaattcaattacccgatggccagtaactgtgctagtggggatagtggtgttttcgtgaatggcagagaacttcatcagagagatctagatttgcttgtaggaagagggcttccacgcatctctggcaaatcatattctgtagagatttctggaaatattactgatgaagaaactggcaagaagctacgcagtcttggcaaacttgctcccacaactcgagctaccttaagtggtctgtgttgccgcgcggcaattggctcgccgcgcctcacaagtcatccactaacactgatttctactacaccagacaagacagagtgcggttcgactcggaggtccgaatcctcgattttgcctccgctacagatgttacactgcgatcgtacattgcgagtgaaataaagaactgcaataatcaagaacggagaaagtacgccggtatggcatatcctatttactggtataa

SEQ ID NO: 1057 - DNA, 2569 bp, Oryza sativa
  N_region (726)..(726): n = any nucleotide
  N_region (785)..(785): n = any nucleotide
tggaatatcgccttcaatttctccactgatcccaccttcctctccaactgcatgcaggccaccgatggtacgcgtgtgtgcaccgccgctgagatgaagttctactttgaaagcttcctcgacagcaatggaagaaagaactacgtgaggcccaacaagaactgcaacctcacatcatggatggatggctgtgaggctggctgggcatgcagtgcaggcccggaccagaatatcaacttgcaggatgccgtcaacttcccttccagaacacttgattgccgaggctgctgtgctggattcttctgccctcacggcctcacttgcatgatacctgttgatcatttacaacttctcagggcaacttctgaccaaccgagagaaaaagcaagcaaaatctagggaggctgcagcaagacacgcaaaagagactgccatggctcgtgaaaggtggaaatcagctaaagatgttgccaagaagcacgccgttgggctgcagtcatcgctgtcccgcacattctcgcgcaagaaaactcttaggacacacgagccatccaaaggagcggttgaaactgatgtggagccatcgaaaggatcaggagaaaagaagagtaatcttactgacatgatgcgctcgcttgaagagaacccggaaaaaggagaaggcttcaatgtggaaataggagaaaaaaagaaaactaaagggaggcatgcacacactcagagccnaattttcaagtatgcatatggacagattgagaaggaaaaggcaatggaacagcagaatnaaaatctgaccttttcaggtgtgatatctatgggcaccgatgaagatatcaggacaagacctagaattgagattgctttcaaagaccttactctaaccttaaaggggagtaagaaaaaactgttaaggtctgtgaccggaaagcttatgcctggtcgggtagctgctgtgatgggcccatcaggtgcagggaagaccacattcttgagtgcaattgcaggtaaggcaactggatgcgagacaacaggtatggtacttatcaatgggaaaatggaacccatccgtgcgtacaagaaaatcattggctttgtcccacaagatgacattgtccatgggaacttgactgttcaggagaatctttggtttaatgcacgatgcagaggctttctgctgacatgtcaaaagctgacaaggttcttgttgtggaaagagttatcgaggctttgggactgcaagcagttcgtgattctttggttggaactgtcgaacagcgtggcatctctggtggccagcgtaaacgagtaaatgttgggctagaaatggtcatggaaccctctgtgttgattttagatgagccaacgtctggtttggacagctcttcgtctctgcttttacttcgtgcactacggcgggaagctcttgaaggtgtgaacatctctatggtggttcatcaacccagagctatacattgtataagatgtttgatgatttgatacttctcgcgaaaggtggcttgacggtttaccatggacctgtgaagaaagtggaggaatacttttcaggattggggattgttgtcccagatcgtgtgaacccgccagactactacatagacatcttggagggaattgtgaagccaaacgcaaatgttgcagttaatgccaaagatctccctctgcgatggatgctgcacaatgggtatgaagttccacgggatatgctgcagagtggttctgatgcagaatcgtcgtttaggggaggaggggatcttacccctggcggtgacactgggcagtctattgctggtgaagtgtggggcaatgtcaaggacatagttgggcagaagaaggatgagtatgattacaacaaatcttctcaaaacttatctaatcgatgcactcctggcattctcaggcagtacaagtactacctggggagaagcaaaggctccgtgaagctagaatacaaggcgttgactatctgatcctgggccttgctggtatatgtctagggacattagctaaaagatcattctctctggagaagatacactactggagggagagagcatctggaatgagctcgttggcgtacttcatgtcgaaagacacaatagatcacttcaacacgatcatcaagccgatcgtttacctgtccatgttctacttcttcaacaacccaaggtcgtcgatatgggagaactacgtagttcttgtggcgctggtgtactgcgtgacagggatcggctacacatttgcgatattcttccagccaggatcggcacagctgtcagcgctgcttccggtagtgctgactctgatagcaacgcagcagaaggacaccttcttcgcgaacctgtgctacaccaagtgggcgctggaagggttcgtgatcgcgaatgcgcagaggtactcgggcgtgtggctcataacgcgatgcggctccctcctcaagagcggctacgacatcaacgacaggttcctctgcattctcgtcctcgccgccaacggtgtcctcttccgctgcgtcgccttcttctgcatggtcatcttccagaagcactga

SEQ ID NO: 1058 - DNA, 2538 bp, Oryza sativa
  N_region (324)..(324): n = any nucleotide
atggctcttccaggccgcctcctcctcctctttctcactgccgcacatgcagccctgcaaacatgcggtggtgaccaaacccctggccccgttgcaaatgtatccagggtctggagcagcaatacctctagagacgtgctcctctgctctgtcccaggcaatggcaacgagaaactgtccttcgctgccggcttctactgctcctccccttgcgacgccatcctcttcgccgtctacatcacctcaggctccggcgatatccctgtggtcgtgtggtctgccaaccgtgaccttgcggcacaccagaacgccaccctgagcttnaccgccagtggtgatttggttcttgcaaatgcagatggcagcgttgtctggtccaccggcacctcagggcagtttgtcattggaatgaccatcaccaactctggcaacctggtgctatttaatgatgcctacatgccggtgtggcagtcgttcgaaaatccaacagattctttgctccctgggcagatgctagcggagggaatgatgttaaggcccaacagctctgccaccaactggactacaagcagacagttatatttcactgttcggtctgatgggctctatgcgtttgccggatctgaccaacctcaaccatactatcggtttgagttttattcgtcatatctggttaaaaatgaaagcatcacacagtatcagtacaaaccaacctttgtgactctggtgaatgggagcctatcaatccctggatctgatccactggagaccaaattgccacctgcacactcacttcagtacttgaggtttgagtcagatgggcatctcaggctatatgaatgggaagagttcaaacaacgctgggtgatagcaaaggacatctttgagttaaactactgtcaatacccaactgtttgtggggagtacggcatctgcttaagtgagggctgctccactgagggcatggactgctcgactacggagtgctcctgtcccaataccacatacttcaagccaattgacaacatgagacctactcttggttgtgcggtggaaactgagatttcctgccaagctatgcaagatcaccaactcgtagcaattcctaatgttacatacttccatctctggggcgatagccgtggtgcaccaatgaccgatgaagagagttgcaagaaagactgcttgagcaactgctcctgtaaagctgccttgtttagtttgtatctcaaccaaactcaggctttgctctatccggatctatctctttctatgtcatatctgaatacgtgttacttgctaccagaagtcctttcactgcaagcatatcttgatccaggctactactcaaaagatccggtaaacgctaggtcaacattgtacgtcaaggtgcagagtacacacctgcttcctccatcaaagaaaaaaaacacttttggttatgcaattggagcaaccgccgctgcactagtgacactcaccattatctcaatggtcatcaggaagaggtgtaatcgacaaagagctgatgaaagcgattttgcagacctgcctggaacaataacgaggttcaccttcaagatgctgaaagcagcaaccaatgatttcagtagcaagcttggggaaggaggatttggttcagtttttctaggaaaattaggcaatgagatggttgcagtaaaactgctggatcgagcaggtcaaggaaagaaggacttcttagcagaagttcagacaattggcaacattcatcacatcaatctggtaaagctgataggtttttgtgtggagagatcacacaggctcctggtttatgagtatatgcctagaggatcactagacaagtggatttattacttgcatagcaatgctccactagattggggcacgcggaagaggataatcaccaatgtcgccaggggtctgtcttatcttcatgacgagtgtaggcagagaattgttcatttggacattaaaccacataacattctcttagatgacagcttcaatgcgaaagttgctgactttggtctatcaaagctgatcgagagggagataagcaaagttgtgacaagaatgaaagggacacctggatacatggcacctgaatggctgacttcacaaatcacagagaaggttgatgtatatagctttggtgttgtggtcatggaaatcatcagtggaagaaagaacattgactactctcagtcagaggagaatgttcagctcattactttactgcaagagaaggcaaagaaaggccagcttgaagatctggttgacaagaatagtgatgaaatgcacttacacaaggaggaagtgattgaggtgatgaagcttgccatgtggtgtttgcagagcgatagcagtagaagaccatccatgtccgtggtggtgaagaccatggaaggagaaagggcggtagatgacaatttgggttataacttctttgatttgagccctgcaatatctgttccagttgagcagctcaacagttcattgcaccctgaagcatcaattttatctgcccctaggtga

SEQ ID NO: 1059 - DNA, 2496 bp, Oryza sativa
atgtcggctagcaaacaagctcattgggacgagattggaatcagccaagccttagccctcaccatagcaaatttggccaaggacgaacccctgatagctgctgccacctatttctggtccaacacccttaatgcctttctcttcaaccaagggccaatgaccccaactctgctggatatcatcatgctcaccggtttagatgtgacctcgtcggccaaccccatgaacttgaacaccaagagtactttcgagttcaagactaagagcattggaggctggtcaggatacattgcagcatacatgggcaaaggaccagttaccccaagagagcatgtagccttcctgttgatgtggctagaaaaattccttttctgcgggtcaagttgtggtcctacaaccaactggcagttcatagccgaggctctagaatcgaagaagcaatttcccttgggcaagatccttctcggctatctatatcaaatgttgaacaatgcatcagccaagatgattattagctcagtagtcggggcaggtggaccatggtggttattgcaatcctggctaaacctggtagtcatgaaagttgtcaatcggccatctgtgacggaagccgaatttccaaggttggagccgattgtggaagatgatggagaagaacgcactcattgtagatgcatgtcatacggagaatatgcctctatgccagccgatgcgggagcaaagctatcggctgaacttctaaaggactggttcttcagtttttatgatgggtttcagaaggatgcccgagtttggttcttctatgccgattcaatggactttgaactaccagctgatttcagatttgaagacatcaatcacgaaaaatttcagcaatctcgagaagtcttcactactgctatcagcccgtgcatcctccctgttggcatccatcaagggagaaatattcaagtctcctatgagttctatcatccaatgtcatcggctagacaactcggaatgggacagctgccgatcagcctgtactttgccgacaagatccagtgcagaggtgacatctcttcaaccttaatgatggatcggctactgaacatccccagacctccattaggcagcattgagaacataaagttggcaaggttcaggagccgggcacttgacagatggtggagtgaatggaagctgcacttgttccatcaattggcgtccatgtatatgatagacctgttccctgatgccattcctcagacaacagaatcttctcctcctcgtcggagtaatagtggcaaggacattgaatataccccaagtctaattccaaatggaggtggaccatctccctccgccatcggctataatgcccccaagacctcagcacttctccaagggctcatcagagaaccagccgatgctggcaagaagcgaaaaaccagatcatcggctgttgatattttagccccagctttaaagaagaaaactaaaccaaagaagaccacgccagctgatgatctgcctgttctagatccatccatcgaaaaggttccggatgaagaagtgattggagatgatgtcgatcaagccgcagccgaaataagtgacacagaaagaacaccatcggcttcacccaagcataccccttcaactccttctgctccagttcacttcctaagtaaaaagaaaaccgctgtaaggaagaaatcggctacatcaactcctaaaccggctgcaccagtggaatcaggtggccgcactccatcggctgcagacagtcatcatgttgaaggagaagaacaactagctgctcctgttattccagttttagccgatctgttctctttcgacataaaagattaccttgatgaaacagaacaagacatcaccagtaaagcaacagctcttctgcccgatgatgtaaagagaacgctcaaagacatctctcatcggctagaagcatcattggataacctggtaaccaactgtggaccgatccgggaaaggttcacagacatccaagctcttctcccagatgaactagctgacgctcttactccagccgtctaccttgagcaacaccagttcaagctggaaaaggccaggcagaggttagccgatcgccgggagcgcaaagctattgaagctacaattcagcacaatcggcagcttgtacacgtagagaaatccaagcttgatcaattgtccgagggcccgatcaaatcaaatatcaatcggcttgaagctcgcaagattgatctcatggcacaactccaagaatgcaatgctgagctggatctggagcacaagaagctagccgatctcccacaagccgtcgaagaacagaaggcaaagctaaaatcggctatcaagaacattgctgacatgaccaaatccttgaaagtcatccctggaaccgacgctcaagacgcccaagccatagaagaagtagatcagattaggcaaagggctatatcggctatccagggatatttgtctcagtga

SEQ ID NO: 1060 - DNA, 2403 bp, Oryza sativa
atgggcgtgcacctcatgaccgcccgccccaccacgccggcgcgcgccgccgccgccgtcgaggctccggtggtgcacggcaattgggaattatctgcttcttttctgttgttgtccgtttcgttttacacgtcatgggctcgtcatctcatgggtgtggtggttcaggcaggggaagacatggcttcacgctcgacgccttcgaagaggccgtttcaaaagaattcttcagagcaaaatggtcggggcaagtggcagaaaacaaagcacaattctttgcagcagcctcaactgatagtgcaacctggtgttcctattttccgcattctctgccctacttcaaaatctgggatgtcattggcaagggtggaggcatcattgcaaagataaggcaagagactggagtaaaaatcagggttgatgaagttgtccctggttgtgacgagagggttattgtgataactgccattgataaggacagagaagttagtcatgtgcaaactaaggaaaacgacggaggtgtggcttgttctgttgatggcaaccatggaatggagaaggaccacactaaggaagaaaaggatgaaagtaacaaagaaatggatgattcagagaaaggccttggtaaggaagaaaaggatgatttagaaaaagatcatgataaggaggacagggatgagtcagggaaagacaatgataagaaagcagatgattcctctgttgcaaaagatacaaattctgagccagaggcgcagctggagctggagaagggaatgccattagccgtgaaggccattttgcttgtatttgaccggatttttgtaaatgaaatggaaaatggaacaggagatgcatctggtgagagaaatcatgtttcattgagattattggtgctagacagccaagtaggttggcttttgggaaagaatggtagtgtgattaagcaaatgtctactgacagctgttgtgaaattcgagtttcaaaggacaagcttccattatgtgctttaccccgagatgaactttgccagagattttgcatcagaaaatcattacatactcccttcatatatcatttcttcagatcactggagagctcgactcagtcaggaaaggtctgaatacagttgctcagttgctatttactcatcctcctaaggagagtgatgttcttggtgctcataattctggttcatctcgttcattcttcaatcaaccagatgttcttcctccaggaatgcaacctaatctccatctcccttttcaagggccaaatgttgctcatcttcccaattttcctgaagctctaatgcatggccatggctcagtcccacctgaaccccttacttttaggttgttatgctcaagtgacaaggttggaggtataatagggaagggtggaaacaatatcaagtctattcagaatgatacaggctgtgaaataaaggttcttgatactgttccaaaatctgaagatcgcatcgtatttatctcaggacctgcggcatccgggtgatggaatttcccctgcacagaatgcaattctgcatgtgcagcgtaaaattgtaccgacctccaacaccaaggagggtcctgcgatatgtaggctgattgtttcaccgaaccaagttggttgccttcttggcaaaggtggtagtatcatagctgaaatgaggaagctatcaggagcacatattatagtgctgagcaaagacaagatcccaaagggtgtcccagaaaatgatgaagttgttcagttcagattagtggggcctctgaagctattcaggaagctctaatgcagataactgcaagactgcggaaccatcttttccgggacagaatggcttcaacagtccctaatgtgcagccaccttttggtttggtggatcctcagtttggttcatatgcggaaaccatgattctatatctcctaggatttttcctaatgtgcctcagtttcataaagattttataggacgaccattggatgagatgtctgctccttggaccatgaaggtatcaatctatagggcatgcaggttgttggtgatccaatttcattgcctgatatcccaggaatggcgcatagaggaatgggtggatttcctggggcctggtcagccatctatcgtatcaaccataactgcagatgtcatggtcccaaaattagttttaccttctctatgtggggaagatggaggctgtttaaacagaattcgtgaggtagtgaccatggactggttgagttgctggtgatgatgattgtgtgggcaatgaagctagtgaccttatgtgttcatatttatgaatatgcgtgccctgtttgcagacttgcatatggtcgaagaggctaattatgctgaatagtgactaaatttcaacatgatggatctttgctag

SEQ ID NO: 1061 - DNA, 2305 bp, Oryza sativa
  N_region (102)..(102): n = any nucleotide
  N_region (104)..(104): n = any nucleotide
  N_region (111)..(111): n = any nucleotide
ccgccggagggggtgaagctgaacgagatcgtcggcggcggcatctccgggatcctctacaagtgggtcaactacgggcgcgggtggaggccgcggtggttngngctccangacggcgtgctctcctactataagatccatggtcccgaccgcatcgtcctctcgcgcgagaccgagcgcggcgccaaggtcatcggcgaggactccctccgccgcctctcccgaccctccacctcctcgtcttcctccgcgcactccaacggtcaccacctaccccgcaagcctatcggcgaaattcacctcaaggtgtcgtccgtgcgggagagcagatcggatgacaggaggttctcgatcttctcggggacgaagaggctgcacctccgggcggagacaagggaggacagggcggcgtgggtcgaggcgctgcaggcgaccaaggagatgttcccgcggatgtccacgagcgagatggtggggccaggggacaccgcagcggccgtggctgtctccaccgagcgcctaaggcagcggctgcagcaggaaggagtcagcgaggcggccattgctgacagcgaaaggatcgtgcgcaccgagtttgaggtcttgcacaagcagctcatgctccttaagcagaagcagacgctcctcctggataccctccgtcagctagagacagaaaaggtcgatttggagaatacccttgtagatgagagccaaagacagtcaaaagagtacggatccacttctagatcaaagaatgagaagtatagtgttttcagaaggaagtgctagtgaatctgatgattataatgaaccacaagatccagctgaagacgaaactgacgatgatgagaatatatattttgatacacgagatttcctgtcatcaagttcttttaaaagcagtggatctgatttccaaagatcagaagctggttcggatgatgaggatgattatccaatggatggtattgatacctctatgaaatccgttggaattagttacccatatgtcagaaggcgtaagaagctgccagatccagtcgagaaagagaagggtgtaagcttgtggtcaatgatcaaggacaatataggaaaggatctaaccaaagtttgtctgcctgtttatttcaatgaaccactctcatctttacagaaatgctttgaagatcttgagtattcctaccttattgatcgcgcttatgaatgggggaaaaggggcaatagtctgatgaggatccttagtgtagcagcatttgctgtttctggctatgcatctacggatggaagaagctgtaagcccttcaatccacttcttggggagacctatgaagcagattatccagacaaaggcctccgttttttctcagaaaaggttgttagtcaccatcctatggtggttgcatgccattgtgagggaactgggtggcggttttgggcagatagcaacctaaaaagcaagttctggggtcgctccattcaacttgatcctgttggtgtgctaaccttggagttcgatgatggtgaagttttccagtggagcaagtctcaggtgacaacttccatttacaatctcatattgggtaaactgtattgtgatcattatggtactatgcgaatacaaggcaataatgaatattcgtgcaagttgaagtttaaggagcagtcaattattgatcgtaacccacatcagcaggtacaaggtgttgttcaggaccgaagtggtcgaactgttgctacactctttgggaaatgggatgaaagcatgcactatgtgatgggtgattgctttggaaaaggcaagggatctgaaaatttctcagaggcccatttgttgtggaaaagaagcaaaccacctaagtttcccaccagatacaattttactcgctttgcaatcacattaaatgaacttaccgctggattgaaggaaaaactgccaccaacagactctagattgcgaccagatcagcgatgcctagagaatggtgagtatgaaagagcaaatgctgagaagttgaggcttgaacagagacaacgacagcaggcacggaagatgcaggagagcgggtggaaacctcggtggtttgcaaaagataaagctaccgacacataccgctaccttggtggttactgggaatccagagaaaagggcagctgggaaggctgtccagatatcttcggacaagttcctaacgatttgatgataactgactaggctttgagtaggttacaggtcttctggttctctgcttttattctttctgtgggatcacttgattccagattttttagcggtttatattag

SEQ ID NO: 1062 - DNA, 2141 bp, Oryza sativa
atggcgtcggccgccgccaacaacagtagctcggccgcctacgatgcggcggagacaggcggcctcctccgccgccgcaacaccaccgccgccgcccgcggcaatgcgggggaggaggaggaggaggcggaggcggtggcgccgtccgtggagcaggcgttcgcggacaagcccgtgccgtcgtggagggagcagctgacggtgcgcgccttcgtggtcgggttcctcctctccatcatgttcaacatcatcgtcatgaagctgtccctcaccaccggcgtcatcccctcgctcaacgtctccgccagcctcctcggcttcttcctcgtccgcctctggacggcggccatcgagagggtgggcttcctcaagcagcccttaacccgccaggagaacaccgtcatccagacctgcgtcgtctccgcctacggcgtcgccttcagcgtcaggtgggtttggcagttacttgtttggtatgagcgagaccatagctaagcaagcaacagaggctaatgatccgatgaatatcaagaatcctcaccttggatggatcatcgggttcatgttcctcgtcagttttgttgggctatttgcactggtgcccatgcgaaaggtgatgattgtggactataaactgacctacccaagtggcactgcaactgcttaccttattaacggattccacacacctgagggtgctgatcttgcaaaaaacaagtccggacattaggcaagtacttttcgattagcttcctctgggctttcttccagtggttctacactgctggggacaactgcgggtttagctccttcccgacatttggccttgaggcttttaagaacagttctattttgatttctcacctacctatgttggtgttggaatgatctgcccctatatcgtgaatgtgtctcttctcattggtggcatcatctcatggggcataatgtggccactcataagcaagaagaaaggaagttggtaccccgagacacttccagaaagtagtctacttggactgcaggcttacaaggtgttcataaccatagcagtaattcttggggatggcctttacaactttgtgaaggtcttcggctacacaatcaaaggcttcatagttatgtataagaacaaaaactcaaacacgcttcctatctccgacaatggcactcctgccaacgccactgaagaggagtcatttgatgacaagcgtcgcaatgaactattcctgaaggatcaaattcccaagacagttgcgattgggggctatgttgttcttgcagttataacgagtggttgcctccctctcattatcccacagctcaagtggtactatatattgattgcatatatatttgcacctataatggccttctgcaatgcctatggaagtggcctgacagattggtccctcgccaccacctacggtaagcttgcaatatttgtgtttggtgcgtgggcaggcgcttcgcatggtggtgtgcttgtaggactggctgcctgtggtgtcatgatgaacattgtgggaacagcttctgatcttatgcaagacttcaagactggatatatgactttagcctcgccaagatccatgtttgtcagccaggtgataggtactgccatggggtgtgttattgcaccctgcgtcttctggctgttctacaaatcctttaatatcggtgcaagtgatggtgcttacccagcaccttacaccattatgtaccgtaacatggcgattctgggtgtcaatggattatcctcattgccaaagtactgccttacactatgctacatagcctttgttgctgccttcatcatcaatctgataaaagacctggtaccagagagagtggcaaagtacatcccgatccccatggcagcagcaattcctttctatcttggaccatacttcgccattgatatgttcatgggcagcgtaattctctatttctgggaatggaggaacaaagatgaagcgcagtcgttcggtccagcagttgcgtcgggcttgatgtgcggtgatgggctatgggccctacctcaggctgttctttctcttgtcaacgtgaatcctccgctttgcatgaagttcttatcaagggctgccaatgccaaagtggatacattcctcggtaactaa

SEQ ID NO: 1063 - DNA, 2097 bp, Oryza sativa
  N_region (90)..(90): n = any nucleotide
  N_region (105)..(105): n = any nucleotide
  N_region (229)..(229): n = any nucleotide
  N_region (237)..(237): n = any nucleotide
  N_region (253)..(253): n = any nucleotide
  N_region (258)..(258): n = any nucleotide
  N_region (261)..(261): n = any nucleotide
  N_region (284)..(284): n = any nucleotide
  N_region (291)..(291): n = any nucleotide
  N_region (352)..(352): n = any nucleotide
atggcgaagtattggggccagcggctatggcggccgccggcgccggacgccgccacgaccgttcacctggcctccctcctccagtcgtgnggccgcgccggcganctccgccggggccgcctcctccacgcgcggctcgtgctctccggcgcggccgccggttcaactttcctcgccaaccacctcatcaccatgtactcccactgcgccgacctcgcctccgcgctcngcctcttngccgccatgccccgcngcaangcngtctcctggaccaccctcgtctngggcctntcccagaacctcatgcacgccgacgcgctcgccgccttcgccgccatgcgccgcgcgggcntcgcgcccacgcggttcgcgctctccagcgccgcgcgcgccggggccgcgctcggggccccgctcccgggcgcgcagctgcactgcgtcggcgtcaggctcggcttcgacaccgagctcttcgtcgcgagcaacctcgcggatatgtactccaagtgcgggctcttgtctgaagcatgcagggtgttcgaccaaatgcctcagaaggatgccgttgcctggacagccatgatcgatgggtatgccaagaatgggagccttgaggcggctgttttgtctttccgggacatgaaacgcgagggactggttggtgctgatcagcatgtgttctgcagtgtgttgagtgcgtcgggagggctcaaggatgggtggctcagcaaaagcatccattgttgtgtgacaaaggcagggtttgaactggaggttgctgtgaggaatgcactcattgacatgtacgctaagtccatggatgtggagagtgcctctcgcgtgctgaagattgaccctggaggttggaatgttgtatcaggcacctctatgattgatggttacattgagaccgattgtgttgaggaggcccttgtaatatatgttgaactgcggagacaaggagtcgagcctaacgaattcactttctcgagcatgatcaagggctgtgccatgcaggctctgcttgagcaaggtgctcaattgcatgctcaagtgatcaaaacggatttgatcagggactccttcgttggttccaccctagtggatatgtatgggaagtgtggccttataagtttgtccatgcagttatttaatgagattgaatacagaacagatattgcttggaatgcggtaatcaatgtattcgcacaacatggtcatggaagggaagcaatccaagctttcgataggatgatctatagtggtatcaggccaaatcacattgcatttgtcagcctgctcacagcatgcagtcatgctggattagtggatgaaggactcaagtatttttactctatgaaggaagcccatggtattgagcctaaagaggagcactattcctgtatcattgatacgtatggtcgagctgggagattagatgaagcatataagttcatatctgagatgcccatcaagcccaatgcctatggctggtgctctttgcttggagcttgccgtatgcgagggagcaaggagctgggggaggttgcggcacaaaatcttatgaagcttgaaccaggtaacactggtattcatgtgtccctttctgggatctatgcatccctgggccaatgggaggatgtgaaggcagtcaggaagttgatgagagatagcaggattaagaaacttcctggttttagctgggtcgattctaacaaaaaaacccatgtgtttggatccgaggattggtcacatccacagcagaaggacatatatgaaaaacttgaggaactcactacgaggataaaggaggaaggttatatcccggatacaagcttcttgccatgtaatttagaagacatcgcaaaagagaggattcttcgttatcacagtgagagaatagctgtagcttttgctttgataagcatgccagctacaaaaccaatcattgtgaagaagaatttgcggatatgtatagactgccacactgcattcaagttcatttgtaaggtagaaagaagggatattattgtgagagataattccaggtttcaccattttgtgaatggtaggtgttcctgtggagattactggtga

SEQ ID NO: 1064 - DNA, 2028 bp, Oryza sativa
gtacacgagacaagatcacgcacactagcggcttcccaagaagaagggaaggctgctccgaagaagcagaagacagaaagcaaagagcagtgaattctgcaaggccataagggaacacctcacgatcgaggacatgcgcaagatcctccaaggcaatgaacaggatgcatctggatcattttatgggcctcttgacaagtgccccgtatgcggtggtcagctcgagtgtaagggattgaaatacaattgcactgggactcacagtgagtgggcatgttgtagcttcagtactaacaatccttcgaggagaggtggtcctataaaggtccctgatgatgtcaagaatgatttcgtgcgcaagttctcgggcatgatgattgcattgtctggaaggatgtcacgctcacatattatgaagcatggagggaaagtcaacaactccgtgattgggtgtcacttgtgtagtggcttccccagctgagagacatcaaggagcgtggaactcctgttgtgagtgagaattggataattgatagcgtccagaagaaggaaaagcaacctttggctgcttatgatattgcatctgatgttgttccagaaggccgagggctgccgctgggcaaccttgatccaactgaggaggctatcgagaccttggctgcagagcttaaacttgcaggcaaaagagcagtgcacaaagattctaaactggagaaagacggaggacatatctatgagaaggatggcatcatctacaattgtgccttttctgtgtgcgatttaggaggcgatattaaccatgcattatgcagctgatcatggtgcctgagaaccatttgcacctatactacaagaagggtcctattggacatgaccagatggcagaggaacgggttgaagattttggtagtcgtttcaatgatgctatcaaggaatttgtccgtctttttgaggaggttactggaaatgagtttgaaccatgggagagagagaagaaatttaagaagaagtgtatgaagatgtatcccttggacatggatgatggtgttgacgtgcgccatggtggtgtggctcttcgtcagttgggagctgctgcagcacactgcaagcttgacccttctgttacttttatcatgaaacaactatgcagccaagaaatatactatgctttgacagagatgggccatgatgtgccagaccttcctatcgggatgcttacagatctccatctgaaaagagagagtctgggcctgctgctgacgcattctggatggagatcagcaataagtggttcaccctttggagactgttcgtgatataaatgtcgcttctcgtcttattggtgatgtgtttggttcaactttagatgacccactgtctcaatgctacaagaaactaggctgttctatcaatcgtgttgttgaagactcggaggactataagatgatcctgaaacctacgagcctgtcaaggttggcgatgtggtcgagcggatatatgctgttgaatcgagtgctcttccttcttatgatgaaataaagaaacttccgaacaaagttctcctctggtgtgggaacaagaagttcaaatttgctcaggcacctgcgcgatggtttcgtgcctgctgtctgccatataccagtgccgggatacatgtttggcaaagccatagtttgctcagacgcagcagccgaagccgcgctctacggcttcacggcggtggatcgtccggagggttacctggtcctggcggtggcatctctggggaaagagatccaggagataacaggcacgccaggctcagaggaggagaagaagatgggcgtgaagggagtcgggaggaagacgaccgacccgtcggagcacttcacctggagggacggcgtcacggtgccgtgcggcaagctggtgccgtccacgaacaaggacggcccgctcgagtacaacgagtacgccgtgtacgaccccaagcagctcgtgggcgtgaagtacgaggagcagaacatggaggtggtgccggacgagtga

SEQ ID NO: 1065 - DNA, 2007 bp, Oryza sativa
atggagcatcctcccttctttctgctccttgtgtcgcttggcttcaaccttatagccctttgtgccggtcaaaaccaattcatctaccatggtttcaccggcaaaaacctcactatcgatggcaccaccaaaatcacaccggaaggactccttgagctgactagtgacaagaatgatctcaatggccatgcattcttcccaacacctatgcatttccgcagttcacccaacagcaccgttcagtcattctcggtgaacttcatgttcgccatccagtccttctactccgatagaagctacgatggcatggcgttcttgatagccccaagcaacaatctctcgactgcgtggccagatgggtacctgggtctctttaacatcagcaacagagggaattcaagtaaccgcatcctcgcagtcgagctcgacacctttcagaacaatgagtttggggatatcagtaacagccatgttggcattgatatcaatgacgtccgctccgtgaattcctcctttgctggcttctatgatgacaagaacgggattttcacaaacttgactctgtacaatggtcgggctatgcaagtttggatggaatacagcgaagaggccacgcagatcaccgtgaccatggctcccattgatacaccaaagccgaagaggccactgctctatgccacctatgatctctcgactgtgctcacagaccctgtgtacataggtttttcagctgcaactggcgtaattagcacacgacatatcgtgcttggctggagctttggcatgggtgttccagctccggacattgatatcaccaaactaccaaagctacctcgtgttggaaccaagcctcgttccaatgtcttggaaatcgtcctcccaatagccagtgccatgttcatcatcattgtcggcaccatggtcattttgattgtgcggaggaagctactgtatgctgagctacgagaagattgggagattgattttgggcctcagcggttttcatacaaggacctgttccatgccactcaaggatttaagaataaaaacatgattggagtaggtggatttgggaaagtctataaaggagtccttgcgacatccaaattggagattgccgtgaagaagatctcccatgagtcgagacaaggaatgaaggagtttataacagagattgttagcattggtcgtcttcgacatcgcaaccttgtgccactacttggctactgtcgacggaagagtgaactacttttggtctataactacatgccaaaaggtagtcttgataagtatctacatgatgtagacaatagggctatacttaattgggctcaaagatttcagataattaaagatgttgcatgtggattgttctatttgcacgagagatgggagaaagttgttatacatcgagacataaaggcaagcaatatactccttgatgctgaaatgaatgggagattaggcgactttgggcttgcacgactatatgatcatggtactgacctacagactacacatgtggttaggaccatgggctacctagcacctgagatggtacagacaggtaaggcatcccctctcacagatgtgtttgcttttggcgcattccttcttgagaccacttgtggacaaaggccagtgaaacaaaactctcaaggcaaccaacttatgctggttgattgggttcttaagcattggcatgatggatctctcactgaggcagtggacatgagactccaaggtgattataacattgaagaggcatgcctagtcctaaaattagctcttgtgtgtttgcatccatttcctgcttcaaggccaaatatgcggcaggtaatgcaatacctcgacaaggacttgccacagccagagttagcaccaacacgtctaggtttcagcaagctacctttgatgcaaagcaaaggatttaacccatcagccatgtcatatccggagtttaggacaagcatcggcacattctctggcctctcaggtggacgatga

SEQ ID NO: 1066 - DNA, 1980 bp, Oryza sativa
  N_region (7)..(7): n = any nucleotide
  N_region (10)..(10): n = any nucleotide
  N_region (12)..(12): n = any nucleotide
  N_region (183)..(183): n = any nucleotide
  N_region (1193)..(1193): n = any nucleotide
  N_region (1239)..(1239): n = any nucleotide
  N_region (1272)..(1272): n = any nucleotide
  N_region (1274)..(1274): n = any nucleotide
  N_region (1281)..(1281): n = any nucleotide
  N_region (1284)..(1284): n = any nucleotide
  N_region (1290)..(1290): n = any nucleotide
  N_region (1374)..(1374): n = any nucleotide
  N_region (1383)..(1383): n = any nucleotide
  N_region (1675)..(1675): n = any nucleotide
atggcgncgntnacgccggacgagcacgagcggcagcaggacggccactgcagggccagggtgaacctgcggccggcggcggcgcggccgttcggcgcggcggcgcgggcggcgctgaaggacacgcttttccccgacgacccgttccgcgggctcggcgggatgccgccggcgcggcgcgcntggcggttggcgaggtacttcgtgccggcgctggactggggcgcggggtactccgcggcgagcttctggtacgacctcctcgccggcgtcaccatcgccagcctctccatcccgcagggcatcagctacgccaccctcgccggcatcccgccggtcatcggcctctattcgtgcttcgtgccgccgctggtgtacgcggtgatggggagctcgaggaacctcggggtggggccggtggcgacgtcgtcgctgctggtggcgtccatcgtcggcggcaaggtgagggcgtccgacgaccagcggctgtacacgcagctcgtcttcacgtcggccttcttcaccggcgtcctgcaggcggcgctcgggctcctcaggctggggatcctggtggatttcatgtcgcggccggcgatcaccgggttcatgggcggcacggcgatcgtaatcatgctgcagcagctcaagggcttcctcggcatgacgcacttcaccaccaagaccgacatcgtctccgtcctccgctacatcttccacaacacgcaccagtggcagtggcagagcacggttcttggcgtctgcttcctcatcttcctcgtcttcaccgagcaagtgaggcgacggcggccgaagctgttctgggtgtcagcgatgtctcctctgttagtggtcgtcgtaggatgcgtcttctcgtttctgatcaaaggccacaagcatggcatccctatagttggtactctgaagcgtggcatcaacccgagctcgatatcacagctcaagttccagccggagtacgtcggcgtcgccatgaaggccgggttcgtgtcagggatgctcgccttagcggaaggcgtcgccgtcggcaggagcttcgcggcgatgaagaaagagcgcatcgacggcaacaaggagatggtcgccttcggcctcatgaacctcatcggctccttcacctcctgctacatcaccaccggtgcgttctcgaagacggcggtgaactaccacgccgggtnccggacggcgatgtcgaacgcggtgatgtcggtgtgcatggcgctngtgctggtcgcgctggcgccgctgttccggcanangccgctngtngccctngcggccatcatcaccagctccatgctcgggctggtcaagcaccgcgagatccggcgcctgtacgaggtggacaaggccgaattngccgtctgngccgccgggctcctcggcgtcgtcttctccaccatgatcaccggcctcggcgtcgccgtggccatctccgtgctcagggcgctcctgcacgtggcgcgcccgtcgacgagcaagctcggccgcgtgtcctgcggctccggtgccggcgccgccgacgacgaccacgccttctgcgacgtcgcgcagtaccccggcgcggcgaccgcgcccagcattctcgtcctccaggtcgccggctcgccggtctgcttcgccaacgccgagtacctccgggagaggatcgcgcggtggntggaggacgaggagaaggccgtcgccggcgaggacctgctctacgtcgtcctcgacatcggcggcgtgacggcgatcgacagccccgggatcgagatgctgcgggaggtgcacggcgagctggagaggaaggggatgaagatggcggtgacgaacccgaggatggcggtggcggagaagctggtgctgtccgggctcgcggagctcgtcggcgagagctggatgttcctctccaatggcgacgccttggccgcgtgccggtacacgctccagggctccaagcacggcggcgtccctccggtgtag

SEQ ID NO: 1067 - DNA, 1917 bp, Oryza sativa
  N_region (1503)..(1503): n = any nucleotide
atgaagtatatgaagcttggatcaaagccagatgtgtttcagacagagggaaacaatatcaggtttgtcgcaactgagttggcaacggacatcgtaatcattgtaggggaagtgaagttttatcttcacaagttccctcttttgtcgaagagttcgcgattgcaaacattggtggcatcgacaaacgaagagagcaacgacgaaatagacatctccgacatcccggggggacctgcagcattcgagatctgtgccaagttctgctatggcatgatcgtcaccctcaacgcgtacaacgtcctcgcagcccgctgcgcagccgagtatcttgagatgttcgagacgatcgacaaggggaacctcatctacaagatcgatgtgttcctgtcctcaagcatattcagaacctggaaggactccatcatcgttcttcagacaaccaagtcactgctgccatggtcggagaacctcaaggtgatcaaccactgcgtcgattcgatcgcgacgaaggcctccatcgatccgtcagaggttgagtggtcatacacctacaacaggaggaagctaccgtcggagaacggcctcgactcgcactggaacggcgtaaggaagcagcagatggtgcccagagactggtgggtagaggatctctgtgaccttgagatgtgcctgtacaagaaggtcatcatggccatcaaggccaaggggagaatcagcagtgaggtgattggtgaggcactgagggcttatgctcacaggaggctgttcagctcactggaaagtgctgtcagcaatgggcttgactgcacaaggcactctgcagctcttgagaccatcatctccctgcttccatctgaggaaggttcagtcccatgctctttcctccttaagcttctcagagcctcatgcttgttgggatcagatgaggcgtgccgcgacaatcttacgaagaggatcggcgcgaagctggatgaggcttcggtctcggacctccttatccccgctaactccgacgaggccgccatgtacaatgtggacatgatctcggcgatgctggaggagttcatggcgcagcaccgcgaggacgatgatggcgccaagctacaagaggatgatgatcaggaagccatggatggtgatgatgacaacctgaatggtgtctcccgcagctcgaagctcgcgatcgcgaagctggttgatgggtatctggctgagattgcgaaggaccccaacctcccactctcgaagttcatcgccctcactgagatggttcccctcgcaactcggcccgtgcacgacgggctataccgcgccatcgacatgtatctcaaggagcatccgggtttaacgaagggggagaagaagaggctgtgcgggctgatggactgcaagaagctgtcgccggaggcgagcatgcacgccgtgcagaacgagcgcctcccgctccgcgtcgtcgtgcaggtcctcttcttcgagcaggtccgggcggcgtcgtcggcgtcngcggcggcggccgccgacatgccgccggcagcgcgctccctcctccccagggagcaggacggcaactcgtacggcagctcgaggtcgacggcgaccgaggacgaccagtgggcgccgccgccgacgacgacgtccgtcgacgtcacctccttccggtcgatgagcctcgccaacaacaagaacggcggcgtctccggcggcggcggcgatcaggccgcctgcaagaagccgccgccgtcgtcggcgtcagcgaaggggagcggcggcggcgggctgatgccgaagaagatactgagcaagctgtggtctggcaaggcgagcagcggcgagaacagcagctccgacacgtcggagagccccggcgaggagacgaggtcgacgccgtcgcggaacacgaggcattcggtgtcctag

SEQ ID NO: 1068 - DNA, 1885 bp, Oryza sativa
  N_region (663)..(663): n = any nucleotide
gatttctttatcaccagtttgggagaaatcgataaaaggccaagctaccataattcctaccagatatggccagttggttttacgtcttactggcatgacagaattactggttcactgttcgagtgtgaggtgtgtgacggagggaattttgggcctttgtttaagcctctgggacgtcctattagcaataagcttccgccagagttggcaggagaggttctccagcgtttctctgaaataattggcctgaaagaaattccttcatatgagcagctagaagatgaacttattgacccagttctttttggtgagctattatctaaggttgcaatttttgtagatccagaatcaaaaactaggcgtggaagaaagaaagacactgagaatctcatttcagcaaaagaatttaaatttgacatgctaacagctaacaagttgacttggccggaattggcaagaaggtatattttagccatttcgtccataagtgggttcatggatttatctgatatttcaagtcgagaaggagtgaaattattccgctgtctacaaggtgatggtggtattctgtgtggtgcactacctggggttgctggcatggaaaaggatgcgttgtgggcaaaatcactggagcctgtgagaaaattaccaacaaatgtgggnacacgaattagaaaatgcgtttatgaatctttggagagaaaacctccggaatgggcaaggaaaattttggagcattcaatcagtaaagaggtctacaagggtaatgcatctggaccaactaagcgcacaattgatataaggttggctatgggagcttactatggatcatgggaggcttttcttgaggatgtccaggaatttgagtcattgtacaagacagagaacagcttacctaaagctccatgggaagatggcgtttgcaaagtatgtggtattgatagggacgatgatagtgttctgctatgtgacaaatgtgactcagaataccacacttactgcttgaatcccccactagcccgtataccagaagggaactggtactgtccatcatgtatgttaggtcaaacgaaagcacatcatgatcagggtgttcaagatgtgaaacggcagcaaaagaaatttgttggggaggaagcccatgcctttcaagaggaacttaataaattagctacagcaatggaagagaaggaatattgggaccttaacatgcaagagaggatatatttactgaaatttctatgcgacgaaatgctcaacactgctctaattagagaacatctagatcaatgttcagtggttaagagactatgacccaagggagaaggaactgaaagactctatcttgcagtggcaaagaaaaaagcgaggaaagaagataaagttaagttctgaagatagaacatatcgctgcgactgtttggaacctgtatggccttctcgataccattgtttaacatgtcatgagacttatctcatatctacagagtttgaggggcatcccatatgactttgaagaaatttgcagaaaaagataaacttgcttgacatcgaagcagccttgcctgaggaggcactgagagcctcaaagtgtcagcaaataagaaggcgttcatggcgtgcatttgtcaaagatgcagaatcaatatcccaggagggcatgataaaagctgagttcttgaagaacgattggtggtactggtcttccttcacagcagctatgaagacatcaactgtatcctcactcgcgctcagggtctacactctagatgattgtatcatctacagtaaggatcaagttccaagcgttgagccagctgacaatacaaggtctggaaacagaggtgggaggaggaggagagagcttgaatccttagcatcataa

SEQ ID NO: 1069 - DNA, 1755 bp, Oryza sativa
  N_region (976)..(976): n = any nucleotide
atggatcccgcgccggcgacccctcgctggaacctggagcggccgtacctcaccggccgcttccatcagcaggagcttttggtcattgatgatttgttatcagctcttgtgggtattgagggacgatacatttcgattaagagagtacggggaaaggaggggtatgttgtcttccagattgattcttcaatggaccttgcactccagttgcaggaattaactcgtcggatttttcccttatgtgaggattttgtcttggtataccattttgtggagtccagatcacatttcaagagtggcctggtcaaccatgctctagctgcagcattgagggcattcctcttggattatcaggcaatggttgctcaactggagcaccagttccgtcttgggagactgtcagttcaaggattgtggttcttttgtcaggcaaaggcaatggctggcgatagtgctgttcgatcattactggagaagatgacagagtgtgcaagtgcagcgtatcttaggatgttagaaagaggtgggtctatgagggcgttatagatgatccttatggtgaattcttcattgctgaaaacaaatccttgcagaaggagagccttactcaagattatgatgctaaatattggcagcaaagatacagtctaaaagatggcatccctagtttccttaccaatgttgccgccacaatactgacaactggaaaatatcttaatgttatgagagaatgtgagtacactgtccaggttcccttgtcagagagttctaagctgatgggctttggttcaaaccaccaatatcttgaatgcatcaaatctgcgtatgactttgcaagtggtgaactcttgactctaatgaaagataagtatgatctcattgggaaactgcgatccctcaagcgatatctacttcttgaccaacagggtgattttctggttcactttatggatattgcccgagaggagcttacaangaaaccagaagaaatatctgttgaaaaacttcagttgcagtctcttgttgacatcgcgttgcgaagtacggcagctgcttcagatccaagtcatgaagacttgacttgctgtgtgccgttaagtgtgactggcttggaaactttctgcctgagctacaaggttgttcaatggccactatctctagtaatttcaagaaaatctttgacaaaataccagttgatttttcggctgttgttccactgcaagcatgttagtcgacaattgtgtacagcatggcaaattcaacaacagggtttccgttctgtcaaaatcctaggaacaccagtcctacggtcatcaattctttgccgcagcatgctcaagtttgtaaacagccttttacattatctaacctttgaggttcttgaaccaaattggcatttgatgcatgatcggcttcaaactgcaaggagcatagatgaggttttaacaacgttcttatgatgaagaaagatgtattgcgaaaggggtcatacagattcatgatttcttcctgcagaagtgtctaaaagaatgcttattgttgttgcctgaactccttgtgaaaatcgagaagctgaaagctctgtgtctccagtatgcgacttccatccagctattgataccatccattgatttcgaggcagaattcaattcagagcttcaaagtcttattcctacgctgagtaacagttcacaggcagaaccatacttgactcatcttgggcagtgcattcttggtgtgggagttgatcaatga

SEQ ID NO: 1070 - DNA, 1734 bp, Oryza sativa
  N_region (1109)..(1109): n = any nucleotide
atggtactcactcacctcctctgctccctcctccttgccaccgcattgctgctgctctccatctcccgtacagatgcgggcgagatcggggtgtgctacgggagggacgcaaaggacctgatcgacccaccggcggcggtgagccttctgaaggcgaacggcatctccgcggtgaggatcttcgacgcggacccgacggtgctggccgcgatggcgaacaccggcatcaaggtgatggtggcgatacccaacgccgacctggctgccgccggccaggacctgcgcagcgcgaccgactgggtggcgagcaacgtggcgccgtaccgcagccggggcacgctgatcagcggcgtcgccgtcgggaacgaggtgttcaggcagaggcccgagctgaccggggcgctcgtctcggccatgcgaaacgtgcacagggcgctggagaacctgaacctggcgaacgacgtgaaggtgtccacgccgattgccttcgatgcgctcaagcagtcgtcccctccatctgcgggggagtttaaggatgagatcgcgcaatcggtgatgaagcccatgatcgacttcttgaaacagaccggctcgttcttcatggtcaatctctacccgtacttcgcgtacgtggctcagccggacaagatctctctcgagttcgcgacgttccgccctaatgctggtgtgctcgatggcaataccgacatcaggtacttcagcctctttgatgctcagctcgacgctgtttacgccgcgataaacagggtttctggtggtagcttaacggtctcaatggctcgacgagatggaatccttagtgtgcaagcttcggaatcagggcacccctctggaggtagatttcccctatcttccatgctagctgcagccgatacggactcggtggccacgatagccaacgcccaagcgtacaacaatgggcttatcagacgtgttgtatccggagcctccggtatgcgtgacgtctccgcctacattttctctcttttcaatgaaaacgagaagcctggaccaaccatagagagaaactttggcttgttctacccaaatggtcagaaggtgtatgaggttgactttcggggcggtgncggtggcggagcttgtcctacaaagacgagttggtgtgtggcgagagcagatgttgggagtgcagcattgcagtcagcgttggactttgcgtgcggtaacggcgcggactgcagcgctatccaacagggcagtgtgtgttttgagccaaacaccttggtcgcacatgcatcgtacgcattcaatgactactaccaacgcaagggccaggctagcggcacttgcgacttctctggcgccgcttccatcgtattcaagccatcaccaagcatatgtgatccgaacccaagttggtgtgttgcgaaatcggaggtcggggacgcacggctgcaaaatgcactagactatgcatgtggtagctgtgcggactgcagcgccattcaaccaggtgcacagtgctttgatcctgacactaaggtggcacacgcgacctatgcattcaacaatttttaccagaccaccggtcgggctagcggatcgtgtgactttgcgggtgctgcttctattgtcaaccagcaaccaaaaataggaaactgcgtgctcccaccaaacaatgcttggacgacagaacaaactgcaattgaagatcaatcgactgcaaacttaccagcaacagcttggcagtga

SEQ ID NO: 1071 - DNA, 1718 bp, Oryza sativa
atggcgagctcttcctcagcagcggcgatctccaatcctctgttcgggattcaaatctcggataaactcaccaagaaaaatcaccccctctggtctgcgcaaatccttaccaccctatggggtgcgcagctggaagggcatgtcaccggcacagttgaagctccggcggccgagtgcgagaaggaagatggcgacaagaaagtcaagaccaccatctccaacccggaatacatcaagtgattcagtcaggatcaacaagtcctggggttcctcttctcctccctatcacgggagatcctgcagcaggtggctggcgcgcagacgacagcccaagcatggaacatgatcaacgacatattctcctgcaaatccaaggcgggcgccatcaacgtcctcctcgccttgacgactactcagaagggacccatgtccataagtgagtacattgccaagatgcgatcccttggcgatgagatggcggcggcaggcggttgaaggattgatggcaacgacaagaattgctcctctcttaatctctcatgtgtattcccaacttttgagctatgaaaacaggatcagtattcgccaaacctacctccctacttcggcaaacactgcaaatcgtggcggtcgcggcggtcgcagtggcggccgtggtggcgcaggcggggccaacactgggcgagggcgcggtaacgacacccacccggtgtgtcaagcctgccataaacgaggtcacattgcaagtgactgctggcaccgctatgatgagaactacgtccccgacgagaagctaggcgacgcggccacatatgcctatggtgttgacaccaattggtatgtggacaccggggcaacagatcacatcacagggcagctagataagctgactacaagggagaagtacaagggaacagatcagatccacactgctagtggcgaaggtatgaatattaaacatattggtcataccattgttcctacccctagtcgtcccttacatcttaaaaatatacttcatgttccacaagcatcaaagaatttagtctctgttcatagactcattgcagataattatgcctttcttgagattcatggaaaatattttttgattaaggacaaggccacgaggaggacaattcttgaaggaccatgtcggcgggggggtgtgcagcagtcacatccgtcaggatcatctacacaaatggagccagcacagcacggtgtgtctactgaggtaatgagaccaaaaactaggctacaaagtggcattagaaaggaaaaagtttacactgatgaacctgttagatacagctgttgtttcacatattctggagagccacaaactttggatgaggccttaggagataaaaattggaagaattggacagaggcaatgaatagtgaatataatgcactcatgaaaaataaaacttggcatctagtacctcctagcagaggattaaatgtgatagactataaatgggtttacaaaattaagaggaaaactgatggtagtctagacagatataaagtcaggcttgtagcaaaggggtttaaacaaagcctgtagtcaaggttgctactatcagaactgtactgtctatagcagcttctagagggtggatgcttcgtcagctagatgtatagaatgcttttcttcatggaatcctagaggaagaagtatacatgaggcaaccacccaggatatgaacaag

SEQ ID NO: 1072 - DNA, 1668 bp, Oryza sativa
  N_region (399)..(399): n = any nucleotide
  N_region (842)..(842): n = any nucleotide
  N_region (1014)..(1014): n = any nucleotide
  N_region (1016)..(1016): n = any nucleotide
  N_region (1023)..(1023): n = any nucleotide
atggggccagccgcgccgccgtccgaagccgccgcggcggccgacgatgtggtgctcccgtacatctcgcgtattctcatggaggaggacatcgacgacgacatgttcttctgcctgtaccccgaccaccccgctctcctcgaggcgcagcagccgttcgcccagatcctctcctcctcctccggcatcgccggtgaggtgaacagtgcacccatggaggattctgctgccttgatgatgcaggggagcggcaatggtaggggacggaagggtagtaagcatggcggggacgagctggaggccgaggtgggcagggcgagcaaactgatggccacgccggaggaggaggacgacgacgacgatggcgtcggcgagatgttggagaagatgatgctcaanggggacgaggacgaggattcgacggagatgaacgcgccacgcgtccccgcggagaaaaacggcgggaaggcggcgcggcggaagaggaggcagggcaagggggaggtggtggacctgcgcgagctgctcatgtcgtgcgcgcaggcggtggcatcgggcaaccgccggagcgccggcgaactcctggagcagatcaagcggcactcgtcgccgacaggggacgccaccgagcggctggcgcattacttcgccgacggcctggaggcgcggctggccggcgcggcgagcctggagcaccggctgctcgcgtccgcggaggagcgcgcgtcggccatggagttgctggaagcgtaccaggtgttcatggcggcgtgctgcttcaagtgggtggcgttcacgttcgccaacatggccatcctccgcgcggcggaagggaggagcanggtgcacatcgtggactacggcggtcagtaccacggcctccagtggccatccttgctgcagcggctggcggagagggaaggcgggccaccggagttcaagttccgcgccgtggcggcggcgaggtgggagacggtcaccgccgaggacgtcgtcggcgtcgaccacgacgangnggcggcngtcgtcgtgaacgacgtgctcagcctgggcaccctgatggacgagagcggcgtgttcgacgacccgagccctcgggacacggtcctcggcagcatccgcgacatgcgcccggcggtgttcgtccaggccgtggtgaacggcgcccacggcgcgcccttcttcccgacgaggttccgggaggcgctcttcttcttctcggcgctgttcgacatgctggacgcgacgacgccggaggaggggagccacctgcgggcggtgctggagagggacgtgctgaggcgggcggcggtgggggtgatcgccggggaaggggcggagcgggtggagcggccggagacgtacaggcggtggcaggcgaggaatcggcgcgcggggctgagacaggtggcggtggaggccgacgtggtggaggcggtgaggcgcagggtgaggaggcggcatcacgaggaattcgtgatcgaggaggatgcagggtggttgctgcaggggtggaaggggcgcatcctgtatgctcactcggcgtgggtcgtggcagaggatgcaactagcgttggagagctcacagtagtaacaacaagcttagtggcaataatcctttcagctgcttcagcacaagacgagcttccattgtccaccaatgaatga

SEQ ID NO: 1073 - DNA, 1622 bp, Oryza sativa
  N_region (292)..(292): n = any nucleotide
  N_region (746)..(746): n = any nucleotide
atggcggtcggcgtcgtcgccggcgtcgagagccaggagcgccgcggcggcggcgccggaaccggaagggtcaccgcgttcgtcgtgctgtcgtgcgtcaccgccggcatgggcggcgtcatcttcggctacgacatcgggatcgcagggcggtgcaggtggcgtgtcgtcgatggagccgttcttgaggaagttcttcccggaggtgcaccggcggatggagggcgacgtgcgggtcagcaactactgcaagttcgacagccagctgctcacggcgttcacctcctcgctntacgtcgccgggctcctcaccacgttcgccgcgtcgcgggtcacggcggggagggggcgccgcccgtccatgctcctcggcggcgccgcattcctcgccggcgcggccgtcggcggcgcgtcggtggacatctacatggtcatcctcggccgcgtcctcctcggcgtcggcctcggcttcgccaaccaggccgtgccgctctacctgtcggagatggcgccgtcgcggtggcgcggcgcgttcagcaacggcttccagctcagcgtcggcgtcggcgcgctcgccgccaacgtgatcaactacggcacggagaagatcaggggcgggtggggatggcgcgtctcgctggcgctcgccgccgtccccgccgggctcctcaccctcggcgcgctcttcctcccggagacgcccaacagccatcatccagcaggcaagtcgaacgctgcgacgtcgnagcagctgctacagagatccgcggcgccgacgacgtcgccgacgagctcgacaccatcgtcgcggcgaacagcgccacggccggagtcggcggcggcggcctgctgatgcttctcacccagcgacggtacaggccgcagctcgccatggccgtgatgatacccttcttccagcaggtgaccgggatcaacgcgatcgcgttctacgcgccggtgctcctccgcaccatcggcatgggcgagagcgcgtcgctgctgtctgcggtggtgacgggggtcgtcggcgtgggcgcgacgctcctctccatgttcgccgtcgaccgcttcggccgccgcacgctgttcctcgccggcggcgcccagatgctcgcatcgcaggtgctgatcggcggcatcatggcggcgaagctgggcgacgacggcggcgtgagcagggcgtgggcggcggcgctgatcctcctgatcgcggcgtacgtcgccggattcgggtggtcgtgggggccgctgggctggctcgtccccagcgaggtgttcccgctggaggtgaggtcggcggggcagagcgtgacggtggcgacgagcttcgtgttcaccgtgttcgtggcgcaggcgttcctcgccatgctctgccgcatgagggccgggatcttcttcttcttcgccgcgtggctcgccgccatgaccgcgttcgtgtacctcctcctgccggagaccaagggggtgcccatcgaggaggtcgccggcgtgtggcggggccactggttctggtccagggtcgtcggcggcgacggcgaggaggaggagcgcaataatggcgggaagctttgactgaaacaacgcgcgcgcgcaatatccaaagtgcgttgcacgaatcttga

SEQ ID NO: 1074 - DNA, 1607 bp, Oryza sativa
  N_region (30)..(30): n = any nucleotide
atggcctcgccggcgaagcgcgcgaagaanccggccttgtccccggtggacccccccgggttgccgccggcgccggaggacccctgcgtcctcctccgccgcagctgggagctcgcgtcggtgctccactttctccggggtgtttgagccggtgatcgaggggaacctggggctatcagcggaggagatcgagaccgcgctcatcgccaataaccacgaccttgcccgcatccatattgcgcttataaaggagggaataccaccaactatcaaaaatctgaaggtcgatgatggatggataacggcaactgccaagaaattatcagattggtggacatggggttgctgaaggtgcaaacccgttcaaaattaatccaggacccaggaaggaaattgacacgtataaacagcaagatccgattaaacgcttgttgatacttaaagcactctgtgaagttcgttcagagagcaaaatgacgcggtatggtatgttaatgacgagatgaaaagaggagttgatatttccaatttccgaaaagaaaagttaggaagtagtagtaacggaactatatactgggtatgatggtgactcaactattggccatagattgtatagtgagtatgtaacacttgatttcaagcgcaacttgaagggaaagaatggtcgtttgacaaagccagttatcaatattcagtgggaaacagttgcgactaaccttgatgagttcgttgagatatcgggagaaactatgcagtaaaggtcgaccggaatctgccatcggcgagcatcttaagacagaaattattccagatgtggagaagcttcaaaagagaagaaggagcgggatttaaaacgtcagcagaagaaggatgaacttttagcttatgctacaagtttccaaacccgttcattgcgtgaacgtaggcctgtcagctacaattactctgattacgatcgttctataaaggaggcaataaaagctgcagcaattcacgtgcttgaatgcaggaaatcaaaagaatctgatccacaggaggcaggcaaaaaagagaagcgtgcctcacatcagggcaataaaggagccaatggagggtctgacattggtccagagcagaaggaagatggacaggaggatgctggagggtctgacgtcaatccggagcaggacaaagatggcggacaggaggatgtcgagtcccttgatgacctgagttctgatgaggatgaagacagagactacaatggtaaggatgatgactcgtcaggcagcgatggagaaaatgatgttggcagtgatggagaaaatgatgcttatgatcccaacaagggtgatactgaagaggaggaagtatttgtcccacgtaagaggactcgtcttgcctcccgtcggtttgacaagcctccgcaagggctccgccggagtcggagaaatatgaaaaacgacgaagacgtcatgcgcccaggacagcttactcctcgatccatgacaaagaaaacaatgaggcagaggccaacatctatctcaaagcagttttctctatcaggctcggaagatgatcgtgaaatgatagttgcagactctgaggaggagtccggctcaccttag

SEQ ID NO: 1075 - DNA, 1536 bp, Oryza sativa
  N_region (702)..(702): n = any nucleotide
atggaggacaacaagctgatactggctctaggcctatcagtgctgttcgtcctcctctccaagctggtatcatctgccatgaaaccaaggctcaaccttcccccggggccatggacgctgccgctgatcggcagcctccaccacctcgtgatgaagagcccccagatccaccgctcgctgcgcgcgctgtcggagaagcacggccccatcatgcagctgtggatgggcgaggtccccgcggtgatcgtgtcgtcgccggcggtggcggaggaggtcctgaagcaccaggacctcaggttcgccgaccgccacctcaccgccaccatcgaggaggtctccttcggcggccgcgacgtcaccttcgcgccctacagcgagcggtggcgccacctccgcaagatctgcatgcaggagctgctcaccgccgcccgggtgaggtcgttccagggcgtccgagagcgcgaggtggcgcggctcgtgcgtgagctggccgccgacgcgggcgcgggcggcgacgctggcgtgaacctcaacgagaggatcagcaagctcgccaacgacatcgtgatggtgagctccgtcggcggccggtgcagccaccgcgacgagttcctggacgcgctcgaggtcgccaagaagcagatcacgtggctcagcgtcgccgacctgttcccgtcgtccaagctcgcgcggatggtggcngtggcgccacgcaagggcctcgccagccgcaagaggatggagctcgtcataagacggatcatccaagaacggaaggaccagctgatggacgacagcgccgccggcgccggcgaggctgcggcggggaaagactgcttcctcgacgtcctgcttcggctgcagaaggaaggtggcacgccggtcccagttaccgacgaaatcatagtcgtgcttctgtttgacatgtttacaggggctagcgagacatccccaacagtattgatttggatcttggctgaactcatgcggtgtccaagagtaatggcgaaggcacaagctgaggtacgacaagctgctgttgggaagactaggatcacagagaatgatattgttgggctgagctacctcaagatggtgatcaaggaggccttgcgactccattccccggctcccttgctgaaccctcgtaaatgtcgtgagacaacccaagtcatgggctatgatataccaaaaggcacatctgtgtttgtgaatatgtgggcgatatgtagggaccctaattactgggaggatcccgaagagtttaagccagagagatttaagggtaataactttgaattccttccatttggctccggacgtagaatttgtccgggtataaaccttgggctagccaacttggagctagcattagctagtcttctctaccattttgactggaagctacccaatggaatgttgcccaaggaccttgatatgcaggagacccccggaatagttgcagctaaactaactactctaaatatgtgccctgttactcagattgctccaagcagcgcagaagatgcatcataa

SEQ ID NO: 1076 - DNA, 1469 bp, Oryza sativa
cgttacaatcggattcctctcagcaacgaagttgttctgcgggggcacaccaaggtctcagccctcgctgttgaccatacaggatcccgagtgctctctggaagctatgactacactgtatgtatgtatgacttccaaggtatgaactcaaagctgcaatcattcaggcagttagaaccctttgaggggcaccaagttcgcagcttaagttggagcccaacatcggatcggttcttatgtgttactggttcagctcaggccaagatatatgatcgggacgggctcacactaggtgagtttattaagggtgacatgtatatccgagatctgaagaatacaaaagggcacatttctgggcttaccggtggtgaatggaatcccaagtcaaaagaaaccatactgacgtcatcagaagatggatctattcgtctgtgggatgtatcagactttaaaagtcaaaagcaggtacagaaaattttgggtcataaaacctaagcttgcaagaccaatgcgaattccagttacctcatgtgcctgggatcatgaaggcaagcgaattgttggtgggataggcgatggttcaattcagaagactggatggggaagcaggccagatatacatgttgagaaaacacatacggaggatattacaggggtcaagttctccacagatggacaaatactcctgtcaagaagtatggatagtactctgaagtgggatttgaggaaaatgaaaactcctttgaaagtttttgaagatttaccaaatcactatgctgagacaaatgtggctttcagccccgatgagcaacttattttcacaggaacttctattgagaaagacggtgaaaatggaggcctactttgcttctttgatagaaggaaacttgagcttgtatcaagggtggggatttcaccacattatagtgtgataaggtgtctatggcatccaaggattaatcaacaggtattcgcaacagttggggataagaaggaaggtggtactcatatcttatatgatccttctattagtcagagaggagcacttgtatgtgttggacgagcacctaggaaaaaatctgttgacgattttgaggtgcaacctgtaatacataatccacatgcactgccactatttagagatcaaccaagtcggaaacgccaaagagagaagatactgaaagacccgctcaaatcacataaacctgaagctccagtcaatggtcctggctttggtggaagagtcggtactacaaaaggcagcttgttgacacagtacctcttgaagttattacaggagggtggtttgattaaggagacatggatggacgaggatccaagagaggcaattttgaagtatgcagatgctgcagagaaagatccaaagttcattgcaccagcatattcccaaactcagccgaaacctgtatttgcagagtcggattctgaaggcgaagagaaaaaataat

SEQ ID NO: 1077 - DNA, 1407 bp, Oryza sativa
  N_region (348)..(348): n = any nucleotide
  N_region (351)..(351): n = any nucleotide
atggggtcttcggccgagccgccgccgccgtgccacgtcgtggcggtgccgtacccggggcgcggccacgtcaacgcgatgctgaacctgtgccgcatcctcgccgcgcgcgacggcgtcaccgccaccgtcgtcgtcaccgaggagtggctcggcctgctcggcggcgcggcggccgcggcggcgaagggcggcgtccgcctcgaggccatccccaacgtcgtgccctccgagcacggccgcgccggcgacatgctcgggttcgtgcgggccgtgtacaccaggatggaggcgccgttcgagcgcctcctcgaccgcttggctctcggcgcggcgccgccgccgccngcngccatcgtggccgacacgttcgtgctgccgtgggcggtcggcgtcggcaaccggaggggcctgccggtgtgcgtcctctcgccgctcagcgccaccatgttctccgtgcactatcacttcgaccgcctgcccacggccaccgacatcgccgatggcgatgaggtcggaaactacattcctgggctgaaatcgatcaggtttagcgatcttgagcccacacacacgaacaagaacatggtagacctcatcctcgaagcctactcccatgccagaaaagcacagtgcgtcatcttcacctccttctacgagctcgagagcaacgccatggacgctctccggcgagacctcccttacccggcgttctcggctggcccttgcatcccatacatggcgctccaagctgacgaacaccacgccggcgacgaggaagaagagccatacatggcgtggctggacgcgcagccggtgggctcggtgctgtacgtctccctcgggagcttcctctcggtgtcacggccgcagctcgacgagatcgccgccggcctcgccgacagcaaggtcacgttcttgtgggtgctccgcggcgactccggcgcgcgagacatcctccgcggcggcggcggcatggtggtgccgtggacggaccagctgaaggtgctgtgccacccttccgtcggcggcttcttcacccactccggcatgaactcgacgctggaggcggtgcacgccggcgtgccgatgctgacgctccccatagcgttcgaccagccgatcgtcgcccggctcgtcgccgacgagtggaggatcgggtacggcctcagggagaacggggacggcggcggctgcagcggcgtcgtcgggagggaggagatcgccgcggcggtgaggaggctgatggtgatggattccgatgcggcggcggcggaagaggcgaaggagatgaggaggagagcttcgctgatgcgagaggcctctcgcgccgcggttcaagagggtggttcttcctacagagacgtgacgtctctgatcaactacatttcagagttcaagaactga

SEQ ID NO: 1078 - DNA, 1362 bp, Oryza sativa
atggaaggcggcgtccacatcgtgtcgcggcgcatggtccggccggcggcggagcacgccggcgagctgccggagcacgagacggtgcaccacctcacgccgttggatctccggatgatcaccggcgactacgtccagaagggcgtcgtcctgcccaagcctcccggcggaggtgagcacgtcgtcgaacaccttgtctcgtcgttcgcccgcgcgctggcccgcttctacccgctggccggccgcctcgccgtcgccgagacgccgccgtcgcctggtggtgctcgtccgaccatctccctctcgctccgctgcaatggcgagggggcggagttcgtccacgccgtggcgcccggcgtcaccgtggccgacatcgccgactcgctcttcgtcccaagggtggtgtggtccttcttcccgctcaacggcatgcttggcacggacgccgccgtggagccccgccgccctgtcctggccgcgcaggccaccgagctcgccgacggcatgttcatcgccatgtcgctcaaccacggcgtcgccgacgggttcaccttctggcacctgttccgcacctggtcggagatcaaccgccgccgcagcggcgctgataacgccgacctcgagctctccaagccgccgccagtgttcgacagatggttcgtggacggcatcccggcgccgatccctctacccttcgccaagctggaggacatggtccggcggcctgcgtacacgccggtggaggagtgcttcctccatttctcggcggagagcgtgaggacgctgaaggagaaggcgaacgccgagatggccggcggcggcggcggcgccgccatatcgtcgctccagtcggtgctggagacgaggcacggcctctccgtgggactgcgagcgcgggtcaaggaggtgccacaagaatacatgggcaacacggtggtgggcgccgtcgcgagggccaccgccggcgagctcctcgagagagggctcggctgggcggcgtggctgctgaaccgcgccgtggcgtccgcgggcgacgaggcgagcgtgaggcgcacgctgccggcgtggccggagacgccgaggttcgtgacggtggcgagcctgcagaacgccggcgtggtggtgatctcgggctcgccgcggttcgacgtgttcggcaacgacttcgggtgggggaggccggtgggcgtccggagcggcgccgggaataagatggacgggaagattacggtgtacgagaggcgaggcggcggcggcggcatggcggtggagatttgcctggcaccggaggcgctcgcgaggctggtcgccgacgaggagttcatgagcgcggtgactgcgccgccgccgacacatcactaa

SEQ ID NO: 1079 - DNA, 1317 bp, Oryza sativa
atgggcaagcaccatgtcaccctgtgttgtgtcgtttttgctgtgctctgcctggcgtccagcttagcacaagcccaagttctcttccagcaggggtttaactgggagtcgtggaggaagcaaggcgggtggtacaactttctgcacgagaaggtggaggagatcgccagcacgggcgccacccacgtctggctcccgccgccgtcgcactctgtctcgccgcagggttacatgccggggcggctctacgacctggacgcgtccaagtacggcacggaggcggagctcaagtcgctgatcgaggcattccacgacaagaacgtcgagtgcctcgccgacatcgtcatcaaccaccgctgcgccgactacaaggacagccgcggcgtgtactgcgtgttcgagggcggcacgcccgacggccgcctcgactggggccccgacatgatctgcagcgacgacacgcagtactccaacggccgcggccaccgcgacaccggcgccgggttcggcgccgcgcccgacatcgaccacctcaacccgcgtgtccagcgggagctcaccgactggctcaactggctcaggaccgacctcggcttcgacggctggcgcctcgacttcgccaagggctactccgcgccgctggcgaggatctacgtcgacaacaccaacccgacgttcgtcgtcggcgagatctggagctcgctcatctacaacggcgacggcaagccgtcgaccaaccaggacgcggacaggcaggagctggtgaactgggtggagggcgtcggcaagccggcgacggcgttcgacttcaccaccaagggcatcctccaggccgccgtgcagggcgagctgtggaggctccacgacggcaacggcaaggcgcccggcctcatggggtggatgcccgatcaggccgtaaccttcgtcgacaaccacgacaccggctcgacccagtcgctctggccgttcccttccgacaaggtcatgcagggctacgcctacatcctcactcaccctggcatcccatgcatcttctacgaccatgtgttcgactggaacctgcagcacgagatcgcgacgctggctgaaatccggtcaaggaacgggatccatgcggagagcacgctggacatcctcaaggccgagggggacatctacgtcgccatgatcgacggcaaggtgatcaccaagctcgggccgaggtacgacgccggcgggatcatcccctccgacttccatgtcgtggcgcacggcaacgactactgcgtctgggagaaggaaggcctcagggttcctgccggtagaaagcactattag

SEQ ID NO: 1080 - DNA, 1204 bp, Oryza sativa
  N_region (127)..(127): n = any nucleotide
  N_region (669)..(669): n = any nucleotide
atggcgcgggggttccgcggcgtccgggacgacctcaccgagctaggccgccacatcctcgacatcgcctgcttcctccacccgctcctcggccccgcccacctcaccgtcgacttaccgcccgccnacccccacccaccgccaccaccaccaccgccgctccccttccccgcgccccgccagccggccttcccctccatcctcgccggcatcctcgccgacctcgccgagatcggcggctcctttcaccggtggcttcgcccgccgcgccgccctccccgaacctgccttctcctccgcctccgcctccgcttccgccaccaccgcggagtccccgcgcgccgcttcctccacggcctcctctccttccccttcccctgctgccgctgccgctgctgatgtcgctgatgacgtcgtcggggcggcgcaggcccttgcggcgcggcccgaggcgtggattgacttccccgtgctcgcgctcgatgagattctataatctccgatatccaaagggatcatatggaagccattgaaaaacttgtacctgacttagcatctctgagagctaggctctgcccttcttacatggatattgatgtattctggaagatctactttacgctgcttgagtcgaaccttactgaacatacttcagagaggtagatgagnatgtaaccaggttctgttcatcacggtcaatgagatagagtctgattctgcgcctaatgtttgtgaaattgaaagtgtgaaaagcactcaagagggttatcaatcgccagatgatcgtgtgttgataaaaacaagatccaatcaaagcattgaccaatgggtgtttgcaaagtcaaaatctgagcaaagcatggatcagtggtccgaaataccttcggatgtggaatcttctagagatggtagaagatacattagcggtgaggagcttagcgacgctgacagtgcccatattgttgtcatggacaaatacatggattcacttctgtcagatcggaggagcctccactatgctagctcctcagtccggcgggattcagctagattggacgcggttagaatgccctgcggcagctgcctcgccgttgctggcttcttgttcttcgtcgtccggcagctgcatttgggcgtgaaacgctgtgttcttcgctgtctggattcagtggtggagctagaaaaatttttgagcccgaactaa

SEQ ID NO: 1081 - DNA, 1167 bp, Oryza sativa
atggcatcggagatgagcaagaacgtgaaggtcaccgatgatcaagaggttacatcacaggagcgtgaccaaagtggtggtacaaaagtaggtggggaggaggaaattgctccactggcgcggcagtcgtcaatcctctccctcaccttggaagagctacaaaactccttgtgtgagccaggacgcaactttggttccatgaacatggacgagtttgtggctaacatatggaatgctgaagaattccaggctaccaccggaggttgcaagggtgccatggaggaagccaaggtggtagacagtggaagcggaagcggtgatgcaggaggaagcggtttatgtcggcagggatcattttccttgccgctaccgctgtgccagaagacggtggaggaggtgtggactgagatcaaccaagcccctgcacacacctccgctccggcctccgcgctccagccacatgccgggagcggtggtgttgcagctaacgaccgacaggtaacactaggtgagatgacacttgaggatttcttggtaaaggccggggtggtccgagggtcctttaccgggcaagcggccatgggatctggcatggtcaacgggccggtgaaccccatgcagcagggccaaggcggtcctatgatgttcccagtaggaccggtaaacgccatgtatccggtgatgggtgatggcatggggtaccccggtgggtacaacgggatggcgattgtgccaccgccacctcccgcccaaggtgccatggttgtcgtgagtcctggatcatcagatgggatgagtgccatgacacatgctgatatgatgaattgtattgggaatgggatgatgattgagaatggaacaagaaagcgtccccacagagaggatggctgcgccgagaagacggtggagcgccgccaacggcgcatgatcaagaaccgtgagtcagctgcacggtcccgtgctagaaagcaggcttatacggtggagctcgaagctgaactgaactatctcaagcaggagaacgctcgtctcaaagaggcagagaagacggttctactgacaaagaagcaaatgctggttgagaaaatgatggagcagtccaaggagaagatgaatgcaaataggggtggcagccagctgcgccgcagcggcagctgcatgtggtga

SEQ ID NO: 1082 - DNA, 1162 bp, Oryza sativa
ggggtcgactactacaaggtcctcggcgtcgaccgcggcgccggggacgacgacctcaagaaggcctaccacaagctcgccatgcggtggcaccccgacaagaaccccaccaacaacaagaaggaggccgaggccaagttcaagcagatctccgaggcctacgaggttgccctcacaccccccgcatctccccctcctcatattcctgcgaagaggtccttagtgatccccagaaacgcacaatctatgatcaggtaggggaagaagggctcaaggggcagccgccccctggtgcgggaggtcctggagcatctcccttctaccctggtggtgcccattccaactcttttcacttcaacccaaggagtgcagacgacatttttgccgagttctttggattccgtggtcctttctctagcatgggtggcatgccaagtgtaagtggaggcatgagaggggacccaaggttcccagggtttggcaatgaatatttctcttcacgctttggtggtgagggttccaccagtatgcatcagccgtcacaccaactagcgaaacctccgcccattgagaaccggcttccagtcagccttgcagatctgtacaagggtgtaacaaaaaagatgaagatctcaagagagattatagacttcaacggaacaggagagtttcacagcaggaggaaattttgcagatagaagtaaagccaggttggaagagggggacaaagatcacttttgaagagaaggggaatcaagctccaaacatgaaacctgctgatattgttttcataattgaggagaagccccatgacattttcaccagggagggaaatgatcttgttataacggagaaaatatctttggtggaagcgcttactgggtatactgcacgtatcattacacttgatgcgcgaagtctgtcagtgcccattaattcagtcatccatcctgactatgtggaggtggtccctggagaaggcatgcctaatccaaaagggcccaataagaagggagatctgaagattaaattcaacatcaggttcccttccaggttgacatctgatcaaaaagcagggttcaaaaggctcttgggttcttgagcctgtttgaacgaatttcgtaaaagtgactgtgaatattggcggtacctagcgaggtag

SEQ ID NO: 1083 - DNA, 1142 bp, Oryza sativa
  N_region (29)..(29): n = any nucleotide
  N_region (148)..(148): n = any nucleotide
  N_region (153)..(153): n = any nucleotide
atgcagagctcagcgcggaggacaaggcnaacctcgtggagtcgattaaggtcggggtttctgcggtggtgtttttgtttttgctgcttgctgcttctatcggggtttgggcgggcttgggaggggttttctgatgaaacttgtggtnaattncgatgtttgcttgcgcagaacacgctgcagggattggcggcgcggcacacggacgtgctcgagagcctcgagcccaaggaggcgaagttctttgaggagagagctgcacttgaagctaaatatcagaagatgtatgaaccactttactccaagcgttatgaaatcgtgaatggtgtggttgaggtagatggtgtcaccaaagaagctgcagatgaaacccctgcagagcagaaaggttctcatattcttcctttactaacatgcagaggagaagggtgtaccagagttctggcttaatgccatgaagaaccatgaaattctgtctgaggagatccaggagagggatgaggaagctcttaagtacctcaaggacatcaaatggtacagaattagtgagccaaagggtttcaagcttgaattttacttcgatactaatccattcttcaagaactcggtgcttaccaaaacataccacatgattgatgaagatgaaccaattctggagaaagccattggactgaaattgaatggttccctgggaagtgtttgacacaaaaggttctcaagaagaaaccaaagaagggctcaaagaacactaaacctatcacaaaaactgaaaactgtgagagcttctttaacttcttcagcccacctcaagttcctgatgatgatgaggaaattgatgaggatacagaataggctgaacagttgcagaaccaaatggagcaagattatgacattggtctaccatcagagacaagatcattccacatgctgtttcatggtttactggagaggctgctcaagatgaggacttcgaaggcattatggatgatgaagatgatgacgatgaagatgacgacgatgatgaagatgaggatgacgagggtgatgatgaagacgacgaggatgaaaagcagaagggcggacgagttcctgcaggggaagggcagcagggagagcgacctgcagaatgcaagcaacagtaa

SEQ ID NO: 1084 - DNA, 1113 bp, Oryza sativa
atggctcttgaggggaaaccaggtttcattaccatgtacgccatcacatgctgcaaatgcgagaaatggcgtacgattccaacaaaagaagagttcgaggtaatccgtgagaactaccccgcgaagccatggttctgcagcaaaaagcgcgactgctcatgtgagcaccctgaagatatccagtatgacaccagccgtatttgggccattgataggcccaacatccctaagcctccgccgaagacagagaggctactgatcatgaggaatgatctatctaaaatggatgcctattatgtcttgccaaatgggaagcgtgcaaagggcaaacctgatatagataggtttctgaaggaaaacccagagtatgctgctactttaccactttcgagcttcaacttctcaacacctaagatagttaaggagactgtttccgatagtgcaaagtgggtgatggcgaagtctgagagggaagagcagtgtatgcaactagacgcaaaagaagttccaagttccagcagcaagaagcgtgtgtgtaaaatgagagtaaagttgggaaagtgtcccgaacacaacctccaaggtaggtgcacactgcacatcaccagaaaacgaggctcctccacagactccattggcatgtatgcagttcaatgttgtgagtgtcacaaatggcgcaaggttccgacgaaggatgaatttgagacaattcgtgagaatttcactgaggagccatggcactgcagtagaagacctgactgctcgtgtgaagaccctgctgacatcgaatatgatagcagccgtatatgggtccttgacaagcctaacataccaaagcctccagcaggaactgagagactagtgattatgagaggtgatttgtctaaaatggatacctactatgtcatgccaaatgggaagcgtgtaagatgcactgcagaggtggataagttccttgaggccaacccgcagtacaaagatcgcttttcagttgaaagcttcagctttacaacaccaaagattgtcgaggaaactgtttctcacaactccgtgtggaagtctggaaaggctaagaagcaggacaagataaatgctttgagcaataacaattaa

SEQ ID NO: 1085 - DNA, 1093 bp, Oryza sativa
atggttctaaacaaggtgctcgagctgttttgtgtgaagaagaaggattccaagaagaaaggtaggcaaagccattaatcctctttgtaaagagttgccgctccacaccccactgcaaatgtcagtacaaacaacagccttttggatcccttttcaagtgggaatggtactgtgctattagtgcaaaaacatgagcctgaatgttcaagtgttgtatcatcaatgacaaggacagaatatggatctgaaagtgatggctaccaatttgtttaaccaatttgatgttgtgcaagatttttctgatcattactatgcaaagaattcaccagggaagcagcatggtttcaatcatgcagaatctatctatgttagagcttatgaggataggattgatctgctgagggctgctattgttgggccagctggaactccatatcatgatggtctgttcttctttgatgttcgctttccttctgaatacccacaatctccaccggaaagttcattaccattcgggtgggcttcggctaaatccaaacttgtatgagagtgggaaagtttgccttagcctgctgaacacctggtggggtactggatgcgagaagtggggcaagtcaaaatcaaccatactgcaggtgctggtttccatccagggtcttgtgttgaatgataaaccatactttaatgagccaggcaacaaaaattcggctaatacagctcctggagaaaagtactcgttggcttataatcagactgccttcctactatcctgcaggacaatgatgtattcacttcggaagcctccaaagagcattttgagtcccttgttgcacgccacttccatgagcgtgagcgcgtcatcctggatgcgtgcgacgcatacatatctggcgcagtcgttggatcatcctctgcgaagggcaccaagcatccccgcgacaacaacagatcgtttgcagatttcaagaagtcactggagaagtactctgaactgctcaggaaggacttggccgcgaaccgcacacacttcctgaaactgacaagagactcgccggctgccgcagatgagatcgttgagtgtaccagcagctag

SEQ ID NO: 1086 - DNA, 1053 bp, Oryza sativa
gaaggtgcatatctagaaggcaacaaaagtttaagcaattgggatgtgttcactcatctaccagggaaatatcaaggatggaagcaacggagatatcgcggatgatcattatcaccgctacgaggacgtcgagctgatgaactccctcggcgtaaatgcctatagattctcgatatcatggtccagaatccttccaagaagggagatttggtggagtcaacccagcgggcattgatttctacaacaaacttatcgattcaattttactgaaagggaatacagccatttgtcaccctgacacactacgacatcccacaggagctcgaagacagatacggagcttggctctgcttcggcgcgttcggcgaccgcgtcaagtactggaccaccttcaacgagcccaacgtcgcggtgcggcatggctacatgctcggcacctacccgccgtcccgctgctcgccgccgttcggccactgcgcccgcggcggcgactcacacgccgagccctacgtcgccgcccacaacgtgatactctcccacgccaccgccatcgagatatacaagagaaagtaccagcagagaggaatgattggcatggtgttgtacagcacctggtacgagccgctgagagatgtccccgaggaccggcttgcctttcttgatccactggtctacggcgattacccaccggagatgcgccagattctcggcgggaggctgccgagtttctcgccggaggacaggaggaagctgcggtacaagctggacttcatcggggtgaaccactacacgaccctgtacgccagggactgcatgttctcagactgcccacaggggcaggagacgcagcacgcgctggcggctgtcactggagagagcaacgggcttcccattggaactccagggagctgatgttcgtggctacttcgcctgtttgggtacacccttcgatttggactgtactacatagactacagaacacaggaaagatctccaaagctatctgcgctgtggtacaaggaattcctccaaaatctgcatgaaaatcaatag

SEQ ID NO: 1087 - DNA, 1036 bp, Oryza sativa
gagattctgtccaagcaggccgtcaagatcgccaccaaggccgaggagcacgagcgcttcatcttcaaggtcacacacttgctgggtgttcttggatttgggacattttgctacctcctgggtgccaccacaggatgtgccgtatgtgtactgcctgttctatgtcatctttgttccgctccggtggatctactaccgctataagaaatggcattactatctcctgctgcaggacttctgttactatgccaacacttttctccttgttatgattctcttctatccaaaggatgaaaagcttttcatggtttgcttctcatttgcagaggggccgcttgcttgggcattaattgtgtggcgctgcagcttggtttttagctcatttgataaacttgttagtgtcctgattcaccttttgcctgggcatagttatattcactatccggtggtggaatccacaaacttttgctgcgatgcatccagaaggaagagcagccagagtcacatggccttatgtggaggacaaatcatacctgtggacatggctgtttgctgttcctctagctgcttacaccctgtggcaacttatgtattttctcatagttaatgtgctgcgtcggcaaaggctgttaaaggatcctgaagtcatgacatcatacagtcttgtagggagctctcaaagaaagcacagaaagcaaacaacatctggtggagactcagcgggcttcttggcgacaggaaccggccactcatgtacatactactccaagcgctgttcacggtggcgacaatggcgcttaccgttcccatattcctgtccttccagatgcatgtggtcttccagatactcaaggtgtgcgcgtcgacatggaacggtggaagcttcatcctggaggtgatgcctaggcaagtcgtccagaaggagaagaagaagctagagatgaagcccatggaagaggctaattcgagccagaatgctgaagaatcacaaggggacctgtcagcaaacggccagcactcatccgagcatagctaa

SEQ ID NO: 1088 - DNA, 1024 bp, Oryza sativa
  N_region (18)..(18): n = any nucleotide
atgcgtgttcagtgtgtncgttgcgctctcagcagtttaggtggggatcatcctggagaaatcaagaaggagctattgaatctggctttaccggccatagttggacaagcaatcgatcctgtggcgcagctgttagagactgcatatattggtcgtttagggtcctgtagagcttgcctcagctgccgtgggtgtgtcagtcttcaatattatatcaaaactgtttaacatcccactcttaagcatcacaacctcatttgtggctgaagatgttgcaagacatgattccgatcagtttacttcagaggaagagactcccctccatttcttcagctatacttttggctgctgcaattggtgtcattgaggcctcagctttgattctggggtctgaaatactcctcagcattatggcctgcaaagttgtttctttctttaagggcacttggtgctcctgccgtagtggtttcattggctattcaaggtatctttcgtggattgaaagacacaaagacacctctactttacagtgaaaagagcagttctactgcctccaaaaattgaagaccttgatttcgttgggtacataaaatctggtgagtgggtggcatgctattagggagaactctttcagttcttataacaatgacccttggaactgcaatggctgctaggcaaggcacaatagccatggctgctcatcaaatatgtctacaggtttggctggcggtatcattactttcggatgcattggctgtttctgcccaggtgcaactctcttttgtaatcaggcattgattgcaagttcttttgccaagcttgactatgaaaaggtcaaggagggtgcagctttagcccttcttctgtttgcctcttttggtagaattgcagttggggcaatatcttctttatttttgctatatgctcccaaagtttttggcctccctggggtttgggctgggctggctcttttcatgggtttgcgcatgactgcaggatttttgaggcaagtttttctttctga

SEQ ID NO: 1089 - DNA, 1011 bp, Oryza sativa
  N_region (962)..(962): n = any nucleotide
  N_region (965)..(965): n = any nucleotide
atggaggatgtcaagtcaggaggagcagtcccatttcttgaccctgacaactgccccaatggctgggctactcccccaggggacacattcatggtcagaggccctgattatcttgcaaccaaggtgaagataccaggtggggagtatcttctaaagcctctcgggtttgattggatgaaaagccccgcgaagatatgcgagattctgaataacaagagtcatcgtgtgaggaaagccatcgacggcgaggttttgcgtggtaatcagcctttcgtctgggctttcaacctgcaactgcccagcaaggataattacagtgctatattctactttgtgtcgctggagccggtaccggaaggctcacttatggatcagttcttgaaaggagatgaggctttccggaaatctaggcttaagctaatcgcgaacatagttagagggccttggattgttcgaacagctgtgggagaacaagctatttgcatattgggtagggctcttacgtgcaagtatactcagggatcaaacttcattgaaatcgatgtggatgttggatcttctattgtcgcaaacgcaattgttcatttggcgtttggttacgtgcagacgctaacagtagatctagcattccttattgagggtcagaccgaatcagagctccccgagagacttcttggagctgtgaggttctctgagttgaatccgggttcggctggtgtgtatgaagtgccatctgaggagcaacaagaaagtgcgccttttctgccggcaagattgtggcagggtttttcaaacatgttacataaccctggaaattccagggagccatcctctacttcacaaagcactaatgggagtttacacaaagaagatgcggatgagaatactagagaaagtttgcacaaagaagatgtggatgacaatactgctgggagcttgctcaaagaagatgggtacgagangtngctaccgggagttttgaccacaagaagatacagaagaggactctaa

SEQ ID NO: 1090 - DNA, 860 bp, Oryza sativa
ggcgcggcggtagagggggagagaggcgaccggtggcggagcggggacggtggtgataggagagggagagaggtggccggcggcggagcaagggtggcgagaaaggggaagagaggtcggcgcaacggcgagctcggccagctcgcggctgcggcgggagaggagacagttggtgcgacgttgagctcggcgtggtgcggtgacgagggagaggagaggagaggagaggcgcatggcacggcgcggcggcgtgggagaggagcggcgtggcgcccacctcttccctcttcgagcgcacgctcaccaacctcctcgccggcatccccgccctgcttgccggcctcctcgccctgcttgccggcctccccatctccttcccctccactcctcgcgcctcttcccctaagcggcggtcgtcgacgttggagccccctctttgccggtcgccggtagcagccactgctgaccacaacgactgccttgcgcggacaagaaagagggaggggacatacaccaccggccgcatctggcgctcatctgagcccgctgccgcccccatcgacacgctgcgctccactcctctccctcgccggtgcgccgtgcgctgcttctctcctcgtctccctcgcgcgcaggttggacgagctcgaacgggcttgccggccgcgtccccctccccttccaaaccgctttgccccactacccgccaaccgttaccgcgctcgcttgccgcccaccgtctgcatccgcgcatcgccactccgcccgccgctggcctctctcactgaagaagagaagagagaagagagaaaagagaagagaaggagaagaaaagggaagaaaaaaagatgtgcagctga

SEQ ID NO: 1091 - DNA, 832 bp, Oryza sativa
  N_region (481)..(481): n = any nucleotide
  N_region (508)..(508): n = any nucleotide
atgccggaagacgccgttgtgaggggaggggaaacgcggccgcggccgcggtacggccgcggtacccagagcggtccgtgcaccttctgtcctttgcccattgcggggttgatcccgcccttctctatgttcttcttcgacgtcttggatttctacgagatccatgtcttgcatctcgctcccaatgccgtgatgaccctggccatcttcgcacacctgtgcaagatgttcgtcgggtctacgggctggctggcggtctcggagctgggggaggagtacgacgcggagcgggaccgcctcaggggcctacgaagccggggcctaatggcggcaatggtgttcaaagattatttctgccgtcacatcgcgcctctccaggagcggtcccgcggcgcatgggagtacaccgggtacaatgaccccatgcgcacccatgtgggcgagcgctgggactggagcgaggaggacgcgaagacggttnttcggcgggtgctgggcctggacaccntcgagcatacgctaattccggatgggattctccctctctgcagcgaccgcgaccgggagaatatcctggctgtgatgatggctgtcggtgctggaggaggtcggccccgccagggcgccgttggtggcggtggcggcgacggcgcaggtagcagtagtgcgaccgcgggcggcggccggaccggcggctccggcgggggcagcggctccaggatgcctggtccgggctgtgggcctaggggagactcggtcgtcgacccgaaggggaagcggaagatgtccgagtctcggctgccctcaaaccccccaccccccgcgcgcgcgg

SEQ ID NO: 1092 - DNA, 815 bp, Oryza sativa
actgagcagcagcagaggacacgagtacgtgtcagagatccatgcgagcgaggagaggagagggaggggaggagaagggggtgcatgcttacgtcgctgtcgagggcggcggcggcggtgccccggtcggacggctcgatggcgagcagcgtgtcgagaaggtcgagcgccggcggcgagaagtccctgaacgtctcggcgatcttccgccggtacggccgctgcggcttgaacagcgtcacgtccggcagcttcgccttcgcccagtactcctccgacggcgacccgcacagcttgaagatcttgtgcaatatatttacctcggtttggccgggcaagatgggcttgccggcgagaagctcggcgaggatgcagccggtgctccagaggtcgacggcgacgccgtactcggtggcgccgaggaggagctccggcggccggtaccagagcgtgacgacgcggctggtgagcggctgcggcctggcggcgtcgaagaaggtggcgaggccaaagtcggcgatcttgagcgcgccgtcgccgccgatcagcaggttggcgcccttgatgtcgcggtggagcacgccccggtcgtggcagtggcgcagcccggcgaggatctgcgccatgaggcacttcacctgcggctccgtgaagcgcagccccggcgtggcggcgaggccggcgaggtcgtggtccatgtactcgaagacgaggtagaggctgtgggagaggcgcgacgtgacgatgccctcgaggcggacgacgttggggtggcccgtcgaggcggcggaggacgtggatctcccgcgccatga

SEQ ID NO: 1093 - DNA, 763 bp, Oryza sativa
  N_region (397)..(397): n = any nucleotide
atgccgatccgcaacatcgccgtggggagccaccaggaggtgtaccacccgggtgcactcaaggcggcgttggccgagttcatctccaccctcatcttcgtcttcgccggccagggctccggcatggccttcagcgtacgcaggcaagctgaccggcggcggagcgacgacccccgccgggctgatcgcggcggcggtggcccacgccttcgccctgttcgtggcggtgtccgtcggcgccaacatctccggcggccacgtgaacccggccgtgaccttcggcgccttcgtcggcggcaacatcaccctgttccgcggcctcctctactggatcgcccagctcctgggctccaccgtggcgtgcttcctcctccgcttctccaccggcgggctcgcnaccggcaccttcggcctgaccggcgtctccgtgtgggaggccctggtgctggagatcgtcatgaccttcggcctcgtctacaccgtgtacgccaccgccgttgaccccaagaagggcagcctcggcaccatcgcccccatcgccatcggcttcatcgtcggcgcgaacatcctcgtcggcggcgcgttcgacggcgcctccatgaacccggccgtctccttcggcccggccctcgtcagctggtcctgggagtcccagtgggtgtactgggttggcccactcatcggcggtggcctcgccggcgtcatctacgaggtcctcttcatctcccacacccacgagcagctccccaccaccgactactaa

SEQ ID NO: 1094 - DNA, 708 bp, Oryza sativa
ctgctcgagtactccggctaccagcggtatgacgtgcaccatgtcgcgaggtggatcgagcagatactgccattctcgctgctgctgctcgtcgtcttcatacggcagcatctccaaggtggtttctttgtcacaatttggattgctgctgtaatgttcaagtcaaatgatatattgcggaagcaaactgctttgaagttgcagggcgagagaaaaattgctgtgcttgtcgggattacagtaatcttcatgattcatgtgtttggtgtctattggtggtacaggaatgatgatcttctcagacctctgttcatgcttccgccaaaagaaataccgccattttggcatgcgatttttatcatcatgggtcaaatgctaacccttgtggaataccttctgctcctatatcgtgccttgttgccaactcctgtttggtaccgtttctttctgaacaaggaatatgggagtcttttctcatctttaaccactggactgtacctgaccttcaagttaacttcagtagttgaaaagcaggttcagtcattcttggctgcagtgaaagcattgtcacgtaaagatgtgcattatgggtcttatgcgacagcagaacagtgctggtgatatgtgtgccatctgccaggaaaagatgcatgttcctgtcctcctccgctgtaaacatattttctgtgaggactgtgtctctgaatg

SEQ ID NO: 1095 - DNA, 676 bp, Oryza sativa
atggctgctgttggcgcctgcttcctccagcagcttgctgtcgttgccctcttggctctgtggtgctctcatggcgccatcgcctccgatcctggccttcttcaggacttctgcgtcgtcgacaagatgtctcaaggcagtgcgtgtaaatgggttcccttgcaaggacgccaaggacgttgtcgccggcgacttcttcttctccggcctccacatggccggcaacaccaccaacaagcagggatccaacgttaccaccgtcaacgttgcacagatcccgggtctgaacaccatgggcgtctccctcgtccgcatcgactatgcgcccaacggcctcaacccgcctcacactcatccacgtgccaccgagatcccgaccgttctcgaaggatctctctatgtcggcttcgtgatatcgaaccccgagaataagttgttcaccaaggttcttaacaagggtgatgtgtttgtgtttccacaaggattagtccattttcagtttaacaatggaacaaacaatgctgtggctcttgctgctctgagcagccagaacccaggggtgataaccgtgggaaatgctgtttttggatcaaagccatctatctcggatgatatccttgccaaagccttccaagtggacaagaacatcatagaccgaatccaagctcaattctag

SEQ ID NO: 1096 - DNA, 675 bp, Oryza sativa
atggcaggacgtggtggaggaggagagctgcggctgctggggacgtggtcgagcccgtgggtgatccgggtgagagtggcgctggggatgaaggggctgagctacgagtacaccgaggaggacctctccagcaagagcgaccacctgctcaggtccaacccggtgcacgagaaggtccccgtcctcatccacggcggccggccggtgtgcgagtcgctcgtcgtcctggagtacatcgacgagacctggggagccaccgggacgccgcagctcctccctgccgatccctacgaccgcgccaccgcgcgtttctggaccaactacgtcaacgacacggtagagcagagagctgaggcgttcaagaacgtcgtccctcgcgtggaggcgctggagcgagcgttcggggagtgctccaaggggaaggccttcttcggcggggacgacgcggggctcgtcgacgtcgcgctcgggagccatctggtgtggatcaaggtggtggacgaggtggccggcgccaacctgctcgacgaggccaagttcccgggcttggcggcgtgggcggagcggttcttggccgtcgacgctgtcaggcaggtgatgcccgacgccggcgatgttctgaagcagtacaaggggttcctggccaaatggactgcaggcgctggttcgagctga

SEQ ID NO: 1097 - DNA, 643 bp, Oryza sativa
atgcatgctcataatctgcttgatcatacacaagtgcaagctccttaccaacaatgccacaataatcctgtcttacatggtgtaaatcattctggcaaccggttccatttgggtccaaggattccagttcttttctctaattctgaacgtacttttgggcctccacatcatccactcttggcaaatccagtgaaccacagaaatatacgaatcctgccacctgagagcatgctacaataatggatttttcaagattgtatgaagtgtcaaatgttgtagatgagcatagagatatgcggctagatatagacagcatgacatatgagaggagcttttagcattagaagagcagattggagatgtaaatactggtctggcaaaaagctacattgtagagaaattgaagactagcttatttgtgccaggatcatcctgcatgtctaataagtcttctgaatcttccatggagaatgatgcttgcataatatgccagcaggaagagtatcaggttaaagaatgcattggaacccttgactgtggccacaggtaccacgaagattgcataaaacaatggttgatggtaaagaatttatgccccatctgcaagacgacagctttgtcaaccggaagaagaagtggataa

SEQ ID NO: 1098 - DNA, 612 bp, Oryza sativa
tgcagggagcttctgtacaaaccagttgttattgtgtggacatatgtcatgtttctggtgcgtccacaatgctatgcatatcatcagggagtctcattgtgctgtctgtaggcagccttataaacattttcctagtatctgtcaactcctccatcacttgcttataaagcttgaacctgtggaatacaaaagaagggaaaaagaggtactagtgtaaggagctgttgtatcaacctgctgttcttaattgtggtcatgtcagatgttcatattggggttggatgcgattcatgcgggtatccaatacgagggaagaggtacaaatgtaaggactgcactgaattaattggatttgacctctgcgaagaatgctacaatacaaaatcgaaacttccaggccggtttaatcagcatcatacccctgaccacaggatggaacttgatcattcagcactcttcaataggttgatgaggctacaagggatacacgaggagggcccaggagagataatcatagaaggtgcatttgttgctcctgacgctgtggtgcatataatagcagatgatcatgaggaaatcgaggataacggtgaggatgatcacttgctctag

SEQ ID NO: 1099 - DNA, 597 bp, Oryza sativa
  N_region (193)..(193): n = any nucleotide
atggtgctctgggtcttcggctatggctccctgatctggaaccccggattcgacttcgatgagaagatcctgggcttcgtcaagggctacaaacgcaccttcaatcttggcttgcattgaccatcggggcacgccggagcatcctgcgaggacctgcacacttgagtccgacgaggaagccatatgctggggnattgcatactgtgtcaaaggggggcttaaaaaggagcaagaagcaatgaaggaaggagattctttgaagccagctgtgacaggtgtactagttttgtatccactcctgatccagtaggcaacaaatactatcttgggcctgctcctttggaggacatggcaagaggcaaattgctacagccaatggccccaatgggaataacagggattacctgttctcaatggagaaggcattgtccaacatatggccatgaagatgattcaatcatcgagctagctaacgaggtcaggaaggtgttgagccggccgaaggagaagatcactggctccgatagcccacaaaaatctcacgctctcgtacacctgtctgcgcttcctgagggcactgttgtggactcaagatag

SEQ ID NO: 1100 - DNA, 587 bp, Oryza sativa
  N_region (482)..(482): n = any nucleotide
ccacacgacattactaacccggatcacccagccatttccaaagccgacacaggtttaccatatgccgacgagaggggtcccagaccaacaacaggttaggtcccagaccatactgtgccaggaagcccaggggtcctccccgacaccaccccggcgaatccacatgtctctcggcatcaaggctcccctgataagctagttactcagccaggggtgtcccattccacccatgtggtcgtacttgtcttatgtttggatgaaattccaaggaatcggtccttaagtgcgagagcgggaaaccgtacacccgagattttaagtttgaaggcgaccgtcgatactggcacagggtgcacgaatatcgaggcgcaactggatggttacaaggggacatggtatagcaattaacaatggaaggatcaaatgcaacaagttagggtggcttgccttgctcgagatctggagcttgatcctcgaaatcntcgcactgcgggtcttcgggctccgaaactatacgcaaaacgggacaactcaacaaacggcgaaaataaagccctattaatgacctctaagcgtgccattagata

SEQ ID NO: 1101 - DNA, 552 bp, Oryza sativa
gcaggtgacctcgggcagacgttcgactcgaacagcacgctggcgcactacgaggccaacggcggcgacgccgtcctcttcgtcggcgacctctcctacgccgacatcgtgaacggcaaggcgacgccggcggcgaacgtggacgcgccggtgtacatcacgatcggcgacggggggaacatcgaggggatcgccaacaacttcacggtgccgcagccggcctactcggcgttccgggaggccagcttcggccacgccacgctggagatcaagaaccggacgcacgcgcactacgcgtggcaccgcaaccacgacccggtgtacatcaacatcggcgacggggggaacatcgaggggctcgccgacgacttccggtggccgcagccggactactcggtgttccgggaggccagcttcggccacgccacgctgcagatcgtcaaccggacgcacgccttctacgagtggcaccgcaacagcgacggcgtcaaggtcgtcgccgaccatgcctggttcaccaaccgatactggtttcccaccgacaccaactag

SEQ ID NO: 1102 - DNA, 509 bp, Oryza sativa
cgccgggccaaatctgaggtccccttccgcctgcccgacgacctcgacctcggcggcggcggcccgggggctttcgacgaaatcggctccgaggacgacctcttctccaccttcatggacatcgagaagcgccccaagcaccgccacagcagctccgtcgacgaggctaagaaggccatgacccccgagcagctctccgagctcgccgccatcgaccccaagcgcgccaaaaggagaattctggcgaacagacaatctgcagctcggtcaaaagagagaaaagctcgttacataacagaacttgagcggaaggttcaaactcttcagactgaagccactactctctcagcacaactcacactatttcagcagagagacacaactgggctttctgcagaaaatgcagagctcaagatacggttgcaggccatggaacaacaggctcaactgcgagatggctctgaatgatgcactaaagcaggaactggagaggcttaagctcgctactg

SEQ ID NO: 1103 - DNA, 481 bp, Oryza sativa
aaggagcagctcgagatggacaaggaggatgagagccttcggagatggaaggagcagcttcttggcagcgtcgatttgaactcagtcggagctgtgcatcctgtcaccggggcggccggacgtccttctgccgctgcccgtggagccgagcaactccaaggaaccatggttcaccctcaaggaaggcagcacgtacaggctcaagttcaccttctctgtcagcagcaacatcgtctctggcctccgctacaccaacaccgtatggaaggccggcgtggacaaaaccaaggagatgcttggcacgttcagccctcagctggagccgtacacttacgtgacgcctgaggagacgaccccctcgggagtatttgctcggggatcatactctgcaaaaacaaagttcgtcgatgatgaccggaagtgctacctggagatcaactacaccttcgacatccgccgggactggccctgcaagtcctga

SEQ ID NO: 1104 - DNA, 402 bp, Oryza sativa
gaggtacttgcttgggtgaaagaaaagagaccgagcgtaagtaatgcatggatgattgaagaagttgattggggaccaaaccaagaccttctccaagtatacttctagctcaccatatcacttttggcccatagaagacaagagatcaagttgtacacgttttggattcagattcgggcctcctgacagcatcaaaatcaaacgtacctagccgctgatttagaaggaatttcggggcccatgagtacttgttggaaagcttatggagtctactttcagatggttttggtcccatgtcaaaattcctaccgagctgtcgggaatctgcaaaacaagccacgtacctcatccagtccgaatctaatttgggttttgggccttgtaattgtgtcatgggcttag

SEQ ID NO: 1105 - DNA, 395 bp, Oryza sativa
taaataaaactgtaattatcagggtgaagttttatacacaagaaattgtatttttccggcaagacctcctttataggatgcggcggtcttgtctgattcccccaacaacagaagaaacaagtgaccctttcgagcatctggtagcaaccatcacccatcagagtcatctttgcccattgcctcttacagttcagccaatcatatggagctacgatcattgccttcgactctatcctactcctcatacgatagtactgggcgacaagagcgaccagaaggccttcaaatacacaggaataacttgcttcaaccctggttcttttgctaacgatagcacctttgcagcttaccgtccttgcactaaggaggttgagctttctgcattagaaagctaa

SEQ ID NO: 1106 - DNA, 324 bp, Oryza sativa
ggtatagtgtttgcttatgcaattactctatgtcatgacgatgatattagagtagtatctggtagtttagacgtggtgtctagattacgggatatcattatttggggttatatattgcggatgagaggtgggccgctgatggtgacagctcagtacggatattcctccgcgcctatatataatcctaagttaatttcctggggagggtattcctctgtatttagccccggttggatggtcatgacgagctgtcgtatggaactcggcagtcaggggtggcttctcgaagtaccaggagggcatcggatagagggtattagctag

SEQ ID NO: 1107 - DNA, 312 bp, Oryza sativa
atgcaggcggtgaaggagaaggtgaaggacaaggtgagcgcggtgaaggcgaaggggaaggtgagcaaggccaaggccgacgagaagaaggaggtggcgacggcgaggtcccacgccgagagggagctggcgcacgagcgcgctaaggccagggtcgccgccgccaagatggagctgcaccaggacaaggccctccaccgcgaggaggccatccagcacaggctccataagcatggcgccggaaccaccgccggcgttcgtccgaccgccgcggcgccggcgccgcacctcccacctgctagctactactag

SEQ ID NO: 1108 - DNA, 2025 bp, Oryza sativa
  N_region (43)..(43): n = any nucleotide
  N_region (45)..(45): n = any nucleotide
atgaagagactcggcgtcatcgaggatgagaacaaggcggacnancgggatatcctccggtaccttgagctgttcaaggctcccctggcgccatctcatgtacaggcgctggcggcgctctgcagtgtggcggaattgctggtggttgggcagctagtggttggggcctggtgcgtggttggagatttcaacctcttggccgcggacggtgataaaaacaatgggaatgtaaatcgacggttgatcaacaagtttaggcacaccattgacgcccttgagctgcgcgaggcgctcagctcctctgcctctgaccactatcccctgttgctggcctgcgatcagatgatgcataggccgaggaagttcaagttcgaatcctattgggccaaattggagggtttcgaggttgtggtccgtcaggcgtgggcggcagtgccggccggctccaacgcgctcagcagccttcacttcaagctgcatgcaactgctgctgccttacggtcctggggagccaagcgtatcagtgagctccgtcagcaactcgcgatcgcccatgaagtagttttccaattggacaaggcccaggatgatcgtcttctgtcggctggtgaaagatcattgcgggcatctctgaaaggtcgctgcctcgcgctcacctccctggagcgcattcggctcagacagcgtgcccgcttgcttttcctgaaacatagcggcaccacggctcaattcttccgcctcaaaatcaatgctcgtcgaaggaagaaggcaattccctctatttgtcaggacgacatcattgcaataactaaagaggacaagcttcaggctgcgtatgattattttctcaaaattcttggcacgccttgccccccgtcggcatcccttgccttcgatgcgatcggcttggcagtgcatgatttctctgatttggagcgcgacattactgaagacgaggcgatgaaggcgatcatggaaatgccgagcgacaaggcaccggggccggatggctttagtgccaccttctacaagaaatcctcaattgtcctgctgccaaagaaggaggaaccgaatcaactgtcagattttcggccaattagtttgattcacagcttcgccaagattctcaccaagattttggctttgcgacttgcgccgaggatggatgagctaattgggccgacacagtctgctttcatcaagcgccgaaggatacaggagaattttctatatgtgcaggagggggtggtcaaaaacctccatcgttcgaaaacgccagccatgctcttgaagattgatattgcgaaggtgtttgatactgtttcctgggaattccttcttggtctgctccggcacctgggttttggggtccgatggagggattgcatcgcgaccttgctcttcattgcctccacttctgtcatcatcaacggcagagattcgcaacggatcaggcttgctcgtgggttgcgtcatggggatcccctctctccactgttgttcgtcatcgtcatggaagctctggtggccctatgtgcaacggctgtgcagcgaggagagctttctcctcttgccaatgtacatctaccgctgcgtgcctcgctctatgccgacgacgcggtgatcttcttccacccctccagacgcgatgcgctgacaatcaattttgtgctcaagctgatgggtgaagcattgggcaggatgaagtgccctattggcaagattatttggaaatcccgtgcaccggcgagatgcaagttctttatgtttctcgccatgcgcaacgcttgcctcaccgccgacaatctacaacgccgcggatggagccttcccaggtgtgccatctgtgctccaacgacggggaaacctgtcagcacatcttcatggactgcgcttacacccagcagatttggggtcgggtgcgcacgcgtctgggcctttcgtgctcttcgccgtcggcggatagcacggaaatctgttgctaaggttgaccgcaaaacattcgatgcggggttatacttgtaa

SEQ ID NO: 1109 - DNA, 1317 bp, Oryza sativa
atgctactaccgccgatgcgcaggcggcagcgctgcatcgtcttactgaacttgatggtgtccaaagccgacttgacggcgagattccgagcgaccatcttgctcctattccagtgtcgtcccttcatctttgagcttggctcagagtttgcgagggaagactcaccagacaccccagagcgaggctcttggtgcgtgcagccacgacatctcggtagccatgaggaagaagatgagcaagttcaattccctggtgctagcacgaccacgcacgccgttcctttcctggataccggtggaggcgttgctgcgttgcggcacggatcggcttgggaacatgaggaggagatgctcgtgcgaggaggagacaatcaggttgctgcagtcaactacttccgctacaccgacatgttctacattgaaccaatctgttccgactcttcttccactagtcgtcacgtcgagtggttacgatccatgatctctttcttcgcatggttcctggtttacgcgctgatcaaaaccacgattaatcaactgatcaacaatcaacaagctcgtcgtacacatatacctgaatttcgttccaaaatggctcgacccacccaccccatggcgatgcggctgctgaagaacatcggccggcgagctccagcatccatggcttgtgtcttgccggcgacgacggcggcgggcgtggcgttctccgagaccaataagggttactctgaactgaagcagatgtaccaagctttttgtttcaatcatcctgggctctatgacagtgatactggttgtgatgaatatgtgaagagaatgcgagcaatcgtcgagttagtttgtcgtcttgaaaaagaaggccaggactggacatcttgcaccattgaatgggacagcgagagggacttgccgattgtcccgcaatggacaccgtcatcccgaacccgaaccatgacagtcggtgatcgccatgccctgctcgccgccgccattgtcgtcgccggcgccgccaccctcgtcgccggcgccgctgttgtttcccgactaaatgcggaaatgggccataggctgtcaggactcaggaatgaggagagacagagagtgagacctgcaggcttacagagtttcagaccgccacgttcatcacatgttaggaccagcaggagcaaccctgaagaggtacagtatgcgggagatgacggcaacacggtggatggggaacaggacggaggcggtcgtcaagatggcgtcttcgtcaaggaaaagcgtaatcgtcgagtgaacatgaagtataaggggtccgagtgggccgtctaa

SEQ ID NO: 1110 - DNA, 996 bp, Oryza sativa
atgtccacaccgaagaagcacgttctcttccccttcacgagcaaaggccacatcgctggcttcctctccctcgctagccgcctccaccgcatcctcccgcacgccaccatcacgctcgtctccaccccgcgcaacgtcgccgctctccgcgccgccgccgccgcgccgttcctcgacttccacgcgctcgacgagatcttcccgccgctgctcatccccctctacgaggcgttcgagacgctccagccagccttcgacgacttcgtcgcgtcgaccgccgccgccgcagcgcgcgtcgtggtcatctccgacgtgttcgtcgcgtggacggtggaggttgcgcggcggcacgggtgcggccacgcgttctttgcctcgtgcggcgcgttcggcagcgccgtcacgcactccctcttcacccacctccctctgcgcccggaggagccgagcggacgtgtgcccaagtacatgctctaccagtacggcctgcccgctgccggtgcagcaaatgacggcagcggcggccgagcagacagacggttcttggaccggcagctagctcacggcaacaacaccgacgcggtgctggtcaatgccgtggcggagccggagccggccgggctcgccatgctgcggcgcacgctcagagtcctccccgtctggccaatcgggccgctctcgcgcgaccgccgcgacgcagccaccgagcccaccgacgacaccgtgctgcgctggatggacacgcagccgccgggatccgtgctgtacatctcgttcggcaccaacagcatgatacgacccgagcacatgctggagctcgccgcggcgctggagtcaagcgggcggtgcttcctctggaagatcaagccaccagagggcgatgtggccggcctcaacggcggcgcgacgacgccgtcgtcctacaatagatggttggcggaagggtttgaagagagggtgacggcgagcaagagaggcctgctggtcaggcggtga

SEQ ID NO: 1111 - DNA, 921 bp, Oryza sativa
atgccgtgtaaacctgattatcgtaaggatgagagtggtcttacaactgaggatggacagtatgatggatgggatgatcaacaatctgcaggtgggagcagtaactggaattctcgtgcaaatcgctcttttggtctggcagatattccagaatggactgggaagccttcattaccttatgaagatccagatatgctgagatttcttggagagcctattttaactccaaaaaacaatgaggtctttgatgatactattggtaagggcaggccagacaagtgcaactgtgaagtcccaggttccacttcttgtgtcagatttcatgtggcagagaaaaagaccgagctgaagcgtgaaatgggctcatcatactatgcaatgaagtttgatgaaattggacaggatgcagcattaacatggcaaaaggatgaagaaaagaagtttgagaccattgtccagcagaatctgccttcatctaagtacaatttctgggacaagctgcgtgccgccttccgttacaaaggtgaacgtgcccttgtgagttactacaacaatgttttccagccgcgcagaagagccttccagaatcgagtagctcaacatgctaatggtgtagatagtgatgatgactcaattgaacctgccttcctacgccttcgtcaagacggtgttcagcttcacctggagctcaagactcaaaaggttcatttatttttatcttcaccaattggttactggactggagacgactatcttaaaaggttgttttaccattacctcggtgtcctgggtggaatgagcggttgtttcatgttgatattgtcacagcgatccggacaattgaagaacaaagggcttgactttccaatattagattcagcatcgcatcacatcctgaaaaatgtaaacaggttgaaatga

SEQ ID NO: 1112 - DNA, 846 bp, Oryza sativa
atgatgagtcctggcgtttcggccaagaagcgccacgccggcgcggggttcacgctcggctgcggctgcaaggacgcgaagagcgtgtccgtctcggcatcggcggcggggacgccgtcgacaacggcgacgcggcgcaggagcgccgggacgaacccgtcggggtcgacgacgacggacactcttaccatgacgtccgcgtcgtcgtccttcctctgggagcactccgtggtggagttcgaccacgacggcggcggcggctgcgggccggagagcttctccggccttctgcgcgagctcagcgagctggagcagagcgtcgcgtcgtggggccggaagagccaccaccagcaccacgacaagaaacactcgccggcgccgtcgtcgccgctgccgccacaggaggacaggaaggagaagaacggcggcaacggcgatgccacggacaaaccaggagactgccgcgacggcggcggcggcggcgacggcgtcggtgtggctctcgacggcagcgtggcggtggtgaagcagtccgacgacccgctgggcgacttccggcagtcgatgctgcagatgatcgtggagaacgggatcgtcgccggcgaggacctccgcgagatgctccgccgcttcctcaccctcaacgcgccgcaccaccacgacgtcatcctccgcgccttcgccgagatctgggacggcgtgttcgcggctactgcctccctcgtccaccaccaccacccgcccccctcctcacgccgcgagccggtggctccggcggcaaggccgcccgcgccgaggacgcctccgcgccaccgccacccttcaccacgggcatggcgcgtgtaa

SEQ ID NO: 1113 - DNA, 807 bp, Oryza sativa
atggatcttcgtccaaggcgggatctttgggctctttcaaatgttcaaagtgtcttgctaccggagagggatcccattccaggtagtgttatgctcagagctgtgtttgatgacattgacgcagtaccgagagtatttttgctcaaggagttgcccctgagaggtggcctaggacagtcatggacctttggggtctttgttctcaacactgaatttgctgacattcatcttggtgatgaagacctccctcctttgatggttcaccttcaagaacctacgcaacagcataacgatcacatggatatgcagccagatgctccaccacaacatgatcagccctgggggaattgggatcagcaaggggagaataaccctgaaaatactggaaactcaggaataagtgctggccccaaccaaaatttggccatgtctattttggagaatgaagcttcccctttgcccctggtggtcgttcaacctttgggccatgatgaggatatggaccatgacatgggctctcccctgggccatgatgagatctttgatgttcaacccttggcaatttcagagccactagaccaggcccagcccaagagcccaccaagaatcggaccagtgcctctcctgttagaacccccaagagcatcagttaagaagagagatggcaagactgtcatgtttgatcctgacaggaggcagagttctcggttgagatcttcaagtcaagagctcactcaacctgaccctagaatgggcatagggaagccgaggggaaagtctgccaaaaaactgaaagagctggcatag

SEQ ID NO: 1114 - DNA, 642 bp, Oryza sativa
atggcagccaccaccggctattgccgatctccctcaccggagcattgccggccaaaccctcgcgccaccgggcttgcctcgatgagccgtcctataagccactatagccacttcttttaccggccggagcaagctcttgccgccgccgttccggcttcatctctcacttccactgctgacctctgctgtacccggatgcgcgtcgacggggaacacgttatgccaccggcgtcgccgtgttttggccaccggagggccggcgccccgctcgtcctctcttctccctctctcgctgccaacagaagaggagaagaaagaagacgggaggaagaagaaggagaagaaaaagaaaaagaaagactgacaggccccgacatcaaaccgttggttgtaaagtccggcaaaacccaaacccaaggtcgaagtgttgttcctggcaccccacgccttcatacgtataacggtcggagcttcactattccctcgaccttcatagcacgccgcacagttagctctctggctctgtgtgatcctagccgctccgtcgccactcatggttgtcggagtaacacttccaccccactaaacctacacaaatctcctattcctctagtccttatcctttctgttgacaccggctag

SEQ ID NO: 1115 - DNA, 630 bp, Oryza sativa
  N_region (23)..(23): n = any nucleotide
  N_region (53)..(53): n = any nucleotide
atgctggatccgctgcgagggangagcgcccttggcgctggatccgctcggancggcaccgcccgaggctgccgaaccgcccccaccgcagcggcggtgaggagaggagagggttgcctcgtcgtcgtcatcgtcggtggtggcggtgagaagggcatggcggtggcgccgctgcccactcgccggatccgccgcccgtcgacgccatcgccgcccctgctcacccctgctcacggccgccggcacatgctcttggagaggagagaaagagagagagacaggggaggagagaaagagagagaggggagaggagagtggctcgatggcaagggatatgaggagcacatcacggataggggtctcctggtgcgtggtgggcgccataggtcgggtgtcaccacgccactcatgttcctccccaatgaggccgaggaagtgcaggttgctagcaccagcgtggagaagtctgtggccaagctgatggatggcgacacggacaacacggctaggagggcacctggtagagagctcgctgtgagggccagggcggcaccgctcatgtacctccccgtcgaggccgagggcatgcaggtcgccagctccgacgtggagatggcatggccaagctga

SEQ ID NO: 1116 - DNA, 603 bp, Oryza sativa
  N_region (541)..(541): n = any nucleotide
atggctcttggattgtcacggagtcgtcctagagctcgggtgacctcggacgataaaactccagcagaggacctaggttttatagttttagggttagaagttggtgccatggtggagcagggtaggggttttggaggccgtgaggatggaagggaggagttgaattgcatgcttggaaggggcatgccagagccattggcggcttccggtgccgacaaggctgagcggtggcgcactgggatgggtagtcagcagcgcagggaaggcgcaggagtagtcgcacttgcacttgttgccgacgcactggccaatgccgcccctgtactgccgctggcagttcgccacgcacaagccgctgtcgcacgtcgggtattcccggctgatcacaagctagcctcgatcaccaaaaaaaaccagagatggatacaagctagcgccaagtattgcgtacctggtggtgatgatgatgaagcgacgaggacgatggccaggatgagcagtgctgcgtggatggccttcatctctgacgctgttgattttnttttttcacttgtgctgatcgatgctactgctaacggtgctagctttgtttggtggttatag

SEQ ID NO: 1117 - DNA, 585 bp, Oryza sativa
atggatggacatcgcacggaggaggccctagctgctcaagagcgtgaagacaagaacaatggcatgatcaacaagcttcttgacaaggttgatcgtctggagaaggaactagctgaactcaagggagaagcaccgccgcatagggccagagcttgtctgaccacctggaagagagccctcgttgctccccgcttccagctggctcctaagctgcatggctctgcctctgagtggtgggatcacttccgtctcaacagggctactgctgagctaatcatttggctcgagttcactgctgctttcaagaagactcataaaccatcgggagtagtagctctcaagaagaaggagttcagggcactcactcaaggttctcgttctgtcaccgagtaccttcatgagttcaatcgactggctcgttacgctctagaggatgttcacactgacaaggaacgtcaggagaagttgacggaagggttgaatgatgaactgtcttacccactgatgactggggattatgctgatttccagaagttggtggacaagatcatttgtcaggaggacaagtataaccgcatggaatag

SEQ ID NO: 1118 - DNA, 573 bp, Oryza sativa
atgcctcctgctttgcaagaatcttgcctccctgatttggcagtcatcaaagcagaggctgatgtgcaaagcatcaggactgctgctgctgaagcatggaaaaaacagatggttggtttctttctgttgaatcctattcctatttttcttctttggaggagggagagtacaaaaggtgcattggcatcccccggacgtacactcgccaacagccccagcacctatttgcgacttgcagttatcatcgcacgttgtgggagaacaggggccgggtacgttgacgctctgacaatcggccgacaccttcatcgacatatctgcaaattcagatcaaatcaaaacttattaagttttcacatgtgcgtattctatataatcaaaaagaaaagacgatcttcgtcatataaatcgatatataaacagtactacctccatcgatcgtacaagtacttcattttatttctagatatgaacttggataagagaaaagaaatggagttattttgggacgacgagaaatttacccgaatagtgggccgtgagagaaagggccagcagcagcgtgcagagtag

SEQ ID NO: 1119 - DNA, 570 bp, Oryza sativa
atgggtggtggtggtgtggggagtgtgaagccacgccaacaacggaggaggcccgcgcgcgcctccgccgcggcggcttcggcgggggcggaggggagagaggcggcggagggagtgacggactcggggatgggagggggctccacgcttccacctctcctcgtcgggacggaagctgtggacgacggcggcgcagcggagtggagcggcggtggtgggacgccgagcggatttctccctgagccgccagcgaccacggcttctacttctcctttcacagcctgtgcctccggcttctctcttttcctccccttagccggcagcactgctcatctcctccctcgactgccagatctagtgcctggccggcggccacccggcggcaggcgcggcggcggaggccccccgaggcaagaaggaaacgatgacaaggaggactcctgcgggccagatctgggttctccgtccacctcggtggcgccggtccacacctctcctcttctctgtggcggcggggtcggtggcggtggatggcacaccgccggcagtaatttgctcagccaaccatga

SEQ ID NO: 1120 - DNA, 489 bp, Oryza sativa
  N_region (51)..(51): n = any nucleotide
atggggcgaaaccagacgctgtggtggggacgacggggatggcaggagccnaggaggagctgtgctcgccggcggagaccaaggaggagctgcgtgccggcggatgcggatgaggaacaacgcgtgccggcggaatcgaggaggactcgtcgcggtagaccactcccacttcttccaatgccttcctcggcgccgctcgttgcccgccgcgcaatcctgcgtcctcctcggcaccacccaccgcccaccgcctccactatcctcctcgacgcggcctaccggccactgctccttccccgttacgcgacaagcttcagcggcggcgtacgggacgtggagcgaggcggcggcggcggcgggatcctccttccctcggtcgcccgagcgacctccgcctccgccgctagcaactgcccccgccctcgcctgctgccattcttggtgtcgtcgtgtgctggtgagctggtgaggagaggagggagaagatag

SEQ ID NO: 1121 - DNA, 480 bp, Oryza sativa
atgttcaccacaagagcttcctattgtcgtttctttctctatcgggaccatgttgttgtcagccgtgttcccattgttctggtttgcttcattgccaaccaccaccatctatggacgagtcacatcatgggacacgtccgaccaccttactcatccctgtttggtcgctggagcactgttgccgatcttccctcctcttctgttggttgtgttgggaagacgatggacaatattattgttttttattcatcttttgttcttcccgcgcgttcaaggaaaacggaatcttccgggaccgtgttttcacacactcatctagtcgtgttcaccaccaaaacttggtgttatcgtttctctctctatctggactacgtcgttgccagctccactcacatagatcggatgcaaagtatggttatgcgaaagattgcagcatcaagagctaaaccagaaacccagtttgaaactacatccatctag

SEQ ID NO: 1122 - DNA, 468 bp, Oryza sativa
atggcggcggctagaggaggggtcagaggtgcagccggtggctggaggccggcttggcgcggttggtggcggaggaggcgggcaaggcgcgacgaggcgttgccggcggtggaggaggcgagcacggtgcgacgaggaggagcttccggtgggttcggtttggtctacggcgcaagaaggctggctggtgagggcgccggtgcagtggtcccacgtgccggcagaagtttgacagtggtggggcatcgtgccagccgtggactcgcaggtggtgagtggcgggtgaaaacccagcctggtctcgccctggtcggcaacgatgacgttcgaagcgtcattcccctcctaagggcgttgtcatgccgtctcatccctcaagtgtggatgtcaggcgaaagcccagtctcggttctctttgaaaccttgacggacggcggcggtggtattttccgtcgcttctcttcttga

SEQ ID NO: 1123 - DNA, 429 bp, Oryza sativa
atggtgatgtccatcagcgccgccaccgccgccatgtcggctgccctccacataccaatgtgccggttctcggtgcaccacgcgctccccgaacatttcctcttcatcttctccaactccgacgacagggacctcgccctcgcgcgctccccgatcccggcggcctcctcccagcagctcctcctctggccatggacgcggcaggcgacggcgacggctttctccttgccgttcaaagtctcgctggatctcgtgggtgttccggcgcacgcttggaacccgtccacggctgtagtgctcatcgctccatgtaggctcttcgacatggacatggaggcttgcagactggccgactttaggatgttgcgggtctccgcccttgcgcacgaccccgttcatcccgcgggagcacctcctcctcatccctga

SEQ ID NO: 1124 - DNA, 327 bp, Oryza sativa
atggcggacctcgagcaatcttcctccgatgccgccacactgaagaagctgtacaccgaaggagccatccctccaaagcaaaccatggcgagggaggcaggaggtactgttcattctcccattttaggtcgcatggtagcggtagaggatttcatccgatgtggctttctacctcctccttctgaattcctcttgctgatcttaaacttctacgggatttctcttttacacctaaaccccaactccatcgcttttctgagcatatttgttcatctttgcgaggcctacattggggatgttgtggattccgccttcgtgatggcatga

SEQ ID NO: 1125 - DNA, 312 bp, Oryza sativa
atgctggagcctgaggtggagacggtgctggcggagcatgaggaggagacggtgcaggatcctgaggaggagatggctgagccggaggagatgatgcgtctcaccgtctcctccagggtaatccagctcgaggtcctcgtacgcgcctcgaccaactcaacttcgaccttcgagtatcctgctggaatcggcctgcagtggaggaatggtcggctggggatcatgggaccgatgtgcggccatgcgttcatcaaccttccttgccacctcctcttgcatgttgagttcgtagctcgatacccggaactctag

SEQ ID NO: 1126 - DNA, 3666 bp, Oryza sativa
  N_region (3450)..(3450): n = any nucleotide
  N_region (3550)..(3550): n = any nucleotide
  N_region (3559)..(3559): n = any nucleotide
  N_region (3561)..(3561): n = any nucleotide
gtttcttggccgaaaccctggctgtggaagatggatggtgttgacaaggataaagggaatgggaaggtgcatttcagggattcctctccccaggaagctttccgaacctacaagaggcgccggcagccacggccggagccgcaacagcaaccgcagccgcagccgcagtcagagccggaaccacagcaacagccacagccacagccacagccacagccacagccagaggcagaggcagaggcagaggcagaggccaaggctgcagatgttctggcacggcaggtgactgaaacattttggaaaagtagggacattggatggaagcatggcataatgatcgacgagaacagacaacactggaagtgcatgtattgtcacctgactagatatggtggtggtgtctctagacttaagcggcatcttgctggtgatctggatgtcaaaatgtgcccaaaagttccagctgacgtctctgaaaaaataagggagcatttgcggaagaaaagagaaaggcgaaagaagcgagctgcacaaaatcgtgataactgtgtgacggctaagagcacctctgatgatatcaagtctggcaaagatcctttacccgttgattcagaggtgctgactggagtagacactgttcttgaagaagttactaaccaaacgaaccatgataatcaggatcttacttatcccaaggctaccatgttgttacgagggataagagatattgggtgggagcatgcagtggatcttgatggaaataaaagacgatggaagtgcaagtggtgttctttatgtcgaagtggtggtgtaactacattgaaggctcatcttactgatagtagttgcccaaatattcctaaggaaatatcaaaaaaagtgttgaactttattgaagagaaaagggcagcacgccatctttttaatagcgctgcaaaatctcctttcaatgtcaaatttgacgaggatgcagttaatctctcagaaatacaggtggaaggtactccaccattgacagatgatcgacaacctttaggaaattccttgcatatacaaacatcagagtgcaccattaatgagtttgaaaaggtggcagctggaagcaaccaacagggtgcagaacatagcaaccaactacttaaccatggtgaacagctgatgaaaagcagcgatcaacctgaggagcactgcaccttggaacatggaaggtgccaagtacttgacaataataagcagcagactatggacaataaaactgataatccggaacacaaagaggtcttgaaacaccctaaaaaaactaggtttaacataaggaagcatatagttatcgttgatgaatctgcaaggcattggaggtgtagatattgtggtttggatgggtatggcaaaacgtctaggctccattttcatcttgctgctgtgtttcgacatcctaagtgcccaagtgttccaaaagaagtttttgcaaaggcacggcatcatattcacttaaagagaaggctcaatgtgaaaaaggctgggcaacaagctcgttcaaggccacatattcttgggcaatcgagtcagcaacagcagaacaacaatccggtactttccaattacccaacaagattgagggacaatgcatgggaacattcgcttattcatgacaaagagaagggccattggaagtgcaagtggtgcagtttagagggttatcatggcataactagattgaagtggcatcttgttgggtggcagaatcgtcctcaatgcctaaatgttccagaagatgttgctaaaactattcgggataaaatgatatcaagagagaagcagaaagaaggaagattgaatcttgatgttattgacagttgcaacatgccatgctcttctgagagtttacagtttgatcaagagaattttgctgaggtaatgcagggaaaaggttcttctgaagattttaatcaagctgaaagacaatcaaacacattgaacacagtatgcaataccactcatcctccacagaacagcaacaattatcagggacttcaagaaaatggattatatagtagcaaaaacaaatctgagaagcaaactgaaagatatgactgttggagtcactggcgatatgttttagatggactgatgcatttgccaggtgcactagagggtcctggcattcagagttgcatccgtgatgtacttctttacggttctgctgaatttggaactgttggggacaaagtggaaatggattccaacagaaaagtgtcaagtgatgggaatattgctaagtgtcagagtgttcttgtggatgttttaaagtcagagaattttgccttattgtgcaatgtgcttggcagaactgtccatcaagatgagcaaaggactaagtattttgattttaccatgattgactcaaggatgaaaaatggagattatggccgtgcaccattattattcaaacatgatttgaaaatggttgaaagagagaggggatcagatgatagtgaagagaatctgaagggagctgcggcgaccaatttggaacccatgaacatggtcaagtcaaatgcattggtactttcaacctcacaaggcttcaaccagttggatcaaccagatccaatggatgtttgcgatgaacaaaacggtactaactgcaatgaatgtggcaaggtagcgaaaattgatagcatcctcacatgcaagagatgcatgctagcattccacgtctcatgcattgaacctcctgtgccatccacttcaactggaagctggtgttgtaaaacctgcagcaccatctgtaacgaatcagctgaagttggcatggccttggtccattatgaaccaaatcgtttgcacggacattgcgtcgcatgcaaggaccttgagttttgcaggcctccaaggtgtgaggaaactgccagtgaaagggcacctgctgataactccagagcaattgtgattcccagtgcagagcctgttgaggatgtggaattgtcagatattgatgtcaggggcttatgcaagatgtgtggaaatcccgaggagaaggacaagagattcttggctacacagatcgctagtgacaagcagctggacaagccctgctggtactgcccatcgtgcctttgccgagtttgccattctgacagagatgatgacctgaccattctgtgtgacggctgtgatgaagcttatcatctctactgcataacaccccgtcgaacttcaatacccaaggggaaatggtttgttttcaagtttcaaccaacatgcattgagcatttgagtgtggacatgactcagtttacaggaaccagtttattttctgtcggaatcgagaaagtttctctcgttccaaacagagctcccaacatgtgtcgaaaagattatgagatattacgagcttatttgtctccaatggctgcagtcactttgctttctttagaaccagacggnccatttggtggaaacctcattatagcaaataatagaatttatttatcggaaaagactatagagatggagaagctatctcgatcacctcgaacccatgacntggtcactnancattatggagataagactcaggggatcttaaattcaaaaattttagttgatgtagtctctgaagcccgtgccatatctcatgggtcattacatgacaaaatatga

SEQ ID NO: 1127 - DNA, 3513 bp, Oryza sativa
atggatcatgtagtcgggggcaagttcaagcttggaaagaagatcgggagtggatccttcggggagctcttccttgctgttaatgtgcagactggagaggaagtcgccgtcaaattggaaaatgttaagacgaagcacccacagcttcattatgagtcgaagctgtacatgcttctgcagggaggaactggtattccgcacttgaagtggtttggcgtggagggagagtacaatgtgatggtgatcgatcttcttgggccaagccttgaggacctattcaactattgcagtaggaaattctcgttaaagactgtcctcatgcttgctgatcagatgatcaatcgagttgagtacatgcatcagaagggatttcttcaccgtgatatcaagcctgataatttccttatggggcttggtaggaaagccaatcaggtatatataatagattatgggcttgcgaagaaatatagggaccttcagactcacaagcacatcccatacagagagaacaagaacctcactggaacagctcggtatgcaagtgtcaatacccatcttggtgttgagcaaagcagaagagatgatctagaatctcttggttatgtccttatgtacttccttagaggcagcctaccatggcaggggctgaaagcaggcactaagaagcagaagtacgacaaaataagtgagaaaaagatgcttactcctgtggaggttctttgcaaatcttacccatcagaattcatttcttacttccactactgccgttcattgaggtttgaagacaagccagattattcttacttaaagaggctattccgtgatctctttatccgggagggatatcaatttgattatgtatttgactggaccattttgaaatatccccagataggctccaaaccactgatgaggccaagtgaaagaaccagtggagctgcgggaccttctatggagaagatggaaaaggccccaggtgaagcatctggcagaaggaatcctactggttctttgaatcagagtgacaattatgcacaacggccgtcaatgtcactaaaggaaatcatgcatagcaccgaccggtccggcgaaaggaccgtggaaagaccccgtacatcctcccgtacaggcagtgcatcaaggagagcggttgcgtcaagcagcaggccaggttcatcggtggaaccaatggagcagcaatacagccggacaagcaggttgttctcaagcagtggaagccgtccttccagcacgcagagggttaatccatcggttggagagacaagggccacttctctctcacgagcagccgttgcaagagggtcccgcgacgagcctctccaccgcagcctggagctgctgtcccttggtggcgttaatgaggaaatatttttggcctgggctccaagaacgcacttacgtgggccgattgttgcgctggccaacctcatccccgaagatgacgccgtcgacgagctcgacagctacatgtatcaaactatgaaatttgatgcaatttcattgattggacttgcttgtagggagcagggtcttaaatataatgttaccacaggcgatgaagtggaggatatgtttgcgctcttgagcgaggttaaaaggcaaatcccatccatcactgcagtgtcttcaggcgccattgcgtctgattatcagaggcttcgtgttgagagtgtctgctcaaggttgggcctggtatcgctggcgtatttgtggaagcaggatcagactttgcttcttgatgaaatgataagaaggggcatagtagctataatcgtcaaggttgccgcaatggggctcaaaccttctgctcacttagggaaagaactggctgaacttaagtgtcatctgctccaactgaatgagagttatggaatcaatgtctgtggtgaaggtggcgaatatgaaacactaactcttgactgccctctattccgtaatgcaagaattgttcttgatgattttgaagttatactccactcgcctgattccatcgctccagtaggaattcttcacccgttaaaatttcatcttgaacacaagccaaattcttttggcaccgttggtgatagtgctattgcccaagagaattctagttatttgtatgaagtagatggagctattgcacacagtgatgtcgaaaagaaacaagagaccttgagtccagttacaactgttgatgcttgcacaaatatagacctatgcatctcaaagactggcaaaaagttgttctccattggttgttggattcaggatccctgtggtacttcagaaggcctgaagacagatctagtagcagttttgagcagaatcgagaatcagctcaaggaagaagggttaggttggatgaatgttctgtatgttcacctcttcatttcaagcatgaaggaatttggattggccaatgaagtttatgtgagctttattactgaacaaaaatgccctctgggtgttccttcacgtagtacagttgaattgccactagttcaggttggtttaggccatgcatatgtggaagttctagttacaaaggagcaagtcaagagagttctacatgtacaaagcatttcatgctgggctcctagttgcatcggaccttatagccaggcaacacttcatggagagattctctatatggctggtcagctggggcttgatccccctacgatgaagctctgtcctgggggcccaacggctgaactagaattcgcattacgaaacagtgaagctgttgctaatgcctttggttgctccattttttcttcggcaatacactttctggtgtactgttctgcacacttgacgtccagtgaaaaagaacaagttgaacatacacttcgtagttcgtacatcaccagtttggattgctcaaataccggatcatatcccaccattctctatgtatttgcatcagatcttccaaaaggagcatacgtggagataaaaccaatattgtatgtccccagtcccactaatgatgatggagtcccaaccagagaacaggaggctggagggtcattgccagcatcaagcgaagcttttagtgcctggagcgcacaatactctgacctggatgattcatgctgccaggtgcacacaatcggtgggaaaatttgctctgctgttgtttcagtcacaaatgatattgcattgaaaatctgttctacaactgaacaactataccactcggaggagcatttgaaagctttggctagattttgtgcattccagcttgctaagattctgatagataatggcttttcctgggacaacctaacgatgttaagattctactattcagtagagcacccagtgactgcggatgtgatgtcccgtgtattttctgaggcattcgccgagcttgaagaaggtggtgttggttcctgcacacctgatggggttcctattttcaacatcgtgccagtgtcggcatctggttgcttcacatcgttaagcgacattatatcatgcgagctattagcttcgaaagtttaa

SEQ ID NO: 1128 - DNA, 3492 bp, Oryza sativa
  N_region (145)..(145): n = any nucleotide
atgggggctcttgcgccgcggcggcgcgggtcggggatcgaaagcagcagcagaagcagtagatctggaggggtcagcgaaggcgttcatcagatgttatccagtgaggagccttcaggcccctcttgctcttctatccagggtntgagcgctgttccggcgacgtcccccggcgagtcgccggcgagccaggatcccacagatctggtgcaaccgtgcgccaaattctctataagagattatgtttttgcttcaaggagcaaaggcatcaagagaagctggcctttccatccacggtcgctgcagctttgcctgaagcgtggtgtgaaggatctgctacctccatttgaaccacctgatttgattcgatcccggtctttgagtactaccataaacgttgagcaatctgctgcaagttcagaagccaatgctccggttggtctggtgaagactagagatgatggttcgtctattgtgaatgcaagcaatatcaacttccagtcatgccaaccagtagctgagtcacttggtccttcacagtacacctcaccagaggatgggaaatctgctgttgaccaaggggagaatacaaatggattggaccatactgatgaggttatgccagtagatctgcaagtcaatagttgcaccaaagcaattcggcaaactgaggttgctgtaccctcttggcgatcgaaaaatcttgactcatcacgagagccatcagaaaagaagtgtaaattggtagtcaaagtaggatccttgacgcggacagaagaggtggcatctaattctagcacggtttcagacccgatggcctcaaaaacctgtcctgtttgcaaagtgtttgcttctacttcaaacacaaccttgaatgcccatatggaccagtgcctttctgttgaatctaatactgagccagtggaaaaagttatcttgaaaccgaaagttaagccaaggaagaagcgactgatggtggacatttacaagactgcccgtctgttcactcttgaggatcttgatcagaggaatggcactaactgggctatcgaattggctacacccaccacgaacaaggaggtttgcactgagaaccgtagcccagaagtggtgccgtttgacccaagagacgacgaaagagaaggcgatgtctatgttgattctaatgggataaaaattcggattttgtccaagtctagtgatgcgtctttggtgttgagggatgaacataattcaaggaaagttgccaagaacgagactggaaaaagtatgttgatgagcaagacgtgcttgaaatccaaaatatgcaagaataagaggctcaagtttccagggaagaagcacagcaaaactaaccgattgaatacccaggttcgaacacatacagatggagatatgcatgagcacacctctgaggacgaagaggagtccactatgcatgtgcagaaacctactgaaagcacaagttatggtggctccgaaactataaggcaatgggtgggctccaaacgctcaggtctctctaagaattgtgcccgagaggttactgataaagcatccaagagtataacgcctggaaccaagaagttggctaggagcagcattcgtggttttgatgattctcaaatatcagatagtcctcctgaggcattttcttcgcaaccgccggaagagatgacgatcacttcagaagctaatgatgatgacgagaggaatggtacttcgagattgctcagatcgattcctagatggtctttaaaaactactccatccagcaatgtcataccaaaagtacctaggtctgctgctgctctagccaaaaggaaaataaaggagatcggaaggagagagtcctataggtctgataactatgatacagtgaggaattccacctcgatcagaaactctgtacgtcggggtccttcctcctctgttgctgggctgagtgatggctcaaatagggttgcatctaccaagaagttccggaagaaccgatctctgttgaggactggtaggcgtgaattctcaccttctaacagtgggctagttcatggttttggtcaagaccatggatctaatcccaatcatacaaacaagaggttcagggttagtaacaaggaaacctccaagaagcttaagcacactcaagaagatactgcagataatgacttctcttatgaaagtgatgtaccagcattaggacaaggggatgatcaatacgatgcggctcaacaagcaggaatttcacagatgtattatgaaggtgaagagcctgaaactgaaatgcaatgtgcatcaccctccagaagtgatcctgtagactgcagcaatgatatgagcagcgattctttgagtccggaaaataatgagacggcagatgatgttttggtggaaggctatagtgtagcaattgtggatccatgctctaatgagaaatctgcatatcatgctcatatacccaacgacgttgccaataatgaggtggaagaatggcaaattgatccgtcttcaactaaggaatctagtgcctgcttgaccaataatagggacatgggtcttggagctcctcaggataactcatcgattacatcaaacagagaagattctaaccttgatcacggtttggtttttgatcgtggctcatccggctctcctgtttcaactgcctccacactgtctccttcaacttctttgagggactctaggactaacaggtctgagccaggtccatccactgttagtcttccaactgttgaggaacgggtttctgggagctcgaatcaagaaaccaagtcgacacctcttgccagagaaggtgaacagttgcctgaaaagtcctgttgttgcaattgtcgggagagcatttccagggattctcaggtgcacgatcaaagtgcgatggctagaccagtgccagcttttactggaaggccggttccacagttgaacataggtttgcgtgcgtcttcatcgttcagcacatatcaaagaaccagcacaaaggcaaatccttgcttagattcacatgatcagacattagctggtaaggtttcagctgagcctaccatgacccacccatcttatacgacagattgtatgagcccatcaatacaaactcagcttccttcaccatcaaatcctattttgagattgatgggcaagaacttgatggtgatgaacagtgaggagagtggacatcctcaggcacccagttcagattacatcatgagaggaaattacatggcacctggttgttttatgcctcaaaactaccaacatattggtgatcctgcatttatgaacacaacaccgtcaacagccaatcatcaaattcctctgtcaagtgtacaagctggcaacttttctgctcctacgttgcataatggttccatggtgcaatctgattatcattctccacaaaagccatacaggaacctccttccagtcatgcatcatccatcctacatgatgaaagaagtaatcatgaattga

SEQ ID NO: 1129 - DNA, 3162 bp, Oryza sativa
  N_region (108)..(108): n = any nucleotide
  N_region (110)..(110): n = any nucleotide
  N_region (128)..(128): n = any nucleotide
  N_region (146)..(146): n = any nucleotide
  N_region (156)..(156): n = any nucleotide
  N_region (161)..(161): n = any nucleotide
  N_region (300)..(300): n = any nucleotide
  N_region (305)..(305): n = any nucleotide
  N_region (352)..(352): n = any nucleotide
  N_region (409)..(409): n = any nucleotide
  N_region (422)..(422): n = any nucleotide
  N_region (453)..(453): n = any nucleotide
  N_region (456)..(456): n = any nucleotide
  N_region (474)..(474): n = any nucleotide
  N_region (476)..(476): n = any nucleotide
  N_region (510)..(510): n = any nucleotide
  N_region (513)..(513): n = any nucleotide
  N_region (517)..(517): n = any nucleotide
  N_region (555)..(555): n = any nucleotide
  N_region (1341)..(1341): n = any nucleotide
  N_region (1347)..(1347): n = any nucleotide
  N_region (1390)..(1390): n = any nucleotide
  N_region (1805)..(1805): n = any nucleotide
  N_region (1812)..(1812): n = any nucleotide
  N_region (1867)..(1867): n = any nucleotide
  N_region (1871)..(1871): n = any nucleotide
  N_region (1891)..(1891): n = any nucleotide
  N_region (1971)..(1971): n = any nucleotide
  N_region (1997)..(1997): n = any nucleotide
  N_region (2012)..(2012): n = any nucleotide
  N_region (2028)..(2028): n = any nucleotide
  N_region (2031)..(2031): n = any nucleotide
  N_region (2053)..(2053): n = any nucleotide
  N_region (2086)..(2086): n = any nucleotide
  N_region (2112)..(2112): n = any nucleotide
  N_region (2152)..(2152): n = any nucleotide
  N_region (2313)..(2313): n = any nucleotide
  N_region (2620)..(2620): n = any nucleotide
  N_region (2678)..(2678): n = any nucleotide
  N_region (2706)..(2706): n = any nucleotide
  N_region (2708)..(2708): n = any nucleotide
  N_region (2755)..(2755): n = any nucleotide
  N_region (2881)..(2881): n = any nucleotide
  N_region (2901)..(2901): n = any nucleotide
  N_region (2950)..(2950): n = any nucleotide
  N_region (2970)..(2970): n = any nucleotide
  N_region (2976)..(2976): n = any nucleotide
  N_region (3011)..(3011): n = any nucleotide
  N_region (3037)..(3037): n = any nucleotide
  N_region (3089)..(3089): n = any nucleotide
  N_region (3103)..(3103): n = any nucleotide
  N_region (3156)..(3156): n = any nucleotide
atgccaccgaagaaggtcgtaaaggagaaggttacaaggcgaaaggaaagcgacgccggggcggatatggccgccgaagagggagcagagccttcggcgcctgtcgcngnagatggaggaacgccatntgcttccgcacctgcgcnatcactaccnccttnggcccctgctacctctgtgcaggtgccgaacgcggctgacatgacgaaggcggctgcagcggcgagggtactccagaccagggcggagatcctttcgacaagccaactgctggtgccccaagccgctccgtcacagccngcagnggccccaactgcgctcgctgctgtgcaagtccaagtcaaccctgacnccgagacacaaaccgaagccgacatggaagccatgcgacagaacatgacacgactcnaagacatgcttcnccaaatgcaaggacagcaacaagcgaagcgnacnaggcggtccaaggtcgcntnggcaccaatcctccagtattcggcaggaagttgngcnagcnccaatgtacttcgccgggcagccatcgaccgcagcagngcatccggcccctcacgtgcaactgcaagctcaaccggtcgctgcccaagtacatccttaaccgcctggccaagtgccacaaacaatggcagaaggggcttcagctctgcaggcgcagctccaagctttccttcagcagctcagccaaccccacaacatttcaagtacaaccccttcggcccgcccggaggggaatacaagtcaaggtgcgcctcgttggttgccttcgaatcagctaggtctggggacttcgccttggagtcaaggaccacagttcgactccatcaatgctgcttaggcgccaaccgttcggccgcaagcaccaacgccaggtttcggagcaaaccaagcaccaaaccaggtcgtcatgacatggtcacagccaactttcgacccattcatggcggtacagcaagcatcaccaatcgggccgggcagccgaatgccatggcccaacctcacgcgcaagccgtgatttcgcccttcgccacgccatacccgcagcaaggtgccatgaacagggcagggggcgaaaaggggctaccattgagtgggggaatcaagacccgtccaatcccaccccagttcaacttcccacccgtcccacgctactcaggcgaaactgacccaaaggaattcctctccatttatgaatccgcgatcgaagcggctcatggcgacgaaaataccaaggcaaaggtaatacatctcgccctagacggcatcgcccgctcttggtatttcaatttgccagccaatagcatttactcatgggagcaattccgngatgtntttgtccttaactttcgaggcacctatgaggagccgaagacgnagcagcatctactcggcattcgccagaggccgggggagtcgataagggagtacatgtgtcgcttctcgcaagcccggtgccaagttcaagacataactgaggcatcagtcataaacgccgcttcggctggtttactcgagggcgaactcacaagaaaaatcgccaacaaggagccgcagacgcttgaacacctatttcgcatcattgacgagttcgcaaggggcgaagagaattccaagcgacggcaagcaatacaagctgagtacgataaggcttctgtcgccgctgctcaagcccaacaacaagttcaagttgccgaaccacctcctctcgttgttcgccaaccccagccggcgatccaagcacaaccgccaaggcaaggtcaagcccccatgacctggaggaagttcagaancgaccgngcgggcaaggctgtgatggctgtcgaagaagtgcaagccctccgcaaggagttcnacgntcagcaagcaagcaaccatnagcagcctgtccgcaagaaggtccgaaaagacctctactgcgccttccacggacgctcttcgcacaccacggagcaatgncgaaacattcggcaacgtggcaacgngcaagatccaaggangcagcagggagcagcngcngaagcaactcgtgaagtagctnaagaacaagcacccccggccgaacagcgccaanatgcgcaacacagagtgatccaagtnattacaagggccgacccgccgatccaactgtcgaagcganagaagaagatgcagctgcgaacggtccacaatatcacttcggcaggcgaaggggctccgcagtatctgaaccagcaaatcttttttgggccagaagatgccgaaggagtaatgttcccgcatcaagatcctctggtgatctcagccgagatagctggtttngaggtccggcgaatcctggtcgacggaggaagttcggccgatgtcatctttgccgaagcatatgccaagatggggttgactacccaagcccttaccccagcaccgacatcgctccgaggattcggcggagaagcagttcaagttcttggccaagcacagttgatagtagccttcggcacgggggaaaacagacgcgaagagcaagtattgtttgacgttgtcgacatcccatacaactacaacgccatcttcggccgtgcaaccttgaacaagttcgaagccatttcccatcacaattatctcaagntcaagatgcccggcccggcaggagtgatcgtggtcaaggggcttcagccttcggctgnttcaaaaggcgatttggccataatcaananagcagtgcacaatgttgaggccgaaccgcatgaccgggcgaagcacncgccaaagcccgcccctcacggcaagatagtcaagatgcagattgatgatgccgaccccacaaagctcgtatcactggggggcgacatgggcgaagaagaagctaagaacatcctagaggtactcnaaaagaacattgatatcttngcctggggccctgatgaagtgggaggtgtttcggcagatctcatcatgnatcacctggcagtcaagccngatgcnaagccaaggaaacagaagctacgcaagatgtccgntgatcgccaggaggcagcaaaagccnaagtccaaaaattgctcaaggcagggtcattcaagagatcgatcatcctgantggctggcgaatcnagtgctggtgcggaagtcaaatggcaaatggcgcatgtttgtcgatttcacanacttaa

SEQ ID NO: 1130 - DNA, 2682 bp, Oryza sativa
  N_region (99)..(99): n = any nucleotide
  N_region (101)..(101): n = any nucleotide
atggctgaattctcgtcagcgaaatgctgcatgaaatctcggcggacaccagaagcaacctggtgtgattttggtgtgatgaacgaggagaagagggcnanggttggggatactgccgagaccccgcggaaatcccctcgcctggatcggccagctgcggcggcggcggcggcggcgccgttaaccagcaacggcgtgatgggcgagaagaagaagaagaatgcgacgcgggatgtgagcgattggtgttggtgggggaaagcggcggcattactatccggcggcgaccgccgtactcgacggtgccgccatgtcttgtgtgagcaggctgacattgatgtggccataacactgatcaagacccgcgttgacaccccggtgtgttgtgttaacaagtgtgatgatactgaggggagggaaatctcggtgtgtttggattgccagttgagtttctgcacggcacacgggaagccgcacgtctttatgaacgaccattggattgctctggtgtacaagaggcccaatgtggcgcattgcttcgcgtgtgaagagtgctatttcatcagaaccgacagtctcggggagggaatggcggtcggtgagaatggcttctccatcggtacccataagaaggatgagaagggaatgacgacggtcaacaatgaggcaggtgttcatgcatctatggtgtctgattatgaaagcgccctcatggtggctttactcagtgatgtcggtactccacggtgcaggcatgacatgtataacaaggatgaggttgatttggtccaaagacggatcatgttctgcgatatcaccagaatgtgtagtgattgtgacaacatcagtgtgcttatgatctttgtgtgcttgggatgtgaaaagcctttctgcactgtacactccagtttacatgctgagagcaccaagcatttggttggtctggtgtaccataacccgtatgtggcgtgctgcttcctgtgtagtgaaacctttgtcctcattggtgagggggataagaggatgccagttgacaaagcggcaggtggttatgcatctgagtcagttattgggcatgcccatgctatcaaagggataccgaatcttggaaacacttgctacttgaattcattgatgcagtgcctccttgtgcttggaaaactgcgggcaaggatgttaggaccggacgctccatcagggacccttggtactgcattgcatgacctctttgagcaaacatacagtgtgaataatgcaacaggcctgctggagacgtcattgctcttggattgtgtatgcaatttggacccacagttcgtaggaggttttatgcatgataaccatgaattgctttgctgtttacgtaaaaatttggatgaggaggagaggatgaggacgcctcctaacatgcaagacagttctgctggtgcagtgcctcctacggtttttaattccattttcggtggtcagctatttgttaccagatcgtgcaaatgttgctcgttttgttcagtttcccacgctgtattctatgatctctcagtaccagtaccaccgaagaagcctccagccaaaagtgttgaatcaacaccatggattgaaggtcacagatctcaaccgaagatttgtatcaaccagtttgaagcaatacataagaggaacacagaaaagactcatagaattgttgaagatgccgattctgatcctgcttcagaattgaaagatatggtcatggtgaaaacatcagagccattggaagttgattatactgaagtggaacagatctcacaaagcaaggactatgtacaagatcctcaaaatgtgttggctgatgtcaaaactgcaggaatggatgcgacaacaacagatacccgcattccagaatatatagggccacatccacctgtctctcaattaagggaagagaatgcacagttagaatcatgcaatgatgtggggaaagatggcaatgctattctcgaagtgctccggaagtcagatgtcactgaaggtacatacagtgaacagatgctgtcaagtactaatgaggacacagcagttggtggataccagagggaacagtcagagaagataacatgccaaagtgagcaatccaacaaaaaacctgaatgccctgaaggtgttcaagacgctgtacctcattgtgtcccagctgagagacaggacaacctgttgagcagtcaggatcaaaatgccaccacactagatgaaggaaggggtaagcaaaagcttcatcatagtgcacaccaagtcgaagaatgccaaaatgagcagaaagataggaataaaggtgctactcaaacacggattagcaagttgccacttgtgttaaccattcatctgatgagatctttgttggggcctgataaggtgatgggacatgtgagctttaaggaaatccttgatatgggactgttcatggaccccagctctgaagacaaagataattccatttatcgtctagctggtgttattgagcaccatggccgcggcaaagattcagggcactttgttgcttatgtgagaccaagtcctcggcagcagaccaatggttcttcctcatggttttgtgcaagtgataccgacatcagagaagtctctttagaagaagttctcaagtgcgaggcttaccttcttttctacgagaggatggaaggctga

SEQ ID NO: 1131 - DNA, 2652 bp, Oryza sativa
atggggtgcggccagtccaagactgacgggggccggggccggggcggcgcggctgtggcgctgtgccgggaccgcgccgcgctgctggccgacgccatccgccaccgctacgcgctcgccgacgcccaccgcgcctacgccgcctcgctgcgggacgccgccgccgcgctgcacgacttcctccgcggcgtccaggcgctgccgccgccgtcgtcgtccgacgtcgaccacgccgcgccgctgcgcctccccgacctgaggaagggggaccactcgctccccgccgccgtggttcccctccccgtcgacgcggtggtcatcaaacagggcggttctgatggtagtggtggccacatccatttcccgtccgacgacgacgacgacgctgagccgcctcccccacgccccgccgcggctccggcgccgcacgccgccacgctatacacctacgctccgccgtacggctacggccccggcgccgggcagtatgaatacggcgtcgacatgggcggctacggccagagcttcttcagcatcagctacgcccggagccagccgccgccgccgtcgtccgttgtgtcctacgagcaccgcccccaaacggtcaatgcgactgttcactactacccgggggacggcgccgccgggccaccgtttcccggctcctactacggcagcgccgcgccgccgcaatcgccgccgcgggtgtccgcctgggacttcttcaacccgttcgagtcattcgagagctactaccaccaggaccagccatctcctgctccaccggcctacacgccaagccggagctccaatggcgcgcgggaggaagatgacaatggcatccccgaggtggagcacgacgaggtcgacaaggttgacaaccaccaggatgccaatggcatgccattgccggcgaaggatgtcagtgaggagcagcacaggaagtccaagtcctcggaggccagcagtagtaccagcagcagcatgatcagtgatctccatgtagttcagaagagtgtgattgaagaacagctgcggcattcggatgccgcggggcctcccgcgatccccaggaaggtttacaatgacgatgtcgaggtggtggaggagatcagatcacaattcgagcatgccgcaaagtccgcattcgatgtatccaaggtgcttgaggttgggaagatgccttactaccagaagagttcaggattaaaagtatcctcgatgatgatttgtgggctatcttcggtgggggaggagttcctgcaatttgaggaggacaaggctatggaatgtggtaacctttcttcaacattgcagaagctgtacatgtgggagaaaaagcttcttgaggaagtcaagtgttgggttatactcaagcaactttgtttatcacagactgaggagaagatgagggtgctgtataaccaaaagcgtgaggagctgaaagttttgtatggaaggggtgccgaagcacacaagcttgaggcaactgaaactcatatcaggaagctatcaacaaagataagcattgccattcagattgtcaatactatctcaaaaaacatcaataatctgagagatgacgaactatggccgcaaacatgtgaactgattcaagggcatttagtgattactggtgagcagggtttcccataccaccggggccggggttaccgcgccccggcggaggttaccgcggtatttattaccatacccccgcagttaatgcaaatgtggcatgccatgtcaaaatgccatcagatccaatgccacgccatatcccaagctagaaacttggactctaagctagattctgcaaggttcagtgaagctcacatggacttaatcaagcggctagagcttcagttactggagttgatttctagttttgctacatgggtcaatgctcaaaagagctttgttggcactttaaatgagtggctcaagaggggaattgactatgtgcccgaagttaccgatgacgggactccccccttttctccaggacgcttaggagcgccccccattttcatcatctgtaataattgggcaatcggcacgggaagaatatcggagaaggaagtagtagacaaaatgcaggcttttgcctcaagtgtcctgcacctctgggagaagcacaggttagaatggaggcaaggtatgatggctaacaaagatatggacagggaccttagagtgatggagagggatgaactctcaatgcgcaaggctctcgatgcgcaaagcaagaagcttgtgcttgtttccaatcagagtggcgtgtcgttatctgcgcaggtggttcacgatagtggtccaactgctgaagttggtttgcaatcttgtatgaataaggtctttgaagcaatggagagcttcactgccgcttgtgcgaatgcatacagtgatctccatcttcgctctgaagaagagaagactcgactcggccaaaacaatggcagagttcctagcttcatttcagacttagctgcaacagtgtgcagagccatcacagattctcaattccagtctcacaaccgatgtgccttgcttttgcttggtttgggccctctgccaagtttcagggtcatccttaggcctgcagcaactgatgtgagatctgtgttggcctgcattctcagggttgaatga

SEQ ID NO: 1132 - DNA, 2574 bp, Oryza sativa
atggcggagagcaagcggttcgatacacagagcccaggctgccttgaaggcctgttcaacttccttgccctgaaccagcggttgcaaatgccgaaggcgattgcgtaccgaaagcacaatgaaggaagtagtaatacacttagagtaaaagttccaaagcccaaaaaccgctcggagaacgatgagtctgttccgaaggggactaattctccaaaggcaaaggtcggcacatttatatggaggacactaatgttcaagaagaaaacactcaagaaagatcaaaagaagagcgactcaccagccaactccccatcatcatcacgtttgacacgctccagatcaattcatcattcaaaatgctttgaatatgtggttccagatgagctggcttctcaataccataccatgattgaatcaagctccaatgaggtggattcatttcacagtgcaccaccgttggtgcaggagagtcctaaagttcccaattttcaagagtcatgcaaatcttctggtgccaaacatagtttcaatgcagaagcaccctgtgaaactgtacctcagagcagtaatgatgaaactgaagccgcctctaagcagaagagtcgtgatgctgcaacacatcactcgaaggagttcatggatttccttgaactgttcaatgcgcacagggagctatttctcaaaattcttcatgatccttcattattagtaccattggaaaaccaagatcaagaagcttcctccagcggtgcagtgccactgaacaaatcagattcgttcccaaggccaggaggatcatcagggaaacgtaaccctatatttgatcggaatgacagtgagaacaatagaaggtcagaaatccaaaagtcaccgtctaggttgaaatctgacattgaaactgctaaagttattggtacaagaatgcctgatggtgttgaaggctcatcggtttcactcacagaatcaaaaagcctgaggaaatctggaaccacttcaaatcgttttaaagttattcgtaaaaagattaaagctgctgtaaaggagaaccggaaagagcttgctcggattaccaaggatggagtttttcataaactgccatatggacaaaagatggctgggttcatgaagagtccctccacagacaagtatgtccaggaggagaaacaaatgcgaaaatcatactccattgcagaatcaatagacaagtattcaacactctatgaatcaatatcaagggaccccaagatttctccagaaagaccaagtacaatgtttgaaggtgatgcaaagttgaaagacaagaagccaccactttctatgaaaagaatagcttctcttccagaaatgagattatattcacctcagcgagatgttttatctgaagtttcagattcccagattgtgcccaagactcacgatctggaatctggttgcttctcttcacaacaaactgatcccttcagcatctgtacagacggaagtttctaccctgacgatattacagaaagaacagcagatatttacagcgaacataattatggagaaagtgctttacttggctcactggaagaggatttgcgcagtatacttcgaagtccaagtttaccttctgtggctcaatctttctcccatcgccgcatcaatagtttaccttcttttgatcgttctttcttccaagatcgtgtcactaatgttaccgagcattctatagcagattcagagccgacgtttgaacatatgcagcttgaggatgatgactggttggtgaagccacctcatcctccaggaccatatgatgctagtttgaaggatgatgagtggttggttaggccacttaagtcctcaggtgttgacactattgatcatgaggatgaagagtggttggtcagtacatcgcagctgcccggtggcaatgctgctgatttcgaggatgaagagtggctggtcaagccagtgcagtcgtcgagtgccgatgctttggattcagagttccagtttatacatgaatttgctgaagatgcaggttccttgcacatttatgttaatgacaagaatgaagccgatttccattatgtcaaggacatactcaaaaaatccggattcagctgcggggaggccgactggtatgcttccaatcagccactcagcccagtgatatttgaggaagcagaattctcgtgccaggaaacatacaccgcgaatgatgacccccacagtgtcgtcaggcgcatgcttctgttcgatctcatcaacgaggtcctgatggatatctatgattcttccttggtcaccggcccatggcactcgcgcttcgactcgcgtaccaggccgatacccatggggtctcatgtcctaggggaggtgtgggggaaggtgagctacaacctgagcctgcaatggaagccggacctgacagtggaggacgttgtggcgcatgatgtcatgatgaaggacaggtggatgaaccttgtgtatgacgcggagtgtcttgcgctggacctggaggatatggtggtggatgaccttctggatgacattgttcttcagatagtgttgatttccattgacgcgtaa

SEQ ID NO: 1133 - DNA, 2334 bp, Oryza sativa
  N_region (498)..(498): n = any nucleotide
  N_region (548)..(548): n = any nucleotide
  N_region (551)..(551): n = any nucleotide
atgcaagccccatctacaacgattcagagaaacgagaatgcaattaatcctgctgagatatgtagtgaagcaggcagcgtcgtccgtactccgaatggcacgccgccgccgccagccgacgcctaccggacttacatcgtgctcgtcgacccgccgccgcacggcgcggccacggacgacgacgggcaccgccggtggcacgagtctttcttgccgggaggccggcgcatggacgacggcgccgatcaggcacggatcatccgctcctacaccgaggtgttcgagggcttcgccgcgaggctcaccgccgccgagctcgccggcgtggtgtccaagaagcccgggttcgtgcgcgcgttcccggggcgccggacgctgcgcctcatgacgacgcacacgccggagttcctcgggctgacgagaggcgccgggttctggagggacgtcgccggctacgggaagggcgtcgtcgtcgggctgctcgacaccggcgtccangccgcgcacccttccttcgacgaccgcggcgtcccgccgccgccggcgangtngaggggctcctgcgccgtcgccgccacgcggcggtgcaacaacaagctcgtcggcgtcaagtccttcgttgacggcggcggcggcggcgacgacgacgtcggccacgggacacacaccgcgtccacggccgccgggaacttcgtcgccggcggcgcgtcggaccgcggcctgggcgcgggaacggcggccgggatcgcgcccggcgcgcacgtcgccatgtacaaggtgtgcaacggctcaggctgcgatgacgacgccgtgctagccgggttcgacgaggccatgaaggacggagtcgacgtcctctcggtgtcgctcgggaggtggtcgagtccccccttcgatgaggaccccatcgccatcgccgccttcagcgcagtggcgcgaggcatcaccgtggtgtgcgcggccggcaatggcggccccgagccgtcgacggtctcgaacgacgcgccgtggctgctcacggtcgccgcaggctcggtcggccggagcttctccaccaccgtgctgctcggcaacggcgagctcgtcgacggccaggcgctcgcccagcagcccaactcctcgacctcgtactacccactccacttctcggagaagcaaccgaaatgtaacgagctcgccggaatcgtcggagatggcgtcgccggccacctcgtggtctgccagtccgatccggtcgaggacgagtccgtcgtgagcgccatgatggccaccggcgccggcggcgtggtgctgatcaacaccgagagcgaaggctacacgaccgtcctcgaggactacggcccgggcatggtgcaggtgaccgtcgccggtggccacaacatcacggagtacgctaggtcgtcgtcatcatcagccggcggctgcaaacccaacgccaccgtggtgttcgacaacacgttgctcagcgtccacccggcgcccaccgtcgcctccttctcgtcccggggaccgagcaaggtcgccccgggcgtgctcaagccggacgtcctggcgccggggctcaacatcctcgccgcatggccgccgcacctccagcacggcggcggcggcggaggcggcgggctcttcaaggtcatatccgggacgtccatggcgaccccgcacgcgagcggcgtggcggcgctcgtcaagagccgccacccggactggttgccggccgccatcaagtcagccatcctgacgacgtccgacgccgtcgacggcgccggcaacccgatcctggacgaacaccacgagagggcgaccgcgttcctcaccggcgccggccacatcaacccggcgagggccgccgacccaggcctagtgtacgacatcgccgtcgctgactacgccggctacatctgcgcgctgctcggagacgccgggctggggacgatcgtgcgcaacgagagcttgagctgcgggaagctggacaagaacaagataccggaggcgcagctcaactacccgaccatcacggtgccgctgccgcggtcgtcgtcgtcggcggcgccgccgccgttcacggtgaaccggacggtgacgaacgtcgggccggccaggtcgacctacacgatgaagctggagatacccaggtcgctgacgatgcgtgtgtcgccggagaagctggtgttctccggtgtcggcgagaagaagggcttcagcgtgacggtgagtggcggcggcggcggcggcgaggtggtggagggaagcttgagttgggtgtctgggaaacatgtcatgcgcagtccgattgtcgccgttccccaaccgtacctgaagttaggaagctag

SEQ ID NO: 1134 - DNA, 2232 bp, Oryza sativa
  N_region (805)..(806): n = any nucleotide
  N_region (808)..(809): n = any nucleotide
  N_region (811)..(811): n = any nucleotide
  N_region (814)..(814): n = any nucleotide
  N_region (817)..(819): n = any nucleotide
  N_region (821)..(823): n = any nucleotide
  N_region (826)..(828): n = any nucleotide
atggactggtctttgctgctcagcgacgtcctacttgccatcgtcattgtcgccatcgcaaccgaactcgttgcctctgctcccaccggcgccggtggtggatctggccctcttgaggccgccgccgccggatggacgatggagaaggagaggcgagggaggccagcccctcccgagttcaacggcagtggatccgcacctcttgaggccgcatccgctagatcgatgatggaaatggagaagctagggaggcctgctgctcatctgaggctagtggaggcatatctgaccctcctatcaccagtaacggtagatccatcgaggccgatggtcacccctgtcaccaacattaacatgtgcctcactgctgaactcacctctacatcgcactgtcgtcgacgccgagcttctgccgagagagagatagaggaggctgaggtgagggagataaggcctgcccgcaaaaatatgtctatttcgcagttaggcatgttaagatgcccgcccgcgaaaattgatttctgcatgcggtccttgaagcgtcctcaggggagcgatctttgcatcggcgatggtgggtccagcgggcaagggcggcagtctcaagcgagagctcgggtggtggcggtggcttgcaaccatgcgaatcccgtcgacggcggcaacagtagtgccggatccagcacctcctccccctcccgtgctgacctcgccgcctctccaatgacgatgacggtggcagcagcagcgacgatagtggatccaggcacgatgacgacgatagtcgatccaggcgtcgcatcgnngnncntcncgnnngnnnccnnngttggatggcttaagtgcccatatgtgaatgccctacccgtatacaaaattctgatactttcacagacacctgggtgtagcatcggtgccggtgctagacattgtgatgtagaggaagaagaccttgacgaagagaatgcagtgccaagagcagtcgcgcgtagacgcgctcccgaaaaccttgatcgccctactcaggcgagcggagtcccggaggattgctcgtcccaagcactagtgcgcacaagtgctcgaaaccggggaagtagaggcttagcacaagtggggttcagtaacaagcaatctggcgatctaaccgatcacaggattaactcggcaaaagggggagaacaaccacaggggtgctggggtcgtgctctaaccctagaacgcgcccctaatgggcccaacttgatacacagcccattgggcccaatgagtccgagtccaccccacgcaaatcctctccccgttggatcctctccatcattcctgagtaaaaccagagtgcacacgtttccctggtataaagaagaggatgagttgagcttgtggaggcggggatgtatcgatggtgttgatgtcctcataactctctctctctctatcctcttttcttctaagccgccgcctatggacggtggccgattcgggccttggctcctccgccggcaccactctgacccccaagaggctcatggcctcgctctccggctcgggcctcgaaccgaccttaccgggcctcctcgacgccgtccttcgccgctgcggcgccgcctccgcgctcgcactccacttcttccactagtgctccctcccgctgccgccgccagagccgctcccttcctccctcgcactcctcgccaagtcctttctcccgcaccttcgccgcaccatccccttccctcctcgcctcactcccgcccagctcctctccccgtccctcctctcccccgtcctccgccgcctcccgcccccgcgcctcctccccttcgcgacctctctcgctcttcctctccctcctcgagtccctcaccaagaccggccatgctcccgctctcgctccgccactacaccgcgctactctacgggtggtgccgcatgggcaagcttgatgaggccaagcacgtgctcgcccgcatgaaggcagcggaggttgcctcagacgtcgtcttcttcaacaccctcctcgctggcttcgttgccgacgggagcgtggctgcccgcccaccaccgccacctcgcctagccttcacgctgcctctggatctccgcgttgtgctcctcctcgctgtccatggccacctggagagagggggccggcgagcctcttccacaccaccaccgttgccaccaccgccacctcgccccgccttcgcattgccttcggatctccgtgcctag

SEQ ID NO: 1135 - DNA, 1791 bp, Oryza sativa
atggccgccgcgttcgacctgcctccggtgaccacgccggcgcccgccgctccaagtgacgtcctgctgccgacgcagccgcaggtgtcgggtcccgaagaattccccgctgccgccgtcaactccaacgacgacgacatgatgatggtcgacgacgtcgtcgtcgccggcggcgtcggcgggagcgggagcaccggcaaccggtggccgcgggaggagacgctggcgctcatcaggatccggtcggagatggacgccgccttccgcaacgccaccctcaaggcgcccgttctgggaggagctctccaggtacggaactcaactcaactcaacccaacccgcgcggtgcagggacgatacaggaggcttgcggaattggggtaccagaggagcggcaagaagtgcaaggagaagttcgagaacgtggacaagtactacaagcgcaccaaggaagggcgcaccgggcggcaagacgggaagagctaccgcttcttctcgcagctcgaggcgctccacgccgcggcgccgccgccgccgccgcagcaacggcagggcatgccggtggaggacccgcagccgctggcgatggcgtggatgatgttgcccggggcggcggacctcgggttcttgtcgatgtcgtcggagtctgagtcggacgatgagtccgacgaggaggaggaggaggaggaggcggtggcgccgggcggcggcggtcgggaggggcttggcgatgatggtgacggtgatggcgaagggggcagcagcaccaggaagctgatggccatgttcgaagggatgatgaggcaggtgacggagaagcaggacgcgatgcagcgggtgttcctggagacgctggagaagtgggaggcggagcgcaccgagcgggaggaggcgtggcggcggaaggagcgcgtcggtggcgccggcggggagcccgtgaggctctccccttcgtccgccggcgccacccgccacgacgcggccgcggcggggctgcagctggtgcccgtgccggcgccgagagcgaaggcggaggacgcctgggcggcagcaggaggagacggcagcgggacgacggcgccgtcgcggtggcccaaggaggaggtgcaggcgctcatcgacctgcgcatggagaaggaggagcagtacaacgacatgggacccaagggcccgctgtgggaggagatcgccgccggcatgcagaggatcggctacaaccggagcgccaagcggtgtaaggagaagtgggagaacatcaacaagtacttcaagaaggtgaaggagagcaacaagcggcgccccgaggactccaagacctgcccttacttccaccagctcgacgccatctaccgcaagaagcacttcgctggcagaggcggcggcggcggcggcgtcacgatcgccgcctcccactccagcctcgccatcgtcaccgtctccgagcaggacaacccgagccagcgtgagctcgaggggaagagcagcaacgacgtcggcaacgtgcagctggcggtgcccctccttgtccacaacgccccagacaagaaggtggaaggctccgaaggcgaaccaaatgtcacagcagcagcggaggagacggacagcgacgagatgtgtggagaatacaccgacgatggcgacgacgacgacaaaatgcagtacaaaatagagttccagaagccaactgcgggcggcggcggcgacggcaacgacgcacccgtgccggcgacaactgcggcagcgacgagttcagccccaaccagcaacaccagcttccttgcggttcagtag

SEQ ID NO: 1136 - DNA, 1773 bp, Oryza sativa
atggctcgcatggatgctagtagtatttctgcttgctttttgctcatggaaattattaaaggactaggcaactgggcatttaaggagtggcaactgacaaccccgcttcctatggtcggccaagtccttagcatctggggattacaaaagaaaactgccccgagtgagtggctcccactcgccttcctcgatccacccttttttgttgttcgaatccattggagcccacgaggtctttgcctcccattctcccaaaaccacttggattctcgaagattcagagcagggacctcaccttcgctgcagcttttttctttcaggcttttggcttcttggatccgtgcaggcgcgagaattcaatggcggttattggagcttcttggggtggtcactgaaggtacactgcctgatgctgctctgcctcgcctttgcagtagaccagtagtacgcagtcttgcgatggagtcggcgacggagaaggtgaggaggacgccctcctcctgcctgctgctgcgcatctccgacatctgcaaggtgcgctccgtcggcgtcgcgccgaccgtccgcgaaaagcccaaggccgacggcagcgccaccggagagagcagcgaagacggcggcgcgcacctgaaagtccacccgcatcatgtgtccgaccatgagagcgtctctgaatgctcctctgctcgctgcgaggaagcgtttgttgagaggcttctcgacgcgatttctggcctcaaattgagttacgtgaaccttcagcaagctcttgtgccatatgatcctgaagagattacgatcgctgatgagcgattcacatcggagcttcaagagactgccgggttgaaggatctgtatgtcaacatgaacaaatggagaaatccaatgtaccagtgctatgtgggctctagaattcaggagcaacaaaagttggccgtggagttgcaagctggcatgtgcaagagagactctgagattgtgtgtttgcgagcggagttggatgaactggaaaggaagaacatggaactggaggagaagatcggtcaaagtgcgttacagaaagaaggaagttttgcaattgggatgggagtatcaacggatatgtttatggaattattcgagctttcgacaaagtctatccatgattttgcaaaactcgtcgtccgttggatgaaactttctcggtggaatcttggcaacttaacatccccaatagacaattctgttgtctatgataaaaggtctcacaagaattacgccgttgaggcctactttgcttgtatgatgttgatggggcacaaagaggagtacctttcgctggatgtcttcgattatgtaatgagtttcagtgatccttttgatgctcttatgaaggccccagactcttgttttgggagattctgtcgagaaaagtatctggccattttgcctcctagtatggaggattcattcttcggaaatttggatcatagatcatttgttgagaatggcggccatccaagaacaccattttatcaggcatttgtgacaatgtcaagatatgtatgggcgtccctaaccgtagcacgttctctgaatccaagagcagagatgttctatgtcaagggtggtactgaatttaggagtaaacacatggaatgtgttccatccaagataaccaaagaaggagacaaggtcagtgttgggtttacagtaatgccggggtttaagattggatgcactgtcatcagatgcagggtgtatctgtccatggtcaacgaaagaaacttctga

SEQ ID NO: 1137 - DNA, 1728 bp, Oryza sativa
atggccgtcttttcgttgatcacttgtgctgccgacctcgtcatcttcttctccgtctgctacattcagcctccggctcatttcgccgccttgtccttcaactaccccaccttcgcctcctcacacaaccagtacatcgaaattgaaggcaatgcctctgtcagcgtcgggtatatcgacatcagtgcgaacatctctggacgcgcaccggcaagtgccagcttcaccacgcgcttctccttcaacatcatcccgggaaatagaagcaaaaagggcgatgggatgaccttcttcctcaccagctacccatcgaggttaccagagggcgacgccggtggccaaaacctcggcctaacgaaccagacggtcggcgtctcgaccggcgagaaccggttcgttgccgtcgagttcgacaccttcgtcaaccccttcgaccccaacgcaaccaacgaccacatcggcatcgacgtcaactccgtcgtatctgtgacgaacgagtccctaccaaacttcagcctcatcgggaacatgaccgccaccgtcgactacaacaacaattcgagaatactgtcagttaagctatggataaatggctcgacgacgccttacacccttagctccatggttgatctcaagagagccttgccggagaacgtcaccatcggcttctcggcatcaattggctcagcctatgagcagcatcagctgacttcttggtacttcaagtcgacttcgtcgttcgagcagaagctggcagcagaaagcaagaaaagaagggaggcacaggatggaagctggcacggcagtgacgacgacgacgacggcgagctcatcatggagatcgagatggggacgggaccaaggcggttcccgtaccacaagctcgtcgacgctacgaagagctttgcgccggaggagaagcttgggcaaggcggtttcggtgcagtgtatcggggctacctcagagagcttggcctcgccgtcgccataaagaggtttgccaaaaattcctctaagcaagggaggaaggagtacaagtcagagatcaagctcattggctggtgccatggccgcaccgagctgctcctcgtctacgagctattccccaaccgtagcctcgacgtccatctccacggcaatggcaccttcctcacatggccaatgaggatcaatattgttcatggactcggatctgcactactctacctacatgaggagtgggatcaatgtgtagtgcaccgtgacatcaagccgagcaacgtcatgctagatgaatccttcaacgcgaagctaggcgatttcggccttgcaaggcttattgaccatgctgttgggatacaaacaatgacccatccctcagggacgccaggctatcttgatcctgaatgcgtgatcaccggcaaagcaagcgccgagtccgatgtttatagttttggcattgttctattggaagtggcatgcgggagaagaccaattagcttacaggacacccaaaacaattgcctcttccgactggtggaatgggtgtgggatctgtacggccaaggagccgttctcaaggcagccgacgagcggctcaacaatgaatacgacacaactagcatggagtgtgtcatggccgttggactttgtcgatatcctagtccttatagagggcctggaattgttggagttatctcatatgatattcagctaatgctgtccaatgactgcatagattactactga

SEQ ID NO: 1138 - DNA, 1626 bp, Oryza sativa
atggttgacattaagcaaactgaggttgaccctgagaatatcatcccaataacaatggatcaacttacaccagaacaaaaggcagagtatgagcagatgatgaacaacttgcagaatcagtttttacattcatttgtgcaaactcatttaggtacggttatccaaaggtataaattgaaagtgccatccaatgatgacttagaatcaagtaccaccaaagatggcaagcccaaacatgacaaacccaaggatgaaaaaccggaagaagaagagcctcaagagttcaagaacttgcaggatcagattgattatgttgtttatcatgcatttatcaaccagtcaggggtgcttgtcaacactttaactaacatgattaagtctgtgattgatggttcaattgccaaacatcaagctaagagtccgacttttcttcctgatggcgtgtttcctccatataggaatctagtgaccggcaaacaacaacccgtttctggtatagcaccggagcagccgatggcatcaacttcggcttttgggaaacagtgcgcatcaacgtcagcacaaggacagctagggtttaatcctcatgtactggggaagcaatcagttgttgacccgattcagcaaataccaattgggcagcaaacacctattgtacagcaacatcagcctattggtgctcagtttattcctgatcagcaagttcataatgtgcatcaatctcctcaacattatgctggtggtaatatgaactttcagtatcagccttattcaccccagatacagtatcagccagggggatcacctcagccccacatcttgcctcggtataatcagcttgaccacattcaacaacagatgcaaggaatgcctcaacagaagccttgggctgatatgattgcagatgtgatgagggagcaatttggtcttaaaccaaagaatattgggaacttgtatcaaccccgatatccagaatattttgagggggttccattgccgaatcggtacaaggttccagatttttcaaagttctcagagcaaaataatgtgtcgacttatgagcatgtcagccgatttttggcccagtgtggtgaggcatcggctattgatgctttgagagttagattattccctttgtgtttatctggatcggcattcacatggttttcttcattgcctgatagttctgttcaaagttgggccgatatggaaaaacaatttcataaatatttctacagtggaaatcatgagatgaaactttctgatctggcagcaattagacagaggcatgatggatctgttcgagattatattcagaggtttagggacatgaggaatagatgttatagcttggctttgacagattctcagttagccgatcttgctttccaaggtttggcaaccccaattaaggagagattctctgctcaagattttgagagtttggcccacttggctcaaaaggtaacactacatgaacaaagatttgcagaagccaaaaagaacttcaagaaggttaatcatgtatatctgttgatgcgaaaaacacacactgccctgggagatctgcttagctccagtgcaggtctaaatcttggtgagatgcaggcgtgccaattagattga

SEQ ID NO: 1139 - DNA, 1605 bp, Oryza sativa
  N_region (785)..(785): n = any nucleotide
atgcttgatcagtgcgcctgtatgatctccactctgcgtaagtcacgcgtaacttatctggactccacgccgttccacgcattggattattcggtgtgtttccaaaaacaaaatcgaattttctacagcaaaacaaaactgcaaaaggagaccgcatgtgcgcaaggtctcccgtaccgcttcactccatcatcccccgacgcccccgcatcgccgcttcaccccgacaccccgcgcgacctagtgcgcaacggagggggaagcggtcgtcgtcgtcgtcagcggcggcggctgcggtgcaccggcgggaaacagaattggtgtaagcagaaacagtccacaatgacaactccactccctgtcagtgctggtgatgcttcacgagtcctcttcactggcattcgagaccacactgacatcctcatcgaggtcctccttcggctgccaccctggtccctctgccaactacgctgtgtatgcaaactatggctagagcggacaacatcgtccaccttcctctctgcctatgctgaacgtcataccaccaacccttcaaactggttcctcctggaccgaacaatctttattgacactgcccccacaccccgaggcccaatacgtgcactgcttcgcaattctgaaccaccaaaagtctcatcaatcatcacctcctctcgcatgtgttccattcaccggaaagagtccttctatgaccagctacccatggttttccgaagccccaacttccgcaatgctgaaagcttgggcattgttgctcgggatgntgagggtgacatggtattctcctctggtgggatgcttcattgggttgatctcaactgtggcatactctcctgtgacccatttgcatcagaaccaactgtactttttatcaacctgccagaggccagtggaagacccacccgtggcctggatgaatggatccacatgaggtatgttggtgtctctgctgggcggttgtgcttctttgacattgatgaggatgatggagaatctgggtcaatgagcttgtgggcactaggtgggaacagtggtgagtgggtgttggaatacaaagtggatttcgaagatctgtgggaagatgaaagctatgatgattattcgctggatgaggatgaggttccattagttggcttggttgacccattgaatgagcacagtgtaaaaggagctgcatcgccggtcgcctctcctcctcaagaccacgaagcgccggttccacaccgccgttcttcttcgctttctccgccaccgccgccagggagaagactccgccctccgccatggcgccatcggcagcaacgtcagcgaggtcgtcttcaagagcatttgattggagacaatgtacagtgcaccagggaggatgaccgcgaacggtgtgagctcgatatccaagggcggggctgtaatgaggaggtatacccgtggaccatgacggaacgaaaaacactttttagggtagacgaccagctcctgctcaacaaaaacagagcaaaagcaggggaagtggagaaaaacagaggaagcagcgaaaacgggagaaagaaatgtcacaactcacaagggctgaaaacggaacgataa

SEQ ID NO: 1140 - DNA, 1551 bp, Oryza sativa
atgggaaacgatggagaaaaggcatcaaaactatgcaaggaggcaggagggcctagcctagattcaaatcttgctccaaccatcgtgctagcgctcaccaccgtccccatggggtgggataaccgtaggaggaaacaagcgagtacgataatgaatgcacgtggccgaggggctaggaatggaaacgggcccaaccgggggcctgggggtggaagggctcattcagatgtggtggttggagcaaacaccaccgtactagcaacaaggaggtgggttgggttggagatagattccgtgccaggtaatgaggggcaacgtgacattgtgaactactacctccgttgcgccactggcgttggtaatggggagagggagctggcggtggtaggaacacaccatagcaataggagggtgacttatgtggtgcatgagccattcctacagtccctcaaggagctgcaggtggctgcggttgttggagttgaacgactcatgtggaagtcgaggaaggatgtggtgcactggctcaacatgctcatctcagatgttgcatctgatgaagttgcaatttgtaacaatgatggcaaagatgctaaacttgctaatatctccacaacaaagggctcttcatcatcaactgctggaaatgattcaggggatttcaaatggttaggtcctgaatcgcattctaaaaaagggaagagctacaaatccttctggcgaaggggatttacattcatggttcacgattttgtttacatcttggtccaacatggcaacaaacttgttgcttatgtggaagaactctatgaggataaccatgcaaacaagatggttcagatacgacggttccgcacactcaactccaccggtattcaactttctccaggtgttaatgatagagagatcctccactccgacaatttgcaagacatcggagttgaatgcatagatggattggcttcagtcctgaacgaagaacactttgagatgtttcaggcaattgccaacaacaccaacaggcaaccctacctatgcatccggcatatcgacaataacagcaatgtcaagacctttgacattgcacaactgcaagggtattcagaacaggagatatttagaatagtctcaggcacacctcccgtgaccgtgcatcccgacgcatctgaaggcagcaagaacacaccaagatcatcagccagaggtcatcatcatcatcggaccatggagaaccccactgctagtgatgagaccaatgttcaggccacaacaatcaatgtccttgcacgcaatgctgcaccaacagagtctgcttctgctctgataaactctgccctggagaagtatcttgagcagtacttctctcatggttgccttgtggaatgcctaagccaggacagtggcattaggggctgttggttcatcggttcagtgattaggaggtgcggagatcgcatcaaggtgaggtaccaacacctccaagatcccgaaacgccaagagcaaacctagaggaatggttgcttgtgacaagaaccgttaatcctgaaacg

SEQ ID NO: 1141 - DNA, 1542 bp, Oryza sativa
  N_region (27)..(27): n = any nucleotide
  N_region (45)..(45): n = any nucleotide
atgatgagggtgacgccagcggcggcnaagaggagcagggcggtntggctagggcgggggttcgtcgccgcggcggcggcgcccttgtgcgcgtgcgtggcaggatttccgctgaagaaggggccgtggacgcccgacgaggacaagcggctgcgggagtacgtggaggcgcacggcgaggggaactggaaccgggtgcagaggaacgcggggctgaaccgctgcggcaagagctgccgcctccgctgggcgaaccacctcaagcccgacctcaagaaggggcccttcagcaaggaagaggaggagatgatcatcaagctccatttatggcttggggaacaaacacatttgacatgctgcactcttgtaaatggccttgttaaaaggagtagacaaatgctttgccattattccttgtttgcagagaataacaaaaaacgatactgtcatcaggaaaagctgacatctaggccacaggataagttgccaggccgcacagataatgaaatcaagaacttctggaacactagatgtaagagaattcagagaactggtgaacctctatatccgaaggagtttaatcattttaagttgacagatctggaagtgatgaactgtgaaagccctgatgaatcacgtgccaagaaacgaacaaatgaggttttacagggaaatggtcaaagttacaaagaggtttttttcgataatttagactatagtagaccagaaaattatattcggccaaattgtgtgactccaaattctcttccagttgatgccacaagtccatttggtagtgccattgccacacaagatcagtcagtaccttttggtagtgccattgtcagtggacatccaattcttgatggcaacttctctacttctgggaccatacagaggcccatgaatgtagagctcccttcactccaatatcccaactatgactttaacaataataatgcatggtcatatcacgaccccttaggacatcctattgaccaggttgactttggctccctgagatcagaatatctctctccaaacaacaatggtctgctggatgcattggttcatggaggacatggacaaggggaacttgcaaattcccaaggatcttttgatgcttgttttcctcgtgttcaatgcaatcaagtgattcaatcgaatgctttctctctgagttcttcctttccaatcattggtgatgatctcctcgagaacagttgtcatgcttttgttggcatcaacaataatgcaagcagcctattccttgacagccaacctccacccttggtggaccctactttctggaggcacgatgtatcactagaaccgaatttgccagtttattgccagtttaacgaagaattgccgccctcaaatgagcagtttgccaaagatgcagatgacgctttcggtcatgggggtctttctgatgagaccaatctagctgctgcaggtcaaggcgatgaacatgaccttgaggacccctgggcgagcatgcccggtgcctgtgacatacctgattttccaagtgaatga

SEQ ID NO: 1142 - DNA, 1524 bp, Oryza sativa
atggatcgagaggattttgatgagttcttggggacgttgggtggggaagcagatcgagctgggtgcgggctttatagttggccgaggagagtgaagtggagtgtgagaagtggatgggggatggacgcgtccttggccgtgctgcccgaacggtcactggccagctggctttgcgtggcctgcctgctcccagctgttgctgagcgggcatctgaccattctacccctcaagctggcgcctcggatactgtagatcagtggctcgatggcatggtgaatcctgcgttggcttctcgaggaggcttgaagcagcttgcagagtggagtgcggagagcaggggaacacgaacgttgggatggcatgtagcgtgggccagcgccatcccagttttgaacgttggggacttggggtgtatcactacagctttgatgtaccgcacagcagtagttactcgtacgagtagcgtgttagaacttataccagaagccaggctggtgctggctatgcaaagcaagcaatgtgaggacgaacacggcgataacagtgaaaaatgcagggagagatggagggatgtttcatttggtcacgcaggtgaggtcgtgaggaggaggaggcggccacgagaagctgcggatgagaaagcgctcgcccccacggctgacccgcgccatcctccacacttccgcaccgggctactactcgctctatgcgcgtcatcgggatgcgcggcagcacgatccgctggccctactaccatcaacgcacatcacgccgcactcgcagatcaggcagcagcagcagcggcggtgaattgcgaacggacggatcgcgcattcattcgtgcctgcccgcgttgccctttcgctggtatcatatctaggcgcgtcacgatggaccacgggagcggcgcttttgttggtccacttccgtgcaggccagctagctcagctccgccggagccgagacgaaatggcaaggcagctggcgtccggggttaccgtgccccgacagtaagcacggaagttaccgcggtatttatattaccataccctgcggtaagcctgaaaacggtggcaagggaaacctgcttccatccgcgatctgctcacgcgaggtcgcgagccccggttgcctgcaggccgtcctggttttctcacgttatccggcttcaagctttcatgtcctccgggactggtaggctcgtgcaaatcaataatcacatcgacaacgatgctgtaaccattactccgtacagcacaatggcagcagaggactgggattggatgctcgagctgtcatctcgtaggacgtcgggctcgtcatcaaaccggctgctctgtgtctcgcgcgtgtctcccgtcctctaccccctcgttaattctcctggtgatcttatcttggatggggcacttgaatctccacacgttgttctcttgacaagggaccggataagcacggagatgccgcattccacgggctttggatcatgtgttaccgctgctgcttggaataaactaacttga

SEQ ID NO: 1143 - DNA, 1482 bp, Oryza sativa
  N_region (30)..(30): n = any nucleotide
atggacggagcgacggtgggcgacgggagnaagcggagcagcggcggggcgaaatggagcggcagcgggccgtgggtggagcaacaagggtgcagcagcagcgcgatagcgggcggcggacaccataagaggaggggcgagcaggggacgcgttgttggccggtgctgctcacccgtcgtcgctgcgacgaggcactgcggaggcagtcggcgcttgggcaaggaaggggcagcaggcgccagaggagaagggaaacagggccggatttggcaccgccgaagctggggactgccggatctgtagcaccagcggcggcggcggctgcggcggcggatgttggctatgcggcggtggtggcggcggaggatctcggtgacgcacttgtggaggggagacggcgaacttcgtgggctatcgccgaaaaaaaaaagagcagtggcggctgggcctggaggagaaggaggagagagagagggagaaaggagaaggcagccgcgtggtggagcaggacgaggaggcggtggcgaatccggtggtcggcgaggcggagtgtggaggaggaggcagctgtgaatccgatggtcgtcgaggtggggcagcctatgagaagaccaacgagggcggggagccagagcagcgcggtaagggaggggagcttgagggcgacccttgccgaggccgcgccgtcgtcgtcctcctcggcggctagggtcctgagccgacaggagaagctcccacccaacaacgccttccccggcgccagcggcggcctccacgtcccgctcctactctccctcttgttcaccgcacccatcgccgagctcctcgtcgtcgcctcgacccctgcagtgtgtccgtcctcgcggcggaacggtggcggcggcaggccgcgggcagagcaaaggggcgggcagagcggcggccacctcgccaaggacatcgagcgcacctctgacgcgagaggagcggcggcgcgcaccagcctacgggagggagggagaggagcggcggtgcgcttgggtcggcggccggcgggagggagagagaggagcgacggcgcgcggggactggcggggggagcggcgcgcggctgccggagggagagggtcggcggcgcacatgagtcgacgggtgggagggagaggagcagcggcgtgcgccgcgccggtggagagggcagccaacaggagggtggaagaggagcagcggttcaccggcctctgcgcccttgtcactccgcccaccgcctgctgccgctccattttaccccgctgacgctcaactccgcttcctcccgccgcccaccattgctccgtccaccgccggccgctgcgccacttcgctccatcgccgctccgctcatcgtcccctcggctccgccgctcgcccttctttcctggcagtgtagggggagagagatgggggatagagagaagagggaggctgacatgtgggaccacatgggccccacctttttttaa

SEQ ID NO: 1144 - DNA, 1230 bp, Oryza sativa
  N_region (504)..(504): n = any nucleotide
  N_region (574)..(574): n = any nucleotide
  N_region (976)..(976): n = any nucleotide
  N_region (1012)..(1012): n = any nucleotide
atgggtctgtggattgattttaaagcctctcatcagccagttgcatacacccccggaactcctttcgacaactctatcaatgcccttagtcatactcttgaactcgaacatatctacctcattctgaccatatctaatgttgccttcactctcgagcttggtcgagctcgagccgagcctgtcggaaagctcgaacattttataggctcggctcaagctcgactcgagcttgtaattgagctcgagcctaggcagacgagctcgctcgagctcggctcgttgacaaccctattttgggccggaacaccacccgtttgggccgaaaatccagcccgtctcccaccatcgcagcaaccgacgaagttctcgcctccccccaacacgcgtggccacctccgcggcgcctcgtgtcatcccccacctcctcgcctctcctcctcgtcgtcgtcggcggcgggccggagccacatgggccagaccctgcgcggcgccgcggggcccttnagggccccacccaccccggcgccccctcgtcctcatcaccttccgcctgcgccgccgtcgccggcgggcnctggcggcgcggcggcacaggatcgtctccgtgtcttccaggatgtgggacatgatgttgattataagctcgaacaatatggccctgatttcgtgaaatcgggtactgatcccatttgggaagcatatcctcctgggctctctatcggtttccagttagacagcttatttccagctgagagtgatgagggacgaggggttattttcaagagaactgaaggatacttgaacaaatggactgcagatgtcacaacacaaccaaaagatgcccctggtgtacttaaggagcgtgatccaagttatgatgagatgcttaagcacatggttgggagaatcactacaaagcctggaggaaagccagaaatgggtgaagctttcgtcgtagatcagtacaacaggccantcccaagggttagaacatccagacctgaacccgggnaaggcggacacagacaactacctccaggaaccattagcgtcgctcatgtccatgaaatcatccaactgtaccaaggaaagtccagtaaccaccctggcccaatgagcgtggacaagattgcctcaaagttcagagtcgaagcctcagtggttcaaaacatcgtgcagttcgtctcacttccgcaggaagaacatgttaccaagaaagaggaatactga

SEQ ID NO: 1145 - DNA, 1164 bp, Oryza sativa
atggcgctgctgatggatcccggggcgggaggccccctgacggagagcgagaaggccgacctggacgccatcgccgccatcaaggagtcggcggcggcagagtacaaggagaagggcaaccggctcgtcaagatgggccggagccactacgccgacgccgtcgactgctacaccaaggccattgcccagatggagccgctgccgccgccgccggtgccatcccccgacgcctccgtcctcttcgccaaccgcgcccacgtcaacctcctcctcggcaaccaccgccgcgccctcgacgacgccgcccgtgccgtccagctctctccctccaacgtcaaggcgtactaccgggcggcgaaagcggcgattgctctcggcttgctgccggaggcggcggccttctgccggcgggggatcgagcaggaccctgctaatgaggagctcaagaaattgctcgcacaagtggacgcccaacagagtgagcaagatcgtcatagggccaaggttgcgcaggccgtgtccgctgcgaaggatattgttgccgctatagagaagagggggttgaagcttgggaaggcagcatatcaagagcttaccggtgtaaagaagccgaagttggatgagcaggaaagttctccaccattaccatgggatgataaacacgcttacacacgggatgctgttgagttatattatcaggctggcgttggcacagttctgtccaaaagtgaaatattgaaaattcttttggaaggcactatggactcaaagtcacttcctgaaagcctgcttgatgaggaagatggagaaaatgatgatggcaagagcagcacaattacatcatcagataagggttctgtgaagtggatcaatgtaaaagagggaaaaactcttcaagaagtgctgcagcataaagacttcatcatccctgcaattcctggtctgaatgatgaggtgagcgcgacgggcgccatcgtggagggcgacgccaaggaggccatctgccaggccgtggaggagatgcacgccgacatgctcgtcctgggaagccgcggcctaggcaagatcaagagggcgttcttgggcagcgtcagcgactacctcgtccatcacgcgtgctgccccgtgctggtcgtgaagcccaccaaggcgcacgacaagtga

SEQ ID NO: 1146 - DNA, 1098 bp, Oryza sativa
atggtggatttggtgaacggcgtgctcaactgggtggcgacgccggccatggtggccagcctgctgctcttctacccgccctactacctcttcaagaccgtccactccttcctctcctacctcttccccgacgacctcgcccgcaaggtcgtcctcatcaccggcgcctcctccggcatcggcgagcaattagcatacaactatgctctgaaccgggcatcattggtccttgttgcaagaagagaatggagcctgcgtaaagttgccgatcaagcgttcgagcttggagcacctgatgtgatcattcttccgggcgacgttgcgaatcctgaagactgcaaaagatttgttcagaccgcaatcgatcactacgggcgatgcaagtctccaatatcactgatttgttcagtaaatttcttcagcaaaatggaccatcttgtgtgcaacgctggcatcgcaagtgttggcgcgtttcaggagattccagatgttactaactacagctctcaatttgatgtgaacttctggggttcagttcagtcaacttttgaagctctccctcatctgaaaaggagccgaggaagaatcgttgttactgcgtcggcaaccggatggaatcctgttccaagaatgaccttctacaatgctgccaatgctgcactgataaacttctacgagacgctgcggacagagcttggtagccaagttggaatcacaattgtaacacctgggtggatcgagtctgagatgtcaaaagggaaatttctcaaggatcatggtgaaatggaggtcgatcaagaaatgcgagatgctcaaattggtttatttcccgtggagtacgcgaagaattgcgcaaaagccatggtacaagcggttcggcaagggaagcgttgtctcaccgtgccaccatggttcagcacaatgtacctgtggagggtattcgcaccggaggtcgtcgagttctgctaccgcctcctgtacatgcaccgccatggtggtagccaagctgatgcgccgagcaagaagatggctgaggctggtggaaagaagctcttgtatccaacgtcgctgcgctctgatgacatcaaggatgagtga

SEQ ID NO: 1147 - DNA, 1092 bp, Oryza sativa
atggagggtacaccaaacaaatcagttcaaagcttcgctggctcgagaactgagaaatctaccgggtctagtcatcatagagaagcagagcaaaatgacagttttacaagaagggaatatacttgtgctgattttattgaagcacttcgcttgattgatcaggaggcattcaagtgtagcattgttctgaatgacttctccatgcgagcaaacatcactgaaccatcttaccgcacagtgaaattagatggtatctgctcaacctttgtttcatcagttttagctggtggatatacctacacaggtgaggttgctaccactgatggagatgcaaaggaaaatgcagcccgtgtggcgatcaagtcaatccttgtagatattattgcagttactagaagcaaccacatgttggagagcatcaggtcaaacaaaccaacaggaacaacaatacaaggagagcagtcaagccagcagacaagtgcccatcctgcagtaattttcaccccacctgctagtaataacatcccttgtgctccccaccatcactatatgctgcatgcgccatttgctcctcttgaacagatgcagtggcgccatcctggtactccacagatggtgccggtttttcctcatgaacagatacagtggcgccatcctaccccagtacatatgccatttcatccccatgaacagatgcaatgccgccaatcccctgcaccaatgccgtttcttccccgtgaacagatgcaatggcgccatcccgctgcaccaatgccaacatttcctccccatgaacagatgcaatggcataatcctgttgcacagatggcatatcttccacctgaacagatgcaacggaatgttccaattgtacacacaccatctgaaatgatgcaaatgtggcagcttcctcaatcaatatccagctctaatcctgtgctgcaaaatgggctttactcgaatacaggtggcgatgatgacatggtagtagaggttggttccgctgaggagactatgactttgagtggtactaagcgcaaaatggaccaaactgaagaggcagagggcaagcaggcaaagatctccaagtag

SEQ ID NO: 1148 - DNA, 969 bp, Oryza sativa
atggggaggcctccttgttgtgatgagaatggcctcaagaagggcccctggactcctgaagaagatgagaagctcatgagctacattcagaaacatggccatgcaagctggagagtcttacctgaacttgctggcttgaacagatgtggtaagagctgcaggctaagatggaccaactatctgaaaccagacatcaagagagggaacttctcgcgtgaggaagagcaaactatcctccagctgcattccatccttggcaacaagtggtcagctattgcaaagcatctccctggacggacagataacgagatcaagaacttctggaacacccacctcaggaagaaactgatcaagatgggcattgatccaatgacccactgcccaagaacagacttctttcagtccctcccgcagctcattgcacttgccaacctccgccagattatcgagcgacaaccgtgggatggccacattgagggcctgcagactgtggcagttcaggctgccaagctcgaatacatgcaatcactgctacattctgcagtgtccattgtgaccagccccaccaccaccaccaccaccagcagcttaaacaccttcaccaccgaactggagcagaccaaccacctatgccctccacaggtgccttcttcaagtgtccctgaattagctgtacaggtgcctcacagccaaatgcctagcacttcatttgatcaggaaattggcaaaaccaacctgttctcaaataacattgtcaatggcaatgagtggtgcagcatggaggcagataacagcagccagaaaagcttgttggtccctgaaaactccattccaccactcattgacatgccagtgcaaaacttttgtaatactatcagcacaccaaactgtgacggcggcaatagtattccactgcccagttggtctgaaatcctacttgatgaagaactcatgggtgaatttgcttga

SEQ ID NO: 1149 - DNA, 969 bp, Oryza sativa
tacttgctttcatcctcaatggacaaaactgttaaactatgggacattactactagtacctgtctgaaaacattttcacacacagactatgtgacttgcatccagttcaatcccgtggatgataacttcttcattagtggatcactggatgaaaaagttgcactggtgggatcacacaagggaagctgtcatttatttgatacaactgaaaagaagcttcagtacaaaagtcagatagaactaagaatcaggaagaagaagtctggccagaagaagataactggcttccagtttgctcctggaagctcgtcggaagtcctgattacctctgcagattcaagaatccgtgttgttaatggtgatgaactcgttcacaaatttaaagggttccgaaatacaagtagccaaatatccgcttctgtagctccaaacgggaaatatgtggtctgtgccagtgaggactcccacgtgtatgtctggaggcatgacaatacttcccatccgagcagaagcaggagtgcagttgatgtaaccaactcatatgagcatttccattgccatgatgtcactgtggctatcacatggcccggcgctgaatcccgtggctcattcgggtcccgtagcagcagaaacagtgattcagacgatgcagtgatgaacacgggtcgggatgcccctgtagagaacagtgagcatgatctgaatggcactgtcaatagatgcaccaagcgcccagtttgtgaaggtgttgcaagcacaagcaatcctccagcggatggagtatcaacgtcctggcctgacgagaaacaatcgtctgccaagagcagtcctggtcactgctcatccgacctttgcattggagctttggatgttcagcgccggtcagcttggggattggtgattgtcactgcaggaaggggtggtgaaattagggtgttccagaatttcggcttcccggttcaagtgtaa

SEQ ID NO: 1150 - DNA, 933 bp, Oryza sativa
  N_region (816)..(816): n = any nucleotide
  N_region (819)..(819): n = any nucleotide
atggggcgcggcaagatcgagatcaagaggatcgagaacgcgacgaacaggcaggtgacattctcgaagaggcggggagggctactgaagaaggcgaacgagctcgccgtgctctgcgacgcccgcgtcggcgtcgtcatcttctccagcaccggcaagatgttcgagtactgcagccctacctgcagtttgagggaactcatcgagcattaccagaccgtcaccaacactcatttcgaggagatcaaccacgatcagcaaatatttgtggagatgactcggatgaggaacgagatggagaagctggacggtggcatcaggaggttcaccggcgacgacctctccaacctcacgctcgccgacatcaacgatctcgagcagcagctcgaattctccgtcaccaaagtccgtgcgagaaagcatcagctcctgaaccagcagctggacaaccttcgtcgcaaggagcacatcctggaagaccagaacagcttcctgtgccgcatgatcaacgagaaccatcatcaggcggcggtgggcggcggcgacgtgaaggcgatggtggatgatggcgccggtgctgtcgatgctgacggcggcgccggcgtactacggcgaggagtcgtcgagcaccgcgctgcagctcaccccgccgctgcacgccgtcgacgccgccgccgccgccgggttccggctgctatgccgacgcagcccaacctgcaggaccccggctgcagtcagcagcagcttccatgccgccgccgccggccacggcctgcagctgtggtaagaacacaaagacgcaagcaaagcatacanggnctacatcctgatactctcatcagagatctagatgattgcttgctaattaagcacatgatggcattgtcgattctgggagctaggagtaacttggagacgcatgaagatgcatga

SEQ ID NO: 1151 - DNA, 867 bp, Oryza sativa
atgaaccgtgacctcgtcatcattgggattggcactgagatcaaaaacgcggagccattggcaggtgcgatagggttcaagaaaatgagtgacaagaccgatgtgtacaacctccgcgtcatcaccctcaacctcaatctccttaccgagtccagatacaggcccgagttggataatccgccgaaccggagatggagcccaacgcgaacgctgggcgtcgcggccgtatcggaactggaaaccaacccgaacggcgaaagcttgcctctaccaccaataaaaaccacaggaccggagccgcataacacaacaccagtcctacatcgatcgattcaagtctcgacgcaaagccaatacgcccacagcatcgaagcaaagccccgcggttttgtcgtacgtcgtaaatcttccacaaaccagcagccgaatccgtcgtcgatcgacgtccgtcgagacacgaagatgcagatcgtcgtggagacccagatggggaagctcatcacgctcgaggtggagagcagcgacacgatctgtcaaggagaaggtccaggagaaggagggcatcccgatcccgccggaccagcagctgctcttcttcgaccacaagttgctggagaacggctgcacggtggctggctacaacatccaggacggctcgacgctgagcctctatctccgcctccttccaggcagcatgaacatcaaggtgaagcctctcagcggcaaagggcgcgcatcgaggaggaggacaggcaaatagggcagctcatctacaaaggggtgctggtcaccgacgacaaggcggcccacgagtacaatatcgaggccggatccgtgctccacctcacacttaatctcagggcctag

SEQ ID NO: 1152 - DNA, 849 bp, Oryza sativa
atggacccgccgccccgccgctccgcgggcggctccgagccgcgcgccaagcgcccccgcagcgccgccgtggcctcctccgcggagcactcgaagcgcccgtcgcgtgtctggagccaagccgacgagctcgtcatcctccgcggcctcatcacgtaccgcaccaagcgtggggtgctccctggctcaacgcaagacattggaaagctccacagctacatccgtggccagctcagtgctaaggtatcaactacacagctcagtgacaaggtccggcgcctcaagcagaagtatcagatgctcgcaacacgcgccaagactgggaaggaagtattccccactccgcatgaccacaatatctaccagcttgccaagaaggtctgggggacaatgagtactgctggtgagggaggaggaagtgggtatgataatgctgatgctggtgagagcgaagaggagcaatatggcagagagagcgatgatgatatggagagtgggcgggataaccgtcaccgcaagaatcagagatcagtgccagtcactatggcaaatggcaatgggactgggatcggtgctgtgaatgccattgtgagagggaggagtgagtttgagaaagggaaggatgtatatccttacctgtgggaaacagttgaggagctgtccagccaacatccaactggagcagtgttcaagaaggcgtttgagttgcttgaaggatcgaaagcacaggtgatggaggaaaagctgcggaagttcaggctgactgagatgagacagcagttgcgtcggatggacctgatgaaggacacactgagtatggtgcttgatgccctggagatggctgactga

SEQ ID NO: 1153 - DNA, 804 bp, Oryza sativa
atggggatgtgtagcaagacaaggaagaaggggtcgtggagggcggaagaggacgcgctgctgacgaggctggtggcgcagcatggcccccaccggtggagcatcatcagcggcgccatcccggggcgctccggcaagtcgtgccggctgcggtggtgcaaccagctgagcccggccgtgcagcaccgccccttcaccccgcaagaggatgccctcctcgccgccgcccatgcccgccacgggaacaagtgggccaccatcgcccgcctcctccccggccgcaccgacaactccgtcaagaaccactggaactccaacctccggaggtgcctccgccgccaagccaaattcaaatccaaggaccctgatctgctgcccgatccaattaatattccacctgactgcatcgtcgtgctcaacgacgacgacgagcctgcagatcggccggtcacgccgcccgccatcatccaggcccaggcccaggagacactaccgtcgctgaccctgagccttagcctttccctgcccggcgccgctgctgctgctgctgaggttgaggtggcaccgccgccgcccagggcactggcagctgcttctgagatccaagacggcagcagcagatcatcatcggcatcgcgtgtcatgttgcaggtgatgcgacagatggtgagggaagaggtgcagcgccatactgcgcagctcgcctactccctcatggccctggcctcctgcagccgtaggcccccaaatttaggagcattcattttcagactttgttcaaacatcgatcgatcatcaaattaa

SEQ ID NO: 1154 - DNA, 672 bp, Oryza sativa
  N_region (178)..(178): n = any nucleotide
  N_region (181)..(181): n = any nucleotide
atggcgacgtcgatggagctggcgcccggcgacgcgcggttcgcgaagctggcaaaagagctcgacgacaaggcgccgcccaaggccgcggccgcgccaccggcagcatcagaagaccaagcagcagcgagctccgggaagcccaagtacaagcacgacttctacaacggcgcgagcnagntggtggtgacggtgttcgccaagagcgtggcggcggagcacgtgtccgtggacttcggcgagcagatgctgagcgtctccgtcgaggtcgtcccggccaagtgccgctacagcatcctcccatcgaagatcgaggtgcgtctcgccaaggcggatgagcaagtgacatggacgtcgctggagtacacgagcaaggccaacaacaagctcgcggcgacggcgacgacaacgacgaggaagaaggtagactgggacaagctggaagccgaggtgaagaaggaggaggaggaggaggaggtggacacggcgacgccggtggtgaacaggttcttccagcagatgtacggcaacggcgacgaggacatgcggcgagccatcatgaagtcctacgtggagtcctacgtgctgtccacggactggaaggacgtcggctctaagaagattgaggccagcgcgccggaaggcatggagctgcacaagtgggagtattga

SEQ ID NO: 1155 - DNA, 659 bp, Oryza sativa
  N_region (586)..(586): n = any nucleotide
cccaatgccgcgccaggcgggcttcagccattcgatgtagtcaagatagagcgcggagatgatcatctgctgcgccgagcccgccaccgaggtaatggaaagcgtcacgatgagcgcgaccagcaggcctatcagcgacacaaaatcgcggagatacttcacccaaattttctcctgatcctgcggcttacgctcccagacgtcgcgcgactgggcgcgaatggcctcgcgcaggttgcccatccagttaacgccggaataaagggcgatcagcaagccgacgatgccgacggtagtacgctgctgaacggcggtattgatggtgcttttgagcgtgccggcaagggtcgggtcgctgacgttgttcaggatcttattgaagatatcctgcagcagcgtcgggtgcgacgcgagtacaaaaccggccgccgcaaacgacaccatcaggatcgggatcatcgacaagaaggaaaaataggtgatggccgcaccaaactggttccccatgcggtcattgaagcgttcggtcgcgcgtatcagatgcgcaaccatggggaactgctgaattctcgcggcgatgccggtnacggtccccagcgctttgctggcggtgcctggcgttttggcctcctcaggcccggtttccatctttttgacgg

SEQ ID NO: 1156 - DNA, 654 bp, Oryza sativa
  N_region (169)..(169): n = any nucleotide
  N_region (174)..(174): n = any nucleotide
  N_region (178)..(178): n = any nucleotide
  N_region (204)..(204): n = any nucleotide
atggcggcgctcttcgaggccgcggagacggcggccatcgtggctgcgctgacgcgcgtcattgccgacggcgggcgtggaggcggcggcggcgtctgcgtgccgccgcccgcgccgtcgttggtcgtgccgccgcgggcgggaacaggcggcgggcggcgcttcgacnttgcncggnaggaggagatggtcggcgtcgtctcngcgggagatcacgccggcggggcaaacgtggccgaggcggcggcggcggtggtggtggcggcgccggcgacagcgcgcaggtaccgcggggtgaggcggcgaccgtggggcaagtgggcggcggagatcagggacccgaggaaggcggcgcgcgtctggctgggcaccttccgcaccgccgaggacgcggcgcgcgcctacgacgccgccgcgctacgcttccgcgggcgccgcgccaagctcaacttccccgaggaggtgtcccgcccgtggcagggtcacgatgtcgatcacatgtcctgctcgccgccgtcgatctcgaacgctcgctttctgggttcgtggaccttcggaccgccgcagccgccatcgcggtccgtcgcggcggcggcgacgactctgcttggtgggagccatggaggcaacggagcagagaacgggagggaatag

SEQ ID NO: 1157 - DNA, 600 bp, Oryza sativa
atgggcccacccgatttcatgggccttccgcttccgcaccacctgggccgcgccgccgcagctcttagcccgcgcgcacatgcggcacgaacgcctcttgccccatttccaccgccctctcccgcttccggcgatgtccacgccgaacagcctcacgacacgtgctgcttcgctgcttgtaattggcttctcgtcgccggtggccgccgccgtgttgttcttctagcagtcgatgaagagcagctcgtcggcgcagaggcccttctccctcacgaatcggctccatcccttggtcagcacgtagctctggctgctgttcctggacgagtcacagcggtggcggcagttggagggtttgtcgctgcggccgcgctcgccgagagggccggcgtgatcgcgccaaggaaacgctccaacgcgcccccagattcgcatcgcaccggtgagtttctgaggaattggagatgtgtgttgctgcttgaaatcaaaaactctgatctcttgattccctttgaagatttgagagccaatcaagtttgcattcgccacaattttcgcaccgttctccgtcactgtctcttctcactctctgtctcttga

SEQ ID NO: 1158 - DNA, 537 bp, Oryza sativa
atgacaacttccttttcttttaatctccccttcgtgatcgcgatctgctctcgagatggatccggcgccgcctgcctcgtcctccgccgcgcggacaaactggtcgtccacgcgggtagtcgccgccggcggcggctgcagaagtctcgagcaggcgcggcgaccgagggggagagaggtggccggcggcggagcggggacggtggcagcgggagagggagagagaggcgatcgacgcgacggcggcggcgggagaagaggagaggtggcggccggcgcgacggcgagctcggcgtcggagatgttcgaacgtgtcgggtgctcgaccacgggccccgccgccgcccgccgggcgagcgacgcgctctccctgttgaccctctctccctccccaaggcgatggggctgctccgctgccgaaagagctgctgcctccactggatgaactacctcagccccgacctcaagtgcagcaacttcaccgacgacaacgacgagcttaccatcaagctccacgcccttctcggcaacaagtaa

SEQ ID NO: 1159 - DNA, 450 bp, Oryza sativa
  N_region (134)..(134): n = any nucleotide
atggcgatggtggtggaggagctcgacgagttcgaggtgctgtggcctgacaccgacgccgccgacgacgacgcgccgccgccggcgatctcgcctgcgccgccggtgcagccatacgagacacgcgcgcccangccgcgcgtcaagcactctcggccggtggacgtcccctgcaggggagcgcgcttacaccggtggaactggagatacggtggtgccagcatggaggaggacggccacggcagcgtcgtcgggaaggtggtgatcgtgccgccgcacctgctgctgctgttcggcgtgcggcggccggaggaggaggaggaggaggagatggcggcggcgccgtgcacgctgccgtcgtcgttggggacgcggccgtgcaagcgggcgcgcgacctgcgccacctgcgcaactcggtgctgcggatgaccgggttcatcgaaggatga

SEQ ID NO: 1160 - DNA, 402 bp, Oryza sativa
  N_region (367)..(367): n = any nucleotide
  N_region (378)..(378): n = any nucleotide
  N_region (386)..(386): n = any nucleotide
  N_region (390)..(390): n = any nucleotide
atggccttcgtgaatgagcagatggatatctaccgcaagattgggtatcgcgtgctgatggtctccagccacaccaaggatggcctgaaaccgcttgaagaggcgctcaccgatcgcatcagcatcttcgcgggccagtccggcgtgggcaaatcaagcctgctgaacaacctgcttggcctccagcaggagatcctgaccaacgatgtgtccaacgtctcgggtctgggccagcacacgaccaccgcctcgcgtctgtatcacttcccacacggcggcgacgtgatcgactccccgggcgcgcttgcaaataccgcgactgtaaacacgataacgacccgggctgcgctatccgcgaagcgttttnaaaaacggtgnaaattgcngganacccgcttttga

SEQ ID NO: 1161 - DNA, 390 bp, Oryza sativa
atggcgcgcgcgcagccgcgcagcgaagaatctgacgaaattttggctcggtgggaagcgaaatacgagggcctagtagccatcgtcgatccccaagtctccgcggcggaggcgcttgcgttgcgaccccgtcgccgccgccggcgatccgctccagccgaaccccgccgcaccgccgcggtagctgccgtcggcgaggtgcgtctcggcaccggactccaggaatcgtgctgctgctggaacgccgcgcccgctcagccggcggccgggcgtcccgcgtggctcgctggcatcgatcggggatccctcctacgggctcgccgtcgcggagggtttaagccgagttactgggtcaggatgggtcaggatgatatatgttctgcttgttag

SEQ ID NO: 1162 - DNA, 390 bp, Oryza sativa
  N_region (289)..(289): n = any nucleotide
atggggccatattggcattggctggctgggtgcggagcagcgggttctgactcgcggccaaatcgaggtatgccacgtgccatagctcatgcggggacttcagggacgacacatctcgttaagatgtttgatcctgttggcgttgtacctgctcctctcttcgctggtgaggagatcgacgatgcaatccatgtcgagtcacataccccctgcactcgtgcaggatgtcctgcttctgggcctcagtgcatttccttatttttggttgttgatgagggggtttcttctngcttgtgcgctagcttgttgcgcaacaaggaggatgaggaggagtcctccggctgctgccactctccaggagaccattgttgtaagaggactaggatgtag

SEQ ID NO: 1163 - DNA, 369 bp, Oryza sativa
atgcagggaggatgggagaatgatgaaactgttgagcaggcagctgctcgagaggctgtagaagaagctggagttcgtggagatatagtgcaatttctgggtttctacgacttcaaaagcaagacgcatcaagatgcgtgctgccccgagggtatgtgcagagccgcggtgtttgcgctgcatgtgaaggaagagctggactcatggcctgagcagagcacccgcaggaggacctggttgacagttcctgaagccacgtcgcagtgccggtatcagtggatgcaagaggctttgcttactggcttctctgactggcatgacaactggagcaaaggtggcggtggcgacaccaactatgactctctctag

SEQ ID NO: 1164 - DNA, 327 bp, Oryza sativa
atggagcctccatcgccgcgcgcagggccttcggcgagggctccccggccgtggccgccgcatggaagccacttcaccaaccctgtccctccctcccgccaccgccgcatgcaagccatcctcgccgttggtcccgggggcgccgccgctgccagggcgctcgtcgtcgccgatgccaccaagaaggccgtcgccgaggccctcgccatgcgggagctcagcgtctccaccgccgtcgccgtcgccaggaagcgctccccgccgctcgctatcgctgggaacgaccgccgcctccccttcccggactcctccgtcgacttcatctaa

SEQ ID NO: 1165 - DNA, 309 bp, Oryza sativa
atggctttatcactaccggttcataataaaagctgggtatcaccattgattcctggaattcttcccaacctcatatatgatggtgtggcggctgccaagatgtgtcatgatccaagccaaaccttcagaggcttgtgcggccaccccaccaactgcatcgcctgctgcaccaacgagggctacacaggaggctactgcacaactgttagacacaaatgcatgtgcaccaaagcgtgtggaggggagagtccgcctgatgatccgccgtcggcgatgccggcatcgccagtgacgacgacaagagcctga

SEQ ID NO: 1166 - DNA, 5509 bp, Oryza sativa
  N_region (3440)..(3440): n = any nucleotide
  N_region (3521)..(3521): n = any nucleotide
  N_region (3523)..(3523): n = any nucleotide
agtcgacatcttgaagttcagttgctttgtgatcaatatggcaacgtagcagcacttcacagtcgagattgcagtgtacaacggcgacaccaaaaggtctgctgtctcagataatcgaggaaggaccagttactgttgctcctcgtgagactgtgaaagagcttgagcaggcagcacggaggcttgctaaagctgtgggttatgttggtgctgctactgttgaatacctttacagcatggaaactggtgaatattattttctggaacttaatccacggctacagcaggttgagcatcctgtcactgagtggatagctgaagtaaatttgcctgcggctcaagttgctgttggaatgggtatacccctttggcagattccaggagatcaggcgcttctacggaatgaaccatggaggaggctatgacctttggaggaaaacagcagctctagcgactccatttaactttgatgaagtagattctaaatggccaaaaggccactgcgtagctgttagaataactagcgaggatccagatgatgggtttaagcctactggtggaaaagtaaagcaggagataagtttcaagagtaaaccaaatgtttgggcctatttctcagtaaagtctggtggaggcatccatgaattcgctgattctcagttcgggacatgtttttgcgtatggaactactagatcggcagcaataactaccatggctcttgcactaaaagaggttcaaattcgtggagaaattcattcaaacgtagactacacagttgacctattaaatgcctcagattttagagaaaataagattcatactggttggctggataccaggatagccatgcgtgttcaagctgagaggcctccatggtatatttcagtcgttggaggggctttatatgccactgtttctgattatgttggttatcttaccaagggccagattccaccaaagcatatatcccttgtctatacgactgttgctttgaatatagatgggaaaaaatatacaaggagtggacatggtagctacagattgcgaatgaatggatcaacggttgacgcaaatgtacaaatattatgtgatggtgggcttttaatgcagcagctggatggaaacagccatgtaatttatgctgaagaagaggccagtggtacacgacttcttattgatggaaagacatgcatgttacagttgcagaatgaccatgacccatcaaagttattagctgagacaccatgcaaacttcttcgtttcttggttgctgatggtgctcatgttgatgctgatgtaccatatgcggaagttgaggttatgaagatgtgcatgcccctcttatcacccgcttctggtgtcatacatgttgtaatgtctgagggccaagcaatgcaggctggtgatcttatagctaggctggatcttgatgacccttctgctgttaagagagctgagccgttcgaagatacttttccacaaatgggtctccctattgctgcttctggccaagttcacaaattatgtgctgcaagtctgaatgcttgtcgaatgatccttgcggggtatgagcatgatattgacaagtgcctagacactccggagcttcctttcctgcagtgggaggagcttatgtctgttttagcaactagacttccaagaaatcttaaaagtgagttggagggcaaatatgaggaatacaaagtaaaatttgactctgggataatcaatgatttccctgccaatatgctacgagtgataattgaggagaggcttgttgagcctcttatgagcctactgaagtcatatgagggtgggagagaaagtcatgctcactttgttgtcaagtccctttttgaggagtatctctatgttgaagaattgttcagtgatggaattcaggatgtgattgagcgtctgcgccttcaacatagtaaagacctacagaaggtcgtagacattgtgttgtcccaccagaaaactaagctgatactaaaactcatggagagtctggtctatccaaatcctgctgcctacagggatcaattgattcgcttttcttcccttaatcacaaagcgtattacaagttggcacttaaagctagtgaacttcttgaacaaacaaaacttagtgagctccgtgcaagaatagcaaggagcctttcagagctggagatgtttactgaggaaagcaagggtctctccatgcataagcgagaaattgccattaaggagagcatggaagatttagtcactgctccactgccagttgaagatgcgctcatttctttatttgattgtagtgatacaactgttcaacagagagtgattgagacttatatagctcgattataccagcagcctcatcttgtaaaggacagtatcaaaatgaaatggatagaatcgggtgttattgctttatgggaatttggtgacaaaagatggggtgccatgagaatagccaaacttcccttgatactaaaggataatgtaaccgatctgcatgcctctggtgtgaaaacaataagtttcattgttcaaagagatgaagcacggatgacaatgcgtcgtaccttcctttggtctgatgaaaagctttcttatgaggaagagccaattctccggcatgtggaacctcctctttctgcacttcttgagttggacaagttgaaagtgaaaggatacaatgaaatgaagtataccccatcacgggatcgtcaatggcatatctacacacttagaaatactgaaaaccccaaaatgttgcaccgggtatttttccgaacccttgtcaggcaacccagtgtatccaacaagttttcttcgggccagattggtgacatggaagttgggagtgctgaagaacctctgtcatttacatcaaccagcatattaagatctttgatgactgctatagaggaattggagcttcacgcaattagaactggccattcacacatgtatttgcatgtattgaaagaacaaaagcttcttgatcttgttccagtttcaggatacatgaacttgttggtgcaagaatgcaccatctttctgtatgccaatgggaagtgaaacttaagttggactgcgatggtcctgccagtggtacctggaggattgtaacaaccaatgttactagtcacacttgcactgtggatatctaccgtgagatggaagataaagaatcacggaagttagtataccatcccgccactccggcggctggtcctctgcatggtgtggcactgaataatccatatcagcctttgagtgtcattgatctcaaacgctgttctgctaggaataatagaactacatactgctatgattttccactggcatttgaaactgcagtgaggaagtcatggtcctctagtacctctggtgcttctaaaggtgttgaaaatgcccaatgttatgttaaagctacagagttggnatttgcggacaaacatgggtcatggggcactcctttagttcaaatggaccggcctgctgggctcaatgacattggtatggnancttggaccttgaagatgtccactcctgaatttcctagtggtagggagattattgttgttgcaaatgatattacgttcagagctggatcatttggcccaagggaagatgcattttttgaagctgttaccaacctagcctgtgagaagaaacttcctcttatttatttggcagcaaattctggtgctcgaattggcatagcagatgaagtgaaatcttgcttccgtgttgggtggtctgatgatggcagccctgaacgtgggtttcagtacatttatctaagcgaagaagactatgctcgtattgggcacttctgtcatagcacataagatgcagctagacagtggtgaaattaggtgggttattgattctgttgtgggcaaggaagatggacttggtgtggagaatatacatggaagtgctgctattgccagtgcttattctagggcatataaggagacatttacacttacatttgtgactggaagaactgttggaataggagcttatcttgctcgacttggcatccggtgcatacagcgtcttgaccagcctattattcttacaggctattctgcactgaacaagcttcttgggcgggaagtgtacagctcccacatgcagttgggtggtcccaaaatcatggcaactaatggtgttgtccatcttactgtttcagatgaccttgaaggcgtttctaatatattgaggtggctcagttatgttcctgcctacattggtggaccacttccagtaacaacaccgttggacccaccggacagacctgttgcatacattcctgagaactcgtgtgatcctcgagcggctatccgtggtgttgatgacagccaagggaaatggttaggtggtatgtttgataaagacagctttgtggaaacatttgaaggttgggctaagacagtggttactggcagagcaaagcttggtggaattccagtgggtgtgatagctgtggagactcagaccatgatgcaaactatccctgctgaccctggtcagcttgattcccgtgagcaatctgttcctcgtgctggacaagtgtggtttccagattctgcaaccaagactgcgcaggcattgctggacttcaaccgtgaaggattacctctgttcatcctcgctaactggagaggcttctctggtggacaaagagatctttttgaaggaattcttcaggctggctcgactattgttgagaaccttaggacatacaatcagcctgcctttgtctacattcccatggctgcagagctacgaggaggggcttgggttgtggttgatagcaagataaacccagaccgcattgagtgctatgctgagaggactgcaaaaggcaatgttctggaaccgcaagggttaattgagatcaagttcaggtcagaggaactccaggattgcatgagtcggcttgacccaacattaattgatctgaaagcaaaactcgaagtagcaaataaaaatggaagtgctgacacaaaatcgcttcaagaaaatatagaagctcgaacaaaacagttgatgcctctatatactcagattgcgatacggtttgctgaattgcatgatacatccctcagaatggctgcgaaaggtgtgattaagaaagttgtggactgggaagaatcacgatctttcttctataagagattacggaggaggatctctgaggatgttcttgcaaaagaaattagagctgtagcaggtgagcagttttcccaccaaccagcaatcgagctgatcaagaaatggtattcagcttcacatgcagctgaatgggatgatgacgatgcttttgttgcttggatggataaccctgaaaactacaaggattatattcaatatcttaaggctcaaagagtatcccaatccctctcaagtctttcagattccagctcagatttgcaagccctgccacagggtctttccatgttactagataaggtaattagcttactgatgcttatataa

SEQ ID NO: 1167 - DNA, 4997 bp, Oryza sativa
  N_region (3713)..(3713): n = any nucleotide
  N_region (3765)..(3765): n = any nucleotide
  N_region (4190)..(4190): n = any nucleotide
  N_region (4195)..(4195): n = any nucleotide
  N_region (4220)..(4220): n = any nucleotide
atgcgctccccttgcttcttgaatcacggaggttcaaggacagacggtacagaggtttgtgttttcttgctgagatttctctttcattgcgctccctttgctctccggatcgtggagcgagatcccatcgctcgggtatggattgagccctctccgcttgtatggtgtcttctccactgatctccatacatccagatctacagtagatcggccctgggaaggggcttttgacgcagatcggttctaccctcggcgccggatcgattccgccgcccaatttggcgctgatccgcgggtgggtcgcatccgccgcacgatacaatcgagaagctgtgtgttttcgtgtgaaatctgtggagttgttagagattggaggtctgaggtggtttgtgtgatccggattttctctgcagccggcggtggttctgggctcgattcggtggtcggatcaacgctcctgctcagcagtggtagtgacaggcctagtgcaacggatgcaactgaatcagtacaaggcttagatggagaggagactttgtccgagagggcatcggttggagcggggcaaggaccaagttcacagaatgggggtgggaaggaggagccttcgagcagttcatctgcagggagtaagaggaagcgtactagcttgagttctgatagagtggaacttaatgggctagatgcggcaggaaccagctcaggcgattccacatggagcgaagatagtttcaatggccgtcacggacgttcattgccaagaaataaggatggccacttagagcattcagttaattcaggtgaagttgcagtgatcaggcagcctcgtggtgtattgaggttaaggaagctggctcagaatgttagtatcaagagtggtaccggaggtcgcaaggttctgcgatccaatggcattacgaaagctactcaggtccagaggaggaagcggaggaaatcacagactcttaaggagaacagagttggtagtaatgaccctatcaattgcttgaaagttgagaatggcacttgtgaccaggacaacagtacaaacttctgttctgaaaatgatgtctcagtcgaaaagcagccaaatctttcaggtgaaccatcaaaacatgtccatcctaccaaggaaagctccgtgcatgttcaagaggaggataatgttaatttggaagaaaatgctgctaggatgctctgttctctatcagataatatgtgtgctagctcactgaggaagagtgcaaaatcactgaatagatcatcaaaagcatactttgtccagcattcagaacatttcaaggattcatgtaacaaagacaagggcatggcgggtcctgctaggttgctacggaatcgtgatggcaaagcttcatccaagaagcgtcgcccacgtcggcatttttatgaagtcagccctcatgatgtggatccgttttgcattgtaaaagagagaatccgggtgttttggcctctggatgagatctggtactttggcctggtaaaggaatatgatcccatgacaaggttgcatcatgtcagatacgacgataaagatgaggaatggatcaatcttcaaaatgagaggattaagcttctccttttgcccagcgaagctcggcataaatctaatcgtcgtaatccaaggtcgatattcaaaccaaaatatgaagtggatgagagggaagacattgatagaaacagcacaggaagttctgagtcaggccccatcatctcattgctgtctagatcaaaccatgcaaggtctgctacatccagtaatacgaataagcagaatcacactcattcagatatttctcctgttatgtttgatcaaaagcagtctatgctgtgctctgatgatagacctggtggttcacctgcaaatgcgggtgaggagatccctgaagacaggactacgcttaaagatagcaggtttcgctttgtttactcaaggaagcgatcttgcaggagaaagaatggatttctcaacacttcagaacaagattctgatcttaaatacagaaaagttacaggtgcgttgtttgcttcagttgctggctgggggtctgttactgaaaatgttacttcgagaagacatggcatattagtactgagccagccattaaaatctatttataagatcatgtctgaagcatgccatgtctggcttctcaatgctcttgttctccttcaccgtggtgcaatggtttccttgtggcctgccgtacatctggagatacttcttgttgatgatactttaggattgaaacacttgcttcttgagacttccttaagatcagctgtatccttattctgtttacttgttggatgtttcaattcgtattccaaggcgagtacacgcaatgagtcaaaaatgctatgcacctcagtcagagttcggatatctggtttgcacggtagaagccaagttgtgtttttgatgttcagcttcgtgggggtaaagtaccccaaatggaagcacctgcaaggacagctgcagcatcaccatataaaaagggggctatctaaagttaattgcgcatgtgctgacataaagcaacttacaaatggaactgatcaaagagtctgtacttcaacagaacacttctctaagagggtctatcactcgatgctcaggactctctgtttttcacagaatcaaaatattcaaatgtcgaccctatcattttttgtcttgatgagcgaagtaaatctgttcaaaatcatctggatgtggcagctgcaccttcactgttgttttttcaccacttaaaattgcgcagtgaaagcaacttgacttctaaaagtcttccggaattcatgccgattactttagaagaggatcagcagtctctgccacagcacacatctgatctggttcatctggctgcttctgcttctgaagtttgttctgtttatgttagtccatctaatactggttccttggatatgggtaccgctggttgcatcaatcattctggttctgctagcagcaagctcaatactgctaaaaggactgtaagtctggattgtaatagcagaggtattggtggtgccaacataacaagcaggagttttccagatcaaattatggatggaagcctttctgctgtttgccctcctcagaagtatcaaaagaggtgttcttctatatctattcctggagataatatatcagatccaccagatgataagctacttaacaaagaagaaaaggccatgcagcctacatctgacttggtccaggaactgaatgagtatcctattggtcgtgttacaccaactgcccccaggactccctaccatcggaaccgatttacatccctatcacgcacttttggtgatggttcaaaattatggcaagaagatattatggtgacaggctttgctggtggctctaagaagccaaggactcaggttttgtactcggtttctcctagaagtgatgaacctggctcaaaacacaaaggacatttccgcaagatacagtctcatagcagtgcaaagagacttcctgataattcaagaagtgaacagagcagtcctgagtcattggcttgtgttgcaaatgtcctagttacagttggtgatagaggatggagggagtacgatactcagatcacaattgactctgatgggcagattgaacggaggatttgtgtgaagcttgcagaaggaactaagtatgctcacaaagttcttcaagtttngcagcctggggcgacaaaccgctatacacatgcaatgatatggaaagggggnacagagtggtgcttagaatttcctgacagaagtcagtggttgattttcaagcaaatgcatgatgaatgttatagtcataacattagagctgcatctgttaagaatattccaattcctggtgtctgctttgctgaagctcatgatgatcatgatgctgtatcctttgtacgctctcaagattatattggtcatattggaacagatgttgaaatggcacttgatgaatctcgtgtgatatatgacatggacagtgatgatgaagtgtgggtttcaagatggaggaaactaggcaaggacagcacctctgtgacagatgacttgtttgagaggatcatggacaaattcgagaaacttgcttatagccacaactgcaatgaactcactattgatcagatgaaggaactagatagtgataacataccacntggancaccattaagtgatacatgattatnggcaggacagaggaagaaaagggaatgccactcattcgacactttcagcattttcagtccgctatgtggaagatccacgagcagcagctacaggaatgggaatcaacagcactcagaatacagggttcatcaaatggttaccaagttaagttgcctccaaaacctgccttgttcgccttctgtttgagacctcgaggactccaaccccaaataccgtataagggaccgaagcagcgttcccataaaaaacttatgtcctcaggaagcttttcgagagagcaagatggcttttaccgaccagcagggtactctcccaggttctctgtgaaaacagaatcccctcgcgcatttgatggtttggaaagatgttctacaccaaggtttttgagaaccaacagtgtcaaaaggactgcaagctttgcattctctgaggatcaccagccatcaccttccttccgtcatcagagagtgaagcgaggcgcgcctgatcactggaacgcggtcatccacgaatggcagagctcaaagcacctgctcccgggtgcgtcccagagcccccgcgtcgacatagaggagctcaagcagcgagatgcctccagtgcagcgcagcatgcggtggccatggccaagctcaagagagagaaggcccacctgctgatgcacaaggctgaccttgccctccacaaggccacagttgctctcatgatggccgacgcgatcaaggcgtccagcagggactcttcccgggatgggaggagagatttcagggacgactga

SEQ ID NO: 1168 - DNA, 4483 bp, Oryza sativa
  N_region (2310)..(2310): n = any nucleotide
gttggttctcatgtttgggtcgaggacccaattctagcctggatagatggagaggttgttagcataaaagacaatgaagttcatgtgcagacttcaaatgggaaaaagtcaaaagttttccccaaggatatggaagctccaccaggaggagtggacgatatgacaagattatcatacttacatgaacctggtgttctacagaatcttgctacccgttatgagctaaatgaaatatatacttacactggcagcattttgattgcggtaaacccatttcaaagattgccacatctctatgatacccatatgatggaacaatacaaaggtgcagattttggggagctgagtcctcatgtcttcgcagttgcagatgttgcttacagaatgaagggaaaagcaactctatattggtcagtggtgaaagtggtgctggcaagaccgaaacaacaaagatgcttatgagatatctggcacacttaggtgggcgatcaggagtagaaggaagaactgtagaacagcaagttctagagagtcaaacccagttcttgaagcttttggtaatgcaaagactgtgcggaacaataactcgagaagtcgctttggtaagtttgttgagatccaattcgacaagactggacgcatttcaggagctgctatcagaacttacttgctggaaagatcccgtgtatgccaaataaatactccagagagaaattatcattgcttttatttcctttgtgctgcacccccagagcagaggtataagttggccgatgctagatcctttcattacctcaatcagtcaagctgtattgaagtagaaggaattaatgatgctgaagaatatttagcaacaagaagggccatggacatagttggaatcaatgaggaagagcagcaggaagctatattcagggttgtagctgctatacttcatcttggaaatataaattttgctaagggaacagaaattgattcatctgtgatcaaggatgacaaatccaggttccaccttaacactgcagcagaactgttgaactgataacacgagtaatagttactcctgaagaaattataactagaacacttgatcctgcttctgcacttgttagcagagatgcattagcaaaaacaatatactcccgattatttgattgggattgtggagaagatcaatgtctccattggacaggacccaaactcaaaacagttgattggtgttcttgatatatatggttttgagagtttcaaaattaacagaacagttttgagcagttgtgcatcaattatacaaatgaaaagctgcaacaacattttaaccagcagcatgtgttcaaaatggaacaagaagaatacaccagagaggagataaactggagttacatagagtttgttgataatcaagatgtgttagacttgattgagaagagaaaggtggtttgatcgcacttctggatgaagcatggtatgtttcctagatcgacacatgagacgtttgcgcagaagttgtatacaacatttaagaataacaaacggtttgccaaaccgaagctttcacgcacagattttacaattgttcattatgctggtgatgtgacgtaccaggctgattttttcctagacaagaacaaagattatgtagtggctgaacatcaggatttgctgaatgcttcttcttgtcctttcgtagctgctttatttcctgcactccctgaagagactgcaaaatcttcaaaattttcatcaatcgggtcacgtttcaagagctgcaacttcaatctctcatggagaccttgagctcaacagaaccccattatattagatgtgtgaagccaaataacctcctaaagccagccatttttgagaacacaaatgttatacaacaactgcgatgcggaggtgttcttgaagctatcaggatcagctgtgctggatatcccacaaggaaaacattctatgaatttgttaatcgctttggtgttcttgctcctgaagttctagaaggaagagcaatgatgataaaattgcatgccagaagattttggaaaaaatggggctggagaactaccagcagatcggaaaaacaaaggtatttctgagagctggacagatggctgatctggatgcacgaagagcagaagtgctaggaagagcagcaagaattatacagagacaaatctctacatatatcgcacggaaacagtttgtttcgctcagaagatcagcaacacagctacaatctttcgttagagaccttggcgcgtaaattatacgaatgcatgaggcgggaagcatcagctagtgaagatncaaaagaatgttcgtcgtcacaaagctcgcgtgtcttatttacaactacaggaggctgcaatcacgttgcagacaggattaagggcaatgtctgcccgcaaagagttcagattcagaaaggaaactaaagcagctgtccatatccaagctcgatggcgttgccacagagactatgcacattacaagaatctgcaaggagcagctcttacttatcagtgtgcatggagacaaaggcttgcaagaagagagcttagaaagctaaaaatgagagaaacaggggcccttaaggaggccaaggataaacttgagaagcgtgttgaagaactgacatggcgccttggactggagaagcggttaagggactgaccttgaggaagcaaaagcccaggaaattgctaagctgcaagagacattgcatgatatgcaacagcaagttgaagaagcaaaggctatgattgttaaggaaagagaagcagctagaaaggcaatagaagaggcacctccagtaatcaaagagacccctgtattggtcgaagacacggaaaagattaactcactgacagcagaggttgaacaactgaagaggctttgctgcaaacagaaaggcaagcaacagaaactgcaaagaaagaatatgctgaagctgaacggagaaatgaagaactaatcaagaaatttgaaggtgcagagaaaaagattgagcaacttcaggatactgtcccagagaggctggaagagaaagcaactaacatggagtctgagaacaaagtgctacgtcaacaggctgttgctatttctcctacggcaaaatcattagctgcatatcctaagtctcccttccagatatcacccctatctcactcaaccctaaagagcctgagactgaggagaagccacaaaaatcactcaacgagaagcaacagcaggaaaaccaagatatgctgatcaaatgtgtatcacaagatctaggtttctccagtgggaggcccattgctgcttgccttatatacagatgccttctgcattggagatcatttgaagttgaaaggactggtgtttttgaccgtataattcaaacaataggcactgctatagaggcatattggctctccaattcatccacattactcctactattacaacgaacactgaaaacaactggagcagctggactcacacctcagaggcgaagatcttctgctgcatcatttgggcgggtgttctcggagcttcaccacagagtgctggccgtccttttctggctagccgcttgatgggaggaataggtgatcttcgtcaagttgaagccaagtatcctgctctgcttttcaagcagcagcttacagctttcccttgagaaaatctatggcatgataagagacaacttgaagaaggaaatatccccattacttggtctttgcatccagcaggcgccgagaacatctcgtgctagtctaattaaaggatctcgttctcaagcgaatgccttggcccaacaaaaccctgattgcccattggcagagcattgtgaaaattctaacgaactaacttgaatgttctgaaagccaattatgtacgtcccttcattcttaatcagcaaggtgttcactcaaatcttctcatttattaatgttcagttgtttaacagtagtctgcttcttcgacgagagtgctgttcatttagcaatggagaatatgtcaaagctggactggcagaattagagcagtggtgtatttatgcgactgaggagagtatgcaggttcttcctgggaagaattgaagcatattaggcaggctgttggattccttattcatcaaaagccaaagaaaacactgaaagaaattaccaacgatttatgccctgtcctaagcatacaacagctataccgaatcagcacaatgtattgggatgataaatatggaacccatactgtttcgtcagaggtcatctcaagtatgaggataatgatgacagaagactcgaataacgcagtgagcagttctttcttgctggacgatgattcaagtgattgcagcattccgttttcggtggatgatatctcaaagtcaatgaaagaaattgaggtaacagatgttgacatgccgcctttgatcagggagaactctggctttaccttcctacactaaagaaaggactatcaagagtggtga

SEQ ID NO: 1169 - DNA, 4345 bp, Oryza sativa
atgccatttccatttttgtgctgttttgcagagaaaaagatagcatcatatctcagtaaaattggccaaaagtttctttgggtgtatcgctcgtatggaacctatgtggctttcctcacaattcttttgactctctacttggtgactcctaattatatatcctttggttacctttttttccttctggtttggataattggaaggcaacttgtcgagaagacaaagagacggctttggtttccactaaaagtatatgccactttggttttcatctttacatactgccttagtgtgtcacccctttttgcagggttagtctcaaaatttgttaaactatatcctgatctgggatttgatcccgaggcctcgctgttgatgaatgtttggcaatcattggctgttctagtagtaatgcaactttatagctatgaaagacggcagaatagtgacaagaactttggtgtatctgatgcttctgaatctgggcttctggggttcctaaggagattgttaatttggcatagtgagaagatattatcagttactgtgttctatgcttgcctatcatcaatcagtttatctggcctaatttatcttttaggtctcattatgttttccattttacctaaagtttctcgaattccttccaaggtttaccttgtttacactggtttacttgctacatcagaatacctatttcaaatgttatgtgaacctgctcaaatgtgtcctggtcagcagttccatggcttgtctgtctttcttggtttgaagcattatgatgctggattttggggtgtcgaatatggtcttcgaggaaaagttttggtaatcgtggcttgcaccattcagtataatgttttccattggttggatttgatgccaacatctcttttacatgagggcaaatgggaagaaccttgccagctctttatctctggtgatacatcttctaacgctagggacaataacaaggatagtcattcatcaaataggtttagttcattgttttcaaaagttcaaggtctgattggtagcagctcaagttcatctctgagttcagggagcacttgtcagacatcagaacctgtccagaatgagacaagcggctcagatgagggcaaaagatactcattttcaaagatttggggaatgtcaaaagaaagccacaagtgggataagagaaagattatttccttgagaagagaaagatttgaaactcagaagacaacctttaaatgctacatgaaattctggatggaaaatctctttaaattgcgaggtcttgaaattaacatgatcgtgttactattggccagctttacattgttgaatgttatatcaattttttacatcacatgcctcgttgtatgtattcttatgaacagagatcttatccagaaactgtggcctctttttgttgttctctttgcttcggtcctactactcgagtactttgctctttggaaggaaggaatgccctggttacacagtatcaatgacattgaagttcattgtcgcgaatgctggaaaaattcaaggattttctttgcatattgctcaaaatgttggctgggacgatcctcgaatgctcattagctactatattgtcttcattttttcctcttttaagttacggtccgatcgtttctctggtttctcagactcagatacttatcatcagatgatgtcacaaaggaaaaatgcattagtttggagggacctctcattggaaacaaaaagtttctggacttttcttgattatatacggctttatgcttattgccatttattggacatagttttagcattaattgctattactggtacgctggagtatgatgtgctgcaccttggttatcttggatttgctttggttttcttcagaatgaggcttgaaatattgaagagaaaaaataaaatattcaagtatctgcggatgtataattttgcgcttattgttttatcacttgcttatcaatctccttattttgggcaatttagctctggcaagtgtgaccaaattgactatatttatgaaattattggattttacaagtatgattatggttttaagataacatcacgatcagcttttgttgagatagtgatcttcttattggtgtcaattcaatcatacatctttagttctggtgaatttgattatgtatcaagataccttgaggctgaacaaattggtgcgatggtccatgagcaggagaaaaaagctttgaagaaaactgaacagctccaacatcttcgaaggtccgaggagcaaaaacgtgagcggaacatgcaagtggaaaggatgaaatctgagatgtacaatttacaaagtcagcttaatcgaatgaattccttcaccccaatcaacaatgcatctcacagtgaaggcttacgtcacagggagatcactgaggtcgaagaaaatgagggcaaagtgaatcataatttactaaaactgcagtatggaagaggggcagttaaggaaaacccactaaaatctgctgtgcaattaattggtgatggtgtctcccaagttcagtcctttggaaaccaggcagttacaaatattgtgagcttcttgaacattgatccagaagaaccacattccagtgatcatcctgcagaagatgacatttatgatatggtagaaagtcagagggaaacacatgatggccagttgttaagaacacattcagttacctctggaaatggcacaaaatcgtctgcaaacatgccgataggtgtaatctttcggtatatatggtatcagatgcgaagtaattatgattatgtttgctattgctgtttcgttctggttttcttgtggaattttagcttgctatccatggtttaccttggagcacttttcttgtatgctctttgtgtgaactatgggccaagttacctgttttgggtcattgttctgatctacactgagctgaacattctctcacaatatatataccagattgtcattcagcactgtggtttgaacatacatatacctcttctccagagattaggttttccggatgataaaataaaggcatcatttgttgtcagcatattgcctctctttctggtgtatatatctaccctcttgcagagttccataacggctaaagatggtgaatgggttcctgtaacagagttcagctttctaagtgcaagaaataatgtagaagagaaacaacgtatgccttacaattggagagataggctaaaaaatattcacttgcctgtaatgaatcttataaggatgattgggagaggcatatctagatattggttgtcactaacacaaggggcagaatctcctccatattttgtgcaagttacaatggaagtaaaccattggccagaagatggaattcaaccagaaagaatagagtcagcaataaacagggtccttgctatagctcatgaagaaagatgtcaagccaactcgccttcatcttgccattcttgtagtcgggttcggattcaaagtattgagcgaagcaaagaaaactctagtatggctcttgctgtcctagaagttgtctatgctgctcccttggactgccaatcagcaggatggtacaaatcactcactccagctgctgatgtagagaaggagattcatgaatcacaaaaggcaggactttttgaagatgtaaattttccttacccagtagtctctgtgattggcggtggtaaaagggaaattgatctttatgcatattattttggtgctgatttggcagtattctttcttgttgccatgttctatcaatctgttcttaaaaacaaaagtgaatttctggaagtttaccagctggaggatcagtttcccaaagagtttgttttcatcctaatgtttttcttgattgtggttgatcgcatcatatatctgtggtcatttgccacaggaaaagtcattttctatcttttcaacctagtgcttttcacatactctgtcactgaatatgcttggggaatggagctagtgcacagaaatgttggaggatttgttctacgtgcaatctatcttacaaagtcgatttccttggcacttcaagctttacagattagatatggtattcccaacaagagtaacttgtatcgacagtttttgacaagcaaagttacacaagtaaattattttggtttccggctttaccgtgctctgcccttcttgtatgagctgcggtgtgtgcttgattggtcatgtacaactacatcattaacaatgtatgattggcttaaggtacatctatacttgatcttccccaaactatcatggttgtttcaaaatattttgccatattaccatataggtctgcacgttgaaatttaa

SEQ ID NO: 1170 - DNA, 4066 bp, Oryza sativa
atggggtcgctcaccagggcggaggaggaggagacggcggcggccgaggagtggtcgggcgaggcggtcgtctacgtcaacggcgtccgccgcgtgctccccgacggcctcgctcacctcaccctgctccaatacctcagagggtcttcctggaacaaagcttggatgtggtgaaggtggctgtggagcctgcactgtgatggtctcatgctatgatcattttgcaatcaacgcatgcttggctccgctttattctgtggaaggaatgcacataatcacagtagagggaattgggaatcgtcagcgaggtttgcacccaatccagcaggaacgtttagccatggcccacggttcacaatgtggattttgcacccctggttttgtgatgtcgatgtatgcattgctgagatcaagtgaacagcctcctactgaagagcagattgaagatagccttgcaggaaatttatgtcgctgtactggctacagaccaataatagacgccttccgtgttttctcgaaaagagatgatcttttgtacaacaattcatctctgaaaaatgcagatggccgacctatctgcccttcaacaggaaaaccatgttcctgcggagatcagaaagacatcaatggtagtgaatcttcattattgacacctacgaaaagctactcaccttgttcatacaatgagattgatggaaatgcgtacagtgagaaagaactcattttccccccagaacttcagttgagaaaagttacgtcacttaaattgaatgggtttaatgggattcggtggtatagacctcttaaactaaagcaagtattgcatttgaaagcatgctacccaaatgcaaaactaatcattggtaactctgaagtaggagttgaaacaaagttcaagaatgcccagtataaggtcttgatctcagttactcatgttccagagcttcatacccttaaagtgaaagaggatggtatacatattggttcttctgtaagacttgcacagctccaaaatttcctcagaaaggttattttagagcgtgattcacatgaaatttcatcctgtgaggcaatactgcggcaattaaaatggtttgctgggacacaaatcaggaatgttgcttctgttggaggtaacatttgtactgctagtccaatatcagatctaaatccactttggatggctacaggtgcaacgtttgagataattgatgtgaacaataatattaggaccattcctgcaaaagatttttttctgggttatcgtaaagttgacttaaaacctgatgagatattgctctctgttatactgccatggacaaggccatttgaatttgtcaaagaattcaagcaggcacatagaagggaggatgacattgcgttggtgaatgctggaatgcgtgtctatataagaaaagttgaaggtgattggataatttcggatgtttcaattatctatggaggggtagctgcagtttcacaccgtgcttcaaaaactgaaacctttctcactggaaaaaaatgggactatggattgttggataagacttttgatctgttgaaagaagacgtagttctggctgaaaatgcacctggtggaatggttgaatttcgcagttcacttactttgagtttctttttcaaatttttccttcatgttactcatgaaatgaatataaaaggattttggaaggatggattacatgcaaccaatctttcagccatacagtctttcactagacctgtcggtgttggaactcaatgttatgaattggttagacaaggaactgcagttggccaacctgtggttcacacatcagctatgcttcaggttactggtgaagcggaatatactgatgacacaccgacaccccccaataccttgcatgctgctctggtgctgagtacgaaagctcacgcacgcatattatctattgatgcttcacttgccaaatcttcccctgggtttgcgggtctcttcctttcaaaagacgtgcctggcgctaaccatactgggcctgttatccatgacgaggaggtttttgcatctgatgttgttacatgtgttggccagggacttgttgtggcagatacccgtgataatgcaaaagctgctgcaaataaagtcaatattgagtattctgaacttccagcaattttatccatagaggaagctgtgaaagctggtagctttcatccaaatagcaagagatgcctagtaaaaggtaatgttgaacaatgttttctgtcgggtgcatgcgatagaattatagaaggaaaagtacaagttggaggtcaagagcacttctacatggagcctcagagcactcttgtatggccagttgattctggaaatgaaattcatatgatttcatctacccaggctccccagaagcaccaaaagtatgttgctaatgttcttggtcttccacaatcaagagttgtttgcaagactaagcgtattggtggtggatttggtggaaaagaaaccagatcagcaatatttgctgcagcagcatctgtagctgcttattgtttaaggcagcctgtaaagcttgttttggacagggatattgacatgatgacaactggacagaggcacagtttcctagggaagtacaaggtgggatttaccgatgatgggaagatattggccttagaccttgatgtttataacaatggtggtcattcacatgatttgtcccttccagtcctggagcgtgctatgtttcattcagacaatgtctatgatataccaaatgtcagagtcaatgggcaagtatgtttcacaaatttcccaagcaatactgctttcagaggttttggtggtccacaagctatgctgattgcagagaattggattcagcacatggctacagaactcaagcgaagtcctgaggagataaaagaacttaattttcaaagtgagggatctgtgcttcattatggccagttgcttcaaaattgtacaatacattcagtatgggatgaactaaaggtttcttgtaattttatggaagctcgcaaagctgtaattgattttaacaataataaccgttggagaaagcgtggcattgctatggttcccaccaagtttgggatatccttcactacaaaattcatgaatcagttagtgcaagtttacactgatggaactgtccttgtaacgcatggtggggttgaaatggggcagggtttacacacaaaggtagcccaagttgcggcttcatcattcaatatccctcttagctctatatttatctcagaaacaagcactgataaggtaccaaatgcaacaccaacagcagcctctgctagttcagatttatatggtgctgcagttttggatgcttgtcagcaaattatggctcggatggaacctgttgcttcaagaggaaaccacaagtcctttgctgagttggttctagcatgctacctggaaaggatagatctctctgctcatggattttatatcactcctgatgttgggtttgactgggtgtctggcaagggaactccattctactatttcacatacggagcagcatttgcagaagttgaaattgataccctaactggggatttccacacaaggacagtagatattgttatggatcttggctgttcaattaatccggctattgatattggccagcagattgaaggaggttttatccaaggattaggttgggcggccctggaagaactaaaatggggggatgataaccacaagtggattcgacctggacatcttttcacttgtgggcctggctcttacaaaataccctctgtaaatgatatacctctaaacttcaaggtctcacttttgaagaatccaaaggtcattcactcatccaaggctgtaggagagccaccgtttttcctcggttcagccgtcttgtttgccataaaggatgcgatatctgccgcaagagctgaggagggtcacttcgactggttcccactcgacagcccagcaacaccggaaagaataagaatggcatgcgtggattccatcacaaagaaatttgctagcgtatattaccgtcccaagcttagtgtatag

SEQ ID NO: 1171 - DNA, 3780 bp, Oryza sativa
atgtgggatgagaaggaaaggccccgggtcttctgtctagcaccacaagatggagaagctgtctggtggttagcgatggaagatcctgaaattactggtcagcagtcaccaaatgccacaagtattgtgacggatctcatggatttggatgacattattgttgagggcaatgaggtacagtttgctatggatgtggatttgagagcaataccatctctgaaagatggagggcacacagacccactggtacaaatcccaggtgacatgtctcatatggatgtggatttgagagtgataccatctctgaaagatggagggcatgcagacccaccagtacaagtcccagttgacaagaggattgcaagcctagagaagctctgtaaagaagcatcaagatcatttttcagggaaactaggctagttagccatcagataaactcctacaatgattttgtctctcatgggctccaaaagatgtttgattctctcgatgaagttactgtcgagcctgactatgatccttcaaagaaagtaggcccctggaggcacgcgaccatcaagtttggtcgagtggagcttgaggagccggtgttttgggtcgacaactgtgatcttgatgtggaaacactcaaactgaagcctaaacatgctcgcctccagaagatgacatactcttcaaagatgaaagtagaaatgactgttcagttctattcactccacaaaagcgacaaagctaaaactggcgaggacccatatatacaaagaaaagatataatgaaagagactaaatgggtcactattggcaagttacctgtcatggaaagcgaatgcgagtatgattttggtggatattttcttatcaagggaatggaaaaggtattcgttgctgaagagcagagatgcctctccaggatttggatcaatgacagccccacctgggaggcttgttaccaacggtctcaaatccgacgagaaaagatctctataaaacctgttcagtctaatgatggtttcagaaaagtcattaacctgtactttttgggtgcaactataccaatctggataatgttttttgcactaggtgtatcatcagacaaagaagcttttgatattattgacatacaagaatgtgatgcttccatggccaacataatatcagctactataactgaatctcatgagcagtgcgaaggctttcagagagaagggagagccagtgaatatattgataagttgatcaggaatacaaagtttccaccaaaaggatcctttgatgagtatattggtaggcatatgtttcctgatgttagtgggaataggagcaaagcactcttcttgggatacatggtgagatgtcttctattggcttcctctggcaatcggaagagtgataatagggatgatttccgcaacaagaggctggatttggcatgtgaattgctccagagagagctatgggtacatattatgcatgcccagaaacgtatggtcaaggtcatgcagagacatttgagtggtgatggtgacctacaacctcttgagtgttatgtccatgcatcaattgttaccaatggtctcaaccgtgccttctccactggttcctggtgccatccatttaataaaagagagaggtgttcagggattgttgcaacccttaggagaacaaatcctcttcaaatgatgtctgacatgaggaagacacgacaatgggttgcatatgctggaaaggctggagatgctagatatccggtaaggaatccatcatattggggaaagctatgtttcttgtccactcctgatggtgaaaagtgtggatttgtgaaaaatcttgccattactgctatcgttagttgtttggcaagggagccctcggttgacgcacttgtttcttgtgggatgaagaaactggatgaactgcttctacaagagatcagcgggaaagacagaatcttcttgaatggaaacttggttggagtttgtgcagactcagtcgagtttgttttgcacttaaggagcatgagacgcaggaagcaaattgatgcacaggtggagatcaaaagggacaagcaaaacaaagaagttcgtatattttccgatccaggaaggattctaagacctcttcttattgtcgaaaatctacgaaacatcatgaatcgaaagaatggatcatactccttccaggaacttatggatcaaaatataattgagctgattggtgttgaagaagaggaggatatccggtgtgcttatggaattaggcatctctttgcaggggacgaagaaaagaatttctcattctatactcattgtgaacttgacccttctttcttgctaggattgagttgcagtatcattccctttgccaaccatgatactgctaagagaattctaatgcaagctgaaaagatatcgcaacaggctattggctactccactacgaatcctctctttagagttgatacacattcccatcagctctattatccacagagacctctgttcaaaactgtagctgctgattgtcttggtaagagagactatacatctggaagcaaacatgactttgccagaccagagtatttcaatggccaaaatgcaatagtctcaatcagtgtccatcagggatttaaccaagaggattctttggtattgaatagggcctctttagagcgtggcatgtttcgaacacaacattttaagagctataaagcactgatagaaaacaaagagatcaccaaacgattaaaacacaaggaaaatatcaattttggaaaaactcctagcaagaaaggcctggttgacagtttagatattgatggcttaccatatattggagcaagtcttcagagtaatgacattatcattggaaaggtctcagactctggtgaagatcatagcatcaagctgctacatactgaaaaaggaatagtggagaaggttgttctttcagctactgatgatgggacaaattctgcgtttgttactctaagacagactcgctcgccacgcattggagacaagtttgccagcatgcatggccagaaaggagtcattggcttcttggattcccaggagaacttcccttttactcaccaaggcatagttcctgacattgtgatcaatccccatggctttccaactcgtcagactcccggccaacttcttgaagctgcactaggcaaaggaatcgccctcggcggtgccacccggtatgcgacaccgttcacaagtccatctgtggaagtgatcacagagcagctgcacaaggctgggttctccaggtggggaggggagagcgtgatcaacggccgcaccggcgagcgtgcggcgtcgccggtgttcaccggaccgacgttctaccagcggctccaccacatggccgaggacaaggtcaagttccggaacaccggcccggtgcacccgctgacgcggcagccggtggaggaccgccgccggtacggcggcgtcaagttcggcgagatggagcgcgactgcctcctcgcccacggcgccgccgccaacctccacgagcgcctcttcctcctcagcgacgtgtcgcgcctccacgtctgccgccgatgccagcgcgccgccgtcgtcgtgtcgcccgccgtcgccgccgacggcggcggcggccgaaaggtgagggggccgtactgcaggttctgcaggtcggcggaggaggtggtgagggtgagcgtgccttatggcgccaagatcctctaccaggagctcttctccatgggcatctgcctcaagttcgacaccgagctcatctag

SEQ ID NO: 1172 - DNA, 3669 bp, Oryza sativa
  N_region (14)..(14): n = any nucleotide
  N_region (22)..(22): n = any nucleotide
  N_region (27)..(27): n = any nucleotide
  N_region (87)..(87): n = any nucleotide
  N_region (93)..(93): n = any nucleotide
  N_region (99)..(99): n = any nucleotide
  N_region (102)..(102): n = any nucleotide
  N_region (235)..(235): n = any nucleotide
  N_region (256)..(256): n = any nucleotide
  N_region (296)..(296): n = any nucleotide
atggcggggagcangggggttnggatnggagttggggatccgagtagcccgagcgcgagggctggggcggcggcggaggaggaggcnggggcngggaangtnaagctgctgtgcagcttcggggggcggatcgcgccgaggcaaggggacggggcgctgcgctacgtcggcgggcagatgcggctcatctccgtgccgcgcgtcgcctcgttcggggagctcatgaggaaggtgnaggcggtggacgacgcggggngagccggcggcggcggcggcggcggggtgctcgtcaagtnccagctccccggtgaggacctcgactcgctcatctccgtgtcctgcacggaggactacgagaacatgatggaggagtacgagaagctggccgccgccgcgcccgacggctccgccaagctccgggtgttcctcttcccggcctccgggagcgaggcggccgccgcgggggcgtccggctccgggtcgcacctcgctgccgccgtcgacgagtcggggcagcgctacatcgacgccatcaactgcgtctccgcggagtccgtcgcggccatgcggcggaaggagagcgtcgccagcgctgggtcatcggcgcacaactccgaggcctccgagcacggcggtgccgtcgaaggtatgtcgccgcaggctgccgtgccgccgccttcgcttccgccggaatatctgtattcaggtgggaacaaataccatggcgccttcccggactccttgggattcagtgccgtgacagcttcatctccggcgatgggtatccaggcacaaaatcatatcatggttagaacagagccattgccgccgcagccgcatcaagttgcctcttacgcgccatcgcatcagccgccacaagttgcttcttatgcgccgcatcaacaaccacaagttgcctcttatgcaccacagcagcagcagcagcagcagcagcctcaagttgcttcatacattccacagatggcgcagtcgttcagggagccacagcaagtccaatacatcaatgcgcagcaattgggtgtgcatggtgtgccccaatctgtcaattttgttcctgtgcaaatgagcccatatatgcccagcattccggtgacgaactccatgccaacctctgccgctcaagtcggcaccatgaagccagcttctccagcttcagaacctgttttagagaacgttcataacacaaggccaatgcaagctacaggtgatcagagttacagggtgctacagccactgtcacagcttcctcctttgcctcctgtgcatttgcagactagtgatgcacacagatatggcgtccagacagtaatgacaagttcagcgagcacgccgttggtgacaacctcaggtacaattccaatggtgattagctcggctaccatgcctgcattgaggtatgatgattgcacaatgtgccagaaagcactgcctcatgctcattcggacaacatgatccaagagcagggcactccacatggagtgaacaatcctgatgctgctccagtgttttacagcctccatcaagagaatgttaccaaacaacatattccaggtgcaaccgcaggaactcctgctaattacatagtagagccaagatctgaggtcacggcagggatgatgcaaactgaacaaaactttgctgcaaacaatcatgtactccagccaacatcatttccagatgctagtggattggttccaaacaccagggttacttccagactagcatttgcggggaatccaccacagccccgttctgaagatcctgtcatgtaccagcatcaacagcagaattcttatagcatgcaaccatcactgataccagtaaatggagttattagcaatccacaagggatagatgctagtgcatttaagaattcaaataatcaggtaccagacccatttagagaatatggccatgatcttccccatgattatgtcagagctatcaatgcacagatgcaaggagttcatttgggacctattgcccctccagaatctagtgtgcaaggaaagcctgccagtccacatggtgctattggtgatggaaaacttgagaagccatcgcatgtgaatattggtggtggttccatctacaagtctcaagctggaggttatcatttgggtattactaatgccttttctgcaccagctgaggacaatcttgtgagacatactgaacagtcatcttcagcttttgattcacaacatcttcattctgagataggccaccagctaaatgtgttacagaatgtgcctgtctcaaacaaccttggtgtacctgccaaaccacatatttctaacgaaagatttcttgcaagacctgctagtgctggtgttcaggttcctgttgagcattctccactgcgacctgcggaaatgctgaatcatgtggtttccgctccccctaatggcaacagtcaaattccactgcaggcgaccgctggtattgatagtgtggaagccacacgtgatccagcttacacagattctctattctcaaatcaggatccttggaatgcagtgggaaatgcttctgtagcgcctccaagactgaataagttggctaaggagcctgctgtttctggagatccatatgtggaaggccatgggcttgccatcaacagttcaaatgctgctacactcttagaagaaggcaatcttccactcatccaggaccgcacttttaaggacatctatcctgaaccctctcaaatgagcaaaggatacggagaagaaactattaagcgacagttacaagctgttgctgagggtgtggcagcatctgtccttcagtcacctttccctgaaaaaccaaccgtattctctggtgatcacacagataaacaaggagctgtaattgatccaaaattggaggatgcggtgaacaatcaatcagacaaaacaagccaaggagttaaagttttagatgatattgataatcttcagagaactgatttctggaatgaagctgacaagcttgcatcattgcaccatccgaatgttgtagctttctatggtgttgtactggatggaccaggtggatctgttgcaacagtaactgaatacatggctaatggttctcttcgacaagcattgcaaagacatgaaaagatatttgatcggcgtaggcgtctcctgattgcaatggatgttgcgtttggtatggagtatttgcatgagaagaacattgtacactttgacctaaagagtgataatctgcttgtcaatctaagagatcctcagcaccctatatgcaaggttggtgatttgggcttgtcgaaagttaaatgccagacgctaatatctggtggggtgcgaggaacacttccttggatggccccggagctgttgaatggaagcagcagccttgtttctgaaaaggtcgatgttttctccttcggaattgtaatgtgggagctgctcactggtgaagagccttatgccgaattgcattatggcgccatcataggcgggattgtaaacaacaccctgggccctccggtgcccgagtcatgcgaccctcggtggaggtcactgatggagcaatgctggtcgtcggaaccgtcagaaagaccgagcttcacggaggttggcaagaggctacgggccatggcaaccccctttaccaaggcgcaacctcagaaataa

SEQ ID NO: 1173 - DNA, 3390 bp, Oryza sativa
atggcatggacccagccgtcgttcgacccatccatggcggcgcaccaagcgtccccgttcggagacgggccgccgaacactgtggcccaacctcacgcgcaagccatgacttcgcccttcgccacgccatagccgcagcaaggtgccgcgaacaaggcgggtggtgaaaagaggctaccattgagcgggagaatcaagatccgtccaatcccatcccagttcaagttcccacccgtcccacgctattcgggcgaaacagacccaaaagagttcctgtccatatacgagtccacgattgaagcctctcatggtgatgaaaataccaagacgaaggtaatacatctcgctctagacggcatcgcccgttcttggtacttcaatttaccagctaacagcatttactcatgggagcaattgcgcgatgtcttcgtccttaactttcgaggcacctacgaggagccgaagacgcagcaacatctactcggcattcactagaggccgggggagtcgataagggagtacatgcatcgcttctcgcaagcccgatgtcaagttcaggatataactaaggcgtccgtcatcaacgccgcttcggccgggctgctcgagggcgaactcacaagaaaaatcgccaacaaggagccgcagacgcttgagcacctacttcgcatcattaacgggtactcaaggggcgaagacgattccaagtgacagcaagcaatccaggccgagtatgataaagcctctgtcgccgctgcttaagcccaagtacaagcacaggtcgccgaaccggctcctttcgccattcgccagtctcagtcggcgacccaaggacaaccgccaaggccaagtcaagctcccatgacttggaggaaattcagaaccgaccgggcaggcaaggccatgatggctgtcgaacaagtttaagacctccgcaaggagttcgatgcccaacaggcaagcagccatcaacagcccgttcgcaagaaggtcagaaaagatctttactgcgccttccatggacgctctgtgcacaccaccgagcaatgccgaaacattcggcatcgtggcaacgcgcaagatccaaggccgcagcatggagcagctgccgaagcatctcgcgaagctattcaagaacaagcacccccggccgaacagcaccaaggtgtgcagtgcagagtaatccaagtgattacaaggactgacccgccgaatcaactgtcaaaagggcaaaagaagatgcagctgccaatggtgcacaacatcactttggcaagtgaaggggccccgcgatatttgaaccagcagatctcttttgggccagaagatgccgaaggagtgttgttcccacatcaagaccccctggtgatctcggccgaggtcatctttgccgaagcatatgccgagatggggttgcctaccctagccctcacccaagcaccggcctcgcttcatggttttggcggagaggcagttcaagtcctaggccaagcacaattggtggtagccttcggcacaggtgaaaacaggcgcgaagagcaaatactgttcgacgtcgtcgacatcccatacaactataatgccatctaaggccgcgcaaccttgaacaagttcgaagccatctcccaccataattacctcaagctcaagatgcctggccttgcaggagtgatcgtggcagctggggtgatccaggagatcgaccaccccgagtggctggcgaatccggtactggtgcggaaatcgaacagcaaatggcgcatgtgtgtcgacttcacagacctcaacaaggcatgcccaaaagacgatttccccttgccgcggatcgactagctcgtggattcgacagctggctgcgaactcatgagttttttggatgcgtactaaggctaccaccagatccacatgagtccggccgacatccccaagacagcattcgtcacaccattcggcaggggcaaccttcaccaagctagtgtacaaggtcctttacaagcagctggggtgaaatgtgcaggcttatgtcgacgatatcgtcataaaaagccgcaaggatttcgaccatgcgtctgacctgcaggaaaccttcgacaacttacgcgcggcgggtatgaaattatatcgtgagaagtgtgtttttggtgttcgcgcgggccagttgttgggttttcttgtttctgaatagggtatcgaggcgaaccacgagaaaatcgattccattcagcaaatgaagcccccgtcgagcgtacgcgaagtacaaaagctcgcaggccgaattgcggcactcagtcgattcctctcaaaagcagacgaaagaggcttgcccttcttcaagacccttcggggcgcggagcggctttgccggtggcggtcagtgcagccctcgtccaagaaacagagtcaggccagaaaccagtattgaaatggaaaagcttgcttacgccctagtgatggcttcgcgcaagcttaaacactactttcaggcccacaaagtcacggtgccatcgcagtatcctttgggcgaagtgctccggggccaggcagaatatgaagctatattgttgggcctaaaaaagacgaaagctttgggggttcggcgcttgctcatccgaactgactccaaattggtggcaagtcatgttgacaaatcctttgaggcaaaagaagaagggataaagagctgggtgaagacccagaagactggcgaacctcgttcgtaaaatcactgacaacgacaagcaattcgattctgacaagttcagagagatgtgcgaggggctaaacctggaaatcaggttcgcttcggtcgcgcacccacagttaaatggggtggccgaacgcacaaatggtaaaatccttgaggcgcttaagaaaaggcttgagggggcagcgaaggaggccaaccaagttcagcccattcatgcttctctatggcgaccaagcaatgacctcaacagagttaggggctaattcaccaagggtgatgttctctagaggcgaagaggcgaagaggggcgcgaggtgtcgctcgaactcctagagggggtgagagtcgaagcactagaacacatgcgcaaatacgccacaaacacttcggcaaattacgacaaaaaagttcgaccgacagagctattgcctggccatctcgtcctaaggaaggagaacccggtggtggtcgggaagcttgaatcgaagcgggaagggccgtacctcatcaagcacatgtccaggacatgctcctttcgcctagcgatgctggaaggcgaagagttcgaccattcctggaacgcggcttcccttaagcgtttctatgtgtagcgcgggtggcacccaaatcgctaacttgtaaaaatgtacatactgttatgtaagcctttcggcactatgtaa

SEQ ID NO: 1174 - DNA, 3329 bp, Oryza sativa
atgagcgtgtggaactacgtcgtgacggcgcacaagcccaccagcgtcacccactcctgcgtcggcaacttcaccggccccaaccagctcaacctcatcgtcgcggaaatgcacccgtatcgagatccacttgcttactcctcaaggcctccagcagcctatgattgatgtacctatctatggaagaatcgccacactagagctcttccgccctcataatgagactcaggacttccttttcattgcgactgaaagatacaaattctgtgttctgcagtgggatggagaaaaatcggagcttctcactaggtttgtagagcgatgggagatgtttctgatcgcattggtcgccctacggacaatggacagagattgggatcatcgaccctgactgtagacttattggtcttcacctctacgatggattatttaagaggttataccgtttgataacaaagggcagctgaaggaagctttcaatatcagtcaggcttgaagaacttcaagtattggacatcaagttcctgtatggctgtgttaaacctactatagttgtcctctaccagctttaccaggataacaaagatgcaagacatgttaagacatatgaagttgcattgaaggacaaagactttgttgagggtccttggtcgcagaacaatttagacaatggtgctggtctgttaatacctgtaccagctcctcttggtggtgtcataattattggtgaggagacaatagtttactgcaatgccaactctacatttagagctataccaatcaaacagacagtcaatcataagagcttacggacgggttgacccagacggttcgcgctatttacttggtgataatgcaggcatattgcatttacttgtccttacccatgaacgagagagagggtaaccggtctgaaaatcgagtacttgggagagacttcaattgcatcatcaatatcatatctcgataatggtgttgtctacgttggttctcgatttggtgattcacagacagcttgtaaaactaaatctccaagctgacccaaatggttcatatgttgaagttcttgagcgatatgtgaaccttggacccatcgtggacttctgtgtggttgaccttgacaggcagggtcagggtcaggttgtcacttgttcaggagcatttaaagatggttcccttcgggtggttcggaatgggataggtatcaatgagcagaggcttcagtagaactacaagggatcaagggtttatggtcgttgaaatcttccttcaatgatccgtatgacatgtacctagttgtgagctttataagcgagacaagattcttggctatgaacatggaagatgagttagaagaaactgagatagaaggctttgatgcgcagactcagactttgttttgtcaaaatgccatcaatgatctgcttatacagacaggttactgctaattctgttcgtctggttagttgtacctctcgggagctagtggatcaatggaatgcaccagaaggattttcagtcaatgttgcatcagctaatgccagtcagcaggttctgctggcaacaggtggtggccatcttgtttacctcgaaattaaggattctaagctggttgaagtgaaacatatacagttagaacatgagatctcctgtgttgatttgaatccaattggggagaatccacagtatagctctctggctgctgttgggatgtggactgatataagtgttagaatactttcacttccagaccttgaattaatcaggaaggagaacttaggtggagaaattgttcctcggtctgttctgctttgtaccttggaagggggtttcatatttgctctgtgctcttggagatggtcatctgttcagttttctgttgaatgcaagtacgggtgaattaactgatagaaagaaggtttctcttggtacccaaccgataagccttcgtacattctcatcaaagggtacaacccacgtgtttgcttcatcggatagaccgactgttatttatagcagcaacaagaagttgctgtatagcaatgtcaatttgaaggaagtcaaccatatgtgtccttttaatacagctgctattcctgacagcagccttgcaattgctaaagaaggtgaactctcaattggaaccatcgatgacatccagaagcttcatatccgtacaatccccttgaatgaacaagcacgtcgcatttgccatcaggaacagtccaggacactagcgttctgcagcttcaagcacaaccagactagtatagaggaaagcgagacacattttgttcgtcttttggatcatcaaacttttgagttcctgtcaatttatcagcttgatcaatatgagcatggctgctccatcattagctgctcattctcagatgataataatgtttattattgtgtgggaacagcatatgttttaccagaggaaaatgaaccatcaaagagggccggatccttgtatttgcagttgaagatggcagactgcaattaattgtagagaaagaaactaaaggagctgtctattcgctgaatgcattcaacggaaaattgttggcagctatcaaccagaagattcaactatataagtggatgctacgggaggacggttcacatgagctgcagtctgagtgtgggcatcatgggcacatattggctttgtacactcagactcgtggcgatttcattgtagttggagacttgatgaaatcaatatccttgctcgtgtacaagagcacgaggaaagtgcgattgaagagcttgctagggattacaatgcaaactggatgagtgcagttgagatgcttgatgacgagatctatattggagcagagaataactacaacattttcactgtgcggaagaacagtgatgcagcgacagatgaagagaggggcaggctggaggttgttggagagtaccatcttggagagtttgtgaatagactccggcatggttcgctggtaatgcggcttccggactcagagatgggccagatcccgacggttatctttggcaccatcaacggggttattgggattattgcttcgcttccacatgagcagtatgtatttcttgagaagctccagtcgactctggtgaagttcataaagggcgtggggaacctgagccatgagcaatggcggtcgttccacaacgacaagaagacgtcggaggcccgcaatttcctggatggtgacctgatcgagtcattccttgatctaagcagaaacaagatggaggaggtggccaagggtatgggggtccccgttgaggagctatccaagagggtggaggagctgactagattgcactag

SEQ ID NO: 1175 - DNA, 3300 bp, Oryza sativa
atgtcccgtatcaggaggatcgccaggcactttcggccatcttgcgagcggtgccggctgagattgtccggccgctcgccgagaaggacagtgccaaagacgcctgggacgcgctcaaatccatgcgagtgggcgcagatcgtgttaaggagtcccgagcatagaagctgcgccaaacttttgagtccatgcgattcaagaatggcgaacacctggaggatttcagccttcgtctccagggtgttgtcagcgatcttcgtctccttggagatgatctgtctgaagagaaggttgttcgaaaaattgcttcgcgtcgttccccggaggtatcgccaaatggctctatcgattgaaaccttgattgatctgacctcgctttctattgaggatctgactggccggcttctcaccgtcgacgatcaccccgactctgacggcgaggacgcgggtcaggcgctcttcagcgaaaaggaggcctcttctcactcaaacaaggaagctgggcataactcagccggggggagcgcgtccagctcgcggcaaccacaccgcagtgggcgcaggcgcgacggcaacggctccgacggcaagtcgggttcgtcccaagcggcgagccgcaatgtgtccaaggacaaatgccgttactgtggcaaacttggtcactgggccaaggactgtcgcaaggcgaagcgagaccgcgagaagctggctcaagcaaatcttctcatcgctgagccagctcaccccgcggacgaaggggagccgacactcctgatggcgcaagtgtgcgagcttgcccctgctaccgattctgtcattactgatggggagcttgacaccaccgtgcgcggcactgtcaagtttggtgatgcgtcgagagtccggattaaaggacgaggcacggtgctgttcgcctgcaagaacggcgatcactgcgcactcacaggtgtctattacatccccaatcttcggagcaacatggtcagccttggccagcttgatgaggcacgttgcaagacggtgatcgaggatggcgttctcactctgcgtgattcacagcgacggctgctgtgtagggtgcgccgaggaactgggtgcctctatgttctccacgtcgagctggcgcaaccggtttcccttctcgcaaaggggaacgatcaagcctgggtctggcacgccagatacgggcacctcaacttcgacgcactccgctcactggcgagccgcggcatggcgcgcgacattcccactctggagcgggtcacccaggcaggagtggaggtggagaccggctgcaagctgcgcgttctccgcactgatcgaggaggcgaattcacctctgtcgagttcgggctatactgcgcgaacgaaggcgtcgctaggcagttgatggcgccgtactctccacagcaaaacggcgtcgtcgagcgccgcaaccagacggttgtggcaatggccagatgcatgatgaaggccaagaacatgccgggggagttctggggcgaggcggtcacaactgccgtctacatcctcaaccaggcgccgacaaagagcgtccgcgacaaaacaccattcgaggcgtggcacggtcgtacacctgctgtgcactactttcgcacatttggctgcatagtctacgtcaaggaggtgaaaccacacatcaacaaacttgatgatcggagcaaggcgatggtctttctcggctacgagccgggttccaaggcgtatcgtatctacgacccggtggccaagcgcatcgtcgtgagccacgatgccgtgtttgacaaggcagcgtcgtggccatgggcgtcacccggggaggaggatggggtggcgtcttctcaggaaaccttcaccgttcgctacgaggtagcggcggtggaagtgccgtcccgccactccgactccatgtcgtcgccggctcactcgggaccaccggcgccatcaatctctgcatcaccgggcgtcccagcggtcgagttcgtgtcgccgcctgcggaaacgcctgatgtcgacgacgacaacgtagggccacgtcgtttccggacggtggctaacatcctcgacactacctcgccaattgagctcgattccgacgagcttcatctggctgctgccgaggaaccaagtaaccacactgaggcggcacaggacacactctggcagcgagcgatgcaggaggaactaaagtccatcgtggagaacaacacgtggactctcgctgacctccctgctggcaagcgtcccattggcttgaagtgggtgttcaagctcaagaaggacgagacgggcgtaattgtcaagcacaaggcccgactggtcgctaagggttacgttcagcagcaggggattgatttcgacgaagtattcgcccctgtcgccagaatggaatccgtgcggttgctactcgccattgcagctcaccttgggtggtttgtgcatcacatggacgtgaagtcagccttcctgaacggagagctggaggaggaggtgtatgtcgcccagccaccaggtttcgtcgacgacaagcacccacatcaagtcctgcgcctgaacagagcactttatggcctgcgtcaagctcctcgtgcctggaacgcgaagctggatgttagtcttcatgaactcgggttcacgcggggcatcacagaacatgctgtgtacacgcgcgggaccgggaacgcgcggctaatcgtcggcgtctacgtcgacgatctcatcatcaccggcgctcactctgaaacaattcaaagtttcaagggggagatgcactccctattccggatgagtgatcttggattactcagctactacctcggcattgaggttcatcaaggcaacgatgggatcacaataaatcaatccacttacgcgcagaagctcttgaagatgggtggcctggcgggatgcaattcagcttgcgttccaatggaacccagattgaaactgacgaagaatagcgatcgaccaagtgttgattcaaccttttatcgcagcttagtggggagtctgcggtacttggtgcattcacggccggacattgctttcgctgtgggctacttcagccgtttcatggagtcgccgcgcgatgatcatctcacggcggtgaagcacattctgcgctatgttgcaggtactgtgaactacggttgcaagtttgcacattcaggagaagaggggatccatttgctgggattttccgacagtgatttggggggagatgtggacgatcggaagagtacctctggtgctctcttcttcctcggctcaagcccggttgcatggcagtcccagaagtag

SEQ ID NO: 1176 - DNA, 3243 bp, Oryza sativa
  N_region (3064)..(3064): n = any nucleotide
atggaaaatctaccaaatggctcagcaaattatagctgagaagaaccaggataatgagatgtctacagatgctggtgagcctgaagaagtagcagatatatttatttatagagaagatgttgtcagccttgaagtcaaaagaggacacccgtgggttggttttggaggtagcaggagaatatgattctgaaggtagcatcactgatgatgatactgatactgaggagcatgaacacaaaagttctcataggactgaaaatggtggtgctgatggtgataatgtcagtaatggagttgatgttgatagtcagagttcattgcctgataacaaggttagggttctatggattgatggtgtcgagaagacggaagatattgacagcgtggttgtcatggacagaagtttccttcatggagatatagtggcttctgccacagatccaactggtcagatgggacttgttgctgatgtcagccttgtggttgatttgcaaggacctcacggagaaataataaagggagtatcctctaaagatttgagacgcatcagggaatttaacgtaggtgattatgttgtctctgggccatggcttggtcgagtcgacgaggtgttggataatgttaatgtgttatttgatgacggctccgtctgtaaagtagccagggcagatcctatgcggctaaggccagcattggggccactgaatccaaatgcaagctgtcccttttatcctggacagcgtgtcaaggcagtgaattcatctgtttacaaaacatccaggtggctcaatggactatggaaagcaagtcgtcttgaaggcactgtcacaaaggtggaaacagttgcagttatagtctattggattgcatctgcacactttgccacgaatcaagaatctgttcctcctgaagagcagaacccaaaggatctgactcttttatcttgtttttcatatgcaaattggcaattaactgattggtgtcttcctaaccaatacacatcatcgtgtactgatgattctttgattgaaagttcagaaataaaagactctgatgacattcctgaatccagtgatgttaagacagaactaacgcagaagactgatatggatgaaaaccctgggaggatggatggagattcttctgctgatggatcaaatatggtttatgaagataacacatgcttagccaaacaatcagaatcaggcactattgcatcaaccgttccaaaggagggatcacaggacaatgcaacttacaggaaaaaacttaggaaagtttttgtcaaaaaaggataaaagaacaagaagaagagacgagagctttgaaagggctctgcttattgcaaatacatacacgaaggttgatgtgatctggcaagatgggacaaaagaatgtggagcaagctcaacattgctcatcccgatccacagtccaaatgaccatgaattctttccggagcagtatgtcgtggacaaggttggtaatgatgttgatgattcttctgaaacaaaacgtgtgggtcttgttagaagtgttaatgcaaaggaccgaactgcatctgtatcatggtttaagccttcattacacccagaggagcccagagaaatcgagtgcaatgaaattgtgagtgcatatgaattggatggccatccagattatgattattgctatggagatgttgttgttcgcttgccatctgtttcactgcctgttgaatcaaccaatagggagaacaccatggaactggataatgtaaattctacagaagtatcggcaacccctgtagctgatgcagaggaacagtttccacagaaggaatccagtttggaatttactagcctttcatgggctggtaatatagttggttttgaagacggtgatattatagtcatttggggcgatggttcagtgtcaaagaggttggtccacatgaaatatatgttgttggtcgtgaagatgatggtgcctcactagatgatggaactgccagtgatggtgctagctgggagactgttgatgacaatcaaacggatttgcctgatgattctgcacagcaggatggaagctctgttgcaactggtccactttctgttgcttttggctttgtgactcggctcgcgagtgaactctttgctcgaggtaaaaagcatttagatggatcaaactcagatgctatggatgaagttgaatctcaccagtctaatgagatttcagaatctggtgatgatattgataaagctgagggggagaacaatgtggcaacatctgagagtaccgttgtaacaacaaatgacgcttccggtgggaagtctgtagatgttgatatggctgacaagcctggagattcagatggcttcaaacactttgatgttcagcagtgccctccagaccatcattacctggaaaacatggcgcaggcagggcactggtggaagaaagtgggtaaaaaaggtacagcaggaatggaacatacttgagaaaaatctaccagagattatatttatgttagggtatttgaggatcgaatggacctcataagagccgtgattattggagcaagtggaacaccataccaagatggtcttttcttcttcgacttccaccttccacctgagtttccacaagttcctccgtttcatttgttaccaaatctgcagtcggcgtactatcattctggaggtttgcgcgtaaatccaaacctgtatgtggatgggaaggtctgcttaagtctcttgaatacctggacgggcagagggaatgaagtatgggatccatcatcatccagtattctccaagtcctggtttcacttcagggcttggttctaaatgaaaagccttattttaatgaagctggctatgagaagcaagttggtactgttgaaggggagaagaatgcattgccatataatgagaacacatatctgctgagcttgaaatccatgttgtatatcctgaggcgacctccaatggcatttcgaggactttgcaaagagccacttctccaagcgtggcaaatacattctcaaagcttgtgaggcctatttgcaaggtaatggggttnggacgctcacagatgatgcctgcaccaccgagagaagcaaagaacagccatgctcggtgggtttcaaactcgcattagcaaaaattatgccacggttgattactgccctgaaggacgctggagcaaattgtgaccaatatgagcaccttgggaaaacggaaactgctcaagaacactga

SEQ ID NO: 1177 - DNA, 3105 bp, Oryza sativa
  N_region (768)..(768): n = any nucleotide
atgggtggcgacgatcgcagcgccgggaaggcgaagccagtgctcggatcgttcatgacggtgttcatgcacgcggacgcggtggacgtggtgttgatggtgcttgggctcctgggcgccgtgggcgacggactctcgatgccggtgttgctgctcatcaccggcagcgtgtacaataacttcggcggcggcgccgacaacgtccaggagttcagctccaaggttaacatgaacgcgaggaacctcctcttcttggccgccgaggggtattgctggacacggacggcggagcggcaggcgtcgcggatgcgggcacggtaccttcaggcggtgctccggcaagacgtggagtacttcgacctgaagaaggggtcgacggcggaggtgatcaccagcgtggccaacgacagcctcgtggtgcaggacgtgctgagcgagaaggtgcccaacttcgtcatgaacgccgccatgttcgtcggtaactacgcatttgggttcgcgctgatgaggcagctcatgctagtggcgctgccgtcggtggtgcttctcatcatcccgacattcatgtacggccgcgtcgtcgtcgacctcgctcgccggatcagggagcagtacacccgccccggcgccatcgccgagcaggccatgtcgtcggtgcgcacggtgtactcgtttgtggcggagcggacgaccatggctcagttctcagcggcactcgaggagtcggtgcgactggggctcaagcaagggcttgccaagggcgtcgcnatcggtagcaacggcatcaccttcgccatcttggccttcaacgtctggtacggaagccgcctcgtcatgtcccatggctacaagggtggcaccgtcttcgtcgtctcctacgccgttatccagggcggcctagcgcttgggtcagtgttgtcgaacgtgaagtacctctcggaggcgagctcggcggcggagaggatcctggaggtgatccggcgggtgcccaagatcgactccgagagcgacaccggcgaggagctgggcaacgtcgccggcgaggtggagttccggaacgtgaagttctgctacccgtcacggccggagagccccatcttcgtcagcttcaacctccgcgtgccggcggggcgcaccgtggcgctggtcggcggtagcgggtccggcaagtcgacggtgatcgcgctgctggagcggttctacgacccgtcggccggcgaggtgatggtcgacggcgtggacatccggaggctccggctaaagtggctgcgagcgcagatggggctggtgagccaggagccggcgctgttcgccaccagcatccgggagaacatcctgttcgggaaggaggacgccacagcggaggaggtgatcgccgccgccaaggcggccaacgcacacagcttcatctcccagctgcctcagggctacgacacacaggtgggcgagcgtggtgtccaaatgtctggggggcagaagcagagaattgctattgcgagagcaatcctgaagtcacccaagatcctcctccttgatgaagccactagtgcattggacactgagtcagagagcgttgtacaggaggcccttgacctagcatctatggggcggactactattgtgattgcacatcgcctatccactatccgcaatgctgacataattgctgtcatgcagtctggtgaggttaaggagctgggatcgcatgatgagctcattgccaatgagaatggcctctattcatctcttgtgcgccttcaacagacccgagattcaaatgagattgatgagattggtgtaattggtagtacatccgctctagggcagtccagcagccacagcatgagcaggaggttctctgcagctagcaggtcaagctcagtaaggtcattgggcgatgcaagagatgctgacaacactgagaagccaaagcttccagtgccatccttcagaaggctacttatgcttaatgcaccagagtggaagcaagcactaatagggagttttggtgcagttgtgtttggaggcatccagccagcatttgcatatgccatgggaagcatgatctcagtctacttcttgacagatcatgcggagatcaaggacaaaacaaggacctacgcactcattttcgtaggtctagcagtgctctcatttttgataaatattggtcagcattacaactttggtgcaatgggggaatacctcaccaagagaataagggaacagatgcttgcaaagatcctcactttcgaaattgggtggtttgaccgtgacgagaactccagtggtgccatatgctcacagctagctaaggacgccaacgttgtgaggtctctcgtgggtgatcgaatggctctggtgatccagactatttcagcagtgcttattgcatgcaccatgggtctggtcattgcctggcgtttggcccttgttatgatagcagtgcagcctctgatcattgtttgcttttatgctcgccgtgtcttactcaagagcatgtccaagaaatcaatacatgcacaagctgaaagtagcaagctagctgctgaggcagtctccaatcttcgtacaattacagccttctcatcccaagagcgtatcttacgcctttttgaccaatcacaagatggaccacgcaaggaaagtatccggcaatcatggtttgcagggctcggcctcggcaccgccatgagccttatggcatgctcatggaccattggcttttggtatagtggcaggcttatggctgagcaccaaattactgccaaggagatcttccaaaccttcattattctagcaagcacaggtcgtgtaattgcagaggcaggaagcatgacaacagacctagctaagggtgcagatgcagttgcttcagtatttgctgttcttgaccgggaaacagaaattgatcctgacaaccctcagggatacaagccagagaagctcaaaggcgaggtggacatcagaagagtcgatttcgcatacccatcaaggccagatgttataatcttcaaagggttcacattgagcatccaaccaggcaagtcaacagccctggttgggcaaagtggctctggcaagtcaaccatcattagctcatag

SEQ ID NO: 1178 - DNA, 3025 bp, Oryza sativa
  N_region (1754)..(1754): n = any nucleotide
atgggcgaacccatcgtcgccatcgccatgaacgaagctggagatgatggagcctccatggaaaagaagcttatttacatctaattgttctatctaagctgagatttaccttgacagatgtccagactccacagatccctgggcttatgcagactgcagagaagctgggacatgtgtccatgctgatgaactggtgctcagtttgcaaatgccaacaagaacagccggcctctccacgctgcgcggggccgcctccggcgagcaggctgggcctcgggcctcggggcctcattccaccgccctgcgcctctcggttcggatcggcttgaaggtgaagaggtatggacttcggtgattctagacgcaagcctaatgtcgtcgggaagttcaccgtagctgttgcactcacggtcatgtgcatcattgtgttgaaacagtcgcctggttttaccagtacaagtgtggttctctcgccatgaaattggtgtgactcatgtgttggtgactggaggagctggatacattgggtcacatgctactcttcgtctacttagggacaactaccgagttaccattgtgggataacctttctagagggaacatgggagctgtcagagtccttcaacgtttgtttccagagcctgggaggcttcagtttatttatgctgatttaggcgatgcgaaagctgtatcctttttctctacaatgtgaactttaataccttattatagccatttttccatacattcatgtgttggtgtgatctgttttgcacttaaccaatagccaggaaaatgcattcgatgctgttatgcactttgctgccgttgcttacgttggtgagagcacgttggagccactgagagatacttcaacgtcattggatcagacccaggggggcggttaggggaagctccacgaccagagctgcgtgagcatggacggatttctggtgcttgctttgatgcagcactgggaatcattccaggtttgaagaggttcggggaactgattaccctacagctgatggaacttgcataagggactatattgatgtcacggatctcgttgatgctcatgtgaaagctcttgataaagctcagcctggcaaagttggaatctacaatgttggcacaggacatggtggtagatcagtgaaggagtttgtagaagcatgtaagagcgcaacaggagctagcatcaaggtttcattccttacccggagaccaggagactatgctgaagtttacagtgacccatccaaaatccatgacgagctgaactggacagcccgttacattgatcttcgcgaaagcctttcaactgcatggaaatggcagaaagcacacccgaatgggagtacaagtggttggattataccgtatgtacatgaacctacacttcttcaaagagaagattaattatgtactacatgttattcgcaactacagttcttcagaagagaagaacaaacaatgcaatggacgaaaccgagccattctgcaagaagagggcacagcagcaggaccatcaccggcgtcggcagcggccgctcgacgccgccggcgttccagaggaccgccgccgccacgtccacggcgcggcggaggaacaggaccgcccccgccggcggcggcggcgcggcggcgccgcgcccccgcatcccgtacatgatgaacagcagccccgccgcgaggatcgcgcacgccaggacgagctgcagctgctcggctccttccaccggcggcgcccngccccccttgccgccgccgccgccgatggtgttgagggtcaggaaggacaccgccgtgagcaccgtcgcgaagcccgtgccgacgaggtccccgccgcttccgcctcgcggttggtaggggcgccctggttgccggcgcattgttcgtcgccggcggcgagcggcggccacgaggaagaagctctgcgagaagcgggatcgcgagccaagttaaagcttgtgtcgttatgtactaccataattgagtacgtacaaaggttcttctgtttgtctgaaagcctgaaatcaccggcaaaaaacgatggtgtgatctgccgtcgccgtccgctcgtggaggagcgcacgtcgctagcttctcccgcgagattgacggcgccgtcgtcgccgcgggggaaggtgtttggaaggggcgcggaaactctagcaccagatgtgtgggcgtcgcgtacgtcgtcgtcgtcgtcgttgtcatggttcaaagtacgagtatgagtgtacgacgtacttgacgatgacggcgcggtgaggcgagaggtcagtggagacgacatgtgtgtgtccatgtcgtcgttgttccatgggaaattttaccatagaacaaagcgccgcggcccaggcgcgtgcccgccgcgtcctctcgtggcctcgccacggaatacgcataaggcttgcgtatctttcgacgctgagcttgctgcagcaacgataaaagggctgtgcacacaaagagttcactatgagtgcttgcataaccataggtctgatgaatctgcgacgtggcgaacagtggattggtgccggaatccactacatcgacacgacacccctgctccatcctcgcaatgttgcaccatctcgcctataaatatgcccatgcaaagttgcaaacacaaatcaagctaagcagccacacagcccacagcgaaagaattcgccgaacagtggaaagctatagcagcagtcatggccaagcaccacaatcgtcgtctctccgtcgtcgtcgctctgctgatgctagcggcgtcgatcgtcctgctgcttcttgcgccgccctgcgatggtaggagacagctgaggggaagcgaggccaccagaggcggtggagtcggcgaggagaaggcgtcgttgctgccgcctccgatacccaacctgccgctgccgcccatcgtccccgggaatcctcctgctcgcaactccgtcgtcaacaacaaatctccatagctctcttcatcatcatgtctttttaagataagcttgttgttgagaggtag

SEQ ID NO: 1179 - DNA, 2938 bp, Oryza sativa
tccccgctgctgtcctccctccgggtctcggcctcctcctccctgctactccacctccccctgctcggagggatgcgctacgacttcctcaactccaagccgcccccgaactacgtggccggtctggggcttggcgccaccgggttcaccacccgttcggatatcgggccggcccgcgcggcgcccgatctgcctgaccggtccgccgccgccgccgccgcccccgccgtcgggcgcggccgtgggaagccacccggggacgacgacggcgacgacgatggcggcgacgaggagaaggggtacgacgagaaccagaagttcgacgagttcgagggcaacgacgccgggctgttctccaacgccgactacgacgacgacgaccgcgaggcggatgcggtctgggagagcatcgaccagaggatggactctcgccggaaggatcggcgggaggcgcggctgaagcaggagatcgagaagtaccgtgcttccaaccctaagatcaccgagcaattcgctgatttgaagcgtaagttggtcgatttgtcggcgcaggagtgggaaagcatacctgaaattggggactactcgctgcgcaacaagaagaagcgatttgagagcttcgttcccgtgccggacaccctgctcgagaaggctcggcaggagcaggagcatgtcacggcactggatcccaagagccgtgcagctggtggcaccgagacgccatgggcgcagactccggttaccgatctgacggctgtgggcgaaggtcgtggcaccgtgctctccttgaagctggacaggttgtcggattcggtatctggtcttactgttgttgatccaaagggttacttgacggacctgaaaagtatgaagattactagtgatgctgagatttctgacattaaaaaggcgcgattgttgcttaagtcagtgacacagacaaacccgaagcatccaccaggatggattgctgctgctaggcttgaagaggttgctggcaagcttcaggttgctcggcagcttatccagcgtggctgtgaggagtgccccacaaatgaggatgtttgggtcgaggcatgccggctggccagcccagacgaggcaaaggcagtgattgctaggggcgtgaaggcaattcccaattctgtgaagctgtggttgcaggcagcaaagttggaaactagtgatttgaataagagcagggttttgagaaaagggttggaacacattcctgattcagtcagactgtggaaagcagtagtagagcttgcaaatgaggaggatgcaagactgttgcttcacagggctgtggagtgctgcccactccatgtggaactgtggcttgccctagcaaaggctggagacatatgaccaagcaaagaaggtacttaacaaggcaagagaaaagcttcctaaggaacctgccatctggattacagctgcaaagctggaggaagctaatggaaacacccagtcagtaatcaaggtgattgagagaagtataaaaactttacagagagaaggattggatattgacagggaggcatggctaaaggaagcagaagctgctgagcgtgctggatctgtattgacttgccaggctattgttaagagcactattggcattggtgttgatgaggaagacagaaaacgcacatgggttgccgatgctgaggaatgcaagaagcgtggttcaattgagacagcccgtgccatctatgcgcatgcactcagtgtcttcgtttccaagaagagtatttggctgaaagcggctcagcttgagaagagccatggaaccaaggagtctctttataatctcctcagaaaggctgttacctacaatccacgtgcagaagttttatggcttatgagtgcaaaggagaaatggctggctggagatgtcccggctgcccgagccattcttcaggaagcttatgcttctctccccaattcagaggagattctggctagctgccttcaagcttgagtttgagaacaatgaaccagagagagcaagaattcttttgtcaaaggccagggaaagaggaggcactgagaggtctggatgaaatctgcgattgttgaaagggagttagggaatgtagacgaagaaaggaagctgttggaggaaggtctgaagttattcccctcattcttcaagctgtggttaatgcttggacaaatggaagaccggcttggccatggatccaaggcaaaggaggtttacgagaatgcactgaagcactgcccgagttgcatccctctttggctctctctagctaatctagaggagaagataaatggcttgagcaagtcacgtgctgtcctcaccatggcaagaaagaagaacccagctacacctgaactctggcttgcagcagttagggctgaattgagacatgggaacaagaaggaagctgatgctctactagccaaggcattacaggaatgcccgacaagtggtattttgtgggctgcagctatagagatggtgccacgtccccagcgtaaagcaaagagctcagatgctataaaacgatgtgaccatgatccccatgtcattgcagctgtggccaaacttttctggcatgataggaaggttgataaagctagaagttggttgaatagagctgttactcttgctccagacattggagatttttgggccttgtactacaaatttgaactgcaacatggaaatgctgatacacaaaaggatgtcctacaaagatgtgttgcagcagaaccaaagcatggagagagatggcaagcaataacaaaggctgttgagaactcacatctgtcaattgaggcccttctgaagaaagctgtgttggctcttggccaggaagaaaatccaaatgctgcagatccctagtttgtctcacttttaacttttgataaggtattgcaatctgttatcattatactcttctga

SEQ ID NO: 1180 - DNA, 2925 bp, Oryza sativa
  N_region (855)..(855): n = any nucleotide
  N_region (2692)..(2692): n = any nucleotide
atggggcgcctccagcaccaccaccgctcccgctccgcctcctcctcctccttcgcgcgctcctccgacaccgccgccaccgacgccgacgcccgcagcctcgccgcggacgccaccgtcgactgccccttcggccacgtcaatggcctcacccgctccgacctccgggaggccgcctacgaggtcttcttcatgtcctgccgcgccgccggtggcggccggctcaactacttcccggccggggagagcggcggcggcgacgtgtcgccgaccatcggcgccggcccccggggtggcacggggatgagcgtcgtcaacagcagggtcaagagggcgctggggctcaaggcgcggaggtcgtcgcagccgaccacggcgcgggtgagctccatgaacgcgtcgtcggcgcccggctcccccggccgcgccatgtgggcgatgagccagccgtcgacgcccgtgtcgcccgggaaagggaggcggccgatgacctccgccgagatcatgcggcagcagatgcgtgtcacggagcagaacgacgcccgcctccgcaagacgctcatgcgcaccctcatcggccaggtgggaagaaaagccgagacgatcgtcttgcccctggaactgctccggcaggtcaagctcaccgacttcgccgacagcggcgagcaccaccagtggcagcgccggcagctgaagctcctcgaggccgggctcatcgcgcacccgtccctgccgcatgaccgcctcaacgcggtggtgctcaggttccgcgaggtcatgcaggcggcggacacccgcgccatcgacaccggcaagacgtcggacgccatgcaagccctctgcaacgccgtgcangcccttgcctggcgctccgcccccggaagcaaggccgccggcggcgacgcctgccactgggccgacggctaccctctcaacgtgctcctctacgtgtcgctcctccaggccatctttgacctcaaggaggagaccgtcgtgctcgacgaagtcgatgagctcctggagctcatgaggaggacatggccaacgctgggcatcaccaagatgctgcacaacgtgtgctttgcatgggtcctcttccagcagtacgtggtcaccgggcagatcgagccggacctcgccggcgcggcgctcgccatgctcacggaggtggcggccgacgccaagcaggagagccgcgaccccgtgtacgcacgggtgctctcgagcatccttgccacgatacacgactggtcggagaagaggatgcttggctaccacgagtggttcggcaacggcaactgcggcgccggcggcgccatggccatggagggcgctctgtcactggcgctcgccaccacccagatcatctccgacaacgcgatcttcacgagcatcagcaccgcggaaaccgaacacgaagactgcagcgtcggaagcttcgccggcgaccgtgtggattactacgtgaggtgttccacgagaagcgccttcacgaaggttagcttcctacgcgtttggccacgccatggcgagcgtcttgtgttgatctgccgcggaaacgtgtgccagatactggagaacggactcgggcaaggggacagcctgatcatcgatcgccacgacgacgaagacccgggcgacatcctggcgcggctcgccggcgacacggagcacatcgcgctatccgagcgcgacgccttcgggccggtgctgaggcggtggcacccgttcccgggcgccatcgccgcggtgacgctgcacggctgcttcggcgtcgtgctgaagcagtacctgggcaaggccaccgtgctgagcaacgagctcgtgcacgtgctgcacgcggcggggaggctggagaaggcgctggtgcagatggtggtggaggacgtggcggacagcgacgacggcggcaagtcggtggtgagggaggtggtgccgtacgacgtggagtccatcgtgttcgggttcctcaggacgtgggtcgaggagaggctcaagatttgcagggagtgcatgctccgagccaaagaaaccgagagctggatgccgagatccaagaacgagccttacgcgcagtcggcggtggagctgatgaagctggctaaggcgaccgtcgacgagttctttggcataccggtggccgtgagggatgacttggtccaggacctcgccgacggcatggaggcgatctttttggagtacatctccttcctcacgtcttgcggtagcaagcagagctacctcccgtcgctgccgccgctgacgaggtgcaaccaggactcgaagatcatcaggctgtggaagaaggcggcgacgccgtgccgggcgcccgtgtcgagcccgcgcgcccacgggcaccaccaaggccagggcggcatggcgtccggcggccagaacccgcggccgtcgaccagccgcggcacgcagcgcctctacgtccgcctcaacacgctccacttcatcctcagccacgtccacgcgctcgacaagtcgctctccttcttctcccgcggcaggtgctcgtcgtcgccgtcgtccgccgccaccgcccgcctcctcgcgccgtgctcccacttcgaccgcgcgcgcgccgcggcgcagtccgcggtcgggcacgtcgccgaggtcgccgcgtaccgcctcatcttcctcgactcgcaccactcgttctacgacgggctctacgtgggcngcgtcgccgacgcccgcatccgcccggcgctccgcacgctgaagcagaacctgtcgctgctcctctccgtcctcgtcgaccgcgcgcagccggtggcggtgcgggaggtgatgaaggcctcgttccaggcgttcttgctcgtcctcgtcgccggcggcggcgacaggagcttcacgaaggaggaccacggcatggtggaggaggacttccggagcctgaagcgcgccttctga

SEQ ID NO: 1181 - DNA, 2880 bp, Oryza sativa
  N_region (2091)..(2091): n = any nucleotide
  N_region (2118)..(2118): n = any nucleotide
  N_region (2145)..(2145): n = any nucleotide
  N_region (2158)..(2158): n = any nucleotide
atgctgcgccgccgcgggctcctcctcgtcttcgtcgtcgtctgcttcggcggcggcggctggctccttcccgcctcccgtgccatgccgctatgcacggactccaggcctcccgtggcgctcaacaagacgctcgccttctgcgcctacgcccgggggagcagcagctgctgcgacgccgccgcagacgctactttgcagaaacagttcgatgccttcaacgtctccgacgcctcctgcgccgccctcctcaagcccatcctctgcgcgaaatgcaatccgtattctgctgagctgttcaacgccggcccaaacattcggactatccctttcctgtgcaactctacctcatcctcttctgctcaatcaaaggactccacacaagactactgcaaattagtctgggaaacttgcaaagatgtgaccatatccaactccccctttcagccaccgcttcaaggcggcgcgccacttcccacttcatcatccaagcttactgatgattggcagtctgaagctgacttctgcaaatcatttggcggtgcgcctaacgaccaatctgtttgcttcagcgggaactctgtctcatttaacaccactccaccttcgccctctctgaaagggatatgcctagagaggataggcaacggatcataccttaacatggctcctcaccctgatggctccaatagaatcttcttaggcagccaacctgggaagatatggttggcaacagttcctgaccagggatctggaggcatcctgcagtttgatgagacaagcccatttgctgatctaaccgatcaggtgcatttcgattcgcaatttgggctcatgggcatggcatttcatcccaattttgcaaccaatggccgcttctttgcctcttacaactgtgataggacaaagtcacccagctgttctggtaggtgctcttgtaactctgatgtcggctgtgatccctcaaaggttggcacggataatggcgctcaaccatgccaatatcaagttgttgtatcagaatattccgctaaaggttcttcagcaaatatttctgaggttacgtctgctgatccatccgaagtcacaaggatatttaccatggggctgccttatacgtctcagcatggaggacagagtgaaattgctaaccagagcttgtggggtaactactccattccaaaagacaacccatacactgatgacagtgacttagaaccagaagtttgggcattgggtcttagaaacccatggagatgcagctttgattccgcgaggccttcctacttctactgtgccgatgttggtcaggatcaatacgaagaagtagatttgatctccaagggtggaaactatggatggcgtgcatatgaggggccacttgttttcaatccaccttcggcacctggagggaacacttccctcaattccataaacgccattccccctatcatgggctacagccattctgatgtcaacaagaagattggatctgcgtcaataataggtggtaatgtttatcgaggatctaccgacccctgcttggtcggaaggtacctatacgccgatctgtatgcatcagcgatgtggaccggcacagaggctccagagagcagcgggaactacagctcgagtctgatctccttcagctgctccaagagttctcctatagcgtgtgacactgctgctggaagccccctcccatcacttgggtacatatactcgtttggcgaggacaacaacaaggacacctacgtcctgtcgagcaagggcgtctaccgggttgtgcggcccagcctctgcggctacacctgtccaacagagaaacctgcgacgaacactgggacgacgacgccttcgtcagcggcatcagtgacaggcaagcagatgatgggagcgcttctgctgtcggttcttatgttctgggttttggcgccagactccgaccgggccaacctcgccgccgacctcgccgaccaccctgtcatcgccgccgccgccaacgtccacgtcatccaacgggccaacctcgtcacctaccgtggccccaccatggtcgccaacaccctccacgccgccgccgccttcctntacaccaaccaacacccgcacttggantgggactggttcatcaacctctccgcntccgactacccgntcctcacgcaggatgatctgatccatgtgttctccaagctgcctcgcggtctcaacttcatcgaccacaccagcaacattgggtggaaggagtatcagagggccaagccggtcatcattgaccctggcctctacatgaagaagaaggccgatgtcttctggatcccgcagcgccggagtgtccccactgccttcaagctcttcaccgggtctgcttggatggccctgtctaagccgtttgtcgaatactgcatatggggctgggacaaccttccaaggactgtactcatgtactacgccaatttcatctcttcaccagaaggctacttccacactgtggtctgcaatgctgaggagtttaaaaataccacggtgaaccatgacctgcattacatatcatgggacaaccctccgaagcagcatccgcactacctcacaattgaagacttggacaggatggttgctagcgatgcaccatttgctcggaagtttcatgcagatgacccggttctagacaagatagatgcggagatcctgttgcgtggcccagacatgctcactcctggaggatggtgtggagggacacgagaaaatggaagtgacccttgctcagtcatcggcaataccactcaccttcagcctggtcgaggagctgtacggctgcagcggctcatgacgtcgctcctgtcagaggagaagtttcacccaaggcagtgcaagtga

SEQ ID NO: 1182 - DNA, 2860 bp, Oryza sativa
atggcgctgtcggcgtccaacagcgagtgcgtgggcgacctggacggggagcagatcaggaaggccaagctgataagcctcggcaggggcgaccgcttcgccgccgtccgggacgacgagcaaaccgcggatgcgctctcccgccgctaccggggactacaactttctgattaccatgagaaagttattgatggcttctatgacatttttggcccctctatggaatcatcaaagcaagggaagatgccatcactagcagatcttcaaacgggcataggcgacctgggttttgaagtcatcgtaatcaatcgtgccattgataccaccttacaggagatggaacaagttgcacaatgtatcctgcttgactttcctgttgcaaatattgcagccttagttcaaagaatagccgagcttgttacagatcacatgggtggacctgtgaaagatgcaaatgacatgctcactagatggctagagaaaagcactgagctaagaacctcactacacacaagtttgttgcctattggctgcatcaagataggtctgtctcgtcaccgtgccctacttttcaagcagattctcgctgatagtgttggcattccttgcaagcttgtcaaagggagtaattatactggtgatgatgatgatgctatcaacataataaagatgaatgaaaggtattgatagggagtttttggttgatctcatggctgctcccggtactcttattccatcagatgtcttaagttggaagggcaactcattaaattctaatgcaagactcacccagaatccattggctgggtcatcaagtacaactgattctaatctcagtgccaatgcattaccacccggacataaaggtggccaactgcctttatttagcagtggcgattggatatcggccagtcaatctggatatgaaaaagatggagccaccacatcttcacaggcctcttcaagtggcacaacatctgttgctgctggaagcgcttttgatagttcttggacattagtttctcatggacaatcagatgatccatcaacctctgctggtatgtcagcacagcagaaagttatacttccaggtggagaacatccatggaatgagaatataaatgcgcgaaatgagaatataaaacttgtttcagatttacaagggaattcagagtccatcaacttatttgccgaccttaatccttttgggggtagggagcccaaaaggacttcagtgccattaaatgggccagataatagaaataatgagttgcaaagacgcagagagaatgtagtccctagcacacgaagaccccagcagcgattagttatgaaaaactggtctccttacaatgatgtttccaacaacaagcagtacaattatgttgaggattcatttgcacgtagaaatattggtgataatgctgcatcatcatctcaggtgccacggccatctgcaaaaaatactaatcttaatgttgtagtgcgcactgatacaccatacatggcagctcataattatgataatagtatggctggttcctctgcaatgaagatgacttctacagctgggattgggaaggttcctgataaggttctgtacggtgatttggacaagggccttactaattctagactgggggatcaaccaccgatagaaagacataaatggggcaattctgtagaaggaaggattccaacaggcacagttcacaatcaagcaaaagaacacaaggagaacttcgatggaaagcaagacaataagaagttacatcctgatccaaagaaatccccacttgacagattcatggacacatcaatgccatcaaggaaccctgaatccgtttcaccatcctttgctaggtcacacaagctagacaccatgttcgacgatgtgtctgaatgtgaaattcattgggaagatcttgtgattggtgaaaggattggcttagcaggttcatatggagaggtgtaccgtgctgattggaatggaacagaagtagctgtcaaagaaattcttggatcaagatttctatggtgatgctttggatgaattccggagtgaagtgcggattatgcgtcgactgcgtcatccaaatattgttctcttcatgggtgctgttactcgtcctccaaacttatctattgtatctgagtatcttccaagcttggcaggggaagcttatataagatccttcaccgtcctaattgccaaattgacgagaagcgtagaattaaaatggcccttgatgtgggccaaaggaatgaattgcctccatattagtgtaccaacaattgttcatcgggatcttaaatcaccaaacttgctggttgacaacaactggaatgtgaagaggtttgtgattttggactttcacgcttgaagcacagtacattcttatcatccaaatccactgctggaactaaacatttactatttctgttttcgatatctcaccagccggagtggatggcacctgaggtcttgcggaatgaacaatcaaatgaaaagtgtgatgtttacagctttggtgtcatcttgtgggaattagcaacacttaggatgccatggagtggaatgaatccaatgcaagttgttggggcagtcggcttccaggacaagcggctcgatattcccaaggaaattgatcctctagttgcaaggatcatatgggaatgctggcagaagggatccaaatttgcggccctcgtttgcacagttaaccagtgctttgaagactgtccaaaggctagtaaccccttctcaccaggagtcccagagccctcctgtgcctcaagaaatatgggtgaattcttccaccccttgatgttgaggggcattccactctcaaaattgtga

SEQ ID NO: 1183 - DNA, 2802 bp, Oryza sativa
atgcctctggggcctgcctccgctgcagcgccgccgcctcaggccgccgctgctccgcctgctcagccgcccgccggcggcgcaacggccggccagaagctcaccacgaacgatgcgctcgtctacctcaaggccgtcaaggataagttccaggacaagagggagaaatacgaggagttcctcgaggtcatgcgcgatttcaagagtgagagaggattgataccaacggagtcattattcgtgtcaagacactcttcaacgggtaccctgagctcatccttggcttcaataccttcttgcccaagggttatgcaatcaagctgcaggaggagaagaagcctgttgatttcgtggaagccatcaatttcgtaaacaagattaagcatgtctataaggcattcttagacatcctcaacatgtaccgcaaggacaataaatccatccaagatgtttaccatgaggatttactcgaagagttccaacacttcttgcctgatacctccgtgcctccacaagctgtggccccttcaaggcctggtattaggcgggatgacaggacctctctggtgcctcctgctagtaggaatgaaaaggagttccatttctgcgaaaaagtgaaggagaagctggagcatgatgcttaccaggagtttttgaaatgtcttcacatatacagccaggaaattattactaggagtgaattgaagaacttgaattgtcagcggtgcactccaagttaccggtttctacctaaacattacccaatgcctcccgcaggcaacaagactgagcttggagcttcagtgcttaacgatcactgggtatcagtgacatcaggaagtgaagactattcatttaagcacatgagaaagaatcagtacgaagagagtttatttagatgtgaagatgacaggagatttgagttggacatgctgttggaatcagttaatgcagcaactaagcgtgtcgaagagttgatagaaaagatgcaagacaactccctaaaaccagatagcccaatacgcatcgatgagcatttaactcgtatgcatcttttatttgtttaatttgtattgttatgtttgttgaatctgaggtgcattgaacggttatatggtgaccatggtctggatgtgatggatgtccttcgaaagaacgctagtgttgctctaccagtcatcttaactaggcttaaacagaagcaggaagaatggtcaaggtgccgatcagatttcaacaaggtttgggcagagatatatgccaaaaattatcacaagtctcttgaccaccgcagtttctatttcaaacagcaagatacaaagaacctgagcacaaaatgctctattaactgagatcaaagaaattaatgagaagaaaagaaaggaagatgatgtgctccttgctattgctgctggaaataggcgtccaatagttcccaatatgtcatttgactatgtagattcaaacatccatgaagatatgtataagatcattaagtactcctgtggtgaagtctgcagttcctcagaccaactggacaaagttgtgagaatttggacaacttttctggagccaattttgggtgttcagcctcggacacatggtgctgaggatgcagatgcagtcaaacccaagagtcgaaccacaaagtctggtcttgcaactgttggggaaatcaacactactgcagcaggggctgttgccaagcatggccatgatgaaaatattccacaggagcaaacaccgtcatctctggctagaatgtcccacaataccccaaaagttgaaagagaagagggtgaattatctcctaatggggattttgaagaggacaattttgcgccttttgaagatggagctgtagatggagtatctaaagcgaaggaaggttccacaagcagaccattccagggtaggtctggagaagcacaaccatcttgtgctgaagcagctggtgagaatgatgctgatgctgatgatgagggtgaggaaagcgcacaaaggtctaccgaggacagtgagaatgcctccgagggtggtgaagatgcatcaggaagtgaatctggtgatggtgaggagtgctctcgtgaagatcatgatgaggaagaggaagatatggatcatgatgatcaggatgccaaggctgaaagtgagggtgaggcagaaggaacaactgagacacatgatgtggaagggggaatatcactcccgctatcggaacgctttctacactccgtaaaaccacttgccaagcatgtacccacagctttacatgaccgagatgaaaagtcctcgcgtatattttatgggaatgattcattttatgtactgttcaggctgcatcagcagatcttgtacgaaagattactttcggctaagacaaactcatccagtgctgaaaagaaatggagaacttccaaggatacaaacccacctgacctatatgcaaagcttcaagctatagcaacagatgaaatggacaacaagcttctccagctttatttatatgaaaaatcaagatcccctgggaggttctttgatctagtctatcatgaaaatgcacgcgtgctcctccatgaagagagcatataccggtttgaatgttcaaatcctacaaaattgtctattcagctgatggaatatggccatgaaaagcctgaagtgactgcagtatcaattgatcccaatttttcctcgtatctttttaacgagtatttgtcgagtatgtcagacagaaaattgtctgagggtgtcttcctggaaaggtattttatccccttaataaaactgaaatgtatctaa

SEQ ID NO: 1184 - DNA, 2764 bp, Oryza sativa
atgatgccgtcggggccgctcaacccgatgggtcccgggcagccggtgggcgccgccgcctcgctgctccggacgagctcaagcctgcttagtggtggtcagcaggggatgggcagtggcggaggcatgattccttcgcagtcgcccttctcatcccttgtgtcgccgcgcacgcagtttggtgctaatggcctgctgggaggtggctccaatgtttcctccctgctcaaccggccgtttgggaatggtggacatatgctcggtccggggttgatgccaggtggtggtgggattccaatgaataccctccagcagcagagaggagggcttgatggtgctggcgatttggttggcgtgggaggttctgatcctctctcgtttccttcatcgtcgcaagttagtttgggcaatcagctgggttcagataatctgcatcaaccaccgcaacatcagcaacaacaacagcagctggatgctatgcacgacttgcagcagcagcagcatcatcagcaactgccaatgtcttacaaccaacaacattgccaccgcaaccaccacagcagccacaggctacagtgaagttggagaatggtggcagcacaggtggggtcaaattggaaccgcagatggggcagcctgaccagaacagctcagcccagatgatgcgccatgctagcaatgttaaaattgagcctcagcagttgcaagctctaagaagtttgagtgcggtgaagatggagcagccgacttcagacccatcagcattcctgcaacagcaacagcagcagcaacatttgctgcagctgacaaagcagaaccctacaagctgctgcggctgctcaactgaaccttttgcaacagcaacggatattgcaaatgcagcagcaacagcagcaacaacaacaacagattctaaagaatctgcctttgcagagaaaccaattacaacagcagcagctacttcgccaacagagtctaaacatgagaactccaggaaagtcggccccttatgagcccggaacctgcgcaaagagattgacccattacatgtatcatcaacagaacaggccacagcaggataacaatattgagtactggagaaattttgtcaatgagtatttttctccaaatgctaaaaagaggtggtgtgtatctctctatgaagtggtcgccaaactactggagttttccctcagaggatgtatggcattgtgagatatgcaatcggaagcctgggcgaggctttggagaccacagttgaggtgttaccacggttgtgccaaatcaaatatgccagtggtacattggaagaattactatatgtggacatgccacgtgaatcgcagaatgcctctggccagattgttttggactataccaaagctatccaggaaagtgtattcgagcaattgcgtgtggtacgcgaaggacatctaaggatagtttttaatccagatctcaagttgaagatcgcgtcttgggagttttgtgctaggcgacacgaggaacttattccacggagatcaataataccacagcaggttagtcaactgggcgcagttgtgcaaaaataccaaagcgctgttcaaaattcgacaaatctgtcaactcaagacatgcagaataattgcaactcgtttgttgcatgtgcccgccaattggctaaagcactggaggtgccattggttaaagaatctgggatacacaaaacgatatgtgcgctgccttcagcagattgcagaggtggtaaactgtatgaaagatttaattgattacagcagacaaaatggatctggaccaattggctagtttgcatagctttcctcggaggacttcatcaggggtcagccctcaccagtcacagcagcaacagcctgaagagcagcaatctataccgcagagttcaaaccaaagcggtcaaaatgctgctcccatgaccggtgtgcaggcttctgcctctgcaaatgcagatgtgacatcaaataattctctcagctgtgcaccctcaacgtctgcaccttcaccatccgttgttgggctcctccaaggttcaatgaactctagacaagatcatccaatgagcagtgctaatggtccatataccagtggaaacagtgctgcaattcccaaggtgaactcgacaacctcactgcagtcaaatccatctacctcttttccttcacccatgccaacaacatccaataacaacatgatgcctgcccctcagagcacaaaccaactcagctccccaaccacatcatcaaacctaccgccaatgcagccacctgctactcggcctcaggagcctgagccaaatgagtcccaaagctcggttcagagaatattgcaagatttgatgatgtcaccgcagatgaatggtattggccagcttgggaatgacatgaaaagaccgaacggacttacatctagtgttaacggagttaattgtttagttggtaatgctgttacaaataactcaggaatgggaggaatggggtttggggccatgggtgggctaggtccaaatcatgcagctagtggattgagaactgcaatggtgaacaatgcgatggcaatcagtggtaggatgggaatgaatcacagtgcacatgacctatcacagttgggccaactacagcagcaacagcaacatcaacagcagcagcagcagcagcaacatgacttaggaaaccaactgttgaatggacttagagcagcaaacagcttcaataaccttcagtatgactggaaaccatctcaataa

SEQ ID NO: 1185 - DNA, 2751 bp, Oryza sativa
atggctgttgtcgatcctgttatgtttgacaacgacgacgaggaaggtccgatctccttcaagaggtcgagcacctctgtgaagaacaggcccacccccacaaagcaggagggctcatcagggaatgccggacctattaggagccctaaggctgttgcttccaatcaacagaagaatgggctgactggtgtttcgaggcctttgcaacagaggccgcagtcaagcagtccaaaccctcgacctttgggatcaggtcagccgaacagttccaaagaacatagtagccataatagtaactcagtggataagagtaaattgaaaagacctttcgtggaagataagtcggatgactcagaagatgaccataagccaatcggattaaggagaaaggtcgaggatagaaatttgaagaaacctgctgtaggaagtgggacagcaaatgattcagatgatgataaaccattgagtctcaagataaactcaacaaaaacgccttcgagtagtgcaaataaggctattgtactgaaaactacacctaaaattgagcaacctggtgatgattcagaggacgataaaccactggccagcaggttgccaactaatgctgctctgaaaaggggaggtaatgtttctgatgattcagaggatgagaagccattggctgcccgattttcgaaagttactggcaatgcatctgcaagtatctcaagttcaaaggacaaggtcctgtctgcaagtataaaagcaagttcttccagcaagatgtctaacaatgacgcgagcacatcacgaaattcaattaaaaggccaattgacaataataatcaaacaagttcagctctcaagaaggcgaggccttcagatgtttctgcgtctgcaagtgtcaaaagagaacccaaggcggatgacaatgacaatgtacctctttcacaaagactgaaaatgggtgagtcttcaaaaagcaagccacctgcaaagaatatcgtaaagaagagtccttcatctttaaagaaggacaacaagaaaatgaaaatgaaaatgaaaacaaagaaaacaatgaaaaattctcagttctcaaagacaatgaaggtccctcctggatctggtggtggacagaaatggactaccttggtgcacagtggtgttattttcccccctccatacaagcctcatggtgtcaagatgctttacaacgggcaacctgttgatctgacgccagaacaagaagaggttgccaccatgtttgctgtgatgaaagacactgattatgcatccaagcaaacattcattgacaacttcttcactgattggagaaaaattcttggtaaaaaccatgtcatcaagaaatttgagctttgtgatttcaccccgatctatgaatggcacctaagagagaaggagaagaagaagcagatgacatctgaggagaagaaagcattgaaggaagagaaattgaaacaagaggagaagtacatgtgggctattgtagatggtgttaaagagaaggttggcaatttcagagtagaaccacctggcttgttcagggggcgcggagagcatccgaagatgggaaaactgaagcgccgcattaaaccaagcgatattacaataaatatcggaaaaggggctccgatccccgaatgtcccatacctggagaaagttggaaagaagtcaaacacgacaacacagttacatggttggccttttggaatgatccaataagccaaaaagatttcaagtatgttttcttggcagcaagcagtgcattaaagggccaaagtgacaaagagaagtatgagaagtctcgaaaattgaagcatcacgtacacaaaattcgtgacacttacacaaaggatttcagaagcaaagataagacaaagaaacaaattgcagtggcaacataccttatagataagttagcccttagggcaggcaatgagaaggatgaagatgaggctgaaactgttggttgctgtacactgaaggttgataatgttacttgtgttcctccaaataaactgcagttcgacttccttggtaaagattctataagatacttcaatactgtagaggttgaactgcttgtatacaaggcaattgaggaattccgtgctggcaagaaaccaggacaagatctctttgacaaactcgatacaaccaggctaaatgctcatctaaaggacttgatgcctgggcttaccgcaaaagtgttccgtacatataatgcttcaatcaccttggatgatattttgcacaaagaaacagaagatggaactcttcttgaaaaaattgcggtttatcaacgagccaacaaagaggttgctataatctgtaaccatcagcgtagtgtctcaaaatcacatgattcccagatgactagattgaatgagaagattgatgaattgaaggcccaaagggatgaattgaaggcagacttgagcaaagtaaggaaaggaaagaatctaggcaatgacaaagatgggaaaccaaaaagaaatttggcccctgaagcgtttgaaaagaagatatctcagattgaaaccaagatagagaagatggagatggataagaagattaaagaggatttaaagacagtggcactaggaacttcaaagatcaattaccttgatcccagaattactgttgcatggtgcaaacgccatgaagtacccatcgagaagattttcaacaaatcactcattgcgaaattttcgtgggcaatggacgtcgacccggatttcagattttaa

SEQ ID NO: 1186 - DNA, 2582 bp, Oryza sativa
atggcggggttgattccgccgttctccggattcttccatgaggttttggatttctatgaaatccatgccttgcatctcgcacccaacgccgtgatgacgctggccatcttcgcgcatctgtgcgagatgttcatcggggtgcggctgacgatgcggctgttccagtctttcttcatcccacagctgctgcaaggtgcggtggtggggggatggcctgcgaagcctgggcctcacaggggcgatggtctttggtgactatttccgccgccgcatcgcacctctccaggatcgatcccgtggcgcgtgggagtacactggtcccaacaaccccatgcgcacgcatgtgggtgagcgctgggactgggaggaggaggacgcgaagatggtgattcggcgggtactgggcttggactccgccgagcaaacactgattccagacgggatcctttccctatggtgcgaccgcgaccgggagagcatcctggccgtgtcggttgttggcaccggcaggagcaggtccagccgggacggcaccggtggtagcgctgccgatgttgctggcggtggcgcgacagcaggcgggagtcggacaagcggacccggcgggggtgggagctctaggtctcccggcccaaaccgcggacccggggacgactcggccagcgacccgaaagggaagcggaagatgtccgaatctcgaccgccctctcccccgcgtggagggggcgccgagcgcgtggatcgtccgctagcgggccacaagagccctgccgggaccgaggccggacggaagaagaaacggctccggaagataggacaaatggagccgtgtcgggggagcttcattgagcccccgaagtggactttcaaccgccctccccgcagatccaaggccgcggggccttcacagcccctcggcagggcccacgggccgcataccgggtccggccccgagcgaaccccagccgggactcgtcccgccgcgggcgatagcggcggtgacgtccctcctgggggcgactccgagaccagggttcatgcggagcgccacccgggatcggggggcgaaggaggtcgtggctcggatgccgaggccggaggcggccttgagctcgaggtcaaggccgaaatcgggggcgggcccgagccggaggccgagtccgaaattgggggcgggcccaagcctgaggccgaggccgaatctacccgaggacccgaggcgggggccaaaatccaggcgcgcgaggagtcgctggactccgtcatgcgagaggtggaggaagagcggcaggcggcgctgattgcctcgagcgtcctggacgaagcactgggtgacatcgccttcagtacgaggcccatgccgaggatctggcgaagaggatcaaggacgcccgcggtatcctcgacgcagctgctgcccaagagcagcggggtatcggaggccgatgcctcgctgcgggctcggaacagcggcgctcgaggccgaacgcagggccttggatgagcgtgtccgctccacgcaggagttcgagaccacgattcgccggcgaatcgaggtcctcgatcagagccagcgtgagcaaaacgcgcgtggccaggagcaggcgcagcgagcccaggagctgaggcggactcaggcgctggaggagcgagcgcgtctgctcgatctgcgggagtccaccttggccgcccacgagagaacagcagcggaggtggaggcctcccttcaccttcgtgaagaggccgcagctgagcgtgaccggatcaccgagctacggctctgggaagaggcgtgccgagaacgggacgttgtactcgccgagcgcgaagctgagagtgctcgcgccgagcgcgcggcgatagcggcgagggcttctgagctggaggcccgtgagaaggacctggcggcgggcgggcagcccggcggcgcggagttggggagccagcttgccatggctcagagcactctcgccgatatagagcgcttggtgcaagatcaggccagggagattgcggccctccgcctcaccaacgggatcggacccgggaagctctccgacgccgtcgaccggctggagcgcgcggggcgccgagtcggcatttccgtgcaccgggatagtaagcttccgcccacacgcccggcagtcgcactccggctggacgggctggcggcggatctggagaggctggagaaggaggtcggcgagactgtgaaatcgtcgtcggctttcttggcgcgggacgcggtggaactggtcctcgcgagccaccaagcgcgtgaccccgacttcgtcccatggcgcgcactcgaggattttcctccagggaccgaggcaagggctcgggagcaagtccgggaggcggccgacgcgatcgtctctaacttcgaggggtcggccccccggttcaccttcgggcttgcctcggacaaggagagcgggagcggggacgatgatgacgacttcggcggcgaggactgggacgacgtctgtcacgcccagaaatttaacccaaatttccggactattttgtgtattaaatccctgtccaggacaagccagggtacacaaaacgacaagtaa

SEQ ID NO: 1187 - DNA, 2494 bp, Oryza sativa
  N_region (1102)..(1102): n = any nucleotide
tccgttgtggaggaggaggacgagcgccgggtggcgcacatcgtcgagcacctcgccttcagcgccacgtcgcgctacaccaaccacgacatcgtcaagttcctcgagagcatcggggccgagttcggcgcctgccagaacgcgctcacctcctccgacgagaccatctacgagctgcttgtccccgtcgacaaacccggcctgctctcccaggccatctcagtcctggccgagttcagctctgagcgtgtgtcggcggaggatttggagaaagagaggggtgctgtattggaggagtataggggtggacgtaatgctactgggaggatgcaggattcccattgggcattgttgttcgaaggctccaagtctcagtatgcagaacgcctgcctataggtactgagaaggtgatacggactgttcctcatgagactgttaggcacttttaccataagtggtaccatctaagcaacatggctgtctttgctgtaggggacttcccagatacacaggttgttgaaatgataaaggagcactttggccagaaagccccaccttcatgtcctccaccagttataccagattttccagtaccatcgcatgttgaacctcggttttcatgctttgtggaatctgaagctgcaggggttgtcagctgttgttgttagctgcaagatgcctgctgatagaattaaaacggtgacggattatcgggattctctggcagagtcaatgtttcattgtgctttgaaccaaaggctgttcaaaatatctcgcaggaatgatcctccatacttctcttgctcttcagctgcagatgctcttgtagttgctagggttcggctccatggattttctgaacgtgagatatccattgcacgtgctttaatgatgtcagatatcgagtctgcatatttggaacgtgatcagatgcagtcaacaacccttcgggatgaattcttgcagcagcattttcttcatgaagatcctgttgtcgggattgaatatgaagcacagttgcagaagactcttctaccccgttgtattgaaagtcaacactcttgaacaagacaacgctattcctccatgggatgaagagcnaatccctgaagaaattgtcagccaaagtccagagccagggtattagctgtctcatgattgactgtcttctacagagatgatactttcgaatggcatgcgaatttgctacaagtgtactgactttcttgatgatcagcaggttgtttttactgggtttgcctatggtggtctgtctgaattgtctgaagatgaatatacctcatgttcaatgggttcaacaatagcaggagagattggcatttttggctacagaccatctgtcctgatggacatgcttgctggcaagagagctgaacagcttgtctaccaattatttacaacaaaggtggagccaagagaggaagaagtaaaaatagtaatgcaaatggcagaggaagctatctatgctcaagaaagagatccttacactgcatttgcaaatcgtgcacgggagataaattacgggaattcatacttctttaagccaattagaataagtgacttgaagaaggtggatccaataagagcgtgtgaatatttcaacaattgcttcaaggatccatcagcttttactgttgtaatagttggaaacatagacccatctatctcagttccactgattctgcagtacttgggtggaatacctaacgtagggaatgcagttctgccacttactcgtgatgatctaaaaggattgccattcaagtttccggagactattattaggaagttgttcgcagccctatggttgaagctcaatgctttgtgcaactaggatttcctgtggttttaaagagcacaacaatgattcactatgttgggtttctaagtaaacttctggagacgaaaatcatgcaagtgcttcgtttcaaatatggacaggtaggtgtcttcttaggtggcaacaaaccttcaagaagtggagatattcgtggagatataagtgtgaatttttcatgcgatccagacatgtcatccaaacttgtatgctctatatcctctggttaacctgtatgctattttgttgttgactttgtgctggaagagatatcatttctacaaaatgaaggcccttctgaagaagacgtattaactatccttgaaattgaacaaagagctcatgaaaatggattacagcaggaaaattactactggctggatcgagttctgcggagctatcaatcaagggtttattctggagatgttggatccacctttgaggagggacgtctaaaggttagagaggctttgacaccacaatcgatgcaaatggccttgcaaagagttgtgcctttcccttgcagaaaacagttcactgtagttattcttatgccgattttggctggcatggctggcgcaatagtgttagcggtcagtttgtggagatactcacgtagcacattgagatcatag

SEQ ID NO: 1188 - DNA, 2469 bp, Oryza sativa
atggagcacgggagcatcatcgcgtcggccgtgggggtgggcgtcggggtgggggtcggcatcggcctcgtctcgtcgcggctgaccgggttggcgactggcggcggcgccacggcggcggaggtggaggcggagctgcggtgtctggtggtggacggccgcgacgtcggcgtctccttcgacgacttcccgtactacctcagcagcgagcagtcgaagctggccctcaccagcacggcgttcgtgcatctgagcccaacgatcctgcccaatcacatccgcgtcctctccgcgtccagccgcaccatactgctctgcggcccatcagcagaggcgtaccttcagtcgctcgcgaaggctctcgcaaaccagttcagtgctcgcctgctgctgctcgatgtcatcgacttcgcgtgcaagagctccatcataagtacggcggtccaagcaatacacagacacagacccgtgagagatccatgacagaggcagccttcgatagagtgtctagtttggttggagctttcaatctgtttcgcaagaaggaagaaccaactggaacagaggaccattgagccgtgaaacaggcatccttgatctcaggactagagcacttgttgtcctcataacacaccttcagtacgggttcagttatccttggtacctcccgagaaggaccatgatcccgaatcttctaaataccttggcatcagttaaaccatgctggagtttgaatgagaaggttctcatacaatccctttacaagagattatagtttctgcttctgaaatcagtccagtcattctttacataagggatgttgatgacttgcttggaagttcagaaaaagcatactgtatgtttcagaaaatgttgaaaaaactatctggacgggtaatcgtgattggttcacaattcctcgatgatgatgaggatagagaagatattgaagaatctgtgtgtgctcttttcccttgtattctggagacaaagcctcccaaagacaaggtccttcttgagaaatggaagacccagatggaggaagattcgaataataacaataatcaagtcgttcaaaactacatcgcggaagtgctcgcagaaaacaatcttgagtgtgaagatttgagctcgatcaatgcagatgatgattgtaaaatcattgtggcttacttagaagaaattataaccccatctgtctcttaccatctgatgaataacaagaaccctaaatacagaaacgggaatcttgtcatatcttcggagagagcttatcccatggattacgcatattccaagagagcaacgaccttgggaaagatacagtggaagcaaaggatgagacagagatgggtcgttccagacaatgagtatgaaaagaagatccgaccaacggttataccagccaatgaaataggagtgacatttgatgacattggagcactggctgatatcaaagaatgccttcacgagcttgtcatgcttcctcttcaacgacctgatttcttcaaaggtggtctcttgaagccatgcaagggcgttctgctgtttgggccacctggtacggggaaaacaatgctcgccaaggccctagcaaacgcagcaggagctagcttcttgaacatctctatggctagtatgacatcaaaatggtacggggagtctgagaagtgcatccaagccttattcagccttgctgctaaacttgcaccagcaatcattttcatcgatgaggtagacagcatgctagggaaacgagataaccatagcgaaaatgaggcatcccgcagagtaaaaaatgagttcatggctcactgggatggactcttgtctaagtccaacgaaaggatattagtccttgctgcaacgaacaggccctttgaccttgatgatgcggtgataaggagatttgagcacagagaatcatggtcggcctcccaacgttggagagtagagagctgattctgaagacattgttgtcgaaagagacggttgaaaatattgatttcaaggagcttgccaaaatgactgaaggatacaccagcagtgacttgaagagaatatttgcgtgacggcagcttatcatcctgtcagagagctacttcagaaagaaaagaacaagaggtcaagaaggaaactgcaccagaaacgaagcaagaaccaaaagaaaagaccaaaattcaagaaaacgggacaaaaagttcggatagtaagactgaaaaggacaagcttgacaacaaggaaggtaagaaagacaagcctgctgacaagaaagataaatcagacaaaggcgatgctggagagactaccctgagaccgctaaacatggaggacttgagaaaggcaaaggatgaagtcgccgctagcttcgctagcgaaggcgttgtgatgaatcagatcaaggaatggaatgagctctacggcaaaggcgggtcgaggaagcgggagcaactgacatacttcttgtag

SEQ ID NO: 1189 - DNA, 2463 bp, Oryza sativa
  N_region (1454)..(1454): n = any nucleotide
  N_region (1598)..(1598): n = any nucleotide
  N_region (2090)..(2090): n = any nucleotide
  N_region (2101)..(2101): n = any nucleotide
  N_region (2128)..(2128): n = any nucleotide
  N_region (2158)..(2158): n = any nucleotide
  N_region (2174)..(2174): n = any nucleotide
  N_region (2186)..(2186): n = any nucleotide
  N_region (2201)..(2201): n = any nucleotide
  N_region (2220)..(2220): n = any nucleotide
  N_region (2255)..(2255): n = any nucleotide
  N_region (2275)..(2275): n = any nucleotide
  N_region (2277)..(2277): n = any nucleotide
  N_region (2283)..(2283): n = any nucleotide
  N_region (2285)..(2285): n = any nucleotide
  N_region (2300)..(2300): n = any nucleotide
  N_region (2312)..(2312): n = any nucleotide
  N_region (2372)..(2372): n = any nucleotide
  N_region (2377)..(2377): n = any nucleotide
  N_region (2383)..(2383): n = any nucleotide
atgggcggacttgtgcctttcaccgagctgaatgagttcgacgaggggtgcactgtagcgaaaagcctgcttgttcaggtatgtgtttcgatttactttgcatttgagcacactgagcgaccgagcgacccgtttaagctagaactagcgcaattgcagtatcaaagacctgaggatgacccggattatattcctatcgagcaggcgatggttacccgtcgtcggtcgaaacgaaatgccggcagggctgaacctgagtcggacacaacgacctcaggaccacagccaacggacacaacgacgagtggggaagcttgtgcaaagaaaaaacgtggcaagaggagcaggaacctgatgccgaaggagacgtactacattgctgctctcaacgatgatggcaaacccgtcgagctgcaacatgtgagggcgaagtttagcaccgcatgcggttcgctggcaagacttcatgtggctctcaacgtggacgactggaagcacgttagcatacacatcaagaacttaatgtgggaagccccctgggtcagaggcacttggttggaaatttgcactgcaaacaattgcccatcgctggcgatagtggaagtcggacatgaacactcattatgttcagaagaataagactccatttgaagaatggggcaccatttcggcagtcgagtgggacaagtttgtgcccaagatgacaacgcctgaagctctagaaaggaggaagaagatgtcagacctggcgaagaagaacatatatccacacaggttagggtcaagtggatacgccggtcacgagaagaaatggcgagctacggaggataagtttgcgaccgaaggcaaacctttgattgtgcaacccctaaataagcgaactagaaattgggtgtaggcaagaacttcgggccaagtgacagaagaggatgagatgccgttggattgtcctgacatacagaacatgaccacgtctctccaacagatcgtccagaaggagaagatcggggagttcatccctcgacggcagcatgatgagctaaccgaagctttgggaactacagaacactccggtagggttagaggacagtcgtgcaggacgaattggaaggtagggtttccacaggaagcccaaagttacaagaagcgcgatgcctataaggccaagatgcgccaggaaatcatagattaagtcacacaacaagtcacccaacagttctatagtcttgccacacaacatcctcaagccttccctgacctggttcctcagggatcgcagtcgacgcagatcccaagctctgtcgggtcggtagaaaatacaacctacccagtagatagtataactgctccgacaccatgcagccttgtggttctgatagggagagcgggaaaaacaaaggaggttgtgtccggattagcgataccgggtagacagttccataacattccggcgnagtacgcaagggttcaggtggcacgtgttaatggcgaccagatgtcgttggagcttgacatcgtaacaccagaggggattgaacttctcggggatgcggttcaccagttcatactttggcatcgtcaagacatcatcctcactnggacagttcacgtagacgacccaagctccgtgccaaaggagtatgaatatggcaagccgttcttgccgtacaacttgatgtgtgaattcgcatggccaacgaggttgatgcatgactggtacttgagggcaagtgagttaggtctcgggatgattactgtgcatgttctggaaggcgctttcaaggatggacctaacgcaaacttcgccatcagtttcaaggacctccacgctttctttaagatggataaaatggatatcaatttcgtcggcgcgtggtgcctgtaagcattccatggggcatcaatcggttatgtaaatccaacgacggtttgcgagacggcccacactgtgcggatatcggaggatagtgcggtactaaagaataagacacctcaggagaaaaaagattacatcgagcgtatgcataagagaaaaatggccgaggtgggaaattacttggccacctcatttctcgcacactccgacaaangagtcatcatngtcccctaccactttggcactacatantattcctcgtctatccaacggaccaaaccntcgtagttcttgatcnggcagactatgncaaggacgcgtacanggagttcctatgcttgctnaactttataagaaacgtggcggtgttataagcaanctagcttgacgaacctatgngngtgtgngngatgctcagggtcantgggagatacanaactgagtttacagatgcggacttgtgccggttcattcgtcgcgacatctgcaatcatcnagganagttcnatgatcctcatagcaaacttgctacggaccccaaattcaagaacctaagagagtgggagagggaacatgctgtggactaa

SEQ ID NO: 1190 - DNA, 2426 bp, Oryza sativa
atgagcaggccaaacacacgaaataagagcaagaggccgcgggctgatgactgcgagagcccgtctgctgttttcaaaggaagatacattccactggagcaatcacaaaaggcgatattaaacaactttatatggtgtggaaacctgtttgtcatggttgccatgggaactccaaggactcacccaattgtttctgcgggttgatccctgctgctaatggggtgaggaaatctggcctgtggcagagaacaaacgagatcattcgcgcccttggtcctaacccgtcgacggatcttcgtgactccactgagacgcctgctggattgactaacctgggcgctacctgttatgcaaacagcatactgcagtgcctttacatgaacacctccttccgcttgggcattttctctctagagcccgacatcttgaagatgcaccctgtgctggatcagcttgctcggttattcgctcagctacactccagcaaaatggctttcattgattcggcaccttttataaaaaccttggaattagataatggtgtccagcaggacagccatgaattcctcacattatttttgtctttgctcgagggttcactaagtcattccaaggttccaggggctagaaccattgtgcagcatttgttccgtggaagtgtgtcccatgttactcggtaggtgctcatcatgtggaagggattccgaagcatcttcaaagatggaagacttttacgaactggagcttaacattaaaggtttaaataatctagaacaaagtttggatgactatttgagtactgaggcactggatggagagaaccagtacttctgtgagtcatgtcagaaaagggtagatgccactcgttgcataaaacttcgctcacttcctcctgttgttaattttcagctgaaacgctatgtattcctcccaaagtttcgtccacagacaacaacaaagaaaaagatttcttcggcattcagtttcccaggacagctagatatggggaagcggttatccaatccttcatctagttatactctgctattttgatccacaagggtagtgctgccaatagtgggcactatgtagcacatgtaaaggacgaaagcaatggtcaatggtgggagtttgatgatgagcatgtatccaagcttggtcttcatccctttggtgaaaaaccaggagatgttttcttctacagatgcttatatgctgatgtacacagagaggcgccaagaagtaaaatctgttctgacagaagcgcctgcaactccagaggaggattcttatttttggatttcaacagattggcttcgccaatgggcggacaactgtgaacatggaaaagttccagcgtcaaaagttacatccatgaaacgactatcagctggagcttggcataagctattttctaaacttaaggatggagcaaaaaattcagtatctgcagatgtttatcgtgatcggcaatggttgcgcagaaaaaatgtggatatcccttcagatgctgacagtggaccaacaattgctctaacgtgcacccatggaaatcttcttccggaacatgcttcaggcgcaaagcgggtcactgtgccagaggacctatggttatttctctatgaaaccagtggaatgaagattgatgatattgtgacttttccgtcagatagtaaactcaagcaacgacaaagccatgaaaagttaacttctgggaaaagtcttgcacttcatcctgggcaaaaatattatttagttccttcctcatggttgtcagagtggagagcttacattacagcgactgggaaaaatatttcttcgttaccagaacctcaatctcttgaagttaccatcaattcactaatctgtgaaaagactgatggattaacaatgatatcagaatctgattggattttattctctgaagagtggaatgtagcacatggaaaagtgtgaagaatgtattggagaaaaagagagctgtgcattggttgagaagctcaattatcagaatgaagatatccaggtttatcttgtccgtggtaaagaagcgccaaagtcaattagagaggcatcggcagctgttcctgtaccagatcgtaggacttcaaagcgttcccggagaacaacctcaggaaattcgatcagtttgaaagtctctggttctacaaccgtatatcagttgaaactcatgatatgggaatctttagggaaggagaaccaggagcttcacaaaggctctgttgagattgaagatgattttgctactcttgctgacaagtgtatttttcctggagatgttctatgggttaaagattccgaaatctacgagaaccgtgacatagcaggaggaaggctttcgtgggactctgttgacatctagtgcttcagctcagctttgccaggatatatcatttagcgattga

SEQ ID NO: 1191 - DNA, 2329 bp, Oryza sativa
  N_region (221)..(221): n = any nucleotide
  N_region (1565)..(1565): n = any nucleotide
atggctctctcggcggcgctccggctgccgctcccgcgcctcctgtggggccccacggggtccctcctcgcggcggccgctgcggcctcccgccgccgcgccgcggtcgtggccgtccccgccgtccgcttcctctcctcctcatcctcctcctcggacggctcgcgctccgtgcagcccctccgcgcgggccgcgatgagcgggcggcggcgggtaaggncggggcggcggtaaaggagcgggtggtgcccgtggagctccacaaggaggccaccgaggcgtacatggcctacgccatgtcggtgctgctcggccgcgcgctccccgacgtccgagatgggctcaagccagtgcaccgcaggatactgtgagctctctccctttatttttcctggattgttcgctttgcatctatacaccgaagctatgcatgagatgggtcttgcatcccgtagaccattcagaaaatgtgcaagggttgtcggtgaggtactaggtaagttccatccacatggagattcggccgtatatgaaaccttagtacggatggctcaggttgacttcgtcccaaactttgataattcacagaaagagccttctctgttgccagctcgtgttccatctctattgttgaacggttcttctggaattgcagtagttggaatggcaacaaatattcctcctcataatctgggtgagcttgttgatgtgctctctgttatgattgaaaaccctgaagctactctccaagaactactagaatgcatgcctggacctgactttcctacaggagggacaatcgtgggaaatcaagggtatttggaggcctataaaactgggcgtggtcgagttgttatgagaggcaaaactgacatcgaaacaattgatgtgaaaagcaaacgctctgccattataattaaagagccataccaaacgaataaatccactcttgttgaaaggatagctgagcttgttgaagaaaagttagaaggcatcagtgatattcgggacgaaagtgatcgctctggaatgcgtgtagtaatagagctgaaaagaggtgcagatcctgccatagttctgaacaacttgtaccgtcatacagctctgcaatctagttttagctgcaacatggtagcaaacttctgctttaggcattcattgacttcagatgttctgttattgaaaggcgtgcaagatttaagctttcacaagctctggaaaggaaacatatcgttgagggcattgttattggtcttgacaatttggattctgttatcgaatttggtctgtctgacaagcaagcagaagccctattggatatcacactaaggaaacttacttcccttgagcggaaaaaatttgttgacgaagctaaatctttgtcagaggagatctccaagttaaatgagctcctgtctaacaagaagcttatttttcagcttattttacaagaggcaactgacttaaagaacaaatttgctaccccacgacgttctttcatagaagattcagcaagcactgaagttgatgatcttgatattattcctaatgaggaaatgctttnggtgagaaacagtgagaagggctacgttaagcgtatgaagcctaataccttcaatctacaaaaccggggaacgatcggaaaatctgttggaaagatgcgaatgaacgacaatacatccgatttcatgtctgccaaacacatgatcatgtcctttacttcagttcagtgacaagggaatagtatactcagcacgtgcttataagatacctgaatgcacaagagctgcgactggaactccactggtacaggtatagtgatggatgttcagctgctttctttgtccgatggggagagaataacctccatcgttcctgtaaatgaatttggtgaagatcagtatcttgtgatgctgaccgttaacggttatatcaagaaagttcctcttaatgctttctcagcaatcaggacttctgggatcatttcaattcaactgggtgatgagctgaagtgggttcgtcgttgtggggatgatgaccttgttgctttggcttcacaaaatgggatggttatagttaatacatgcaacaagaggaaaacaaggggcgtcctggcaatgaagctaaaggaagccatggctgcttttcatagctgataatggtattgggaagcgtgtgcccctaaatgcattccggcaaggaaatttcaacagagtgggcttgcaaggctacaagagtgacgaacaggtggttttagttagccagagtggtactgtaaacagaatcaaagtcaaagatatatccatccggtctcgttccgcaaggtaa

SEQ ID NO: 1192 - DNA, 2325 bp, Oryza sativa
  N_region (259)..(259): n = any nucleotide
atggggaagccggcggcagccaagaagccgccggcgagcgcggcggtcgacggcgacgaggaggtgttcctggagctgtcgcgggagctcaaggaggagggcggcaggctgttcaaccggagggactacgagggcgccgccttcaagtacgacaaggcggtccagctcctccccagcggcggccatgccgacgcggcggcacacctccggacctgcgtcgcgcagtgctacatgcggatggcccccgccgagcaccacngcgccatccacgagtgcaacctcgcgctggaagcggcgcccaggtacagcagggcgctgctgcggcgggccgcctgcttccaggcgctggaccggccggacctggcttgggaggacgtccggaccgtgcttgcctgggagccggctaaccgcgccgcgcgggagatctccgacaaggtcagggcggcattggaggagaagggcgttcttgtcttggagaaggaacccgtgccgccgccgccggagcacaaggctgttagtgcgaagggacaggggaagttgaagaaatctcataaacagtgtgattctgctattgaggggcaggagctgattcatgtcgaagattatgagcaaagtgagaaaacagagctgaagattaatggtcaggagaatggagaaaatcgtgccgggaaggagcaatttgattgtaatgtacctgtcaagcaagaaattcgaaccgaccagccggaagcaaatggagtaggaaaacatcaatatcatatggacgataaggaaaacaagggtttagataaggaaggaaagaatggcaaaccagggaagcacagtgcaggaaagaaaattaggcgtgctgacgccaagaagcaaaagcattccgctatggagccagtgcatcatgctgaggaaaatcgtcatgagcgttacacggagaccagtgtccatgtcaaggaagcaatgaaggatctgaagctggtctttggggaggacattagatgtgctcaaatgccagctaactgcaatctgtcacaattgagagacatagttcaaaacaagtttccatcgttgaaagcgttgcttattaaatataaggacaaggaaggtgacttggtgacgatcacttcatcggatgagcttagatgggcctacagcttggcagatctggaagggccaattcgactgtacattgtagcggttgatcctgcacaagagctaggtgtggatgtggtcaggagacgctcttcatttgcctcattagagaaagcttattatagcatgtcggagaatgggagcagtaggcatgatgatgatcacaactgctctattgatgactggatgatacaatttgctcggctattcaagaaccatcttggttttgattccgactcgtatttggatctccacgaccttggcatgagattgtactatgaagctatggaagacactgttgcaagtgaagaagcacaggaaatatttcaagttgcagagctaaaattccaggaaatggcagcattggctctgttcaactggggcaatgttcacatggcttctgcgagaaaaaggcctcccttgtcagacgatgcttcaatggaatgtatacttgagcaggttaaggttgcttatgaatgggcttgtgcggaatatgccaaagcgggcgcgaagtatggagaagctgtgaaaacaaaaccagatttttttgaaggtcttattgcacttgggcagcagcagtttgagcaggccaagctctgttggtattatgctcttgcatgtaagatagacatgggaactgaggttttgggattatttaaccatgcagaggataatatggaaaagggaatggggatgtgggagggaatggaaaatacacgcttgagggggctctcaaaaccaagtaaggagaagatcatatttgagaagatgggcatagatgggtacatgaaggatatgtcttccgatgaagcatttgaacaggcttctagtatccgatcgcatgtaaatattttgtggggcaccattctttatgaacgttctgtagtggaatttatcttgggacttcctagttgggaggagtctctaacggttgctatagaaaaatttaagactggaggtgcttctcccgcagacatcaatgtgatggtaaaaaaccattctgctaatgaaactactcaagaaggactgagttttaaggttgaagaaatagttcaagcatggaatgaaatgtatgatgcaaagaagtggagaaatggagtgccatctttccgacttgagccaatattccgacgtagagctccaaagttgcatcatatgctggagcatatacactatgcttga

SEQ ID NO: 1193 - DNA, 2310 bp, Oryza sativa
  N_region (1248)..(1248): n = any nucleotide
  N_region (1261)..(1261): n = any nucleotide
  N_region (1272)..(1272): n = any nucleotide
ccttatgaagttctgtttcgtctgaactctctcatgcatatggggaagatagtcgccaagcattctacctgctacgggcctttacaatttatccaacaggaggcttatagcatgaagagaagccataatgttttgctctccaatgaaggtgaaggtgaaggtgaaagaaaattgatgaagtgttatagagttaacataactccctccaaaatattctgctttggacctgaagaagaggttacaaattatgtggttaagcatcattctgcatatgcttctgactttgtgagagttacttttgttgatgaagattggagtaagctttcttctaatgcaatctcagctagaattgaacaaggtttcttttctaagcctttcaaaactggtctatattatcggattctctccattctaaaaaaaggattttccattggtccaaagaactttgaatttttggccttctcagcaagtcaacttcggggaaattctgtttggatgtttgcttctaatgcttccttgaatgctggaggtataagaagatggatgggccactttgagaatatccgttcagtttctaaatgtgcagctagaatgggtcagctgttcagctcctccaggcaaacatttgaagtcttacgatgggatgtggaagtgattccagatattgagatcacaactgatggctccaaatacatattttctgatggtattgggaagatatctttgagatttgccaagcgagttgcacaccacgttggattagatcctactaaccttccttcagcttttcaaataagctttctctgcgtcctagtatgaagaaatttgagtctgagagcaggatgttgaacattacaagttggagcaagtctcagccatgctatgtgaatcgtgaaattatttctcttctctcaacattgggtataagggatgaaatttttgttgcaatgcaacaagatgagatgcgtgaaacagaagaaatgctaaccaacaaagaagttgctttgtcagtcctagggaaacttggtggttctgaaacaaagacagcagtgaagatgttgctgcaaggttatgagcctagttcagagccttacctgtcaatgattcttaaggcccatcaggagaataggcttactgacattagaactagatgtaaaatacatgttccaaaaggccgtgttcttattggttgtttggatgaaacaggtgtattagaatatggtcaggtttacattcgaattcaaagtnacagcaaagaacnaaaggacagtnatcaatcatatttttataatgatgacgggaaaacagccacagttgttggaaaagttgcaatcacaaaaaatccgtgtctccatcctggtgatatccgagtacttgaagccatctatgaccctgatttggtgggcatggttgattgtcttgtcttccctcaaagaggagaaagaggcctcatccaaacgaatgctcggggggagatttggacggcgacctctattttattacttgggatgacaaacttattccagagaaagttgatacacctatggactacacagcaacaaggccgcgcataatggatcatgttgttacactcgagctgcaggaaattcagaagcactttgttgattacatgataaatgactcgcttggtgccatctcaactgcccacttgattcacgcggaccgttcgccactgaaagctcggagtcccgagtgcctccagctggcaactctgcattccatggcagttgacttcgccaagacgggagctccagctgaaatgccgcgaacattgaggccgagggagtaccccgacttcatggaacggtgggagaagccgattacgatcctgacctcgaggtccctggctctgacgaattcctgcaagctgcagaggagtactacgagctgtacgaggagaaactgaccacgctgatgaactactaccgtgcggagctcgaggacgagatcctgacgggcaacatccggaacaagatgctgtacctgaagagggacaacaagaggtacttcgagatgaaggaccggatcgtcgccgccgtcgacgccctgcacagggaggcgaggggctggctgctgagctccaggaaggaagaggacgcgtcgcggatggcgtcggcgtggtaccgcgtgacgtaccacccagaccgccgccgcgggaagcggttctggagcttcccgtggatcgcctgcgacaacctgctggcgatcaaggcgtcgagccagctcaggcggcggcggcagaaggacgatgactccaccgcggtggtgcagatggactgcagcgcctga

SEQ ID NO: 1194 - DNA, 2307 bp, Oryza sativa
  N_region (144)..(144): n = any nucleotide
  N_region (177)..(177): n = any nucleotide
tggtacggcagcatccagtacctggtcaacatctccgcggttggggccgcctcctgcgtgctcctcttcctcctcgtcaagctccgcttcgaccaccgccgcatcccggggccctccgcgctcgccgccaagctcctcgccgtntaccaagccaacgggccgcagatcgcgctccantgcggggccgacgccgcccagttcctcctcttcgagcgcgcctccttcctcgtgctcgccgccgtggccgccgccgccgtcgccgccgccctcccgctcaacctcctcgccggggacgccgccatcgccgaccagttcgccgccaccaccatctcccacatccccaagtcatccccgctcctctggctccatctcctcctcaccgccgccgtcgtcgccatcgcccatctcggcatctcccgcatggaggacgcccttcgcatcacccgcttccgcgacggcaacggcaaccccagcgaccccaactccagctcggttgccgtcttcaccatcatgatccagggcattcccaagacgctcgccgcagacaagaccccgctcaaggattactttgagcacaagtaccctggaaaggtgtaccgggtcatcgtgcccttcgatctctgcacgctggagtatctagctgaggagtgggggaaggtgcggaacaggatttcttggctggaggcaaggatggatgcccgcaacctatttgatgaatttgctcagggtggaagacattcagaagagcattggattgtgaggagatgcaaagagctgtgggtgatgacagcagagaggttcgggtttactgacgaggaaatgctaaggaggttgcagacaaagaaacttgtcctcggtagcaggttatcggattataaggatgggcgtgctcccggtgctggcatagcctttgtggtttttaaggacgtgtatacagcaaacaaggctgtgagagatttccggatggaaaggaagaagacaccaatagggaggttcttcccggtgatggagctccagcttgagagaagccgttggactgtggaaagggcaccaccggcatcagatatctactggaaccatctagggctgagcaagcggcgtattgcagtcaacacctgcctcattctgatgctcttgttcttcagttcaccattggcaataattagtgggatgcaaagtgcagcgcggatcatcaatgtggaggctatggataacgccaaatcatggcttgtctggctccaaagctctagctggttctggaccattatctttcagtttcttcccaacgtcctcatttttgtgagcatgtatattatcatcccatcagtgctgtcttacttctccaagtttgagtgtcatctgacagtgtcgggagagcagagggctgcattgttgaagatggtttgcttcttccttgttaatctcattctactgcgtgcgctggtggaatcatcgcttgaaagttggatactcagtatgggccggtgctacctagacgattgcaagcagattgaacaatacttaagcccctcttttttgtcaagatcttcactctcctccctggcattcttgatcacatgcacctttctaggaatatcctttgatctgttggctccaatcccttggataaagcatgtaatgaagaaatttagaaagaatgatatggtccagttggtccctgaagaaaatgaggactaccaactgatgcatgatggcgaagaaacaaataatttgagagcgcctctaatgtctgagagagaagacagtggcattctgaatggtattgaggagcatgatctttcattgtacccgataaacaggagcttccatatgccaaagcagacatttgactttgcacaatactatgcatttgacattacaatattcgcgctcacaatgatctactcactgtttgctcctctgacagttcctgtcggcgcagtatactttggctaccgataccttgtggacaagtacaatttcctgtttatctacagagttagagggtttcctgcaggcaatgatgggaagctgatggacatggtgatctgcatcatgcaattctgcgttattttcttccttgttgcaatgttactattctttgcagtccaaggtgatcctatgaagctacaggcaatatgtactcttagtttgttagtcttttataaattgctgccctctagaagtgatcgcttccagccatccttgttggaagggatgcagacagttaatagctttgtagatggtccaacagattatgaagttttttcacaacctgacctggattggagcctgtatcaatcctga

SEQ ID NO: 1195 - DNA, 2288 bp, Oryza sativa
  N_region (539)..(539): n = any nucleotide
  N_region (760)..(760): n = any nucleotide
  N_region (773)..(773): n = any nucleotide
  N_region (896)..(896): n = any nucleotide
  N_region (2082)..(2082): n = any nucleotide
atgatcccggcgaggcatatgccgtcgatgatcggccggaacggcgcagcgtacggatcctcatcggcactgtcactcagccagctccttgaccagatcccggcgacgacggcggagagcggcgacaacatgatccgcagccgtgcgtccgaccctctcggcggcgacgagttcgagagcaagtccggcagcgagaacgtcgacggcgtctccgtcgacgaccaggaccccaaccagcggccgcgcaagaagcgctaccaccgccacacccagcatcagatccaggagatggaagcgtttcttcaaggaatgtccacacccagatgataagcagcgcaaggagctgagccgggagctcggcctggagcctctccaagtgaagttctggttccagaacaagcgcacccaaatgaagagaaccagcatgagaggcacgagaactcgcagctgcggtcggataacgagaagctccgggccgagaacatgcggtacaaggaggccctgagcagcgcctcctgcccaactgcggcggccccgcngccctcggcgagatgtccttcgacgagcaccacctccgcatcgagaacgcccgcctccgcgaagagatcgataggatatcggcgatcgcggcgaagtacgtggggaagccaatggtgccgttcccggtgctgtcgaacccgatggcggcggcggcgtcgcgggcgccgctggacctccccgtggcgccgtacggcgtcccgggcgacatgttcggcggcgntggccccgggganctgctgcgcggggtgcagtcggaggtcgacaagccgatgatcgtggagctcgccgtggcggcgatggaggagctgcgcatggcgcagctggacgagccgctctggagcgtcgcgccgccgctngacgccacggcggcggcgatggagacgctcagcgaggaggagtacgcgcgcatgttcccccgagggctcggccccaagcagtacgggctcaggtcggaggcgtcccgcgacagcgccgtcgtcatcatgacgcacgccaacctcgtcgagatcctcatggacgcgcgcggcagtgttctcgaacatcgtgtcgagggccatcacgctggaggtgctgtccaccggcgtcgcggggaactacaacggtgcattgcaagtgatgtcagtggagtttcaggtgccatcgccactggtgccaacgagagagagctacttcgtgagatactgcaagcagaacgcagacgggacatgggccgtcgtcgacgtctcgctggacagcctccgccctagccccgtcctcaaatgtcgccgccgtccgtcaggctgcctcatccaagaaatgcccaatggctactccaagaggtgacgtgggtggagcatgtggaggtggacgacaggtcggtgcacaacatctacaagctgctggtgaactccgggctggcgttcggcgcgcggcggtgggtcggcacgctggaccgccagtgcgagcgcctcgccagcgtcatggccagcaacatccccaccagcgacatcggcggtgattacgagctcggaggggaggaagagcatgctgaagctggcggagaggatggtggtgagcttctgcggcggcgtgacggcgtcggtggcgcatcagtggacgacgctgtccggcagcggcgccgaggacgtccgcgtcatgacgaggaagagcgtcgacgaccccgggaggccccccggcatcgtcctcaacgccgccacctccttctggctccccgtccctcccaagcgcgtcttcgacttcctccgcgacgaatcctctcgcagtgagagtgggacatcctctccaatggcggtatcgttcaagaaatggcccacatcgccaatggccgggatcagggcaactgcgtctcacttcttcgcgtcaacagctcgaactcgaaccagagcaacatgctgatcctgcaggagagctgcacggacgcgtcggggtcgtacgtcatctacgcgccggtggacgtggttgcgatgaacgtcgtgctaaacggcggcgacccgactacgtcgctgcatgctgccacctcgggcttcgccatcctgcccgatnggccggcgcacgacggttgcgacggcgacggcggcgtcggcgtcggctccggcgggtcgctgctgacggtggcgttccagatactggtggactccgtcccgacggcgaagctctcgctggggtcggtggcgacggtgaacagcctcatcgcctgcacggtggagcgcatcaaggcggccgtctccggcgagagcaatccgcagtag

SEQ ID NO: 1196 - DNA, 2288 bp, Oryza sativa
ccaaattcacccaagtcccctgttgccagtgcaagtgcttttgagagtgtagaaggatcagatgaggatgatgctaaacaaccgaatggtaaacttgaaaatggctacctgaagatgaatggaaatgttgctgcagcaagtttgattcggtctcatagtatatccaatgatcttcatggtgttcaacctgatccagttgctgcagacattcttcgaaaagaacctgagcaagaatcatttattaagctgttaactgctccacatggatgagattgaggtttacaagctccttcagaagtgccttgagttaagagactgttatctttttagagaagaggttgctccatgggagaaggaggtcataaatgatccctgtactccaaaacctgaccccaatccgttcacctatgtgcctgaaccaaaatcagagtttccaaatggtcgatggtgttgtccatgtctatgcagataaagacgaaatactttatcctgttgctgatgcgacaaccttctttactgacttgcattatatgctccgtgtgatttctgctggaaacacaagaaccgtgtgccataaccggttaaatcttttagagcataaattcaaatttcatttgatgttaaacgcggatagggagtttcttgcccagaagactgcaccacatcgtgatttttacaatgtcaggaaggttgatactcatgtacaccactcagcgtgcatgaatcaaaaacacttgctgagatttataaaatccaaactaaggaaagaacctgatgaggttgtcattttcagagacggcacttatatgactctgaaggaggtttttgagagcttggacttaactggtatgacttgaatgttgatttactagatgtccatgcggacaaaagtacatttcatcgttttgacaaattcaaccttaagtacaatccgtgtggccaaagtaggctcagagagattttcctcaaacaggacaatcttatccaagggtcgttttcttgccgagctaacaaagcaagttttctccgaccttacagcaagtaaataccagcagatggctgaatataggatttcaatctatgggaggaagcaaagtgaatgggacaaccttgcaagctggatagtgaacaatgaattgtccagtgaaaatgttgtctggctggttcagcagatcccacgcttatataatgtgtacaaggaaatgggtattgttacatcattccaaactcttctggacaacattttccttcctctgtttgaggtcaccattgatccagcttctcatccgcagcttcacgtcttcctaaagcaggtttgcaggttgtagggttagatttggttgatgatgaaacctgaaaggcgtccaacaaagcatatgcctacacctgaacaatggaccaatgtcttcaacccagcattttcatattatgcatattactgctatgctaacttatacacactcaataagttgcgtgaatcaaaagggatgaccacaatcaaattccgtccacatgctggcgaggtagaatctcttcaatgttccactgtctttctgttattgtgtttgtctatagctggagacatcgatcacttggcagcaacatttcttctttgtcacaatatatcgcatggaatcaacttaaggaaatctcctgtgcttcaatatctatactatcttggccagcagattggtctggcaatgtccccattaagcaacaactccttgtttcttgattaccaccggaatcctttcccaatgtttttccaacgaggcctgaatgtttccctgtcaacggatgatccattgcaaattcacctgacaaaagagccattggtggaagaatacagcattgctgcttcagtactccctctttccctctcccctcaccctattcatcttatgcagacactaattggaagctcagttcttgtgatttatgtgaaatagctagaaactctgtctatcaatcagggttttcacatgctctcaagcactggattggcaagaactattacaaaagaggacctacagggaacgatattcataaaactaatgtgcctcacatcaggggttcagtttagggacttgatttggagagatgagatgcgtcttgtatacctaaacaatgtcatcttacctgacgaggtggaccagtaacatgtacctggtgtatatggcgcggttgccatgggagttacatttcatgtttgggtaagcattattcaccttttatctgccggttcatactctacatctcatttcatttctttattaatcgatcactga

SEQ ID NO: 1197 - DNA, 2283 bp, Oryza sativa
  N_region (711)..(711): n = any nucleotide
  N_region (949)..(949): n = any nucleotide
atggcggggttgatcccgccattctccggattcttccatgaggttttggatttctacgaaatccatgtcttgcatctcgcacccaacgccgtgatgacgctagccatcttcgtgcatttgtgcgagatgttcatcggggtgcggccgacgatgcggctattccagtctttcttcgtcccacagctgctgcatggtgcgttggtggggggatggcctgcgaagcctgggcctcacaggggcaatggtctttggcgactacttccgccgccgcatcgcgcccctccaagatcaagcccgtggcgcctgggagtacactggacccaatgaccccatgcgcacgcatgtgggcgagcgctgggattggggcgaggaggacatgaagacggtgattcgtcgggtgctgggtctggacactgccgagcaaacactgattccagacgggatccttcccctctgcagcgatcgcgaccgggagagtattctggctgtgatgtcggccgtcggcgccagcaggggtcagtcccgccggggcggcgccgatggtggcgttgtcggcgtgggtagcggcggcgcggccgcaggcgggagtcggaccagtggccccggcgggggtggcagctccagggctcccggcccgagccgcggacccggggtcgactcggccagcgacccgaaagggaagcggaagatgtccgaatcgcgaccgccccntcccccgcgcggagggggcgccgagcgcgtggcggaccgaccgccggcgggccacaagcgccccgccgcgcctgaggctggacggaagaagaagcgactctggaagataggtcaaacggagccgtgtcgggggagcttcatcgagcccccgaagtggactttcaaccgccttccccgcagccgatccagggccgcgggaccttcacagcatcccggcggggcccacatgcggagcgcnacccgggagcgggggccgagggaggtcgcggcccggaagccgaggctggaggcggccctgagcccgaggccgaggccgaaactgggggcgggcccgagcccgagcccgaggccgaatctacccgagggcccgaagcggggggaaatccaggcgcgcgagcagacgcgggactccgtcatgcaggagacggaggaagagcggcaggcggcactgattgcctcaagtgtcctggatgaagcgctgggcgacatccgctttgtcacgcacggaaattcactacgcttacagtacgaggcctatgccgaggacctggcgaagagggttaaggacgcccgcggtgtcctcgatgcggctgccgcccaagagcggcgggtatcggaagccaacacctcgctgcaggctcggacggtggcgttcgagtctgagcgcaaggccttagataagcgtgcccgctccgcgcaggagtttgaggccacgattcgtcggcgaatcgaggtcctcgatcggaaccagcgcgagcaggacgcgcgcagccaggagcaagcgcagcgagcccaggagctggagggcgggctcaggcgttgaaggagcgagcgcgcctgctagaccagcgggagttcaccttggccggccgcgtggaggagctacggctccgggaagcggcatgccgggaacgggacgccgcactcgccaagcgcgaagccgaggcttctgagctggaggcccgggagaaggacctggcggcgggcgggcagcccggcggcgcggagttggtgagccagcttaccacggctcagagcactcttgccgacctagagcgcttggtgcaagaccaggctggggagatcgcggccctccgccttaccaatgagatcggacccgggcagctctccgatgccgtcgatcggctggagcgcgcggggcgcccagtcggcatctccgtgcgccgggatagtaagctcccgcccacacaaccggcggatctggagaggctggaggaggaggtcggcgagaccgtaaaatcgtcatcggcttccttggcgcgagccgcggtggaactggtcctcgcgagccaccaagcccgcgaccccgacttcgtcccatggcgcgcactcgaggatttccccccggggaccgaggcaaaggctcgggagcaagtccgggaggcggccgacgcgatcgtctctaacttcgaagggtcggcccctcggttcacctttgggattgcctcggacgaggagagcgggagcggggacgacggtgacgacgtcggcggcaaggactgggacgacgtcgttagcggcgccggcctcgggggcccgggcactccgtga

SEQ ID NO: 1198 - DNA, 2276 bp, Oryza sativa
  N_region (856)..(856): n = any nucleotide
  N_region (891)..(891): n = any nucleotide
  N_region (899)..(899): n = any nucleotide
  N_region (1001)..(1001): n = any nucleotide
  N_region (1631)..(1631): n = any nucleotide
  N_region (1666)..(1666): n = any nucleotide
  N_region (1699)..(1699): n = any nucleotide
  N_region (1749)..(1749): n = any nucleotide
  N_region (1827)..(1827): n = any nucleotide
cttctccagtcactgccggaagatctcttgatgcaggtggcaaagaagcggacggcaaaggaggtttgggactgtctcaagacgaggttcgtcggggcagacaagagtcgtggcaggggtcgcggacgcggcggaacgcagagcagcggtggcggctccggcggcggtggccgcgacaagagccacatcaaatgtttcaactacgaagagttcggccactactcaacgcagtgcccatggtacttggataatggtgctagcaaccatatgactggggatcgacgacgtctactacatccccagcctctgctgcaacatgtgcctcatggcgaagcagatcaggcagccattccctgcgatggcgaattatcgagcagaagcgccactcgagctactgcacatggacctatgtggcccaatcacaccgtcgacgtttgccgttaatcgttattttctgttgattgttgatgatttttcgcgttggatgtgggtgtttgttatcaagacgaaggatcaagcactggagatgttcgcaaaattcaagccgctggccgagaacacggccgatcactccatcaaaacactccggacagaccacagtggcgagttcttgtccggcgagttcgcgcgggtgtgcgatgaggccggcatcgagcgacatctgacggcgccgtactcaccgcagcagaacggcgttgttgaacaccgcaacagatcggtgatggcgatggcgcgctccctcctgaagggaatgtctgttcccggcaggatgtggggggaggcggtgcggcacgccgtgttcctgctcaaccggctgccaaccaagtcgatgggtgaacacactccgttcgaggcntggacggggaagaagccacacttaggacacttgcnagtgttcnggtgtactgcgcacaccaaggtgacaactccaaatctgaagaaattggatgatcggagtgagcagttcgtgtaccttggcatcgaggaagggagcaaggctnaccggctgtttgatccatgacgccgcggaatccataagcacaaggcatggctggtcgcaaagggctatgtgcagaggcacggtgtagactttgaagaagtgttcgccccggtggcgaggttggatacggtgcgtaccatacttgctgtcgcagcggaccgaggttggcgggtgcatcaccttgatgtcaagtcagcttttctcaacggggagctagaagaagaggtgtatgttgcccaactggaggggttcattaagaagggacaagagcaccttgtgctgaaattgagcaaggcactatatggcttgaggcaggcgccacgggcctggaacatttgcttggacaagagtctgaaggaacttgggtttatgcggtgcaagcaagaacaagccgtatacactcgaggcagaggagcagaagctatgattgttggcgtttacgtcgatgatttaattgtgacaggggagaatcctgccagggtagaagcattcaagaaacaaatgatgggggagttcgagatgaatgatctagggctcttgagttattatctgggaattgaggttggacaaggtgtgaatggaatcacacttaaacaaactgcctatgcaaagaaggttctgtcatagttcnggatgttggactgcaatcggcgtgtgatcggttgncttcggtatttgctgcatacaagaccggacctntcatatgctgttggagtggcgagcagattcatggagcatcccaccatgangcacttgaaggcagtgaagcaaattctcaggtatttgaaggggacaatcgactgtggccttgtgtataccgcaggaantggtgagatcacaatcacggggtacactgacagcgatctagccggagatgttgatgatcgtcggagtacaggaggtatggcgttctatatcaacaacagtttggtggcatggagctcgcagaagcagaagacagtaactctttcttcttgtgaagcagaattcatggcagccactgcagctgcctgtcatgcactttggctaagggcattgctgggagagctactcggtgaggaggcaaaattggtaaagttgtttgttgacaacaaatcagctattgctttgatgaagaatcctgtttttcgtgggaggagcaagcatatagatactcggtatcaattcattcgaagaacagcgtgcagatgcgctgacaaaagggttgccggcggcaaagctagtgacggcaaggtttctgcttagagttcgtgatcttggagaacgccaggcctaa

SEQ ID NO: 1199 - DNA, 2268 bp, Oryza sativa
  N_region (300)..(300): n = any nucleotide
  N_region (330)..(330): n = any nucleotide
  N_region (354)..(354): n = any nucleotide
  N_region (408)..(408): n = any nucleotide
  N_region (429)..(429): n = any nucleotide
  N_region (433)..(433): n = any nucleotide
  N_region (435)..(435): n = any nucleotide
  N_region (627)..(627): n = any nucleotide
  N_region (1324)..(1324): n = any nucleotide
  N_region (1465)..(1465): n = any nucleotide
atggcccctcgcaagccaaaccctgcttcggcgaaagggccggatcccggccgagtcgatgacgacagcaccgcctttttgggggtttctcttatggacgacgtcgagctggtgaagctggtcagctctggggcgttggttgaggggcaggctttcgccccagggaaagccgtggtgccgaaaccaatcgacaatcggacggtggtgttcaccgtcttttttaaggcagggctacggtttccctgcaacgtgttgttgccggagatccttcgcctcttccaggtggaacttacacagctnagcctgtcggcgcttgttcggatcgctatnttcgactgggcatgccggacttcngggtttgagcctaacgctgagtttttcggcgccatattcttcgccaccgtgaantcgaagacggtgattaccccngctngnacgaagaagaccgtgttcgggagtgtgaacttcaacgttcgtcccgagcggtccgatctctggccggtgaacgctgccatgtcgaagtgggaccgccattggatggctaggtggttctatcactccatccccttcgaggctggttctgactcgacaaaagccctccggtgccggcgcagggcgatcgcgccnaaccggaaacccaagatcgccgtggacggcgctttggaggcgcggttcgttctgctgcgcaaagtttgctcccgccttagctgccatgacttggtagaggaattctgtatgcttcgcatctttcccctctcccaggcatggcaagtcacggttgatcaaggcgaagaggttgacggtttgccgaacctgattcttcctgagaggacgaacacccgcaggatgatcggcgacgtatcggtcgtcgagtatagccagctgctaacacgacaagcgtctgggcaggcgaaccgggtttgtaacggcgagttgcctcctcgggcaaacccccacaaagcggacgacgatgcagggccttcgcaaaagcgaatgcgcaggcaagtgaagcttgcccctaggaagcgaagggtccttgcttcgtcggactccgacgccgacgacgaggacgatgccgaagaacgcgacggtgagaatgaaggagaggaggaagaggaggaggccgtggccgataaggccgcgaaagaggcgatcgaagatcgcgtcgatacccccggctacactcctaccccaagtccaggtcacaacgagaccggggtggagtcgaacagctccccccttcgacggaaggatctggaaggggcgaaggctctagttgcgttctccttgggaacggtggcgaagggaggtccggtgaagaagntctccaaaaagaaaggactcgtcgacatcgcccgcgttttcagcgacgacgagtcttctgacgagactccgacttcgcctgctggccgcagtttggacctctcgactgctccccttgctccgctcggcgttgctggggcangcggtggcgccgccgccggggcttccgcctccgccgaacggatcgtgtcgaccgcggcgagggttttcgggagccctgtgcgtgagccagctatttcgctgctggtcaaggcgaaggggaaattcttgcggctcactgttcgacggagcgaactgcgggcccgttttgacggtttcaagagccgtcttcgggccaaggatgatgaaataagccgcaagaacttggaggtggaggccctggcccacaccctcaaggaggcgaaggctgaagtcaaacgccttcagtccgaatgggataaggggaaagaggccagggccaaggttgatcgcctcaaggccgaactggagaaggagaaggcccattcagcggtgcttgtcgattactacaaccttactgagccaaagatagaggctcttcgccagaaggctagcagggccgaagcgagcgccgcagtggagtcggagcggtttttgcgggagatggcgaagaccaccgaatccgcgagaacggcttgccaaacgctccgcctcgcccttaccgacatgggcgcgaagcagttcggctgcgagcacgttgccgagttccctacctatgcgaaggggtactgggagattagtgcgcagaacatttcgcccgctcttcgcgcatggcgaaaacagttctggcagaaagacggccggtccgctgccaaggcgcgccttctggagcaactggcgaaggcggaggtggcagatcggtgcgaagaagagggcgcggtgggcgaagaggttggaggcgatgcccaggatcacccagacgtgtga

SEQ ID NO: 1200 - DNA, 2262 bp, Oryza sativa
atggccggagaaggatgggtgatgggcatcatttggcatgtgttggtacttgcccggaacacgattgtcgatgtttggggcggctggtcaatggagatcctgctcggcgccagcttcctgatgcagcttgtgctgaccttctctgccgggttccgttggcgcggggactcccccatgctacgcaacgtcatctggctcttctatgtaagcggcgactttgtggcgacgctcgcactcggccacctctctgtaagtggcacatccggcaagcgtcgtctcgtcgcgttctgggcgcccttcttcctgctgcacctcggcggccccgacagcatcaccgcctatgagcttgaggacaaccagctgtcggcgcgctatgtgctggagctcgtcctgcgagtcaccggagcggtgtacatcgtctacaagtccatttccggtagctgggccttggtcccggcagcctggctgatgctccttgtcggcgtggccaagtatacagagaagacgttggcgctccacggcgccaacctggccaatgtccggagatccttagagaggcagcagcaccgccatcacatgggaggtggcaaccaccattctcagcagctcgcgtttgcgacagatgacaatgatggcgcccttgtgatgaaggctcatgccctgttccacatctgcaagaactccttggtggactcgtcggtggatatagaatccacatctccttccaccgcgctgttcgatctcaggtggaaagagctgttcagggtgatggagatagagctctccctcatgtatgacttcctctacaccaaggccaccatcatccacacctggcatggctactgcatccgtgcgttgtcgccactggcgaccaccgtgtcactggttctggttgagctgagcaatgagggcggccgccgccacaagcaatcggacattgtcatcacccgtgtactgctggtggccaccttcctccttgagtcggcgtcgctgctcagggctctcagctcgacatggaccggcttcttgctgcatagcaagttgcaaccgggttggattcgccatgaagtcctgtgcatgagacggtggcatcgtttccatagcgtcatcatgtcccttggctggcccgccaaggtgcaagctcaccggcagtggttaggcaagatggggcagctcaacatgttgcagctggtcatcacccagaaggagctagagcgaccggcgccaaagggtggtcagttctgggacaaggaatatcagcgatgctcaaatgaaaccatgatcccagaaaatgtcaagaaactggtttctgagcttgtcagccgtcagttgaaggagttgagggattatgtgaaaaaggtggtggcgcaagaaggggcggatgcgttgtcacaggacgttaacttgctggagatggcagtgtacttgaggaagaagaggggtcagcaggcactagaaaagaacaatttgctctcggatctccgttggagcctcggcaatgagctccagctaggcatcctcacatggcacattgccaccaacatgttcctcttgttgtccggcaaagccgccaaggcgaagggtgacgaaggaccgaaggtgtgtgcaatcatgacactgtccaactacatgatgtaccttctcgctcttcgcccttacatgctgccgggcctggtcacccgcaagcttatcgaactgacctgcgaggaattggcccagatttggtccgaacatcaggcagcacctgccgccgtcgatgacctagagtcgtcgtcttctccgagcttctgcaatattagggtcttcatgcggggcaaattctcccagtggcacaatcgttggcgagtttctaccaggctcagtcacggcagggcggaggaggaggagcttgctaggatgctcatcgaaagggacaatgaaactgcccttaacaaatatctctctcgtggaatcgatgtcgcccagaaactgctcgacctagtagacttgcgcaaggagattgacatggtgcaggtgatcctggcggtgtgggtggaaatgctgttctatgcgagctaccagtgcagcaaggagtcccatgccaagcagctgagccaggggggcgagttgacgaccatcgtgtggctcatggcagaacacgccggcctgttccttgtcaacaaaaccagaaagggagctgaagaggctaactggaggaaaaggaaagctaataagaaaaaagaggccggaacgtctgatgctacagttaacaagctaagttaa

SEQ ID NO: 1201 - DNA, 2213 bp, Oryza sativa
atgggagccttagtacttgtggcaaccagcctgatgctgctgatactacagcatagtggtgcatctgacggggctagggctgggtctggaagtatctggcagccccagcccgattgtccagctccagcgaagtgcggcaacgtcaacattccctacccgtttggcataagagaaggttgcttccgaccgaagggcggctttaatatctcatgcaagcaagaacaagcttatattggatcagaccggacattagggtcacgaattttgatgtagtccagagtgaggctcgcatcctgaccgatataccatcagggacggtagcatggaagtacaacaatgaatttgatccaattgcatggacgtccagaggaggattacgacttggtaatcaccatatggtttccagcgccaagaacagattcacagcaatcgggtgttcaactgttgcattcatctacggcagagacaaaaatggtagcaatggacagtttgatcagttcaccagcttatgtggatcgttctgcttcgacgagggtagcatcgaagacggcccagagtgctccggcatgggttgttgccaagtccccatttcaaccaaccttaggaggttcagtttaggattctataattataacacaaccaaaaaagttcttaattttagttcacgcagctatgcgttcgtggtcgagaaggatcaattcaagttcaagagttcctatgccaaagcagacaatttcatggaggagctcgctcgtgggattcctataattctccagtggattgctggtaatgaaacctgcaaggaagcagccctgaaggagtcgtatgcttgcgttgccaataacagcaaatgcatcgatgtgatagaggcgcccgggtacagatgcaactgcacccaaggttacgagggaaatccctacctcaaagacggctgccgagtgttcagttgttaatattgcagacatcaatgagtgcaacgccacaagattcccgaattcttgcaagggcatctgcactaacaccgatgggagctacgactgtatttgcatcagcatcatcttcctcatcatctgtatctccactctgctgatcaagattcagagaatgaagctggaaaaagagaagcagaggttctacgatcagaacggtggccacatattataccagaaaattatctcagggcaagtcaatacagtggaaatattcacagaagaggtactaaagaatgcgaccaacaacttcgacagcggacaaaagcttggcgccggtggtcatggcattgtctacaagggcattctcagggacaacaatgtcgtcgccgtgaagcgctccaacttcctccacgtgacagacgccgaggaattcgtgcaggagatcatcatgctctcgcagatcaaccaccggaacgtggtcaggctcatcggctgctgcctggaagttgaagtgcccatactggtctacgagttcatctccaatggcactctctcctacctgatccatggcgatagcaggcggtatgcttcactgaaacttcgtcttaggattgctcaagaatcagctgaagcattggcatacctgcacctgtcgacgaaccggcctatcatccatggcgacgtggagtctctgaacattatgctcgatgatagctacacggtgaaggtgaccgacttcggggcatcacggtggctgtccaatgaagctgtcgagcaaattgcgatggtgcagggaacccgagggtacctggatccggagtacctgcaggagaggaagctgacggagaagagcgacgtgtacagcttcggcgtcgtgctgctggagctgatcactgggaagaaggcgatctaccgccacgatggcgatggcgacttcgagagcctcgcaggatcgttcctgcgggcgatggaggagagggtggagaacatcttggacacaagcttggctggtgccagcatggaggcgctgcccctgctccaggaggtcgccaaggtggggagtatgtgtctgagcgccaaggggaaggagaggccatccatggcggaggtgaccgacatgttgaaagctgtaagaattgcgtggagggatcttctggtttcatcggagtacaacgtgacggaggttttcgtcgacagttcagaagctcctccatctggcaacccatcttccgctgtgttctggacgccggacatgcagtctctagaagttgaaactttgag

SEQ ID NO: 1202 - DNA, 2167 bp, Oryza sativa
atggggaattgttggaaaaatttcaagacaacgctggtcacagagtacgtcctcaaccccgcccagccagaaccatttgggaaatacccattcatcacccaacccgtgtgggatgagttccatgccgccaaatcaacgaaagagcctcgggcaaaaagccaagcctaccgtgatctgcaggcaaggaaccttcacccgcaccggcttggcaccggaggctacgcggggaaacaggcagaatgggacaaggaggatgaagctgtagcggaatctaacacccagcaagtgcttgctgatatcccagtccagtgggcaaggaactgggcaagggcaagggtgaagaagaatagtgacgaaactctttcgttcccaaatcccgcagatcaagtggtgtaccagaaaatcgtcgaactgaatgctgagagacaggcctcctaagagagtacaagaagcacaagctttccaaggcgcagaaagctgcatgcattaaggcccaacttcgggaggagcttaaagaagagcttagagaagagctcactgctgagctgttaggtatggaggcttggatggaggcacgcatcagggataggtcgaccgatgccactcccggtcccatagtacaagtgagccccacgcagagacgtagcagctgcacatcaactgaggctccggtagaacagcctgaaggccccgccgcgggtggaccacataacgggaacccacatcgtgtaccctagtcgttagggtgacaccaggatttgcaattcctgccgctgagggtcaagcattcaagcctaccccggagacccgagtgcatggggcacagctgcaagccggcaatgccaaagttcaggtggacttagtgaagcccgattgggttggctacactatcccacacccacctaatgacgagattccgacccttggggctgcacatgggacctttattcaatggcccaagcacagcattgagatcaatataactccaaggccagcgccaagttctcgtccgctgccgacgtgtccccatcaaactgttatatctctccctcctgccgttgaacaaagagatgaagatatccaattacaatatgatactgattttggggacgacggtatggaggttgacagcaggccgcacctcccccctcttgccaaaaggagcaagagagagaaatcttctccaacccaagattgacacacgtagaaaagctgctggaacggggagaggaaaaataaaggtgccattagccccaaagaagcttgatcttggcaaggcgccagtagctcctccaaagcctccaaccgagtttacattgggcatgccattggtcagagacgatgccttatttaagatgggccctgcatgcaaggagttgcatgggtactacatggaaaagtccaatgcaaggagaaagaatagagagacctccatgttgggccagcacgatggtcagccattcctcgggcctactgccttcatcgccgtagacttcaaagatctatgggacctctacagggtgcgagcgatcgacaccaacctccttaagtgctactccttgttaacctggaagcatgtccatcgtaaagcaccccatgttgcctaactcgatccagctgtcgtcaacgagacaacgctgaaaaacgatcgagcaaacatggtgggctatatcaaggactgcttatttgcctgtcaagacaaggacttcattatgtgtgcctacaatcaacagtatgcgtgtaccgtactgatactcaaatactagacgcgtacaactgtagcgacattggattcttctggtaataacgctgaagtggagccgggtacactaccttaactccaatatcaagccagaaatatacgattggtcggccatcgaatctgccttgaacgaggcatgggaccaatatgtggcaagaggcgggaggcataaggatgggcatcccaaacttggtcacaagaaagacttcccaatacgtcaacaagttggcgaccagtgcgggttccatgtctgccataacatgatgagcttcgtagaaaaggtgacattgctcgaccctgagaggaatttatttcaagtattccggaaatcaacttcgaaatcattagagaggagatagcacaattcatactagatgatatcttgtcaccgaaagggatgtttag

SEQ ID NO: 1203 - DNA, 2104 bp, Oryza sativa
atgctaactgaacaaggagaggccccacgcgtgaaaactttccgcttcgaaaacttctggatccagctcccaggtttccaggaggtggtgacagaagcctggtcagccccccaaccacaccatgaagcacatcacatactcttccacaagctaggaaatacggcaataagactaagagcgtggagtaagaaactaatatcgcacgggagactgcacctccatatggcgctcgagattattctccaattcgatatagctcaagagtcaaggcaactcagccaagctgaactcgcgctaagaagaaacctcaaagatagggtgataggcctagcgatcgttgaaagagctcgcagaaggcaggcagcacgaatcaccaatctcagagagggggatgcaaacacaaaattcttccatttgaagatgaatgcaaggaagagaaaaaatttcatccagaggctacgagtgggaaacatgtggaaattaaaacacaacgaaaaagttgccgctctaaaagagcacttccagaccttcatggcgcgcccaggcccacgttcaaaagatctcgactgggacgtcctgcagctaccgactttcaactgctctgcaatcagtggtcccattactgaagaggaagtccatgctgcgctaaagcagtcccctagcgataaagcgccaggctcggacggcttcaccggagccttctacaaagcttgttgggaaacgataaaaggagacatcatggcggtcatccattcctttgaccagctgcgaagcaacaacctcccgatcctcaattcggcaaatgtggtgctcataccaaaaggagactacaggccaatcagtctcatacatggaataggaaagctaatttcaaaagtgctcaccttgcgtttgcaaccccacatggggaccctgatcagccacacccagagcgccttcataaagaaaagatacatacacgacaactttatgtatgtgagaaacctgacgagaaaattccatcagacaagaacgccaaccctcctgctgaaactagacataaccaaagctttcgatttggttagatgggattacctaatcgaccttatacagaggaaaggcttcacatccagatggactaactgggtctcaaacatcttagcctcctcgacaacaaagatcctcctcaatggatgcccaggatcgcctataaaacacggaagaggtctcagacagggcgaccccctttcaccgctgctcttcattctagcaattgacccacttcaccaccttctagagaaagcaacggagctagggcatctatccccccttcgaggaagagcccccaggttcagaacctccctctatgcggatgatgcggccatattcgtgaacccaagtgtccaagatatgacagctctcaccaacatcttaagtgactttgggcatgtgaccgacctctgaacaaacatgagcaaaagccaaattgccccaatccggtgtgataacattgatctctccagcataactaggatcttcccagcgggactcacaaacttcccaatgaagtaccttggtctacctctcgtggttggaagactcaagaaaatccacatccagcccctgagggacaaatgtcgatcgcgtctcgccccgtggcaagggaaaatgatgtcgaccgccgctagaatctgtctgacaaaatcagtcctcacggcacaacccatctaccacctaacatctctaaaactgccagacgggaccttagaggagttggacaaaataaggaaaaaattcctatgggcgggaggcgaaaatatctcaggggaaaaatgcaaagtcaactggaaaagagtctgcaggcctaaagattggggtggcctgggtgttctggacctgcaacgcttcgcatcagccctcagacttagatggctttggaacgaatgggtggcgccagacaaaccttgggtgggaactgtgctcccatgcaatcagctagataaagacctcttcgcggccgcaacaacaataacggtgggagacggcaaactgcgcgcttttggagctcgaaatgatccgttggaatctcacagcaaatggacagtactccgcaaaatcggcctat

SEQ ID NO: 1204 - DNA, 2076 bp, Oryza sativa
  N_region (801)..(801): n = any nucleotide
atggcctgggagggggttgtcggcgcggttgatgcagctagaatgtcgaagcaacaagtagtggaagcagagcacctgatgaaagctcttctggagcagaaggatggtttagcgcgcagaatattttcgaaagctggaatagataacacatctgtcctgcaagctactgatgagttcatctcgagacagccaaaggttggcgatacaagtggaccgatcattgggtcaagctttgtatcaattttggataatgcaaggaagcataagaaagaatatgctgatgagtttgtatctgttgagcacatattgcgagcattcacagaagataagaggtttggacaacagctgttcagagatctcaaaattggggagaatgagttgaaggaagctatctccgctgtacgtggcagtcagcgggtcacagatcagagtatgtctatttggcacagcgtattgtgcggggagatgttcctgaacctttacagaatagaaagcttatttcattggacatgggagcattacttgctggggctaaattccaaggtcaatttgaagagagacttaaggctgttctgaaggagatcactgcctcgaatgggcagatcatcttgttcattgatgagatccacactattgttggtgcaggctattgacctagttgatgaagcagctgctaagctgaaaatggagataacatcgaaacctattgaattggatgaggtagatagggaaatcataaggcttgaaatggagaagctctcattgaagaatgataccgataaagcctccaaacagcgactntctctaactcatattttcttatctttgttgtagactgacagagttaacctggagattgaagctgctgagagagagtatgatttgaaccgtgcagctgagctcaagtacggaacacttctgtcgctacaaaaacagcttgaagaggctgagaacaaactcatggaattccagcagtcaggcaagtcaatgcttcgagaagaggtgactgatgttgacattgctgagattgttagcaagtggactggtattccagtgtcaaaccttcaacaatctgaaaaggaaaagctactgctattggaagatgtactccacaagagggttattggccaagatattgcagtgaagtcagtggctaatgcaatccgtcgttctagggcaggcctatcagaccctaaccgtcccatagcaagcttaatgtttatgggtccaacaggtgtaggaaagaccgaactggggaaaacactagctgaattccttttcaacacagagaatgctctaatacggattgatatgagcgagtacatggaaaagcatgccgtctcccgtttggttggagcccctcctggctatattggttatggggaagggggccaactgacagaagctgttcgtcgtaggccttattctgtggttcttttcgatgaaattgagaaagcgcaccaggatgtgttcaacatcttattgcaacttttggatgatggaagaataaccgactctcagggcagaacagtcagctttactaactgtgttatcatcatgacttcaaacattgggtcgccattgattcttgatacgcttagaaacacatcagacagcaaggaggcagtttatgaaataatgaagaagcaagtgattgacatggctcggcagtcattccggccagagtttttgaataggatagatgagtacattgtattccagccgctggacaccacagagataaatcgcatcgtggagatccagttgcagctgaaccgagtcaagaaccggctgaggcaacagaagattcatctgcagtacacaccagaagctgtggagcatcttggctctctcggctttgaccctaactacggtgctaggcctgtgaagagggtgatccagcagatggtagagaacgagatcgccctcagtgtcctgaagggcgacttcaaagaagacgacaccgtcctcgtcgacgtgagctccgtggcgatcgcgaaaggccttgctccacagaagaagcttgtcctccagaggttagagaatgcaaacttagagttagtcgccaatgactag

SEQ ID NO: 1205 - DNA, 2056 bp, Oryza sativa
cacatggcgctcgaggttattctacaactcgatatagcccaagagtcaagacaaatgagccaagccgaactcacactaagaaggggcctcaaagatagagtactggggattgcagttgtggaaagagcccgtaaaaaacaagctgcacgaatcacctatcttaaagagggggatgcaaacacgaaatttttccacttgaggatgaatgcgaggaaaaggaaaattttcatccaaaggctacgagtggggaacatgtggaaattaaaccatgaggaaaaagctaccgctatcaaagaacacttccaaaacttcatggcacgcccaagcccacgcttaaaagacctttcccagcgacaaagccccgggcccggatggcttcacaggagctttctacaaagcctgctgggaaacgataaaagatgacatcatggtggtcattcactccttcaaccatttgcgaagcaatagcctctcgattctcaattcggcaaatgtagtgcttataccaaaaaaagatggggcagaatgcgtgggggactacaagccaattagtctcattcatggaatcaggaagcttatttcaaaagtgctcgccctacgtttacaaccgcatatgggctccctgatcagtcatgcccagagtgccttcatcaagagaagatgcatacacgacaactttatgtatgtgagaaacttgacgaggaaattccaccaaacaagaacgccgactctcctcctaaagctggacataaccaaagcttttgactcggtgagatgggattaccttatcgatctcctccagagaaaaggcttcacatctaggtggaccaattgggtctccaacattcttgcatcttcaacaacaaggatcctgctcaatgggtgcctaggaacgcctataaagcatggaagaggccgcagacaggaagaccccctctcgccgcttctattcatcctcgccattgacccactccaccacctcctagagagagcaatggagttagggcatctatccccacttagggggagagcccccaggttcagaacctccctctacgcggatgacgcggcaatctttgtgaatccaagcgttcaagacatgacaaatctgactggcatcctaagcgactttgggcaggtgaccggcttctgaacgaacatgagcaaaagccaaattgccccaatccgatgtgacaatattgatctgtccagcattaccggcatcttcccagcaggcctaacaaactttccaatgaagtaccttggcctaccccttgtggtaggtaggctaaagaaagtccacattcagcctttgatggataagtgtcgatcgtgcctcgccccttggcaagggaaattaatgttgaccgccaccagaatctgcttgacaaattcggtcctcactgcacagcccatctaccacctaacatctctaaagctgccagatggaaccatagaagaacttgacaaaatgaggaggaagtttctttgggcggggggcgaaaacatctctggcggaaaatgcaaagtaaattggaaaagagtctgcaggcccaaagacctgggtggtcttggagtcatggatctacaacaattcgcatcagcactgcgactcagatggctttggaatgaatgggtggcaccagaaaaaccctaggtggggacggcgctaccgtgcaacaagttagatagagatctcttcacggccgcaataacaataacggtgggcaatggcaaaactgcacgattttggagctcgaaatggattcgatggaacctcacagcaaacgagcagtactctacaaaatcggcctatagactccaattccttggggctgcgcgatccatcttcaaccaatcaatctggaaggcctgggcgccgccaaagtgcaaattcttctcctgattggtcactcaaaacagggtttggacggcagacagactggagaaaagaggatggcaaaaccaaaagatctgcccactctgctgcatggtggatgaatcggccctacacctcctggccaaatgtaggctaacaaagagaatatggacataa

SEQ ID NO: 1206 - DNA, 2043 bp, Oryza sativa
  N_region (389)..(389): n = any nucleotide
atgcacactctcctattgtctttcctctttgtttccatccttcatattcacacaactagttccaccggtactgaaaatttcgatgcatctaggctagacacatatatagtgcgtgtgcgtccaccaccaaacttctcaattgacatgagcaacatcaagcttgagaagtggtacagatcatttctcccactcttgacaacgcacacaccagatttcctagggctgcgtctcagggaaggatcctggaaaaaaactagcatgggtgagggtgtgatcataggtgtccttgacacagggatagatttcactcatacctcatttgatgatgatggcatgcaggagccacccactaaatggcgcggctcctgcaagtcatctctgatgaaatncaacaagaaactcattgggggtagctcattcattcggggtcagaaatcagcacctccaacggatgatagtggccatgggacacataccgcaagcacggcagctggcggttttgtagatggtgcaagcgtgtttggcaatggaaatggcacagcagctggcatggctcctcgtgcacaccttgctatctacaaggtgtgcagcgataaaggttgccgtgtatctgacatacttgctggcatggaggcggctattgctgatggtgttgacatcatgtctatgtctcttggtggtccagcgaaaccattttacaatgatataatagccactgcatctttttctgccatgaggaaagggatctttgtaagtcttgctgcaggaaattctggtccatcttccagcactctaagcaacgaggcaccatgggttctgactgttggtgccagcacgatagatagacaaatggaagcccttgtcaagctaggtgatggagacttatttgttggcgaatctgcttatcaaccacataatcttgatcccttagagttagtgtacccacagacttccggtcaaaattattgcttctttctgaaagatgttgcaggaaagattgttgcctgtgagcacacaacctcatcagacattattggacgcttcgtcaaggatgctggtgcatctgggttgatcttgctaggtcaggaggatagtggccacataacatttgctgacccaaatgtcctaccggtgtcctatgtggatttcccagatgcaacagtaatcagacagtacattaattcaagtaacagtccaactgcctcaatcatcttcaatggtacctcattggggaaaactcaagctcctgtagttgcatttttctcatctcgtggccctagtactgcgagcccaggtattcttaaacctgacatcattggtcctggagtaaacgtcattgctgcctggccgttcatggaagggcaagacgcaaacaatgataaacacaggacattcaactgcttatctggaacatcaatgtcaactcctcaccttagtggcattgctgctctcatcaagggaacacacccagattggtcatccgcagcgatcaagtccgcaatcatgacaacagcttatgttgttgataaccagaagaaggcaatcctggatgaaagatacaatattgcagggcatttcgcagttggtgctggacatgttagtccttctgaagccattgaccccggtctgatctatgacattgatgatgcacaatacatttcatatctctgtggcctgggttacacagatgttcaagttgagataattgcaaatcagaaagatgcctgcaaaggaagcaaaataactgaagctgaacttaactatccatcagtagcagtaagggcaagtgctggcaagcttgtggtgaaccggactgttactaatgtgggagaagcaaattcaagctacaccgtggaaattgatatgcctagggaggtgatgacaagtgtgtcaccaacaaagctagaattcaccaagatgaaggagaagaaaacattttcattaagcttaagttgggatattagcaaaactaaccatgccgagggaagcttcaagtgggtatctgagaagcatgttgtgaggagccccattgcaattttttag

SEQ ID NO: 1207 - DNA, 2036 bp, Oryza sativa
ggtatggcggattctaaggagtttgcaagcgaggtgtttgtggcattggcgagaaggaggagcatcaaaccagaagatgggataacaaaggaacagctgaaagaattttgggaggagttgactgatcagaactttgattcacgactacgaatattctttgacatgacaagaatggtgatgggcagcttacagaggacgaggtcaaagagattgtgttgagtgccgcagcaaacaaacttgccaagttgaaaagccatgctgcaacctacgcctcactgatcatggaagagctggatcctgatcatcgcggttacattgagtggcagctggagacgctactccgtggtatggtgacagcccaagggcctccagagaaggtgaagctggcttcagcaagccttgcaaggacaatggtcccttccagtcaccggagtccaatgcagaggcgtttcaacaagactgttgacttcatccatgagaattggaagaggatatgggtgctctccttgtgggcgatcctcaatattgcattattcatgtacaagtttgtgcagtacagtaggcgggatgcatttcaggtgatgggctactgtgtctgcatagcaaagggtgctgccgaaacactcaagctgaacatggccgttatactcctcccggtgtgccgaaacacactaacaaggctccgatcaacagcactcagcaaagtcgtaccatttgatgataacataaacttccacaagtgcgacttcccaagattggtatcatgtccaagggacaagttcgaggccacactggggccttacttcaactatgttcaaccaacatactcatcgctggttgcaagcactccagggtggactggcatcctcatgatcttgataatgtcattctcgttcacacttgcgacacattcgttcaggaggagcgttgtgaagcttccatcaccactgcaccaccttgctggtttcaatgccttttggtacgcccatcacctactggtgattgcatatatcctcttggtgctgcactcctacttcatatttctcaccaagcagtggtacaatcgaacgacgtggatgttcttggcagttccagtcctcttttactcctgcgagagaactatcagaagagttcgtgagagcagttatggggtgaccgtcatcaaggcaatttaccctggaaatgtgctctctattcacatgaataaaccatcaagtttcaagtacaaaagtgggatgtatatgtttgtaaaatgcccagatgtttcgccttttgaatggtaccatctgatcgtctctgtccaaatcatcccttctccataacttctgcacctggagatgactacttgagtgttcatatccgtacattaggtgactggacaacagaacttagaaacctatttgggaagcccaaagtctttatagatggtcctttcggcgcaccagctcaaaattacaagaaatatgacattcttttgcttatcgggcttggaattggagcaacgcctttcatcagcatactgaaggatctcctgaacaacatagcttatttctactgggtcaccagagagcaaggttcctttgaatggtttaaaggcgtgatgaatgatgttgctgaaagtgatcatgatgtactactcagtctaactgcttcagtgcaacttccatgttctctccttcagattaataaatagatactaacataatcactcactatacagaatgtaatagagatgcacaattacctgacaagcgtgtatgaagaaggagatgcaagatcagctctgattgccatggtccaatcacttcaacatgccaaaaatggtgtggatatcgtctctggcagcaagcggacacattttgcaaggccgaactggagaaaggtattctcagatctggccaatgcccaccagaactctcgtatagggcgttttctactgtgggtctccaacacttacgaaaatgctgagggatctttcactagaattcagccagacgacaacgactcggttccatttccacaaggagaacttctaa

SEQ ID NO: 1208 - DNA, 2034 bp, Oryza sativa
atgaatcatttatcctatcttctacagttcttcttcctcttcatctctaatctttcagctctcgccaccggtgaagaccaattcatatactctggcttcaatggtgctaacctcaccctcgacggcgtggcctcggtaacaccagatggcctgcttaagttgaccaacggaaccttacggctccaaggccatgcctttcacccaactccattcagtttcaagaagaaacccaatggaacagtgaattcctttgctgtctcctacatatttgccatctactgtctccggcctgtcatctgcggccatggcatagcttttgttgtttccgtgagcaaaaacttctcaaccgcaatggcaagccagtaccttggccttataaatgaccacaacaacggcgatccaacaaaccatttcttcgctatcgagctcgacacgaaccaaaatgatgagttcaacgatgtcaataacaaccatgttggaatcgacatcaacagtcttacatcactgaactccagcagcgtgggatactacacagacagtaatggtaacttcaacaacattacactcactagttacaagatgatgcaagtgtggctagaatacaatggggacaacagacagatcaatgtgaccttagctccaataaaaatggccaagcctgttaagccattactctctacctactatgacctctcaacagtgctcacagacatggcatatgttggattctcatcatcaacaggctcattcgttgcgcggcattatgtgcttggctggagttttggcatcaataaacctgcaccagccattgatatcagtaagttgccaaagctaccttatgaaggtgagaaaacccattccaaggtcttggaaatcactctgccaatagccacagcaacatttgttcttgcaatgatagctctcatcattctactcatccgaaggagattaaggtatgctgagatacgagaagattgggaagttgaatttgggccgcatagattctcatataaggatttgttttgtgctacggaaggatttaagaacaagaatctactaggaataggagggtttggaagggtatacaagggactacttccaacgtctaaattggagattgctgtgaagaggatctctcatgactccaaccagggtatgaaggaatttgttgctgagatagtcagtataggtcacctccaacaccgcaatcttgtgcagttacatggctactgccggcgaaaaagtgaacttattttagtgtatgattatatgtccaatggaagtcttgacaagcatttgtatggtcaagagaacaattctactttgacatgggcccaaagattccaaataataaaagatattgcatctggattgctttatctccatgaggaatgggagaaagtaatactccatcgagacatcaagccaagcaatatacttctcgatgacaacatgaatggacgactaggcgattttggcctagcaaggttatatgaccatggaaccgaccctcaaaccacacatgttgttggtaccataggatacctagctcctgagctagcacgaactagcaaagcaactccccttaccgatgtatttgcctttggcatgtttgttcttgaagtcacctgtgggcgaaagccgattgaccacactgcacaagacaatcaactgatgttggtagattgggtgcttcattgttggcaccaaggatttctaaatgatgcagtggatatcaaactccaaggtgtctacaatattgatgaggcgtgcctagctctgaagttaggactgctgtgtgcacaccctttcatcaataaaagacccagcatgaggcatgttacgcagattctcaatagagagatggaactaccagagctaacaccaacacacatgagcttcaacatgctctccttgatgcagaaccaaggttttgatccagagaccatgacaaaccagtttctaatatcaaacagcacactatctgacctctcagaagttagatctcatacatggtctccctatgatatttaa

SEQ ID NO: 1209 - DNA, 2009 bp, Oryza sativa
  N_region (207)..(207): n = any nucleotide
gtagcgtactccctggccttggctgtcggtgcgccgtgcgcccgcggccgcgactacgacgcgcgctgcgtgtgcgccgtgcgcggctcacgggaaaccaagccgtttttaatacccgcgccggtcaagccacaccgccggcatgtgacagtgcgcgcgccgcatacgtacgcagcagcgtcactcgcggctcgggctcggggattncgtgagcgccagcaacacagcgcgcgcatgcatggcggactccacggccatgaccgtcgacttcctccgcgcgcggctgctctccgagcggtccgtctcccgcgccgccaaggagcgcgccgaccagctcgccaagaggcccaagtaccggatggggcagtcctgccgcaagaacaagcgcaaggagctcagagtcagaaggggcagcaagatggatcggattgcaccgacgacggccaggcggacatggacggcgaggatactggtggtcagtatgtgatcaggtacgagaaggacggcgagatggagagggtgctcgagaggcaggccgagctgatcggccagtatgaggcggaggaagaagctcagaggcagtgggagaagcagttcaacgagaatcggagctcagccaaggctcaggttcatgttgaggcagagaataaggcgtgccagatagaaaatggttgggagcagagcaaggagcatgctaggctcgcggatcaagcggtacattgcaacgaagaggcaaaaccaggcgttaaaaatcaccccagcgccagcaacaaccgctctgctggccttctgttgaatgattcccttcctgaatcacacgcatcaggacaagaagctgctgccgaccaacgtgacgcgcacgaggagcatcacgaccactgtcatgcacagtctcaaggaagctctaatgtcgccggcacaatgacagggaagaatcaagaacaaggaaacgagaatccggatggatgttcaagctactgtgacatcaaagcgccatcagatggaagcccgtcaatgagtgatgccaccctgaacagcaaggtctctgactggagctcatcaagcttccatgaccatggcgacaaccaggtcgatgcagggccagatcaacagccaacaagcaacatggacatagagagtgttcttcaggcacttcagcttgccaggatttccctgagtcagaagctgagcaagccagttccacccagccaggtgacgctggcgcttcctgcaccaggggacgatgaacattcagaagacgacggctactcccccgtcgacgacgagttcacttctgcaagagatgagctctgcagctcaagccaatctcctgagcaggagatactggctctccctgcaccagaggactaccatgacagggagaatttgcctgtcaatgacgacgctaccatttcactgacagaggaacagaccagttcaagcccacaccggcaggagatcctggctctcccggctccggtagatgattaccacagagagatagtggatgacatcaagatacctatctgcattgccgggttgtttcggttgccaacagactcatttccaaaggacgagacgctctcaacttgcagcatttgcttgatatccttgcataaagaggaagatcggattatacacgttctcttggattcgatacctttggaatactccgtaggggaagtgctacatcggtatattcgtgcgcttgtggattttatctgtgattgtaagaaataccaaacagcgccctactcgtcgtcgctcccggtcgctgcgaacccatcacccaatgccacagctgcccccaccgccgcctacatgcccagctgggggatgacgttggagaacgacccttcatcggtgttgtggtggccgtgtcggcatcctccgcgacatccttgtcattgctcctggtcgctgcggacctgtcacccggtgtcgcggccaaccccaccgccacctccatgcccaagcatcgcatcaagccgctagcctgcaatttatga

SEQ ID NO: 1210 - DNA, 1985 bp, Oryza sativa
atggagagggaagtaggagctgaaccgcaattctatcgcctttcttagcatcttttctcatctttgtgaggcctatattggggtagagccctttctcgatctctttcgcttctactacgagctgtgttggatggagtccaacagggtgtctggatgcgtcgggttccgacttcgggattgcctgaagtcgcgttatatccccttccagtgcccttcctctcacagcaaatggcgaacgaggtggttctaccttcagatcgaagattcggaccctgtcttcgttgttccagaggaacaaccggataagatttcgtcttggaccgcaaagccccccttgaccccttctctccagtcgttcatcgatattgtcgacgatctccgagtacgaggttgttctggttcacaggtctgaacagcgaaaccgtgggacgtcgtgtcggccaggtgatgatcagtggcccgacaacggcgagtaacatccatgttcccctttgtgagaaggaggcagccgaacgtgacactgccatcaatgctcttcctctgactgacatcatcgggccgctcgctgaccatcaggtggtggcgtcactgaaggagaaggtcgccaaggaggcgtccgatgctgctgctgctaccacaagtggtggcaatgttccgacaaaggggaggaagttctcctctgtaagcggacatcgtcgcaaggcatctaccccctcgatcctgttgtctgatcatacagccagaagaatttcgccttacttcgcatcaaccgttttccaggcctcggacgcgtctcccccgcctccacgacgacaacgacttgtgacacttggcgagaagaaggcggcgcaagatgagtccggagggacttccggcgcgtctcccgctgtggcctcgacggatgtcgtgcttgcgcccgggagccgcgaggcaacaccaagcggcccagccagcgatcccgcggctggtcgtggtccaccggctgccgtcctcacctgggaggagctccaggtcgaaatggggcgcctcctcgaggctggtgctcgtggcattggtcgcgagattgcggaggcgagctcgccggggagtgcggcatcaagtctaccatcccggcgaatcccgatgagttttcactgacatcttctcttgcgaagctggcggcggcgatggaggagatcccctccaagcatgcggccaggatcggggaggagacgtccaacggaatctataccgggacatgccacgtccttgcgtgtgtgaagctggcgcatcctgaactcgatctccgcgagatcttggatcagggggcggctagcgatgcgcgtaaggaggtgatggaagaagtcggcgatctgggggaatctgttctccctctttttgaagaggagatgttgatgatgaggatgtccagcagcgcgggcagcctgagtcaccggcgatcatttcggctctcgcgtttgaaccacatgctcgagagtgctcttgctggccaagatcgtcgtatccaatattggaagacaaaatttgaagtagcggaactcgagagaaccatgcttgcagtgaagaaaaagaaggctgtggaaacgctccgaggtcgtgaggtgtggttcaactcgtacttgaagagttgctgcacatccatggccaaggtttgtagagagctccgagtaccccgtggggatcccaaggagtcggcagccggatacatctcgtggctgaacggggcctgtgctcagctcgatggcgtcggcaaacgcatcgacgaggccttgaagcaggagtgtcgtcgatcgagccgatatgccggagggcacgtgttggcttgcctacgagatcatcgcccgcgcctggacctcgattttctccgtgaaggttttgctcgttcccggaggactccgacggagatagaccaactggcgaagtcgatggcgccattggcggagaaggtcttccaatctatggactggcgttggccttcttggtag

SEQ ID NO: 1211 - DNA, 1975 bp, Oryza sativa
  N_region (1507)..(1507): n = any nucleotide
cggtggatggacagacctcgaccacttcaacccacgttgagtccgatctcccaccaccgcctcctctttcggtggatttgtgctgtgccgtcactttgcatcagtttggtctttggctctgtcggaatctagtcaatctatatcctagtatagtctccagtgtgagaactaagcgaattggtactgaattagcacgcccacgtccgcactggcacaatcgattgattttgaagctgggagaatttatggagtttgaggatgctaaagaaatttctgttttgtttcatagatttcatgtgagcttcacttttgataacgccattccgatgttcatgtcccgtacacataatgttcatgagactttcggacctcataaaaaggcaatcggtgatggcaaagaagtttggtgcggcagtggtctcccctgagcatcggtactacggaaagagttccccttttgagagtttgacaacggaaaatctaaggttcttgtcatcaaaacaggccttgtttgatctggctgttttccgccaatattatcagaggaaactttgaatgctaagtataatcgctcaggagcagacagttcttggtttgtttttggagggtcgtacgctggagcacttagtgcttggttcagattgaagttccctcacttgacatgtggaagtcttgcgagttcaggagttgttctttctgtttacaactatactgactttgacaaacagagattggtgagtcagctggccctgaatgcaaagcagcactacaagaaacaacaaaacttgttgacggacaacttcagtctggtcgcaatgcagttaaacaactctttggagcatcaacggttagcaaatgatggtgacttcctctttctactggcggatgcagcagctattgcggtatgctaaatagttccaatacggtaatcctgatgctttgtgctccccaatagttgaagcaaagaagaatggcacagatttggtgaggaaacatttgctcgctatgtgaaagattattacataggaacatttggagcatcagttgcatcatatgatcaagaatatttgaagaacacaactccacctcctgctgaatctgagcatataggttatggtggtaccaagtttgcagtgaagttgcatatttccaagtggctccaaaaaatgatagtgtccgttctgcaaagattgacacaagaggtaccatttggacttgtgcagaaatgtttttggggaaggagtttaccctgatgtattcatgacaaatttatactatggaggcacaagaattgcagtgcaggttcgaaaattgtttttgcaaacggctctcaagatccatggcgccatgcttctaagcagaaatcatcaaaagaattgccgtcatacttaattgagtgcagcaattgcggacattgcagtgatctatctggatgccctcaagctccttcacatattgaagaggtgactcgtctaattgttcatctccagaagctgtgaacaaagtnagaaagcagatcgtcgatcacattgatttatggttatcagaatgtcaagagcaagaggacacgacaatgagccattgctgggcagtagatggagcatagctacttaactgaattaacctgctcgagctaccaaccatatgttcaaaaggcccatgagtacaagacaatgccagctgtcatttagactagtatgattcactcaaataatacggacagttggttgttccaagcattctcatggtaccaagcattatcctcaggactgcggtaacaattgctcaaacactactatggtgacgacctctgtcatttgtcaataaccttacaggttgctctcaggctcccccattctgcagaagattaccatgatatgtaaaatgttactgaattatgtacaagataaactttgtttattcatgagactaagatattagataaccgggtacatcctactccaaccatttttaa

SEQ ID NO: 1212 - DNA, 1949 bp, Oryza sativa
gatgagaagtctaatttctcaggttatgaaatctattctggaaaactcagactcacaagtaaagccctaatatggggttctgtatcttacagttctggtgtccaacatttcattgtgcatgcatacccttctaagaagtatttgtttggaaagacacacagagtacggaaggacctccggtttatagcccctactgtagaggaggccatttcatgggtaacatgctttgccgaacaaaacatatatgttaacatgctacctctccctccaacatccagtaccgagcaagaccttgatggtcccctcagtggtgctttatttgaccacccacccatcaaatgtagaactccaccgaggatacttgttatactgaaccctcggtctgggcatggtagatcatgcaaagttttccatgacaaagcagaacctatttttaagagcttgcaggttttcacatggaagtggttaaaactactcatgctggtcacgctaaatctcttgcatctacatttgattttagcgcattccctgatggtataaacagcacagatgttgccaaggaatcgtgtgtgtaggtggtgatggaattgtaaatgaggtcttcaacggtctactcagtagaagtgatagagcagaggctgtatcaattccagttggaataatcccagcaggatctgacaattcacttgtttggactgttttgggagttaaagatccaatttcagcatcattactaattgtgaagggtggctttactgccctagacatcctgtctgttgagtggatccagtctgggctaatacactttgggacaactgtttcatactatggttttatcagtgatggtcctggagctttctgagaaatatcaaaagaaatttggccctcttcgatattttgtggctggaatactcaaatttttttgcctgccaagctatttctatgagttagagtatcttccttcttcaaaggagatgactggccatggaaaaggtataggacaagaaaactttgtgtctgatgtatataccaatgtaatgcgcagccgatcaaaaagagaaggaattccacgagcttccagtttgtcaagtattgactctattatgactccaagtcggatgtcacttggggacgttgatacatcaggtagcacagcagcaagcactgaaccttcagagtatgttcgtggtcttgatccaaaagcaaaacgcctttctttgggcagaagcaacattgtttcagaaccagaggaagttttacaccctcaaccacatcattcatcattctggccaagaaccaggtccaaaacaagaactgagagaaattcagttggtgtcactactaacgatacacgattatcttgggcagccccatcaattcatgacaaggaggacatttcctcaacaatttcagatccaggacctatttgggactctgaaccaaagtgggacaatgggccaaaatgggatacagagctaacctgggagtctgaccaccctattgaactccctggaccaccagaagacaatgaaattggaccatcagtggaacttgtgccaaatttggatgataaatgggtagtcaggaaaggacactttcttggtgttctagtttgcaatcattcatgcaagacagtgcaaagtttgagttcgcaggttattgcaccaaaagccaaccatgatgacaacactttggacttgctcttagttggtggaaagggtagatggaagttgttgaaatttttcatacttctgcaatttggtcgccatctttctttgccttatgtggaatatgtgaaggtaaagtctgtcaagcttaaaccaggtgcaaacacgcacaatgggtgtggaatagacggtgagctttgccgcgtcaagggacatgtactctgctccctgttacaagagcaatgcatgcttattggccggcaaagcagacaatctacttaa

SEQ ID NO: 1213 - DNA, 1897 bp, Oryza sativa
atgcggaagcgggatctgggcatcctcctcctcgccgccttcgccgtcttcttctcgctccagcagcacgacggcgacctctccttccgcgaggcctggtaccacctctccgatgccgactaccccatcaagcacgacgccgaccgcctcccctctcccctagtcgccgacctcaacggcgacggcaaacccgaggtcctcatccccacccacgacgccaagatccaggtcctccagccccaccccaggccctcccccgacgatgcctccttccacgacgcccgcctcatggctgatgtctccctcctcccctccaacgttcgcctctcctccgggaggcgccccgtcgccatggccgttggcaccgtcgaccgccactacgcccacgccccctccccctccaagcagctcctcgtcgtcgtcacctccggatggtccgtcatgtgcttcgaccacaacctcaaaaagctctgggaggctaatctccaggacgatttcccccacgccgcccaccatcgcgaggttgccatttccattaccaactacactctcaagcatggggatgcaggtttggtcatcgtcggaggaaggatggaaatgcaacatcatcaggcttctgagacaggcaacacagacctgcgtcattttgccctttatgcttttgctggccgcactgtccgatgcttcagtgctgataccacaacacaattacaagcttgatgcccatgcccttaatagtcgtcatcctggtcaggataggagagaggatacttttctgcaacttgcccattttaggaggcataaaaggaaagcactgaagaaaacacctggaaaagctgttgtaaataacgtgcacaagcccagtgaacataatccacctggaaaggatgtttccaataggttagcaaatgtgattgggaaagctgcagatatggctaattcaaataaaatcaagaagtatgttccgacaatcaccaactatactcaagtttggtgggttcctaatgttgttgttgcccacgaaaaagaagggatagaggctgttcatctagcttctggacgtacaatctgcaagcttcatttaacagaaggaggccttcatgcagatattaatggagatggggttctagaccatgttcaggagcaaacagttgttagtggttcaatggaagtgctgaaaccttgttgggcagtagctacatctggtgtgccagtgcgggagcaactttttaatgtttctatctgccattacaacaatttcaatttgtttcatcatggtgacttttcaagaagttttgggaggacatttgatacaactggcttagaggtggcgactcctattctgctccagagagatgatggtcataaacacaggagaggaagccacggggatatcatctttcttacgagtcgtggggaggtgacctcgtactctccaggtctacttggtcatgatgcaatatggagatggcaactgtcaacaggtgcaacatggtccaaccttccgtctccatcagggatgatggaaaacattgtagttccaactttgaaggctttctctctgcgagcctatgacccaaaacaggtaatcatcgcgggtggtgatctggaggctgtggtgatttctccttctggtggtttattggcatccattgaactccctgcacctccaacccatgcgctggtacttgaagatttcaatggtgatggtttaactgatattattctggtaacatcggggggagtctatgggtttgtgcagacaagacatcctggggctcttttcttcagcacgcttgtgggttgcttgatagttgttatcggagtgatatttgtttcactgcacctcaactcctcgaacagcggtaaacctagggcttcaaccgactataggtga

SEQ ID NO: 1214 - DNA, 1896 bp, Oryza sativa
atgctgccaccgccggccgccgcggccgccgcgctcctgctgctcctggcgctctccgccggggccaacgacatcgcgtcggacgccgcggcgctgcaggcgttcatcgcgccgttcgggtcggcgaccgtgtcgtggaacacgtcccagccgacgtgctcgtggacgggcgtcgtgtgctccggcggccgcgtcgtggaggtccacctcccgggggttggactccgcggcaacgtccccgtgggcgcgctcgggggcctcgacaagctcgccgtgctgtcgctgcgctacaacgcgctctccggcccgctgccgtccgacctggccaagtgcgcggagctccgggtaattaatctgcagtcgaatcacttctccggcgagctccccccggagattctggctctcccggcgctgacgcagctcaacctcgcggagaaccgcttttccgggaggattccggcgagcattgccaagaacgggaggctacagctgctctacttggacggcaacctcctcaccggcgagctgccgaatgtcaacatgccattgctcacctcgttcaacgtctccttcaacaacctcacaggcgggatacccagcggtctcagcggcatgccggcgacgtctttcctcggcatgtcgctgtgcggcaagcccctcgccgcttgccgaacgccgatttccatcccaccgtcgcaggctccggcgctctcgccagaaggcgcggtctcggcggtcggccgcgggaggggcggacgccgcctagccggaggagccattgccggcattgtgatcggctgcgcgctcggcttccttctcgtcgccggcgttctggtcctcgcgtgtggcgcgctgcagcgcaagccaagaccgcaccacagccgtgacgtcgcggcggagctcgccttgcacagcaaagaggcaatgagcccgagcgtgtacacgccgcgcgtctcggacgcgcggctgccgccgccgccggcggcggtggtccccgcgatacaaccggccgtcgccgccaacgtcgcaggaaagaagaagctcttcttcttcgggagggtgccgcggccgtacgacctcgaggacctgctgcgcgcgtcggccgaggtgctcggcaagggcacgtacgggaccacgtacaaggccgcgctcgagaccgggccggtggtcgccgtgaagcgcctcaaggagacctcattgccggagcgcgagttccgggacaaggtcgcggcgatcggcgggctggaccaccccaacgtcgtgccactgcaggcctactacttcagcaaggacgagaagctcatggtgtacgagttcgtcgccatgggcagcctctcgtcgatgcttcacggaaaccgtggctccggccggtcgccgctgctctgggagtcgaggaggcgcatcgcgctggcgtcggcgcgcgggctggagtacatccacgcgacgggctccaaggtggtgcacggcaacatcaagtcgtcgaacgtggtggcggacccgtggcggctgtcgcagaaggccgacgtgtacagcttcggcgtgctgctcctggagctgctcaccgggaaggcccccacgcacgccgtgctgcacgacgacgagggcgtggacctgccgcggtgggcgcgctccgtcgtgcgggaggagtggacgtccgaggtgttcgacacggagctcctcaggcaccccggcgccgaggacgagatggtggagatgctgcggctggcgatggactgcaccgtgaccgtgccggaccagcggccggcgatgccggagatcgtcgtgcgcatcgagcagctgggcggcgcgggctccgcgcggaccgcccggagcgtgtcgatggacgacgccgacgaccggccgctcaggcccgccgggtcgacccgcgagagctga

SEQ ID NO: 1215 - DNA, 1876 bp, Oryza sativa
atggcagagcagccaagaatcaactcagcattagtttctgttatccgtatggctaaggtttcaaagaatgccaactcagctgtctctgcagctgcgtatcattacatacgaaatgatgatagacctgacaaggcttttacaactgaaagggctaagagggctggaaaagctaatgcttcaagtggccagatctttgttactatcccacccgaccattttggccccattcttgcagagaatgaccccaagagaagcattggtgttctagttggggatacatgggaagacagacttgagtgcaggcaatggggtgcccattttcctcacgtggctggtattgctggccaatccacacatggtgctcagtcggtagccctctcgggtgggtatgtcgatgatgaggaccatggggaatggtttctatatactggaagttatacttgtacagtggtggaagagatctaagtgggaacaagcgtacaaacaaggagcagtcctcagaccagaaatttgagaagctgaatgctgctcttcgtattagttgcctcaagggttaccctgtcagggttgtgcgaggtcccacaaagagaagcgttcttcatatgctcctgaagctggtgtgaggtatgatggagtttacaggattgaaaaatgttggaggaagattagtgttcagtagggtaaattcaaggtttgcaggtatctctttgtacgttgtgacaatgaaccagctccttggactagagtgatatttatggtgaccgtccgaggccactccccaaagttgatgagctgaaaggtgcaacagacatatcagagaggaaaggaactccttcatgggactttgatggagaaagaaggctggaagtgggtgaagcctccaccaatcagcagaaagcctaacctatcaggggatcctgcaactgacaaggaaatccggagggttgcaaggcgtgcccagatgtctgtgactgaaaggctgctgaaagagagtttggatgttccatttgcaagcaagtgatgaaggaaccactcactactccatgtgctcataacttctgcaagttgtgtttggttgggacatatggtagtcaatcgtctatgagggagagaagccggggtgggcggactctaagggcacagaagattgtgaagaagtgcccttcatgtccaactgatatttgtgacttcctagagaatccacaggtacaacaagtttatcagatcaatcgagagatgatggatttgattgagtccttgcaagaaaggctgttgaagaaggagataccaagacaagctcagatgttagcaatggtgctgagtcatctggagatgatggaaacaacgaagctttagagaagggagaggatgatagcagcttgaaggatgatggcagcttgaaggatgatggcaaagtggtcaaggctgtggttgtaatcaaggaagaggacctgcagccctaagaagagccaaaggagaagatgagaaagaacaaggtgacaagaagatggacagtgctgatgtggtggacattgcagttgaaaagaaacaggcgacgaagcgggcttctgagaaggctgagaagaagcaggcaaggaagcgcaagggggatgctgttgccacaaatgatggtaaaaggatgaaaacaggtggtgatgctatggagacagcagcggaagaggatgctcccctgagcggcggaactcctgtgaagcgcaacagcaggaagagtagtgaggttgatgccaaaggcggtggcggtagtcctgttgtgagcagccctcgcagggtgacgaggagcaatgccaaggctagcggtgaagctgatggtagccctgcgacaaggaccaggagggctacccgcgctgaagcctga

SEQ ID NO: 1216 - DNA, 1872 bp, Oryza sativa
atgatctcgtcggcgggaccgcatcctcgccggattcggcccctcgccgccgcctccctcgtgctgttcctcttcctgctctacagccgctccggcgggagcttggtgcggtctccacgggtattgagcttcgattcgcatacggggcaccgtagattcctctccgatgccgatcctatcagccccgcgtccaacctgtcggagatcggggagctaaacggcgagcagccgccggtggatccctccgtggcgtgcgccggggtagcgcggcacgaggggttcgggtcccagtgcgagttcctccgggcgcacccgcagtgtagctccggcgggttcgtcgactacttgggcttcttctactgccggtgcgagaggttcagggtgctcggctatgcggtgctcggtgtgtgcctagcggctctgttctacatgcttgggaacacggccgcggattacttctgctgcagccttgagaagatgtccgcgctgctacggctcccgccgaccgtggccggagtgacattgctcccctttggaaatggcgcgcctgatgtgtttgcgagtattgccgcgtttatggggaccggcgctggtgatgttgggctgaacagtgtgttgggcggagcggtctttgtgacttgtgttgttgtcggagctgtgtcattgtgcgtggcggagaagaatgtgcagattgatagaagatgctttgtgagggatgttgggttctttctgatgactctagtagcactgtcgattattttgattgttgggaaggtgaccgtttggggagcgattatgtttgtgtcgatttatgtggtttatgcgtttgtggtggctgcaaatgaggtattgaggaagcatgcacggaggcttaagtttgatgtggtcacaccactgctgcctgtgagagggagtatctttgcacaaggaacagaagatgatgagtccgtgtacagttcacttcttgaggaggaatcagatggtgacgtggctcaaataaacacatccttgcctcagtggatgtgggcttctcatgtggccatttactcaaatcatgggatcagaggtggttcacctgacagttccaggccgctatggggttggagtgatgaagaagtggataattccacagttagcttctccaagctgttcttgtttttggagctccccttgacgataccaagaaggttgacaattccaatagttgaggaagaccggtggtcgaaagaatatgctgttgctagtgctggcttggcgcctgttctgctggcatttctttggagcagtcaagatggggtatccactaaggctcacatagcagcatatgtgatagctggtatttctgggatggcacttgcttctctcgctttcatgttcactgaccatgaacgacctccacggagatttttattcccatgggtgttgggagggtttgtgatgagcattatctggttctacatcattgccaatgaactggttgcacttttagttgcttttggagtgatattggggatcaatccttcaattcttgggttaactgtgttagcatggggtaattcgatgggtgacttaatgtcaaatgttgccttggcaatgaatggaggagatggtgtgcagatcgccatgtctggatgctacgcaggacctatgttcaatacacttgctggattgggaatatcgatgctgcttggagcttggtcaacagcaccaaactcttatgttcttcctcaagacagctctctcatttacacaatgagcttcctcgttggtggattgatctgggctcttgttatgctgccacggggttgcatgcagcctaacaagatacttggagttggtctcaatgcccctttactcagtttttccttttaa

SEQ ID NO: 1217 - DNA, 1863 bp, Oryza sativa
  N_region (92)..(92): n = any nucleotide
  N_region (128)..(128): n = any nucleotide
  N_region (231)..(231): n = any nucleotide
atgggcggcgcccaaagccgcgaggacctcgacctcaactcctccgacgacgaggacgacgacgaggagtacgacgcccagaccgccacctncgccgcctttcgagaggacatcctccggacttctancccctcctccctcgagttcctcgacgcgaagctgaaagcgctcgatctcaagtaccaggcgccgaacgcggcgaagctgtacctccacgtcggcggcgcttcngcttccgcgcgctgggtgccggccgagcggcgggcgacctacgccttcgtcgacaaggcgacggcggcgggcgacagcgattgtggcggcccgaggtgggttctggaggttggtccgggtcccagggtctccgcccccgtcggcccggcgctacagctcaaggcgctccccgcgcagcgccgggccgatttcgccgcgggcggctccgtctgggcgctgcggctgccgaccgacgccgccttccgccgattccggcaggagtacgaccggtgcctgttcgagaacacgtatggcgtcgaggccacggatgagggccggaaggaggtgttcggcgctgacttcgccgcgtgggcgcgccccggtgagtccgacgacgccgtctgggccgacgcagaggactccttcacccctcccgttgcgaccccggcgagagacctgctcgaggagttcgaggaggaggccggggacggcagcatccagagcctcgcgctgggcgcgcttgacaacagcttcttggttggagggtcagggatacaggtggtcaagaatttccggcatggcgtgcacggcaagggcgtctctgtgaggatatctgatggccgtggtggtgggaacgcgtacatgacaccgcagaaggctctgcttatgcgtggcgagacgaatatgcttctgatgagccctggagagactggcactcgccattccaatggcgtccatcatgttgatatagagactggcaaggttgtggctcagtggaggtttgagaaggatggaactgacatcacaatgcgagacatcgccaacgacagtaagggcgcgcagctggaaccctctggatcaaccttcttaggattggatgacaaccggctatgccggtgggatatgagggattccaggggcagggtgcaaacaattgggagctcatctgagtcaccggtgctgcaatggtcgcagggccatcagttctcaaggggcaccaatttccaatgctttgcaagtacaggggatggttcgattgtggttggttctgtggatggcaagattaggctctattccaagagttcgatgcggatggcgaagacagcattcccagggcttggatcaccaatcacacatgttgatgttacttatgatgggaagtggattctgggcactactgatacatatttgatcttgatctgtaccatctttaaggacaaggatggtaaagagaagacaggattcagtgggcgtatgggaaataggattgcagcaccaagattgctgaagctctccccattggattcaattttggcagggtccgagaacaaattccatggcgggcagttctcttggttttcccaggtaacagagaatgggaagcaagaaaagcatcttgttgcgacagttggcaaatttagtgtcatttggaactttcagcaggtgaaggacagcaaccatgagtgctaccgcgatcaggaagggctcaagagctgctattgttacaaagttgtcctgaaagacgaatccattgttgacagccgtttcatgcacgagaaatttgcaacaaccgactcccctgaggctcctctggtggtggcaacacccatgaaagtcagctccttcagtttagccaatagacgattacactga

SEQ ID NO: 1218 - DNA, 1862 bp, Oryza sativa
  N_region (1064)..(1064): n = any nucleotide
  N_region (1124)..(1124): n = any nucleotide
atggcggagcggctgacgcgtatcgcgatcgtcagcgaggacaagtgcaagcccaagaagtgccgccaggagtgcaagaagagctgccccgtcgtcaagaccggggaagctttgcatcgaagtaactccggcgtcgaagcttgcgttcatttctgaagagctgtgtattggttgtggtatttgcgttaagaaatgcccgtttgatgccattgagattatcaaccttcctaaggatttggaaaaagatactactcatcgctatggtccaaacaccttcaaattgcacagttgcccgttccaagacctggtcaagttttaggccttgttgggacaaatggaattggaaagtcgacagcactcaaagtgttagctggcaagctcaagcctaatttgggacgatttaaaccagactggcaggaaattctgacatacttccgtgggtctgaactccaaaactattttacacgcatattggaggataaccttaagaagcctcagtatgtggatcacattccaaaagctgtccagggaaatgttgggcaagtacttgaccagaaagacgagagaggcgtgaaagctgagctttgtgtcgaccttgaattgaaccaagttattgatcgaaatgtaggagatctttctggtggtgagctccagagatttgcgatagcagttgttgctgtgcagaatgcggaaattttcatgtttgatgagccatcaagttaccttgatgttaagcagaggcttaaggctgcacaagtcgttcggtctttgcttagacccaacagtatgtgattgttgtggagcatgatttgagtgtcctggattacttgtccgactttatttgctgcttgtatgggaagccaggtgcttatggtgtagttactttgccgttttcggtccgagaaggtatcaatattttcttggccggatttgttccaacagaaaatctacggtttcgagatgaatctcttacttttaagctgtcctttcagattgcggagactcaggaaagtgctgaggagattgagacataccagcgatataagtaccctactatgagtaanacacagggcaatttcaagctcactgttgttgagggtgagttcactgattcacagattgtngtgatgcttggtgagaatgggacagggaaaactacattcatcagaatgctggctgggttgttgaagccagacactgtggaaggaactgagattgaaattcctgaatttaatgtgtcctacaagcctcagaagattagcccgaaattccagcattctgtgaggcacttgcttcatcagaaaatacgggattcatatactcatcctcagtttgtgtctgatgtcatgaagccactgcaaatagagcaactcatggaccaggaagttatcaatttatcaggtggtgagctacaaagggtggcaatatgcctttgccttggaaagcctgcagatatctatctgattgatgaaccaagtgcctatcttgattcggagcagcgcattgttgcttcgaaggttatcaaaagattcatccttcatgcaaagaaaactgcatttattgtggagcatgatttcatcatggctacctacttagctgacaaggtcattgtttatgaggggcggccttctatcgactgtactgccaatgcaccacagtctttggtatctgggatgaataagttcttatcggtaagttctgaatattaaatattgagaagagatccacaacttgacattacttttagaagagacccaaccaactataggccaagaataaacaaactggactccacaaaagacagggaacaaaagtctgcaggatcctactactaccttgatgactaatttgaaggcgtacag

SEQ ID NO: 1219 - DNA, 1859 bp, Oryza sativa
atggtcacaccagacggcatccttgagctcaccaatgacacaattaatctaggacacgcatttttatccaactccacaaaacttccaacagcacagtgcaatcattctcactcagctttgtgtttgcaatcctctcagtgcatgatgatataagtgcagatggcatggccttctttgttgctccaagcaagaacctttccaatacatgggcacagtatataggtctcctcaatagtaggaacgatggcaacagaagcaatcacatgttcgcggtcgagcttgatactacccaaaatgatgagttcaaagacatcgacaacaaccacgttggaatcaacatcaacagcctcatctctttgcaagctcaccacactggatactatgatgataagagtggtttcttcaacaacttgactctgatcagtggcaaggccatgcaggtatgggctgactatgatggagagtctgcacaaatcaacgttaccttggctcatcttggagcacccaaatctgtaagaccactgctttcatcttcctataacttctcagatgttcttagagatcaatcatacatcggtttctcagccacaacaggtgcgattagcacaagacattgcgtacttggctggagttttgctatgaatagtcctgctccagctatagacatctccagactcccaaagctaccacgccttggcccaaagcctcgttccaagaccttagatatcaccctgcctatagccacagcaatatttgtccttgctgctggtaccgttgttgttttacttgttcgtagaagattgagatatatggagctacaggaagattgggaggttgattttgggccacatcgattctccttcaaagacatgtaccatgctacggaagggtttaataaaaataacttactaggagtaggtgggtttggcaaagtttataaaggcgttcttcagaagtctaaagttccagtagctattaagagggtgtcccacgagtctacacaagggatgaaaaagttcattgctgaggttgtcagtattggtaagctcagacaccgcaacctagtgcctctacttggttattgtcggcgaaaaggtcaactccttctagtatatgactatatgtcaaatggcagccttaataagtatttgtatcctgaagatggaaaaccatcattgaattgggctgagaggtttcatgtcatcaagggtgtcgcatttggcttgctctatctccatgagaagtgggaaaaggttgtcatacaccgagatattaaaccaagtaatgttcttctagatagtgaaatgaatggaaaattaggtgactttggtctttcaaggttatatgaccatgggactgatccacaaaccactcacatggttggaaccatggggtacttagctccagaattggtacgcacagggagagcatccacttctacagatgtctttgcatttggcatatttcttcttgaggtcacctgtgggcaaagacctattaagaaagactcacagggaaaccagcatagtttgttcgattgggttcttcagtttctgcataatagctcactaatcgaggccatggacagtagactccaagctgattttaatatcgatgaggtttgtcttgtcctaaagctaggtcttctatgctcacacccatttactaatgcaagacctagcatgcagcaagtcatggagtaccttgaaggtgatacaccaataccagagatttcatcaaggcattttagctttactatgcaggctttgatgcagagcaaaggatttgaatcaccagacatgttatgcccacagtttacgagtattggcacattctctgaactgtcagggggaagatga

SEQ ID NO: 1220 - DNA, 1795 bp, Oryza sativa
  N_region (790)..(790): n = any nucleotide
  N_region (1267)..(1267): n = any nucleotide
  N_region (1274)..(1274): n = any nucleotide
  N_region (1286)..(1286): n = any nucleotide
  N_region (1632)..(1632): n = any nucleotide
  N_region (1757)..(1757): n = any nucleotide
atgaggggtgcggggtttctgctgctcgttgtgttcgccgttgccgtcgccggtggggcggtggcggcggcggcggatttggacggcggcgatggtggtggtggtgtggcggcggagtggcggtttccgagctcgaggatgcgggacgcgtacgtggcgctgcagacgtggaggcgggaggccatcttctccgaccccggcaacctcaccgccgactgggtgggccccgacgtgtgcaactacaccggcgtgttctgcgcgccgctgccgtgggatcgccgggaggtcgccgtcgccggcgtcgacctcaaccacggcgacatcgccgggtacctgccccccgagctcggcctgctcgccgacctcgcgctgctccacctcaactccaaccgcttctgcggcgtgctcccggccaccctccgccgcctccgcctcctacacgagctcgacctcagcaacaaccgcttcgtcgggaggttccccgaggtggtgctcgacatgcccgcgctccggttcctcgacctccgcttcaacgacttcgagggcggggtgccccgccagctgttcgaccggccgctcgacgccatcttcctcaaccacaaccgcttccgcttcgacctcccggacaacttcggcaactcgccggtctccgtcatcgtcctcgcgcacaacagcttcggcggctgcctcccggcgagcctcggcaacatgtccgggacgctcaacgagatcttgctcatcaacacgggcctcagctcctgcctgccgccggaggtcgggatgctgcganaaggtgacggtgttcgacgtgagcttcaaccggctcgccggcccgctgccgtcggcggtggccgggatgaggaaggtggagcagctcgacgtcgcgcacaacctgctcacgggggcgataccgcaggcggtgtgcgagctgccgcgcctcaagaacttcaccttcgcgtacaacttcttcaccggcgagccgccgtcctgcgcgcacgccgtgccgcgctacggcgaccggaggaactgcctgcccaaccgccccgcccagcggacgctgcggcagtgcgccgcgttcttcgcgcgccctcccgtcaactgcgccgcgttccagtgcaagccgttcgtcccggccctgccgccaccatcgccgccaccaccattaccgccgccgccttcgccaccgccgccatccccaccgccaccgtcgacatcaccgcctccgccttcaccaccaccgccatctccaccgccaccatcgcctccnccgcctncaccaatcttcncacccaccgcagccgccgccgccgccgccaccacccgcgccacaaccgcatccgccatgtccggagctgccgccaccaccaccgccgccgccaccctgcggcggcgcaacaccagcattgtcaccaccaccaccaccaccttactaccccgggccatggccacctgtccatggagctcatggccaccgatccacagcgtaccatatggatcaccacctcctcccccgctgcattgatagaatttctccgaagaatgtttggaaacatgcatgtgttccgctcttgctcctcacatccggcaaatcgacagcagcggaagtcgcacacaagtatacgtgttggttgnttgattgatgactaccggcgtgaagagcgtagtaaggtgcacaaaattttgtttggttatgatttgtcggcgtcagcatcgaaacagtttgtgttgctgtggtgttgaaagggattgggaagtgntgggggtgtggggatttggaggatttgggaacatatga

SEQ ID NO: 1221 - DNA, 1777 bp, Oryza sativa
ggtcatggtgttgttctactaaacacagatgaggctggcattctttcagtgacaaatttccgacttctctttgtggttatagagttgggtaccatcccactaactgcaattgagaagataaatgatccccgccagcatgataagaagcagccccgtgaacttcttcaagtcatcgggtaaagacatgagggtcattgtgttcgattttcttcctaaaaccaagcagggtagaaatgtgtttgatgctttgagaagatatagcaaacctactcatctgtgggatctatatgcattttcttgtgatccctccccaaagatgcggctcttgaaggaataccatcgccttttgcgtaatgaatggtggagggtaagtaaagtaaattccacctactcactatgttcgacgtacccatctgcattgattgtgccaaggagcataagagtgatgaagatttattgcaagcttcttctttccgatccggcagacgcttgcctgttatttcgtggtgtgaccctggggtctggagctgttctggcaaggtcatctcagccattggtaggattgatgatgaattttcggaaagcaataccgatgagaagcttgtttctgctctttgcacccaaattattgatgccactgggtctctaagaggaagttatatatagttgatgcccggccaagagcaaatgctttagcaaatggtgcaaagggaggtggctcagagtcagcatcaaactacccaagatctgagtttttaggaatacaaaatatccacacaatgagagatagtctttttcgccttagggactatgttgatacccatggatcagtatcatcaaatggaacatcatcagctgtatctcttgttggagaccggggatcaacctggggtggagggaatctgaatagcatgacacaattttcttcaatgttaggggagtggctaaaccatatccagagtatcatggtcggtgcttcgtggattgctgcacaaattgtccaagaatcagcttctgttctcgtccattgcagtgcagtgatggttgggaccgcacaactcagttggttgcacttgcttgtttgttgcttgatccatattatagaacgttcaatgggttccaggcccttgtggaaaaggattggctagcatttggccatccattttctcagttgttacgtttgtatccatctgcatttgagttctcatctttccttgttgactttatggattgtgtgttgtcatgccgctttgggaacttcttgtgcaatagagtgagcgagaaagggagcaatctggtgctgtaagctcttgccattgcatgtggacgtacttggctgatctccgagcttctggtggcagcttccataagcatcgtaatccattctatgatccattaaagcataatggtcccctagtgccacctgctgcagcacttgctcctaccctttggccccaattttatttgagatggacatgccccattgaatctcaaggtggtgatcttgaatctcaatggcatgccatgaataaaaagtacacagaagcaatgaagtccgacttctctgtatccatcaccgcgattgaggacagcttggtttcagaaacaccaagcaaccatatctgtgagtcactctgccctttccgcaccagggaaggattgtagatggcctgatgcagcgtgtgcacagcttggaagccagtttgttggtctaaaggcaaattttgatgccttcgaccggctatcggtacaagacagctattttggttcagaatag

SEQ ID NO: 1222 - DNA, 1767 bp, Oryza sativa
atggagaaggtgggcgggaagccgccgcagtcgcgcctctgcttcctcgccacgctctgcgccatgttctgggtcctcatcttctacttccacttcttcgtcatcgccaacgagcctggctccgcgggggcggacaccgccgccggcgccgcggcgagcattgcccgcgcagaacttccgctccccgaacccgagcgcgtctccgatcccgcggttcccctccctccgcctgccctcgtctcggagccgccacctaccaccgctactgtcgccaaagtggaagatgaggagaagcccacggccgtcgcccaccaggaggcggcgcccagggattacgcgttccagcgagcgctcaagaccgcggagaacaagagcgacccgtgcggcggccggtacatctacgtgcacgagctgccgccgcggttcaacgacgacatgctccgggagtgcgagaggctcagcctctggaccaatatgtgcaagttcatgagcaacgaagggcttggtccgccgttgggcaacgaggaaggggtgttctccaacaccggctggtacgcgacgaaccagtttatggtggatgtcatcttcaggaaccggatgaagcagtacgagtgcctgaccaaggactcgtccatcgctgccgcggtgtttgtgccgttctacgccgggtttgatgtggcgaggtatctttgggggcacaacatttcgacgagggatgccgcgtcgctggatttgatagattggctgaggaagaggcctgaatggaatgtgatgggcgggcgtgaccatttcttagttggcggcaggattgcgtgggatttcaggcgcttgacggacgaagagtcggattggggcaacaagctgcttttcatgccggctgcgaagaatatgtcgatgttggtggtggagtcaagcccatggaatgccaatgattttgcgataccatatcctacttacttccaccctgccaaggatgctgatgttttgctttggcaggatagaatgaggagcctggaacgaccatggttgttctcgtttgctggggctcctcgtcctgatgatcccaagtctatcagaagtcagcttattgatcaatgcaggacatcaagtgtctgtaaattgctggagtgtgatcttggggagagcaagtgccattcccctagcgcaatcatgaatatgttccagaactctttgttctgcttgcagccccaaggtgattcgtatacgagaagatctgccttcgactcgatgctggctggttgcattcctgttttctttcatcctggttcagcgtatgtccaatatacgtggcatcttccgaagaactatacacggtactctgtcttcatccctgaagatggcgtccgtaagggaaatgtcagcattgaggacaggcttaaaagtatccatccagatatggtcaagaagatgagggaagaggtcattagtctcatcccaagggtgatatatgctgatccaaggtcaaagctggagaccctgaaggatgcattcgatgtttctgtagaggcaataattaacaaggtgacacagttgagaagagatatcatcgaagatcatgaagataaagattttgttgaagagaatagctggaagtatgatctgttggaagaagggcagaggacaattgggcctcatgaatgggacccgttcttctctaagcccaaggacaagggtggagattctactaatccatctactaatgctgccaagaactcctggaaaaacgaacaaagaggtcagaactaa

SEQ ID NO: 1223 - DNA, 1752 bp, Oryza sativa
  N_region (335)..(335): n = any nucleotide
  N_region (353)..(355): n = any nucleotide
  N_region (432)..(432): n = any nucleotide
  N_region (829)..(829): n = any nucleotide
  N_region (834)..(834): n = any nucleotide
  N_region (839)..(839): n = any nucleotide
atggaggtgcgccgcagggcgccgctgccgccgccgcccgggagggtgcaggcgggcgacgcgctgccgctgccgatccggcacacgaacctgatattctcggcgctgttcgcggcgtcgctggcgtacctgatgcggcggtggcgggagaagatccggtcgtcgacgccgctccacgtggtggggctcgccgagatgctcgccatcttcggcctcgtcgcctcgctcatctacctcctcagcttcttcggcatcgccttcgtgcagtccatcgtctcctagcagcgacgacgaggaggaggacttccttgtcgggcccgccgtggctcctccgnggcggcggccgtcgcgcnnnattagccgccttcttctccggcgcagtgctcgctgctgggtagcccccacgacgatgccgcgcgggagagaatgccngaggaggacgaggagatcgtgtcgtcggtcgttgccgggaaggtcccctcctacgtgctggagaccaagctcggggattgccgccgcgcagccggaatccggcgcgaggcggtccggcggatcaccgggaggcagatcgaggggctcccgctcgacggattcgactacgcctcgatcctcgggcagtgctgcgagctcccagtggggtacgtgcagctccccgtcggcatcgccgggccgctcctgctcgacggccagcggttctacgtccccatggccaccaccgaggggtgcctcgtcgccagcacgaaccgcggctgcaaggccatcgccgagtccggcggcgccgtcagcgtcgtcctccgcgacgggatgacgcgcgcccccgtcgcccgcntcccnaccgntcgccgcgccgccgagctcaaggccttcttggaggattctgtcaacttcaataccctctccatggtcttcaatagaggtccagtagattcgcgaggctgcaaggggtacaatgtgccatggctgggaggaacctgtacatgagattcagctgctgcacgggggatgccatggggatgaatatggtctccaagggcgtgcagaatgtgctggattacctccaagatgacttccctgacatggatgttattagcatctcagcaggtaacttttgctctgacaagaagccagctgctgtgaattggatcgaagggcgcggtaaatctgtggtttgtgaggcagtaatcaaggaggatgtagtcaaaaaggtgctgaagaccaatgtgcaatcgttggtagagctcaacgtgatcaagaatcttgctggttcagctgttgctggggctcttgggggtttcaatgcccatgctagcaatattgtaactgcaatcttcatagccactgggcaggatcctgcccagaatgtggaaagctctcactgcatcacaatgttggaagctgtaaatgatggcagagaccttcacatctccgttactatgccatcaattgagaggtgggcacagttgggggagggactcagctggcgtcacaggctgcttgcttggacctgctcggcgtgaaaggcgcgaacagggaatccccgggatcaaacgcgaggctcctggccaccgtggtggcaggtggtgtccttgccggggagctgtccctcctatctgcactcgccgcaggccagcttgtcaagagccacatgaaatacaacaggtccagcaaagacatgtccaaggtgatttcctagtcctagtagttcgaggtttggatcgttgcattggaaagaaagaaagaaaaaatggatag

SEQ ID NO: 1224 - DNA, 1733 bp, Oryza sativa
  N_region (1489)..(1489): n = any nucleotide
  N_region (1491)..(1492): n = any nucleotide
ctgcctgagggtgttctgtcagtacctctgcttaggcaccaggcattggcttggatggtttcgaaggagaatagctctcattgtgcaggtggaattcttgcagatgatcagcagggtcttggcaaaacagtgtctacaattgcccttatacagaaacagaggatccagcagtctaagtttataggcctgctgcaggtactctagtggtgtgcccagctagtgttcttaagcaatgggcgaacgaattgactgacaaggttggtgaaagtgctaaattgtctgttttggtctatcatggtggctcaaggaccaaagatccaaatgagttggcaaaatatgatgttgttatcactacatacacaattgtggccaatgaagtgcctaaacagaatgccgatgatgacactgatcagaagaatggtgaagaatcttctgctggtaataagagaaaacaaccacccaaagcacagagcaagtcgaagaaaaagaaaaagagtggcccagttgcaagagtgcgatggtttagggttgtccttgatgaagctcagacaataaagaactttcgaactcaagtggctaaagcctgttgtggattacgtgcaaaaagaagatggtgcttatcaggaacacctatacaaaatgcaattgatgagctctacagctatttccatttcttgaaatacgatccatattctacttataattcattttgtacaatgataaagcacccgattgctagaaatgcagttcatgggtataagaaacttcagactgtgttgaggatagttctcctgcgccgcacaaaagctgattgatggtgagccaatcataaagctacctccaaagacaattaatctggataaagtagattttacaaaagaggagcgagctttctatttgacgctggaagaacgctcgcggcaacagttcaagtacgctgctgctggtacactcaaacagaactatgccaacattcttctaatgctgttgcgccttaggcaggcctgcgatcatcctcttcttgtgaaggggtcttttgcaatctttggacttcttttacggcaggatgtacctgaggatgccgtcgtgacgatgtgtggccatgtcttctgctatcaatgtatatacgagcggataactactgatgagaatatgtgtccctcccctaaattgtggaaacacattacatatcctcaaagatacaggcggcaatcgatatactgaattcgatcattaacacctatgcccttaccgacagtgataccgtcgaatcaaatcctagccgagtggccccagtgaaagccattgtgttctcccagtggactggcatgctggatttgctggagctttcattgaatagcaatctcatacagtacaggagactagatggaacaatgtccctcaattcaagagataaagcagtgaaagattttaacacagacccagagcctcaggtcagggttatgatcatgtcactgaaagcaggtancnnggatcttggtctcaatatggttgctgcttgccatgtaattctccttgatctttggtggaatccttatgctgaggaccaggcaattgatagagcacacagaattggtcagactcgtcctgttactgtctcccgtttaaccattaaagatacggtggaagatcgcattttagctctgcaggtaatagcttgtctttcatttgcactgtgctttcataaacttgtctttttcctacttagataa

SEQ ID NO: 1225 - DNA, 1728 bp, Oryza sativa
gttcttgagagagagaaaataatgaagtctttccaggatattactgcaaggcttgaacaagccttaggtttaatctcatttgatgaacttgacatatcagatgaagtaagagaacagcaggttgaattggtacatgctcagttcaaaagagctaaagaacgatctgatccatctgatgatgatctctttaatgatttggtgtccgtctacaactcaagcaccagtgctaatgttgacccagatattctccagaggttatctgacaagttgcagcttgccactatatcagacctcaatcaagaatcattgatcttgcacgagatggctagtggcggtgatcctggtgccgttgttgagaagatgtcaatgctgctaaaaagaatcaaggattttgtgcagagtcgagatcctgaaatgggaaccccaccggatgatttccgttgccccatatcgctggatttaatgaaagatccagttattgttgccactggacagcagacttatgagcgaggatgcatagagagatggttggaggctgggcatgacacctgtccaaagacacagcagaagcttcccaataaatctctaaccccaaattatgtcttacgcagccttatagctcaatggtgtgaagcaaatggtatggagccaccaaaacgtgctgctcaacatcataatgcaccagcatcatgtaccgctgctgaacatagcaacgtcgttgagcttcttcagaaattattgtcacaaaacctagaagaccagcgtgaggctgcaggtatgcttcgtcagcttgccaagcgcagtcctgaaaatcgtgcttgtataggagatgctggtgctattcctattcttgttagcctgctatctataactgatgttagcactcaagagcatgtagttactgctctcttgaatctttcgatatatgaagagaacaaggcaagaataatcacctctggagctgttcctggagtagttcatgtgttgaagaggggaagcatggaggctcgggagaattcagctgccacactgttcagtctttcactagtagatgagaacaaaataacaattggggcttctggggcaattccagctcttgtgcttctgttgagtaatggaagtcaacggggtaaaagggatgcagctacagccctatttaacctgtgtatctatcagggcaacaagggcaaagctgttagagctggattgatccctgtactattaggactagtcactgagactgaaagtggtatgatggatgaggcccttgctatattggcaattctctcgagccatcctgagggcaagactgcaattagttcagccaacgccattccaatgctagttggagtaatcagaaatggatcagcaaggaacaaggaaaatgctgctgctgttctggtgcatctctgcaatggtgaacagcagcaacagcatcttgctgaagcgcaggagcagggaattgtgaccctgttggaggaactagccaaaagtggcacagacagaggaaagaggaaagcaatccagcttcttgagcgaatgaatcggtttcttatgcagcaaagtcaagcccaagcccaagcagaggccatggcacaagctcatgcgcatgcacagtctcaagctcaggttcaggctcttaacgaagctcaatctcaggtagagatgcaggtggagcaattgttgcttccaactacttcacatctttctgatagacgagacggttga

SEQ ID NO: 1226 - DNA, 1723 bp, Oryza sativa
gtccaattaaacggaaggtccataactgctggcacaaaagttccccttaaaggaggggatgaagttgttttcagtccatgcggcaagcatgcctacgtatcctcagagttcgatttgactggtagatgccaagcctttaaggatgggatgaaacaaggaattattagtccaaatgatattgatgttacatttgaaaattttccttattacctcagcggattctattatctggtccagcagggttcggagatttatcaggaaacattgataaaggcacttgcaaaacatttcggtgctaggctacttgttgttgattcgcttttgttgcctgggtctagtgtgcatgctgatatcgtgggtacatcgactctgcattctgcatctttgcccaaacaggaatcatcaacagctacatccaagagctatacttttaggggacccagttatggttatcgaggcagagtgatgcttgcttttgaagaaaatgggtcttccaaaattggagttcgatttgacaagcagatccctgatggtaatgatcttggtggtttgtgcgaggaagatcatggtttcttctgctctgcttaaggatgtagagaaatcattcactggaattacagagtcactttcatctttgaggaataagcttgaagcgcttccatctggtgtgcttattataggatctcacactcaaatggacagccgcaaagagaagcacccaggtggatttctttttacaaagtttgctagtagcagccagacgctatttgaccttttcccgctcacagattggaagcaacaactggatcgtgacgttgaaacccttaaagctaaatccaatgttggtagcattcgcacggatgttgtcacagagaacgaatttgagaaaaggcttctggcagatgttataccacctaatgacattggagtcacctttgatgatattggagccttggaaaatgtaaaagacacattgaaggagctggtgatgcttcctctgcaaaggcctgaattgttctgcaaaggacagctaacgaagtggtttggcgaaggagagaaatatgtaaaagctgttttctcattagcaagtaaaatagctccaagcgttatattcattgatgaggttgatagtatgctaggaaggagagagaatccaggggagcatgaagcgatgcgcaagatgaaaaacgaatttatggtgaattgggatggattacgcactaaagataaagaacgtgtactggttcttggtgccacaaataggcctttcgacctggatgagggctgtcattaggaggttcccgcgcagaggttaatggttaacttacctgacgcatcgaatagagaaaagattctgaaagtaatattggcaaaggaagagttggctccaggtattgatatggattctcttgccactatgaccgatggatattcaggaagtgacctgaagaatctatgcgtgaccgcagctcattaccccattcgagaaatccttgagaaggaaaagaaggtggcaaaagcagaaggcaggcctgagcctgcattgtatggtagtgaggacattcgtcctctgaccttagatgatttcaaatctgcccatgagcagcaggtttgtgcaagcgtttcatctgattcagcaaacatgaatgaacttcttcaatggaacgacctatatggcgagggcggttcgaggaagaagaaagcactgagctacttcatgtga

SEQ ID NO: 1227 - DNA, 1716 bp, Oryza sativa
  N_region (94)..(94): n = any nucleotide
  N_region (816)..(816): n = any nucleotide
atgggcaacaactgcgtcggccccagcgccgccggccagaacgggttcttcgccaacgtcgccctctggcgacccaggcccgccgacgcggctncccccgccctcccgccgccctcctccgcgccgtccgaccaggcgcccgagcccgtcacaatccccccatcggagcactcctcccaccactcctcccgctccaccgacccgtcgacccccacctccgccgcggagcagccggcgaacaaggcggcgcccaaggtcaagcgcgtccagagcgccgggctgctcgccgattccgtcctcaagcgcgacgtcaacaccgcccgcctcaaggatctatacacgatcgggaagaagctagggcaggggcagttcggcaccacctacctctgcgtcgagaaggccacaggtcgggagttcgcctgcaagtccatcgccaagaggaagctgctcacgcaggaggacgtcgaggacgtgcgccgcgagatccagatcatgcaccacctcgcgggccacgccaacgtcgtctccatcgtcggggcctacgaggacgccgtcgcggtgcagctcgtcatggagctctgcgccggcggggagctgttcgacaggatcatccagagggggcattactccgagaaggccgcggcgcagctcgcgcgggtgatcgtcggcgtcatcgaggcgtgccactccctcggcgtgatgcacagggatctcaagccggagaatttcctcttcatccaccagaaggaggattcgcctctcaaggccatcgatttcggcctctccatcttcttcaagccagggtgagacatttanggatgttgttggaagcccgtactatgttgcacctgaggttcttatgaaacattatggtcgtgaggttgacgtctggagtgctggtgtgataatctacattttgttgagtggggttcctccattttgggatggtgagatcatatgaaagtgagcaagggatatttgaacaagttttgaaaggtgatctggacttctcatctgagccttggcctaatatctcagagagcgcaaaggatttggtcagaaaaatgcttattcgtgatccaaaaaagagattgactgcccatgaagccctatcatccttgggtctgtgttgatggagttgctcctgacaagcctcttgattccgctgtcttgagtcggttaaaacaattttctgcaatgaacaaactaaagaaaatggcgcttagggttattgctgagagtttatcagaagaagaaattgcaggattaaaagagatgttcaaaatgctagacactgacaacagcggtcatattacactggaagaactaaaaacaggcttgcagagagttggtgctaatttgatggactcggaaattgatgctctaatggaggcagtaagtattctaagaaggtttctgcgcatctattcatcatttatactgaaattagtaaacaagattttgttctgatctgcagatattgacaacagcggaacaattgattatggagaattcattgctgcaactttgcatataaacaaagtagagaaggaggataagctgtttgcagctttctcatactttgataaagatggcagcggttacattactcaagatgagcttcaaaaggcatgtgaggaattcggtataggtgatacccgtattgaggatattattggagacattgatcaggacaatgtgagtagaaaatgctaa

SEQ ID NO: 1228 - DNA, 1705 bp, Oryza sativa
  N_region (613)..(613): n = any nucleotide
  N_region (739)..(739): n = any nucleotide
gagtgcgccattggcaacttcggcgtgccccagtacggcggcaccatggtcggcgtcgtcgcctaccccaaggccaacaagaaggcctgcaagagcttcgacgatttcgacatctcctacaaggccaaacccgggtcactccccaccttcctcctcgtcgacaggggaggattgctttttcacaaagaaggcatggaatgcacaaaacgcaggagcagcagccatccttgttgctgatgacaagactgaacccctgattacaatggacacgcctgaagagagtggaaatacagactatttagagaatatcaccattccttctgcgctgataaccaagagctttggggacaagctcaagaaagcaattgataatggtgacatggttaatgtgaatttggattggagggagtccctgcctcaccctgatgagcgtgttgagtacgaattttggactaacagtaatgatgagtgtggccctaaatgtgatagccagattgattttgtcaagagcttcaaaggagcagcacaggtacttgagaagaagggatacacacagttcactcctcattacattacctggtattgcccagattccttcattctaagcaagcantgcaagtcccagtgtatcaaccatgggagatattgtgcacctgacccggaacaggatttcagcaaagggtatgatgggaaagatgtggtagtccagaatttacgtcaagtctgtgtttataaagtngctaaggagcatggaaaaccttggctgtggtgggactacgtgacagattttgcaatccggtgcccaatgaaggaaaagaagtacaccaaggaatgcgctgatggagttatcaagtcacttggataagtgcattgctgatccagatgctgataaagaaaatcctgtgctgaaagctgaacaggatgcacagattggcaagggctctcgtggtgatgttaccatcttaccgactcttgtaatcaacaatagacaatacagaggggaaacttgataaaggagcggttcttaaggcaatttgtgctggttttcgagaaaccactgaaccagctgtttgcttgagtgaagacaaatgagtgcttggagaacaatggtggctgttggcaagacaaggctgctaacatctctgcatgcaaggacacttttcgtggaagagtttgtgaatgtccagttgtgaaaggtgttaaatttgttggtgatggctacactcactgtgaaggcttcgggatctggccattgtgaaattaacaatggagggtgctggaaggattccaggcatggccggacatattctgcctgcacgtgtaaatgtccggatgggttcaaaggtgatggagtccacaaatgcgaaggatattgatgaatgcaaggaaaggactgcatgccagtgcaaggaatgtaaatgcaagaacacatggggaagctatgagtgcggttgcagtggcggcttgctttatatgaaggagcatgatacatgcataatcaggcaaaaatgcagcaacagaggtaggatggaacttcttgtgggtgatcttctttggcctagtggtagccggcattgcaggatacgcagtatacaagtacaggatccggtacatggattcagagatccgcgccatcatggcccagtacatgcccctggacaaccaaggagatgttcccaatcattctcaccatatcgagctatga

SEQ ID NO: 1229 - DNA, 1690 bp, Oryza sativa
atgccggacgccaggtccgccgccgagaatgcaagccgccaccaccaccaccaccaccgtgcccacgccatcgccgaccgctcggagcgtgggttgcctgaggagcattcacggggcagcgtggacgagcggttcgtcttcccatggatggggattctggtgaacgtgcctaccgagtggaagaacgggcggcaggttggggagagtgggaaccgcctcaaggagggattcgcgcggttctgcccacacaaggtcatcccgttgtggaatcacaggggtcacacggggaacgccattgtggagttcgccaaagactggaccggtttcgagaacgcgctcgcgttcgaggtccacttcgagcaacaagggtatggcaggagggcatggatggggaacaagtacagggggtcacagatgtttgggtgggtcgccagggccgatgatcacaactctccggggccgattggggtttatctgcgcaagaacggtgatctcaagactgttgctgatcttgagaatgaaggaacacgcaagactgacaagcttgttgccaatttggctagccaggttgaggtcaagaaaaggcatgtggaggagcttgaatctcagtacaatgagaccacagcgtcacttgaaagggtgatggagcaaagggagcagcagctccaggcttacaatgaagagaaattcgtaagatgcaagaccttgcgctcagacattcacagaggatcatggatgagaataagaagctgcgttcagatttggaatccaagatgcaactacttgactcaaggtccaaggagcttgacaagctagctgtccaaagtaactctgacagaatgaaccttgagaaagagaaggaaaagagaacgatattaaaactaagcatcttaagatggcaacattggagcaacaaaaggcagatgaaagtgtgctgaagcttgtggaagaacacaagagagggagaaacaagctgctctagacaagattctcaagttagagcagcagttgaatgctaagcagaagcttgagttagaaatacaacagcttcagggcaaattggaagtaatgaagcatatgccaggtaaagaagactccgaagcgaagagtaaaatacatgaactcagtgaggagctaaaagataagtatgctgaaatggaatcaatagagtcactcaatcaagcactggttatcaaggaaagacaaagcaatgatgagctgcaacatgcccggaaggtgctgatagaaggcttccaagatattatagttggtcgaacaaatataggcatcaagagaatgggtgtgattgatttcaaagcatttacaaatgcttacaaacagagatccttagaagaggatgcagatgttagtgctgcagagctttgttctctctgggaaaatgagattaaaaattcagactggcacccttttagggttgtcatggtcgacggtaaagagatgggaaattctttctgaagatgatgggaaactttgcgaacttaaagaagagcatggtgaagaaatctgtgccatggtaacaaaagcactgctagaacttaacgagtacaaccccagtggccgctatcctgtaccagagctttggaacttcaaggagaaccggaaagcaacactcaaagaggtcgtccaatacgtcctcaatcagtggaagaagaacaagaggaagcgttga

SEQ ID NO: 1230 - DNA, 1683 bp, Oryza sativa
atggtctacaccaggaatggcggccgcacagcgggtgagggcagcagtggcgaagaacgcgccgatggtggacaccccaacagcgcctccggcaatggttcgccaccgctccccgagaacccaatgcttgcacaagtgatggcccatcagacccagatgatggcggccatgatgcagcagatgtagcagcagcaccagcaaatgcaccagaggatgcagcagcaggctgatcagcaccagcagcagtttggtccccctccccctcagtccaagccgccagagtttctacgcgtcaggccacccaccttctctagcaccaccaaccccatggaggcaaatgactggctccatgccatagagaagaagctcaaccttctgcagtgcaatgatcagtagaaggtcgccttcgccacacaccagctccagggtcccgcatcagcttggtgggacaaccacgtggcaacccgtccgccaggcacagaagtcacttgggtgaagttctgtcgcagcttcaagaaggcgcaggtgccagacggggtcgtggcacaaaagaagagaaaattccgggcactcaaccagggcaacaggacagtgactgagtacctgcatgagttcaatcgcctagcgcgatatgcatcggaggatgtccgcaccgacgcagagaagcaggagaagttcctatcaggcctggatgatgagctgaccaatcaactgatttccggggattacgctgacttcgagaagctagtagacaaggcaatccgccaggaggatcagcgcaacaagctggacaggaagaggaaggccgcctagtttagggcacaccggggaggtcaccataggctgcgcttcactcccagacagcagggtggacccaccaccatgattgttcgccagcaccacccctattcttccggcaacttccaccagggtgccagtggatgtcagaaccaccagggaggtcagcctaaccgcagtgcagctccgcgcctaccaatggcaccagcacagccaactccaccaactcaagccaagaaggagaccagagcaaagccagggtcctgctacaactgtggcgagcatggccactttgctgacaagtgcccaaagccaaggcgtgccggaccaaggttttctcaagctcgcgtcaaccacgcgtccgcagaagaggcacaagtagcaccagaggtcgtactgggtacgtttcctgttaactcaatccctgcaacagtacttttcgattctggtgcaacgcattctttcatttccaagaggtttcttgggatacatggggtaagaaaagaggagcttagtacaccaatgagggttcataccccgggaaatagttcaaccacggtcagttatagcccttcagtgctaatagaaatccacaaatcacaatttctagccaacctcatccttcttgaatccaaagacctacatgttattcttgggatggattggctgaccaagttcaagggtgtcattgattgtgcaaatcgcacagtcaccttgatcaatgagaagggagaaacagtggtgtacaagtcaccagtctcaccgaagcagggaatctccttgaatcaaattaaggtggaaaatccggtggtcaccgaggagaagagtttgaggaaattggaaggtattcccatcatctgcgagtatccagaagtgttccccgat

SEQ ID NO: 1231 - DNA, 1653 bp, Oryza sativa
  N_region (354)..(354): n = any nucleotide
  N_region (361)..(361): n = any nucleotide
  N_region (447)..(447): n = any nucleotide
  N_region (554)..(554): n = any nucleotide
  N_region (647)..(647): n = any nucleotide
atggagaggtgccagcgcatcctattcaggaggttgggcatcctccatgacgaagaagatgcctccgtggagcgcgttctcagccagtacatggccatgtttgatgggcccctgccgccgcacgccatcgccgccttgacggcgatcttcggcctcgacgacgatgatgagtgcgccatggatgcctctctgctcccccttgtgggcgaagggatcactgatgtggccgatctggcgtgccgccggtggcctgcgtgccgcctccctagcatttctatggaacctcagctcttggagcacatgtcgtgcaatgagaactgggatctcgccttccatcaccatgtggctaggtgncctcctntacacattctacctcgcaagttcttctcaacggcatccctggtcaaagaatcacgcatgggagaggacttcggcagggagacccgntgtctccgctcctttttgtcctagcaatcgaccctctccaacgtctccttacaaaggcaacagacctgggttcgctctctaagcttcgaggcagaatgcctcgcctnagaacatctatgtatgcagatgacgctgccattttcgtcaatcccacaagaggggatgtccaagcgctcacggaaatcctgcaacgtttcggnacggccactggactcgttaccaacttccaaaaatctcaagtcgcggccatcaaatgcaataacattgatttggacgacgtcctagagggagtcccagcagtgagagcatgcttctcgatcaaatacctgggactccccctgatcctcgggcggatgcgaaaggcggacatgcagcacatctctgataagatcacagggcgtataataggatggagaggcaaaaacatgggacttgccgggaggtccacacttttaaaatcagtgcttacggcgcagccaatctacttactgaccgctctgaaaacttcaaaggaagccttggagtgcctagacaagcagcggcgacgttttctctaggctggcacgggggacatcacgggtggaaaatgcaaagtcaattggacaaagacgtgtctgccaattaggcaaggaggcctcgagggtcctgaacctagaaagattcatgagagccctgcgtctacgctggctgtggcatgaatggaaggacccaaacaagccatgggttggtctcgagatcccctgcgacgaagtagacaagagcttgtttgccgcatccactaagataaccattggtgatgggaatatagcgcgattctgggacactgcgtggattgatgggagaagaccaaaggacctcatgcccctagtatatgcaatttctaagaagaggaaaaagaacctgcgccaaggaaaggagaatgatgcctgggtaggtgatttggcactggagacaaacccagtaattacagtggcccttgtggagcagctggttgccctatggactgcagtctgcaacgtgcagttagaagaagaagagtcagaccaaatcgcctggaaagttcactcctcatgggcactactcggcttcatcggcctacaaagcgcagtgtgttggcgcgcctgacacaacttttgactccttgatctggaaggtctgggcgcccggaaaatgcaaactccacgcttggcttatcatacaaaatag

SEQ ID NO: 1232 - DNA, 1639 bp, Oryza sativa
  N_region (44)..(44): n = any nucleotide
atggtcgaggtcttgaaggaagaagtggtggtgcacacccccantcccttcgggagtgaggatgctagcgggagccgcggcccccatcaccgtcgccgcaactctcggactccgccccgccgcgacccctcgcggagggaggatcccacccggtcgggtggctcagccctctccccgcctccgggcagggggaagccatggcgcatcggagcgcgacaccgcctgacatacggcgacagcggctcgccccgaggcgcgcttcggacagcgggagcccttctacggcatcctcccaggagcgcccgtcggtcagccatgacctcgaggcggtccacggccccaacatcgtcgggggcctcgggaaatcagaggcatcacgatggcctctacggggagcaggacgctcggatcaacatcgagcgacgccaggacgagcgccgtgctgcccgcatgggagaaggcgcatcctcctccagagtgtagtgttcctccttgcgaggcggcccgccccccacgttcacccctggatggactggttgtaggggcttcgttgtgagtctccagaacgtccggtggcccccgaagtttcgtcccaacctcacggagaagtatgatggcagcattaatccctccgagttcctccagatctacaccacgatcatcacggcagtgggggggcgatgaacgggtcatggcgaattacttccccatggccttcaacgcaggtccgcaacactattccatgcattccggcccacgcggtcgtttatgcatttcggaatggcgtgcggcacaaccgcatgctagagaagattgcctccaaggagcccatgaccactgccgagctcttcgagctggcagacaaggtggcgcggaaggaggaggcatgggcctgaaactcgcccagcaccgatgacgagggccacgtcctagcttcaagaccatgaggcgtgagcttctggccgccgtcccaactcacgaggcggcacggaaggcgcgctggtcggaggtgaaactcaccttcgaccagagcgaccatccgacagtgctcactcggggagggaagttggccctcgtggtctcccccaccatccacaacgtcaagatgaagcgtgtcctggtcgacgagggagccagcctcagcatcatctccccagctacctttgacgctctcaaggctccgggaatgaagctccagccgtcattgccaatcattggcgtgaccccgggacataggtggcctctgggtcacgttgagctcccgttgacctttggtgactccaccaacttccgcaccgagcggatcgacttcgacgtggcggacctcaatctgccatacaatgcggtcctgggcaggccctcgttggtgaagttcatggccgcctacctccagatgaagatgccgggccccagtgaccccatcactgtctttgacgatgtgaaggtcgccctggcctgcgcggagcagcgcgccgacaacttggtggcagccaccgagccgcagccctcggagtcctcagcgtcccgcgcctcgaagaagcgcctcgcttcggccgacgaggtccccgtcaaggatatttcccttggcgatgatccgtccaaaaccgccaagattgacggtaccttggacgccaaatag

SEQ ID NO: 1233 - DNA, 1637 bp, Oryza sativa
  N_region (273)..(273): n = any nucleotide
agtagtacagcgcacaggccacgcgtgcgcgtccaccgaaacagcggcggcgacgacgaggcgatcgattcctggacactcgcgccacgccaccccactgtccctgcacgctgcagctacccctactctaccactgccctctccggcagggaagcgaggaagaggcacgcaccacgaagtcgccacctcgatttttccggcgaacgacgcaagaataacaccccccccccctttacctagggggatttgaatttttccgggaaaaaggccagnattaaaaccccccccccttacctacggggatagtgatacgatggcgatggcggccgcttccgcttcgccatggcgaagcgggccgcttcgtggccacgggtcctcctcctcttccgggccttcgccgccgccgccgctgagccgaagcgggtgctcgtgccggtcgcggacggcacggagccggtggaagcggccgcaaccgccgacgtgctcaaacgcgccggcgcgcgggtcaccgtcgccacggctgaccccgcgggcgacgaccgtggcctcctggtggaggccgcgttcggggtcaagctcgtcgccgacggccgcgtcgccgacctggaaggcgaggcctttgacctcatcgccctacccgggaggaatgccgggatcagctaacctcagagattgcaaggtgctggagaagatggtcaagaagcaggcagagcagggtggcctctacgccgccatctgcgccacgccggcggtgacgctggctcactggggcttgctcaaaggcttaaaggttgcaacatggatcatcattcagtcaggaggcgacttgctatccatcattcatggagaagttcaccgctgaaattatccctgtgaactctagggtggtggtagatagaaatgcagtgaccagccaagggccagcaacagcaattgaatatgctctcgctttggtggagcaactgtacggcaaagagaagtcggaggaggttgcaggacccttggtatgttcgtcctcaacctggggttgactatgtcatagatgagttcaattcagttgagtggaaatgcagtggtacacctcagcaggttcttgtgccagttgctaatggttcggaggaaatggaagctcttaatttaatagatatcttgcgtagagcaggagcaaatgttactgttgcatcagttgaggataagttgcaagttgtgacccgccgccacaaatttaacctgatagctgatattatggtggaagaagctgccaaaagggaatcgatctgattgtcatgccggggtggtctgccaggtgctcaaaagctttctagtacaaaggtacttgtagatttactaaagaaacaggcagaatctaataaaccatatggtgcaatatgcgcttctcctgcttatgttctcgagccccatggtttactgaagaggggaagaaggcaacatcatttccaccaatggcacacctgcttactgatcagagtgcatgtgacagtagggtggttgttgatggtaaccttatcactagcaaagccccaggctccgcgacagagttcgcgctagccattgttgagaagctgtttggtcgagagaaagcggtcagtatagcgaaggagttgatttttatgtga

SEQ ID NO: 1234 - DNA, 1627 bp, Oryza sativa
  N_region (63)..(63): n = any nucleotide
  N_region (66)..(66): n = any nucleotide
  N_region (107)..(107): n = any nucleotide
  N_region (113)..(113): n = any nucleotide
  N_region (121)..(121): n = any nucleotide
  N_region (123)..(123): n = any nucleotide
  N_region (148)..(148): n = any nucleotide
ctccaggagctgctctgcgccgtcgtcctcgccgagtgcgtctacaagaggcctgtttctganatnatgagatattttaataagttcaaatctgattttggtggacncattgngccccttnancgttttcagccatccttggatcatntaggacatagaggtatgtgttagcagaggctggtgatacattatttgctacatttatcggtacaaaacaatacaatatagagatattattgctgatgtgaatatactccaaggaaccgtatttcatgaggataccgcaaaatcaaaacctgctgcacaccggattcctgctctggagctatacaaacttgctcagaaaaagaacaggaaacttgttctgtgcggacattcgcttggtggagcggtagctgctttggctacccttgcaatattaagagtacttgcatcctcatctccatctaaagagcctgacaggcttcaggtgaagtgtatcacgttttctcagccaccagttgggaatgctgcactgagagatacgttcatcgaagaggatggcaagattatttcaaatcctactgtattccagaggacttggtgccacgagcaacttgttctaggtgttggtcctgttcaaaagtcactctggagactttcaaagcttgttcctttggaaggagtgcgaaaagcaatctcttgagattcaagaaggttcagaaggaattgctcttaccccagagtaccttctttgccttcatatgttccatttggtgaggctatacctgttgggagattcatcagtcaatacactttcagattcagagtactccaagatgacatcggtgcagtcagttataacggaattaagagagcgtttgcaatcacactcaatgaaatcttatagggctcgcttccagaaagaatatatgacatctgcatgtctgcaaatgcccagctttttacaggcattgaacaattgccacaattttcacatctacaagaactactcggtctaacagctgctgattctgttgaacttggccatattgtggagcctcctactattcgaactgccacttctattcttcctcttggatggaatggctaccctggtgataaaagtgctgaacccctgaaagttgatataattggacatgacctgcatatgtgcactcttttccaggctcagataaatggaaactgtattcatcagatcaggaagtgcagcctacattgcaaaaaatgcgcattctagttgaagattttatggtttctgacaagtgattttgtaactatatgtaaagaggtctatgtgaggaccaggagggtgcgattgcttggactagagggagcaggtaaaacttccttgctaaaagcattgttaggacaaggtttgtgctacgtagattcggcaacagtgaacttgcagcaggaactacctttagaagttaggcagttcaaagaagaattgcagttagggatacatgatctcagcaggaagactgacttagttattgttgtgcataaccttgctcatcgaattcctcagtatgctgctgccgtaggtgcatcacttggtgccggactcggggttgtaatggctgtaataatgggagctgcgtcagctctccggaagccatga

SEQ ID NO: 1235 - DNA, 1622 bp, Oryza sativa
  N_region (290)..(290): n = any nucleotide
  N_region (1331)..(1331): n = any nucleotide
atgtggtcgtgcgtgtgtcgtggcagcgcaaaaagggtacaattttcggttcgcgaggcacgcgcgggacgcgccgctggtgtcatattacaactacatcgtcgtcggcggcggcacggccgggtgcccgctggcggcgacgctgtcggagcggtcgcgcgtgctcctcctggagcgcggcggcctcccctacggcaaccgcaacgtgtccagcgagtaccacttcgccgacgcgctggccgacacgtcgccgaggtccccggcccagcggttcgtctccgaggacggcntcgtgaacgcccgggcgcgcgtgctcggcggcggcagctgcctcaacgccggcttctacacccgcgccagcagcggctacgtgcgcgccgccggctgggacccccgcctcgtcaacgcgtcgtaccggtgggtggagcgcgagctggtgttccgccccgacgtgccgcggtggcagtgcgcgctgcgcgagggcctcctccaggccggcgtcacgccggacaacggctacacgctcgaacacgtccagggcaccaagatcggcggcaccatcttcgaccgcgccggccgccgccacaccgccgccgacttcctccggcgagcccacccgaggcggctcaccgtgttcctccgcgccaccgtgtcgcagatcctcttccgacgcaccggcacccggtggcgtacggggtggtgttcacggacccggcgggcgtgcggcaccacgtgtacctgcgtggcggcgccaagagcgaggtgatcgtgacggcggggacgctggggagcccgcagctgctgatgctgagcggcgtcgggccgcgcggggagctggagaagcacggcatcctccccgtgctggaccagcccagggtcgggcagggcgtggcggacaaccccatgaactcggtgttcgtcccctccccggtgcccgtcgcgctctccctcgtccagatcgtcggcgtctcccgcttcggcaccttcatcgagggcgtcagcggctcgcagttcggcatcccggcagacggggcagctggggacggtgccgccgaaggagcggacgccggaggcgatgcggcgggcggcggaggcgatgcggcggctggacaggcgcgcgttccgcggcgggttcatcctggagaagatcctggggcccatgtcgacggggcacgtcgcgctccgatcagccgaccccgacgcgaacccggccgtgacgttcaactacttccgggacccgcgcgacgtggagcggtgcgtgcgcggcatcgagacgatcgagcgggtggtgcggtcgcgggccttcgcgcggttcacctacgccaacgcancttccccgtcaacctgctgcctcgccgcgccaccgacacgcggccgctgcagcagtattgcagggagacggtgatgaccatctggcactaccacggcggctgccatgtcggcgccgtcgtggaccaggactaccgggtgctcggcgtacgtggcctccgcgtcgtcgacagctcaaccttcaagtactcgcccggcaccaacccgcaggccaccgtcatgatgctcggcagaggtatatggggctgaagattcagaaggagaggtggacgaggaacgacgagacacattag

SEQ ID NO: 1236 - DNA, 1617 bp, Oryza sativa
  N_region (1326)..(1326): n = any nucleotide
atggcagcaattggtaacatgaatttgttcgacttgttcttcgtcttgcagcttctcctgtcaggagtatgcgtgctcgtcatctgctaccgatatcagcggcttaaatccatgaaaaaatgtagcctaggggttgtcagtggccgatcgtcggcgtgctcccggccatcgtcgccaacatgcaccgcctcctccgacggcgtgaccttcctgctggccacgtcgcagctcaacttccagtgccgcttctggctcgccggcttccggttcttcgtcacctgcgacccggacaacgtgcgccacatcttcacgtccaacttcgacaactaccccaagggcgacgtgttcgccgacatgttcgacgtcctcggcggcggcatcttcaacaccgacggcgagcggtggcggcggcagcggaacaaggcccagatgctcatgaccacgccgcggttccgcgccttcgtggcgcgctccagcctcgacaaggtggagaagggcctcctgcctttcctcgcgcacgtcgccgacgcccggaagacgtgcgacctgcaggacgtgttcacgcggtggtcgctcgacgcgacgtgccacctggtgttcggcgtcgaccccggctgcctggacatcggcctgccggaggtccccttcgcacgggcgatggacgacgtgctgcggacgatcttcctccgccacaccatgccagtgtcgttctggaagacgatgagatggctagggattgggcacgagaagaggaacgccgcggcgaggcggacggtcgagagcttcgtcgcgtcggccatcgcgaaacacagagccgatgacgagagcaagtccagacaaggcggcggcggaggcggcgacaagcaatcggtcgccgacttgctttcctccttcctctgcgacgacgagatcgccggcagcgccgacgccgacgtgtacatcagggacatggcgatgaacctcctcgtcgccggccgcgacaccacgagctcggcgctgtcgtggttcttctacctcctctccacgaacccgcgcgtcgagcagaagctcctgcaggagctggcgcccatcgcttcccgcaagccgcagctgcagcaggggcggctcttccccggcaacggcggcatggtgacgttcgacgcgagcgaggtgaggaacctcctgtacctgcacgcggccctttgcgaggccatgaggctgtacccgccggtgcctttggagcacaaggcggcggtcgccgacgacgtgctccccagcgggcacgaggtgatggccggcgacaaggtgctggtgttctactactccatggggaggatgaagcgggtntggggcaaggactgcagggagttcaggccggagcggtggatcaccgaggacggcaagctgcggtacgtgccgtcgaacaagttcgtcgcgttcaactccgggccgaggacatgcctcggcaaggagatggcgctcgtgcagatgaaggtcacggcggcggccatggcgtggaactttgccgtggaggtggtgccggggcacgtcgtggagccgaggctgtccgtcatactccacatgaagaatgggctcttggtaagggtcaagagaagagagccagtgatgaacacctga

SEQ ID NO: 1237 - DNA, 1617 bp, Oryza sativa
atggccggaggtgtcatcgtggcgaacgacggtgatggctccgccgtggaccacggcggacggctgacgttctcggtggtcatcacctgcctcgtggcggcctccggcggcctcatcttcggctacgacgtcggcatctcaggtaggcggcgtctcgacgatggagccgttcctgcggcggttcttccccggcgtggtgaggaggatggcggaggcgaggcccgggaacgagtactgcgtctacgacagccaggcgctgacggcgttcacgtcgtcgctgtacgtcgccgggctggtggcgtcgctcgtggccagccgcgtcaccagggcgatggggcggcaggccgtcatggtcatgggcggcgcgctcttcttcgccggcggcgccgtcaccggcttcgccgtgaacatcgccatgctcatcgtcggccgcatgctgctcggcttcggcgtcggcttcaccaaccagcaggcggctcctctcttcctcgccgagatggccccgacgcggtggcgcggctcgctcacggccgggttccagttcttcctcgccgtcggcgtcgtcatcgccaccgtcaccaactacttcgcgtcgcgcgtcccctgggggtggcgcctctccctcggcctcgcgggggcgcccgccgtcgtcatcttcctgggcgcgctcttcctcaccgacacgcccagcagcctcgtcatgcgcggcgacacggcccgcgcgcgcgccgcgctgctccgggtgcgcggggctggcgccgacgtggaggcggagctgaagggcatcgtgcgcgccgtggaggtggcgcgccagggggaggacggcgcgttccggcggatggcggcgaggcgggagtaccgcccttacctggtgttcgccgtggccatgcccatgttcttccagctcacgggcgtcatcgtgatctccttcttctccccgctggtgttccgcaccgtcgggttcggcagcaacgccgcgctgatgggcaacgtcatcctcggcgccgtcaacctcgtctgcctcatgctctccaccctcgtcatcgaccgctacggccgcaaggtgctcttcatggtcggcggcgccatcatgatcatcgcccagaaggttggggtggcgtggatcatgggggcgcaggtggggaagaacgggtcggaggcgatggcgaggccgtacgcggtggcggtggtggcgttcacgtgcctgcacacggcggggttcgggtggtcgtggggcccgctggggtgggtgatccccggcgagatattcccggtggacatccggtcggcggggcaggcgatgaacgtgtccatcggcctcggcctcaccttcgtgcagacgcagtcgttcctcgccatgctctgccggttcaggtacggcaccttcgcctactacgccgcgtgggtcgccgtcatgaccgtcttcatcgccgtcttcctgccggagaccaagggcgtcccgctcgagtccatggccaccgtctgggcgcgacactggtactggaagcggttcgcgcgggagcaaccaaagacgagcgccgacgaaccgaccgggacgtactgatgtttcacgatgtgtagatgtacttaattctgtggagtacatgtcttgtataa

SEQ ID NO: 1238 - DNA, 1606 bp, Oryza sativa
atgtcacaggactgggcttcagatagcgacaatgataagttcgagtgggacacagacggtgaggctgagacctcatctgccccggccctaaggaacatagatgctcctggtccgtccacgaggctgccgcagaatgggaaggccaacgggtcaggtgctttggttgctgaatttatgggaatgggattcccaaaagaaatgatcttgaaagcgattaaggagattgttgcttgagttacttctgacttatcaggcttcggcctgtgccccccagactaggatttctttcaagaaatgtcagagaaggatgaaaaaatgaagtccttagtcaacatgggttttcctgaagatgaagcaaagatggctatcgatagatgtggtgttggttgattcaatctatgcatcacaggaagcaggaaatggttactctgcaaacttatctgactatgagtcctttggaggaagaaagaaaacaagatttgtggatggaagcaagaagagaaagcggtatggaagtgggccatctgggaatcaagtgccgtttgatggcagccacgaagagcccatgcctcttccaaatccaatggtgggattcagcttgcccaatgagaggttaaggtcagtccacagaaatcttcctgaccaagctcttgggccaccattcttttactatgaaaacgtggccctagctccaaaaggtgtatggacaaccatctcaaggtttttatatgacattcagcctgagtttgtggactccaagtacttttgtgctgctgccaggaagaggggttatattcataacctgccgattgagaacaggtcacctgttctcccaatgcctcccaaaacaatatctgaagcctttcctaataccaagaggtggtggccttcctgggatccaaggaggcagttcaactgcttgcaaacttgtatggcaagcgcaaagcttacagagcgaattcgttgtgctttgggtagattcagtgatgtaccaactccacaagttcagaagtatgtcttggacgaatgtaggaaatggaacctagtttgggtcggaaagaataaggtcgctcctctagagcctgatgagatggagttcctgttagggtaccctagaaaccacactaggggagttagcaggacggagaggtacagggctctcgggaattcattccaagttgatacagtagcataccatctctctgtgctgagggacctgtttcccaatggaatgaatgtcttatccctgttttctggtattggaggagcagaggtagctctccacagactggggatacatatgaaaacagtgatctctgttgagaaatcagaagtgaacagaacgattctgaagagctggtgggatcagacacaaactggaacgctgattgaaatcgccgacgtgcggcatcttactactgaaagaattgaaacattcatcagaaggtttggcggttttgacctggtgattggtggcagcccgtgcaacaaccttgctggcagcaaccgccatcaccgagatggtctggagggcgagcactccgcgctcttctacgattacattagaatattagaacatgtaaaggctaccatgtcagcagtctag

SEQ ID NO: 1239 - DNA, 1605 bp, Oryza sativa
atgccaaggaggacggcgagctcgtcgacgtcggtgaagtcgatcaagtcgttctgccagccggtggactaccgggagacgtgcgagaccacgctggagcagacggcgggcaacgcgacgaacccgacggacctcgccaaggccatcttcaaggcgacgtcggagcggatcgagaaggcggtgagggagtccgccgtgctcaacgacctcaagaacgacccgcgcacgtccgacgcgctcaaggactgcgaggagctgctcgactacgccatcgacgacctcaagacgacgttcgacaagctcggcgggttccagacgagcaacttcaagcgcgccgtggacgacgtcaagacgtggctcagctcggcgctgacgtaccaggagacgtgcctcgacgggttcgagaactctacgtcgacggaggcgtcggagaagatgcgcaaggcgctcaagagctcgcaggagctgacggagaacatcctcgccatcgtggaccagttcgccgacacgctggcgaacctggacatcaccggattcagccgccggctgctcggcgacgacggcgtgcccgtgtggatgtccaacgcgaagcgccggctgctggaggcgaccccgggctccaaggagttcaagccggacgtgacggtggcggcggacggcagcggcgacttcaagaccatcaatgaggcgctggccaaggtgccggtcaagagcacggggacgtacgtgatgtacgtgaaggccgggacgtacaaggagtacgtgtcggtggcgcgcaacgtgacgaacctggtgatgatcggcgacggcgccaccaagaccatcatcacggggaacaagagcttcatgctcaacatcaccaccaaggacacggccaccatggaggcgatcggcaacgggttcttcatgcgcggcatcggcgtggagaacacggccgggtccaagaaccaccaggcggtggcgctccgcgtgcagagcgaccagtcggcgttctacgagtgccagttcgacgggcaccaggacacgctctacacccacaccagcaggcagtactaccgcgactgcaccatcaccggcaccatcgacttcatcttcggcaacgcgcaggtggtgctccagaactgccggatccaggtgcgccggtgcatggacaaccagcagaacatcgtgacggcgcaggggcgcaaggagaagcactccgcgggcggcacggtgatccacaactgcaccatcgagccgcacgaggacttcaaggccgacgccgccaagttcaagacgttcctcggccgcccgtggaaggagtactcgcggacgctctacatccagtccgacatcggcgggttcatcgacccgcaggggtggctgccgtggctcggcgacttcggcctcaacacctgctactacgccgaggtggagaaccgcggcgacggcgccgacatgagcaagcgcgccaagtggagaggggtcaagacggtcacgtaccagcaggcgcagcagaagtacaccgtcgagaggttcatccagggacagacgtggctcccaaagttcggcgtgccgttcatccccggcctgttgccgcaggagcagtcagggaggatacactga

SEQ ID NO: 1240 - DNA, 1543 bp, Oryza sativa
aagatcacgaactccatgaacctcatggccgacgagctggtcctgcagagaagcgagcagctgagggagctctacgactctctcctctccggcgagtgcggccaccgagcgaggaggcccgtcgctgcactgttgccggaagatctcggggacacggaatggtactacgtcgtctgcatgacctacgccttcggcccccgccaagggtgcgtatgttgccaggcaaaagcttcgcaagcaatgaatttgtttggctgacaaacgctcagtctgcagatagaaaactattccatcgcgcgcttatagcaaaacaatcgtctgcgtgccatttatcatgcatggtgtccttgagctcgggaccactgatccgatttcggaggacccggctctcgtcgaccgtatcgcggcgtcgttctgggatacgccgccccgcgcggcgttctcgtcggaggcgggagacgccgacatcgtcgtcttcgaagacctcgaccatggcaacgccgccgtcgaagcgacgacgacgacggtcccgggggagccacacgcggtagccggcggcgaggtcgccgagtgcgagcccaactccgacaacgacctcgagcagatcaccatggacgacatcggcgagctctacagcctctgcgaggagctggacgtcgtgcgccctctcgacgacgacagtagcagctgggcggtcgcggatccctggtcgtcctttcagctagttccgacgtcttctccggcgccggatcaggcgccggcggcggaagctactgacgtcgacgacgtcgtcgtcgccgctttagacagtagctccattgatggatcttgcaggccgtcgccgtcgagttttgtggcgtggaagaggacggcggactcggacgaggtgcaggccgtgccgctcatcagcggagagccgccacagaagttgctgaagaaagctgtcgccggagccggtgcctggatgaacaatggtgacagcagcgcggcggcgatgacgactcaaggaagcagcatcaagaaccatgtcatgtcagagagaaggcgccgggagaagctcaacgagatgttcctgattctcaaatcagttgtcccgtccattcacagggtggacaaagcatccattctcgcagaaacgatagcctacctcaaagagctggagaaaagagtggaagagctggaatccagcagccaaccatcgccatgtccattggaaacaagaagcaggcgaaagtgccgtgagatcactgggaagaaggtttctgcaggagcgaagagaaaggcgccggcgccggaggtggccagcgacgacgacaccgacggggagcggcgccattgtgtgagcaacgtgaacgtcaccatcatggacaacaaggaggttctcctcgagctgcaatgccagtggaaggaattgctgatgacgagagtgttcgacgcgatcaagggagtctccctggatgtcctctcggtgcaggcatcaacatcggatggtctccttggactgaagatacaagccaaggtcgtcatctcagcggctaagtag

SEQ ID NO: 1241 - DNA, 1519 bp, Oryza sativa
  N_region (139)..(139): n = any nucleotide
atggtggtgcgcggaggtggaggcagggcggagcgctgcggcggcgaatgcagggctccggctgcactccgccgatttctcgccggagccgggccggagcatggcggatccgcccctgggcacggaggcggaggcggangcggggtcaggcgccgtggtggttggcgcggaggccggcgccacggaggtgaagacgggcgagagcatacaggcgggcgccacggcgacggaggcggggctccggcggaactccgccgtcgagacggtggctttccaccgtgctcacggcctctgcaaccgccgcctccgcttctcgcgcgttgttgtcgttgccgccgccgcctcctctctccttcctctgttctccttcctcctctctccttcctctgttctcgatttctatgtgggctcgaagttgcagacgaacaggaggacgcctgacagacacagcctctctggagtgatgacctcattgagcagaacgaggccccacctggtcagtgggacgaccaggacgcctctgccgtcgggcggtgacgtcattgcgcaggatgaggccccacctgtcagcgagcaggaggctcgtgcaccttttaaagtgctcgccttggcgctcgcccagagccccaagccgtaaccgaaacccaagatcatcccaccgcgcccccgtctccgcctccgcctccacctccgccgctgctcgccggagcccggaagcgatggagcagttccacgacagggaccacgtgcggctgcggagccgcgtgcacggcacgtacctccacgccgatgaggacgggaggggcgtctccctgcagccgaccggggcatcgctcaccgcggtttggacggtgcacctggagggcggtagcccccagcgccgcctcctgctccacagcgccgcctacggccgataccttgcggccacaggcaagccggggccgagcggcctccgtggccaccgtgtcgcgcttatcaacctcgaccggctggacgacgagtccgtgtcgtgggaggcggttcggacggcgaaaggagatgacgtgctgctccggcacgccacggggcgcaacctacgcgccaaccatggcgctggcgccaccgttgacgatagatacagcaggatgctgctctgggtggaccaggtggttgaggccatcccctcggcagattccgtacccaggcctccaccgatctcaagggcgccaggacgggcctgagataagaaccatccggtttgtgccagcagctcctaatgggaccattgccgaggattggagaacctttcaatttactggaagatcagttcagcggttaaaggaagagattacaagccgtgctggggaggcaacccagtactgtgttcaagcaggccggtacggacgtcttatccctttgacacatgagcttcctcacaacactgagaccattgatatcatcattatgatgactggtactacagtacagatgggcggttttgatttccccccttcttgtctgtggcaatatatccatgtaa

SEQ ID NO: 1242 - DNA, 1515 bp, Oryza sativa
atgctccgctcgccgggccactccccgcgccacctctccccgtccccggcgccgtccacgcctcgcccctcctccccgacgccctcgtccgcctccgcctccgcctccgcatcggccctcgccgccgccgccactaccaccacctcctccaagcgccgccgcccggaggtgctcgacgaggacacctacgtcgcggccgtcgagcggatcatcgagcgggacttcttcccggacctcccgcgcctccgcgaccgcctcgactggctccaggccctgcgctcccgcgacccgctcgtcctccgcgacgcgcagctcaagatcctcgagcgccgccgccgcgcccagcgccagcgccagggcggccccgtgcccaccccgacgccggccacctccaccgcgctccgctccccgtccttcctcgccaccccctccgtcgccccctccgtcgccggcgacgagggcgccgacgtcgacgacgacgtcgaggccgcgctctcgctcgacgacttcttccgccgcttcaccagcgaggacaacgagtccttctcccgcatcctcgagaaggtgaaccaccgccgccgcgagcgctatgcccacctgctggagcctggtgaggtggcgaaggcgccccagttggaggacgccaagcgcgacaggataaccgatgggtacggcacgtcggggcagccgctgagcaccttggagggtgccaagttcacggccaagaacctgctcatgtactacccggctgaccgtggggaggccccgcttactgatgaggagcgcgccgagcggctcaaggggatgaccaaggagatcgacaggtcgaacaccaggttccatgggaagtcttctgttgatgatggtgcaaaggaggaggaggcagctgctatactttatgcgccagttgcaggttccactcccggaggtatggcataccatgatcctgataaagcgaagaagtacgatttggaggatctaaggaagactccaaacccattctacgttgagtcagggaagaatgcaaacaatgggtatagttttgtgagaacgccatcgccagcacctggcgtggatgagtcaccgttcatgacatggggtgagattgatggaacaccactgagactggacccagaggagacaccgggtggttctgggggaagtgatagggcgcatttcaagatcccacctccgcctgctcgggatgtaaaggcacatctgctgtcaagggatgcagcaaggaagataaaggagcgcactaaaatgttccacaagccaccgctaccatcgcctgtgaggggaggaagtgcaagcccaaggaccttctctcctgcagcacagaagtttgttaggaatgccattgcaaagtcctctcgtaccattgatgagtcgctccgagcgagctacagaggtacaaccccatctgcaaccactccaaagacaaggttttcaagagacccaagcttgggatcacgatctccatcgacaagacagggttccacccctccctggtga

SEQ ID NO: 1243 - DNA, 1509 bp, Oryza sativa
  N_region (488)..(488): n = any nucleotide
  N_region (610)..(610): n = any nucleotide
atggggttcctggtggggttggtgctggggatcgcggcgggcgtggctctcatagtgggcttcgcccgcgccgagaactcccgcgccgcccgccgccggcagctgttaaaatggctcaatcaagagctgataaaaatatggccatttgtgaacgcggcagcatcagaactgatcaaaacctccgtggagcctgttcttgaacaatatcgaccaataatcttagcttctctcaagttctcaaaactcactcttggtactgttgcaccacagtttactgggtgtttcgatcattgagaatgacgaatcaggcattgtcatggaactagagatgaattgggatgccaatccaagtatcatactagacgtaaaaactagacttggcgtgtcacttccaatacagatataggtgaaagatattggctttacaggagttttccgcttgatcttcaagccacttgttgatcagttgccctgctttggagcagttngcttttctctacgaaagaagaaaaagctggatttcagactgaaggtcattggtggtgaaatttctgctatacctgggatttcggatgctcttgagagtgatttggaactaaagcctgttggnacattggaagtcaagctagtacaagcgagggatttgacgaacaaagatctgataggaaaatctgacccttttgcaattgtgtatgtacgacccttgccagataaaatgaagagaagtaaaacaattcctatctggaatgaacactttgagtttattgttgaagatgcagatactcagactgtgacagtgaagatttatgatgatgatggtattcaggaatctgaattgattggctgtgctcaagttactctgaaggatctacagccaggcaaagtgaaggatgtctggttgaagcttgtaaaagacttggagattcaaagggaccggaaagatcggggtcaggtgcatcttgagctactctactgcccatttgacatgaaggaggagactccaaatccttttagacagcagttttctatgacatccttggagaggacaatgacgagcatggaaaatggtcttccaggaagaaaaaagaaatcattatgcggggagttttgtcagtaactgtgatatctggggaagatctgccagcaatggatatgaatggaaagtctgacccatatgttgtactttcactcaagaaatcaaaaaccaagtacaagacaagggttgtgagcgaaagcttgaatccagtttggaaccaaacttttgattttgttgtcgaagatggtttacatgatatgcttatgttggaagtatatgatcatgatacttttagtagagattacatgggacggtgcatcctaacattaacgaaggtcttgatcgaagaagattacaaggacagcttcaaactggagggagcaaagtccgggaaactgaacttgcatctgaagtggtcgccgcaaccaatcttccgtgattcgcgagaagaggacagcttaagattcagatga

SEQ ID NO: 1244 - DNA, 1503 bp, Oryza sativa
  N_region (135)..(135): n = any nucleotide
  N_region (180)..(180): n = any nucleotide
  N_region (330)..(330): n = any nucleotide
  N_region (333)..(333): n = any nucleotide
  N_region (339)..(339): n = any nucleotide
  N_region (441)..(441): n = any nucleotide
  N_region (578)..(578): n = any nucleotide
atggacgaggaccacgactgcgaccccgaccagccgccggccggagcggcggcgggggcgagcccgtgctcgtgctgctcgacgccgtgcgcggtcgcgacgtggcggcggtcggtgaagaggaagctggggganaagggggatggggaggggaagggggaaggggcggtggtgctggcncgggtggaggcggaggaggaggcggcggcgctgcgggaggcggtggcggctgcgcaggagacggccgcggcgctgcggtcggaggtggaggaggagcggctcgcggcggccagcgccgcgagcgaggccatggccatgatgctgcgcctncancggganaaggccgaggtccagatggagctccgccagttccgccgcttcgccgacgagaagatggcgctcgacgccgccgagatcgaccacttccgcgccgccctggcncgccgcgcccgccacctggcgcgcctccgctccacgctccgggagtaccgccacacgtgcctccgcctcggcatcccactcgccgagggcgaccaagccgatgagttggccctagacgacgggttcgttctcgaggncgaggatggcgacggcgccggatactacccagagctacgctgctacgacggggagtactactacgaggatggccaaaaggagggcgaggaggaggacgatcccgttgtcgtcgatctggagcgccggatctacctcctcgagcacgaccacaaaaaccatggagttgagctgtgcttggaggaagaggaaggcgctccactttacgcagacgagccgctgccggattcatctgagcaggaattgaacagcgtatatgtcgacgaggcattgcctgaagggactgtgcaggaaagaaaccaatgcagtgatgatgatgatgagttgccggagtctccagctgctagaaatggcagtgaggaagagggaagcgatagtgatggtggtcgcagcggcagtggcagcgatagggtatacacaatcgacaaggtgcatcaaggtgctactgctccagcagctagggtcttagagaattaccaggatggggaagtggagccagacattaagaagctatacatgagactggaggcgctggaggcagaccgggagtcaatgcggcaagccctggtggcaatgcactcggagaaggctcagcttgtgctcctccgggagattgcacagcagctagccaaggatgctactccagctaacacaggaggatttggggtggtgccaactgtgcaccattttcctggaaagcaagatgggttcagagatcagaggtttcgggaaaacaggaagatggcgattgccaagagactctccatggttgcgttgtgtaagtggattgttgctttatttcgctctcagaaaaggaacccatcacaaagcaggtacacatttggtctatctggcaacaatgtcggcttgctagtactcctggacaagtacccgcggattcagaaaactctcacaagaagaaagtaa

SEQ ID NO: 1245 - DNA, 1479 bp, Oryza sativa
  N_region (300)..(300): n = any nucleotide
atggcaggcggtggcggcaagtccgtagcggcggcgctggccatggcctgcttcctcctcatcctcgccgccttcgctcccccggcggcggcggcgccgccggacatcatgtcgatcatcaggtacaacgcggagcacggggtccgggggctggagcggacggaggccgaggcgcgcgccgcgtacgacctgtggttggcgcggcaccggcgcggcggcggcggcggctcgcgcaacgggttcatcggcgagcacgagcgccggttccgcgtgttctgggacaacctcaagttcgtcgangcccaaaaagcccgcgccgacgagcgcggcgggttccgcctcgggatgaaccgcttcgccgacctcaccaacggcgagttccgcgccacctacctcggcaccacgcccgccggcagggggcgccgcgtcggggaggcgtaccgccacgacggcgtcgaggcgctgccggactccgtggactggagggacaagggcgccgtcgtcgcccccgtcaagaaccagggccagtgcggtagctgctgggcgttctcggcggtcgccgccgtggagggcatcaacaagatcgtcaccggcgagctggtgtcgctgtcggagcaggagctggtggagtgcgcgaggaacgggcagaacagcggctgcaacggtgggatcatggacgacgcgttcgccttcatcgcccggaacggcggcctcgacacggaggaggactacccgtacacggccatggacggcaagtgcaacctcgccaagaggagccgcaaggtggtgtccatcgacggcttcgaggacgtgcccgagaacgacgagctgtcgctccagaaggccgtggcgcaccagcccgtcagcgtcgccatcgacgccggcggccgcgagttccagctctacgactccggcgtgttcaccggccggtgcggcaccaacctggaccacggcgtggtggcggtggggtacggcacggacgccgccaccggcgccgcctactggacggtgcgcaactcgtgggggcccgactggggcgagaacggctacatccgcatggagcgcaacgtcaccgcgcgcaccggcaagtgcggcatcgccatgatggcgtcctacccgatcaagaaggggcccaacccgaagccgtcgccgccgtctccggcgccatcgccgccgcagcaatgcgaccggtacagcaagtgcccggcggggaccacctgctgctgcaactacgggatcaggaaccactgcatcgtgtggggatgctgccccgtcgagggcgccacctgctgcaaggatcactccacctgctgccccaaggagtatcccgtctgcaacgccaaggctcgcacttgctccaagagcaagaacagcccgtacaatatcaggactccggcggcgatggcacgaagtgttccggaacaacctgattcaatctcttttgtagttttgaatagggaagatctagggtgtgtttag

SEQ ID NO: 1246 - DNA, 1479 bp, Oryza sativa
atggcgaggcgacagcgccacgccgtgatgatcccgtacccggcgcagggccacatcacgccgatgatgaagctggccaagctgctccacgcgcgtggcttccacgtcaccttcgtcaacaccgagttcaaccaccgccgcatgctcgcctcccggggcgccgccgcgctcgacggcggcgtaccggggttccgcttcgccgccatccccgacggcctcccgccgtccgacgccgacgccacccaggacatccccgcgctctgccgctccaccatgaccacctgcctcccccacgtcgtcgccctcctcgccgagctcaatgacccgacctccggtgtgccgccggtcacgtgcgtcgtggcggacgccatcatgtcgttcgcgtacgacgcggcaaggcggatcggcgtgccgtgcaccgcgctgtgcacgccgagcgcctgcggcttcgtggggtacagccactaccggcagctcgtggagcgcggcctcgtgccgctcaaggacgcggcgcagctcgccgacgggtacctcgacacggtggtggacggcgcgcgcggcatgtgcgacggcgtccagctgcgcgacttccccagcttcatccgcaccacggaccgcggcgacatcatgctcaacttcatcatgcgcgaggccgagcggctcaccctccccgacgccgtcatcctcaacaccttcgacgacctcgagcggccggcgctggacgccatgcgcgccatcctcccaccggtctacaccgtcgggccgctccacctccacgttcgccacgtcgtccccaagggcagcccgctggacacagccatcggctcgaacctctggaaggagcagggcggcctcctcgagtggctcgacggccggccgccgcgctccgtcgtgtacgtcaactacggcagcatcgccgtgatgacgaacgagcagctcctggagttcgcctggggcctcgcccacagcggctacccattcctctggaacgtgcgccccgacctcgtcaagggcgacgccgccgtgctgccgccggagttcctcgccgccgtggagggccgcggcatgctgacgacatggtgcccgcaggagcaggtgatcgagcaccccgcggtgggtgtgttcctgacgcactccgggtggaactcgacgctggagagcctcgccgcgggcgtgccgatgctgagctggccgttcttcgcggagcagcagacgaactgccggtacaagcgcacggagtggggcgtcgggatggagatcggcggcgaggtggagcggagcgacgtggccgccacgatacgggaggccatggagggggagaaagggcgggagatgcggcgtcgcgcggcggagtggaaggagatggccacgagggtgacgctgcccggtggaaccgcggatatcaacttgacaaggcttatcgacgaggtgctgctcagtggtgggaagaagcgtcaagctttggacgcccgtgactga

SEQ ID NO: 1247 - DNA, 1467 bp, Oryza sativa
  N_region (297)..(297): n = any nucleotide
  N_region (457)..(457): n = any nucleotide
  N_region (557)..(557): n = any nucleotide
atggacgccgccgcaatggaatccctcatcctggagctccacgccatcgaggccgtcaagttcggcgccttcgtgctcaagtccggcatcacctccccgatctacctcgacctccgcatgctcgtcgcccacccgcgcctcctctccaccgtcgcctccctcctcggctccctcccggcgacccgcccctacgacctcctctgcggcgtcccctacaccgcgctccccatcgcctccgtcctctccgccgccgcctccgtccccatgctcctccgccgctaccacgtcacgccgcangccgccgccgaatgcctcgacgggtccttccgcgccggggacgccgtgctcatcgtcgaggacctcgtcaccacgggctcctccgtgctcgagaccgtcgcgccactccgcgaggtcgggctcgtcgtcgccgacgccgtcgtggtcatcgaccgcgaancagggcgggagggagaacctcgccgcgaacggggtcgcgctccactcgctcatgacgctcacggaggtgcctcgccgtcctcgtgaagcgcgggaagctnggcgaggagaaggcccaggaggtgaagcgattcctcgacgcaaacaggaagatggctgtgccgggactgccggttaaaccgaaagtagttaggaaggcattttctgagagagctggattggcgacgaatccgatggggaggaagctgttcgagttgatggaggccaagcaaagcaacttgtgtgttgctgcagatgtcgggacagcaacagagctacttgatctcgccgataagttggtccagagatctgcatgttgaaaactcatgtggatatcttgtctgattttacaccggattttggccacaagctccgttcggattgctgagaggcacagctttttgatatttgaagaccgcaagtttgcagacattggaaacacagtaactatgcaatatgaagggaggaatattccgcatattagactgggctgatattgttaatgcacatatagtttctggacctggaattgtagaaggcttgaagctgaagctgaagggtctgccaaaaggaagagggttacttttgctttctgaaatgagttcagctggcaaccttgctcatggagattacactgctgcagccgtgaagattgctgagcaacattctgatattgtaattggatttatatcagtaaatcctgcatcttggtcagtgacgccgtcaagtccagcgttcatccatgctactcctggagttcagttggttgctgggggagactcgcttggtcaacagtacaacactccttactctgtcataaacgacagaggcagcgacataattatagtcggtcgtgggattataagggcgaacaatcctgctgagaccgcgagagagtaccgcatccaaggatggcatgcttaccaatccagcttatcatgagaatgctgtaaggtctctcccattctgtaa

SEQ ID NO: 1248 - DNA, 1443 bp, Oryza sativa
atgtgttccatttttataaacagtgccattttacaggcaagccttgctgattctttcttagcggatcttgatgaactttcagacaatgaagcctatcctgtgggcacggaagagattggtgatgatgatatgcctgacctcgagtctcttaattatgatgaccttgatagtgtttcaaagcttcagaaaacacaacgttacaatgacattatgcaaaaagttgaaaatgcacttcagaaaggtacagatttttccaatcaaaggtcgatcctggaggaagatccagaataccagctgattgttgattgcaatgctctatcagtagatattgagaatgagatcattataatccataatttcatacgtgacaagtataggctgaagtttcctgaactagaatcccttgttcatcatccgatcgattatgctcgtgttgtccagaagattggaaatgagatggatttaacgcttgtagatctggaagggcttttaccttctgcaattataatggtaatttcagtgacagcatcaacgacaagtgggaagccgctttccgaggagaacttggtaaaaactattgaagcatgtgagagagcccttactcttgatgctgcaaagaagaaggtacttgaatttgtagagagcagaatgggttacattgcaccaaacctgtctgccattgttggcagcgctgttgcctcgaagttgatgggaactgctggtggtttgggagcacttgcaaaaatgcctgcttgtaacgttcagttacttggtgctaagaggaaaaatcttgctgggttttctactgccacatctcagtttcgtgttggctatcttgaacaaaccgatgtattccagagtaccccaccagctctgaggactcgtgcttgcagacttatagctgcaaagtcaactctagcagcaaggattgattcgatcagaggtgatccaacaggaaaagctgggcgtaacttgttagaagaaatccgtaagaagattgagaagtggcaagaaccgcctcctgcaaagcttccaaaaccacttcctgttccagactttgagcctaaaaagaagagagggggtcggcggcttcgaaaaagaaagagatatgcacaaactgatatgatgaagcttgctaaccgaatgcagtttggtgtaccagaagagagctcattggtcatcaggtgatggtttaggggaaggttatggcatgcttggacaggcaggaagtggaaagctacgcgtgtcaactgcaccaagcaaactttctgcaaaaattaccaagaaacatcggggctgacttctagtttggcgtttacaccagttcaggtccaggggatagagttgtcaaatccacaggcccacggcaacctgcttggaagtggaactcagagcacctatttttcagagaccgggacgttctcgaagatcaaaaggacctga

SEQ ID NO: 1249 - DNA, 1391 bp, Oryza sativa
atgggcttttcctgcacgtcggccattatcagatcagtggaggactcgtgcgcgcggctgattcttgatttttgcagctctctgcaccatccacgcccaccacctgttcgacgaaacgcctcagcgcctcttgggtcaccgggttggctcatggaaccggagaaagcacccggcagaggcaggctcatgctcagcgacctccccgacgacctcatccgccgcatcatgtccttcctctacgcgcgccaagccgtgcggacgtgcgtgctgtcccggcgctggcgcgacctctggcgctccctcacccgcatcaacgccgacttctgcgagttcaagggggacaccaggacatgggtgggggacaaggcgcggttcgagaagttcctcaacgctctactgttgcgccgtgaccccgtcctattggtggacaagttctggctcagatgccccagctgcagcttcggggtttactcattagatgctaacctgtggatcagccatgtgttacagttgcaagccccggttctggatgttcgcgcagtgggcatcagccgtctcaatcaggcagtatttacctcccagtacttgagaagattggccctctcctcggttgttttgtccaaaggtttcttcaatcaactcaagatgcgctgcccggaattggaatgtctcttcttgcgagactgccatattcacgatcatcacatctcctcccagacactgaagatcctcacaatcaatatctctgatttcagtttcgttgacaagtacgattgctgcatttccactccgagcgtcactgctctgacattgtttggtccgaaagggcgggtacctttgctacaggacatggcatcactagtgtctgcttcagtttatcttgccaatgatttcagtaattttggtactgctggtgatgtccatcggttgctcacaagcttatctggtgtcaaatatttggccttggattttgatggggtaaatgagaggtgcagataacaaatgaaaacaatatacaatggtgtccagaattcattgatcttgtaagcctgactctgggttcgtggtgtctggagtcaaacttctatggactgactgtcttccttcagaactcaccgaaactggagaagctgacattgaaactcaataaagtagttcatactcgaagaatcgttggcaagcttaaagaaaaatcatttacttgtgaacgccttaaggttgttgaagtcatatgcattggggatgatcctctggtgaactgcgtggaagaattctttttcaacagcggcatgacctctcttcagattagaatcaaccacctggacggctacgagctttatgaacctaggttatacagagatgagtacaggcgtcgacagtacatgggttaa

SEQ ID NO: 1250 - DNA, 1389 bp, Oryza sativa
gacccggcgcgcgtcacccagctatcctggcgccccagagggcgttcctgtacagcggcttcctctcgcacgacgagtgcgaccacctcgtcaatctggcgaaggggaggatggagaagtcgatggttgcagacaatgattccggcaagagtatcatgagccaaggacgacattgtttctggaattgaaaagcgtgtagctgcttggacatttcttcctgaaggaaaacgccgagtcaattcagattctgcattatgagcttggtcagaagtatgatgcccacttcgattatttccatgacaagaacaaccttaagcgtgggggtcatcgagtcgccactgtgcttatgtacttgaccgatgtcaaaaagggtggagagactgtatttccaaatgctgcggtgaagccaaagaaaggcgatgcgctactgttcttcagtctccatgttaacgcgacaacggatccagccagtcttcatggaagctgtccggtgatcgaaggcgagaaatggtctgcaacgaaatggatccatgtcagatcatttgataatcctccggatgtaagcctggatttgccgtgttccgatgaaaacgagcgctgcacgagatgggctgctgttggagagtgttacaggaacccaaaatacatggttggcaccaaggattcgctcggattctgccgcaagagctgctttttttacaagggcttcctttcagatgatgagtgcgaccaccttgtcaagttgaagctgaagaggtccatggtggcagacaatgagtcgggaaagagtgttatgagcgaagtgcgcaccagctctggcatgttcttggacaaacaacaggcagcttggaccctgcttccgcaagcagatactccgatacgagaacggacaaaaatatgatcctcattttgattattttcaagacaaagtcaatcaactgcagggcggtcaccgttatgcaacggtgctgacatatctatcaactgttgagaaaggaggtgaaaccgtcttcccaaatgctgagcaacctaaagatgattcattttcagactgtgcaaaaaagggcttggcagtatgcagtgaaagcagtgaagggtgattctgtgctgttctttaatcttcagcctgatggcacaccagacccgcttagcctccatggaagctgcccagttatagagggcgagaaatggtctgcgccaaagtggattcatgtgcggtcttacgacaatgcatcaagcatgaagcaaagtgaagaatgttctgatttgagcgagaattgcgcggcttgggctgcatcgggtgaatgcaataacaacgcagtctacatgattggaacggaagatgcacccggtcagtgccagaagagttgcaatgcttgcagtttatag

SEQ ID NO: 1251 - DNA, 1384 bp, Oryza sativa
  N_region (610)..(610): n = any nucleotide
  N_region (668)..(668): n = any nucleotide
  N_region (676)..(676): n = any nucleotide
  N_region (898)..(898): n = any nucleotide
gatacgtcgcgtgcttgctttgcgttcgtagctttgtgcagacgctgccaagattgtcaggaggccaaagatcacaacggttgttgctcagcaaccaccaggaatccgtcgagccctcgctgacgtcagtaatctcgtcaatggccgggctgctctgcctgtcgttaatcgccagaaggctccagcagcagctgacaagtgcaggaaaccaatcaagcagcgcaacgagaacaacaaggctaagccagaagtcatcgtgatcagttcggactccgagaaacagaagaaaagtccagcccagagagcagcctcccggagggcaccaatccaaacgctcacctcgattctgaccaagtgcagcaggggcttctggcggtgtgatcagcccgaaaaaggagctgatatacgacatcgatgcatctgatgctcacaacgagctggcagtgattgattacgtcgaagatatctacagattctacaggagcactgagagaacacctaccggcctctctgcacctacatggtgtcacagaccgagatcaacgagagaatgagagcaatcctgactgattggctcatcgaagtgcactacaggcttatgctgatgccngagaccctgtacctcactgtctacataattgatcagtacctgtccctggagaatgtgnccaggaangagctgcagcttgtcggagtaagcgccatgttgatagcctgcaagtatgaggagacttgggctccattgttaaggacttccttgtcatatcagacaactccttcagcaggcagcaggttctgagcacagagaagtccatacttaacaagctccagtggaacctgactgttccgacaatgtacatgttcatccttcgatacctgaaagctgcattgggtgacnaggagagctggagcacatgactttcttctacgcagagctcgcactggttcagtactccatgctcttttttgcgccatcggtgatagcagccgctgccgtctacgctgctcggtgtacccttggcctgagcccactatggagcgatcttctggagtaccacaccggcttagctgagccgcaattgctggagtgtgcgaggcggctggtgagcctgcacgcggcggcgccggagagcaggcagaaggtggtgtacaagaagtacgcgagccccaagctcggagccgtctccctccactcgccggccaagaagcttctcccgccgccgtcgccggtggcggcttgagctctcgctgttggaattttggcctcgattggaagaacatgtgcatagataggatcggatcgtcgccgcgtcgtcgtatcatcgctttgatgttaccccccgtttctgatttgattcttccaaattttgggttcctgatttga

SEQ ID NO: 1252 - DNA, 1380 bp, Oryza sativa
ttgttcaaacgagcctcagaaatgatgaacctaaggaaatatgatggatcacttggtctgctaaatgctgtgttggaggttgacccaaatcactcagaagcttacaggcagcgtgcatctgtgcttcgtcacaagtgcagtatagcaaatacctggagctaaaacctgggagttcttctgtggaaaaggaattatctcaactgcttcaggctcaaaatgcattagagtctgcttatggccaatttgaatctcatgacttctcaaaagtcctggagtacatcaacaaaattgtgcttgttttttctccaaactgcttaaaggcgaagcttctcaaggctaaagcattgctagcacttgaagactactcaagtgttatctcagaaacaggatttattctgaaggaagatgaagataacctggatgccttgttgcttcgtggccgagcatattactacctcgctgatcatgatgttgcatccagaggcactaccagaaaggccttcgtctagaccctgaacattcagaactgaagaaagcatattttgggttgaaaaatcttctgaagaagactaagagtgctgaagataatgctgccaagggtaagctacgtgtgtctgctgaggactacaaggcagccctagcaatggatccagatcatacttcttacaatgtacatctttatcttgggctatgtaaggttctggttaaactcggaagaggcaaggaggctatcagtagctgtacagaagcactcaacatagatggagaacttgttgatgcattaacacagcagagaggtgaagctaagcttcttacagaagactgggaaggagcggttcaggatctaaaagaagcttcccagaaatctccccagcaggacatgggaatccgagaagcactaatgagagctgaaaagcagcttaagttaagcaaaagaaaagattggtataagatccttggcatttcaaagacggcatcagctgcagatattaagcgtgcctacaagaagttggcactgcagtggcatccagataaaaatgtagataaccgagaagaagcagaaaacatgtttcgagaaattgctgcagcttatgagaggttcttggggatgaagataaacgtgtaagatacgaccgaggagaggatcttgatgagatgaatatgggaggaggaggtggtggtttcaatccttttgggggaggtggtcagcaatacacattccattacgatggtggattctatggaggaggaggattccccgggggcggctttcctggaggatttcagttcaactttggatagaaagttactgtctgtggagttggagtttgtatgtttgtttgttttaggaacgctgataagcttaacaacaggtattga

SEQ ID NO: 1253 - DNA, 1368 bp, Oryza sativa
atggaccccacctgtcatcctctttctcccctcttatctctatcctcttcgtcctctagttctgcacttccgcgcgcggatcgagttggctcgagtgctcgacggcggcacgaggagttcgacgccatccactccgacaaggccaaggcgctcctcgacacctaccgcatcggcgagctcatcaccaccggctccgggtacagctccgacaactccgtccacggcgcgtccaacctctcccagctcgcccccatccgcgaggccatcaaggccccggcgcccatcgcgctctccagcccgggcgacaaggtcccctgccaactcatcgacaagaaggagctctcccgcgacgtccgcctcttccgcttcgcgctgccgtcctttgaccaggtgctcggcctccccgtcggcaagcacatcttgatctgcgccagcatcgaagggaagctgtgcatgcgagcgtacacgccgacgagcatggtcgacgaggtcggccacttcgacctcttcatcaaggtgtacttcaagaacgagcaccccaagttccccaatggcgggctcatgacgcagtacctggacttgctccccgtgggcgcctacatcgacgtcaaggggccactcgaccacgtcgagtacaccggccgcggtgagttcgtcatcaacgacaagccgcagaacgcgcgggcgccggccggcgggaggagaggagatgcggggggcggcgcacttcgttgggcggcggcgcgtcattcatgcggaagcggccgaggcacgcgcgggtggaggtgtcgccggccgaggcggcggcggcggttgagaaggaacggcaacacaatctcaacggtggtccaatcggtcttgatctcgcggcagcggcggcgacgaacatgccgaggcacacggcgcaatcagttgcgcggaggcagcggcgtcctcctccctccagttctgcgtgtggatcgagtcggctcgacggcggcacgcggctgcagcggcgactggcgaggggaagaggaaggggcctccttcttcgtagggagggcgacgatggcggcctccatctcccccgtcgtcatctccataggcaggccgtgcagcgctggcgtgccgcccggagctcctcggcgtcgaggcggccgcggcggagacggcctcccgctgccgcccgccacggcttccatgacggagacgccactgaaggcaagagaggagctaggagttgatggtggaggcgcaggcggcggcggcggaggtggcgagggtggtggtggaggcggagttggtagcggcagcggcgcgagggatgtggcggtggcgggaggcgggagcggcggcggagtcggtggtggtgacgctggagagagatga

SEQ ID NO: 1254 - DNA, 1367 bp, Oryza sativa
  N_region (391)..(391): n = any nucleotide
ggtggatgggaggacggggaagaggtacgaggtcaaggtgtcggacgaggggaccgtgcgcgccaccgacttcaagaagattaccactggaaaggacgacaagggtcttaagatctatgatcctggttatctcaacacagccccagttcgctcatccatctgctacattgatggggatgagggaattcttcgttacaggggatacccaattgaagagttggctgaaagcagctcatttgttgaggtggcctacctcctgatacggaagtttgcctacccagagccaattggctggatgggaatttgcgatttctcagcactctgctgttccccagggactcttggatatcatacaagcaatgcctcatgacgctcatcccatgggtgcctntgccagtgcaatgagcacgctttctgtcttccatccggatgcaaaccctgctcttagaggtcaagatctttacaagtcgaagcaggttagggataagcagattgtgcgagtacttgggaaggcaccaacaattgcagctgcagcgtacttgagattagctggaagacctcctatccttcctacaaatagtctctcttattcagagaacttcttgtatatgctagactcttttacaagccaaatcctagacttgctagggttctagatatcctttttattctccatgctgaacatgaaatgaactgctctacagctgctgctaggcaccttgcttcaagagtggtgttgatgtcttcactgctctttctggtgctgttggagctctatatggtccactgcatggtggtgcaaatgaggcggtacttaaaatgttaaatgaaattggaagtgtggagaatattccagatttcatcgagggagtgaaaaacagaggaagagaaagatgtcaggttttgggcaccgtgtttacaagaattatgatccccgtgctaaagtcatccgaaagctagcagaggaggtcttctctattgtcggacgggatcctcttatcgaggttgctgttgcgttggagaaggcagcattgtcagatgattattttgtcaagaggaagctgtatccaaatgtggatttttactctggcttaatatatagagggcaatgggattccctacagagttcttccctgttctgtttgcaattcctcgcatggctggttggttagcacattggaaagagtcacttgatgatccagacactaagattatgaggcctcagcagtcttcaggtatacactggtgtttggctgaggcattacacacctgtcagagaacgagtcccagcaagccagggcgaacagcttggtcagattgctacctctaacgcaacaaggcgtcggcgtgcaggttctgccctgtaa

SEQ ID NO: 1255 - DNA, 1359 bp, Oryza sativa
  N_region (165)..(165): n = any nucleotide
atgcagcggcggcggggcctcgccgcgctcgccgtcctcctcgccctcgcggcgcgcggcgcggacgcgtccgtccacgagtactcgggcggggggttcgcgccgcgggccaactccttcttcttccacggcggcagcgaggggctgtacgcctccgaccccacntcaaactcctccgcctccttcatcaggtttgactctgtcacatttcgacggacccaggagtcagcaggtaggcatgaggctatgcagcaaaagacagggttagttgaggctattattgttgagatccaggacagaagcaagattggtggttcttacttgcattctgatgcaatatgctgcactcctgagctcgataaagagaagtcctgcaaagttggtgaagtaattatacagccaaatcctgataatcctgactggccaaaaagggttcagacattttttagtggtagagatgaagaagctagcatggtcacacaagttgtatctataaacaaaacagggatgtactacctctattttatgttctgtgatccacagctcaagggattgaagattacaggcaggactgtttggcgaaacccacaaggttatctccctggtaaaatggccccaatgatgacattttatggtttcatgtcgcttgcatatcttgtacttggacttctgtggtttcttcagtttgtgcgatgctggaaggatattttgcagctgcactaccatataacagctgttattgctcttggcatgtgcgagatggctttctggtactttgagtatgctaacttcaattcgactggaaacagacctatggctataaccttgtgggcagttacatttactgctgtgaagaagaccatatctcgccttcttttattagtggtttctatgggatatggtgttgttagacccacattaggtggggttacatctaaagtaggtgctcttggtgtcgtctattttattgcttcggaaggtcttgaacttgttgaaaatcttggaaacatcaatgacttctctgggaaaacaaggttatttctggtgttacctgttgccatacttgatgctaccttcattatctggatattttcatcgctctcgagaactttggagaagctccagctgcggagaagtatggcaaaacttgaattgtatcggaagtttacaaattctctagctttgtcagttcttatctctattgcttggattggctatgagctatacttcaatgcaactgatccattgagtttgcgtattcggaggatacagctgacgaggctgatgaggaagaggataaacgtgcatgacaagttgtcatctttagtgcagctgtactcctggctgagtgctatgtga

SEQ ID NO: 1256 - DNA, 1347 bp, Oryza sativa
atgttcaagaagcatgttgatgtaaaggctctacagcgtttgtcgggagctgacaaaaagaagctcagaagaactgccaaggaaaggttcccacaagcatctgatgctgaccttgatgccatccttcctcccaagaatagggttcttgtatatggcatagagggagagttcccaatgcttttcgacattgatggaagaggccatgagctgtttccaacaggtttatgcactctggaaggttcccgatctgttgcctgcttttacacttaagggtggtgggcttccttcctttcaacctggccagccatggtcagtaaaggttcctggtaatcctgctccaattgctgttggggccacaactatgagcagtaatgaagccttaaaggcagggttacgtggcaaggctttgcggattactcactactttaaggattcattatgtctgctgatggtcgctatgttccaaatgaaggattttatgaggacattgttgttgaagatcttgtctacggaagaaattgactctcttttagataaatgtcttctgcaagctttacacacgagtgtaaaagataaagaccttcctattcctggaagtacattgtgcctacaggtgttactctggatattaagaagtcatcacacaaaaagctatccaagtggttgcaatcaaaatcttccgctggccttatttcatcaaaagaagacaagcataaaaaggaagtcatgttgcttcgtatcaatcgtgggcatccagattacatggcctttaaaccagaaaagagggtacaggagcctgttgtacagcatgataatgttgttgctgaagagcacgaagcaactggaagtagcagaaacttataagccaagctctcatgttaaccccatatttatggctgttggagcggacacgagcaagtactatagtgcatcagaggcatctgacatagtcttcagtacgttgaaaaggaaaatttggttaaacaaacagacaaggccaaagtagttttggatgttgcattatgcgacgctctctacaaaggagccatcaaaaagggttcagcatacccaaccgagatccacaagagggacctggggtcaacatttttaaaccgaatgcagattcaccatagagtagcaagagggaacgaggtggtcattcgcaagggcgccatacgaaccattcagatcatgacagagagaaggcaaggaaacaagaagatgacccggctatctggattggaatgcttcttaatggatcctgactcgttagcttctgagctgcagaagaagtttgcttgcagcaccaccacagctgagcttccaggttttccaggtaagaaaggg

SEQ ID NO: 1257 - DNA, 1338 bp, Oryza sativa
  N_region (642)..(642): n = any nucleotide
atgatcagacgggtggtggtgcatcgagatgcgcgtcccgattcctgtgctcgacgctcagcccttccgggtgtccggggcagtgggcttactggcttagcatcggtggccgacgatcgtgtcagcagctcccctccccctccgcgtcgcacccgtcccaagggcgacacggacggcgacaacaacctggctgctgcccctccccaccctaacccccttcgcctcgccgccgcacgagtggctcgtcggcaaagccggacggccgcaaggacggcggcggggcgctctccccacgaggaagcccagaggcgggacaccggagggccgctcggcggcggcaagacggcggccaacgcggcggctccgggcacgacggagacagatccgcaccccctagcggcggatctagcctccccgtcggcggtcgagcttgcagcgacggcgaccggaggaggccaaggggcggcgttcacggctcgacgaggaaggcgacagcggggttagcggcggcctgccccggcttgggcggccgtggacccgtccccaagcggctggatccggcctccctggctcagatctggccagggtgctgtcggtccagcggcaacgggtgcggattggaggccggcgatatggccggcntggcggtggcagtggcagacagcgacagcgactgggcagcgcccgtggtggtggcggccatcgacgacagtggccgcagctgtgtcgaggtgacggcggcggcggctgtggaggcaatggctgctgcggctggcgaggcggcgcccgtcgtcgtggctgacggcaacgatgacagtggccgcatctgcggcaaaggcggctaccgctcgcttcggtggcagatgaggaggcagggaaggcgtcgtgcagacgatcgccggcgggagtaagtggaggcgcgaccgtggccgcggtgggaggaggcatggcattctcggacggctagccagggatgtggaagacggccgcacctgaccggcgcagcagcgattggaggagggtcggaggtcagcttggcgcagagaggcgcagccaatggcgggaggccggattggcgcgagaggcgcgtccgatggaggaggtcagcacggcgcgagaggtgctgccggcggcgacggaggccggcttggcgcgagaggcgcggccagcggtggcggtggaggaggcgacctcagagcgaggaggagccgccggtggatgtggcgcggtcttcggcgcacgaaggctagctggcggggggcgccggtgcagtagtcccacatgtcggcagaggttgagtggtggtggagcatcggtgcgttagccgtggattcgtag

SEQ ID NO: 1258 - DNA, 1330 bp, Oryza sativa
ggtaccgcttcactgaacctagcagagtactctgtcattaaagcggggctgagaaatctaaaaattctcacagatctagtgtcgacacggaggtccaaaaagactaaccgagatgatgatggcagtgaggaggaaatccttcagctatggttccttgcagtctgtgaattatgccggtggcctactttatgcacatgcaaggattgatggagagcatgaggactggatatactacagtcaccggaaatctgaagcgggttattctgtagagcaagaggcctcatccactgctgaagaacctgtggtttcagtatcgcggaggagtctgcttccctggaagaagaagaggaaattgaatttacggttattgaaggtactgaagaataaaggggaacctttactgaagaaggggaatgacgaagagggaggtgatgacattgactacgatcggcgattattgaccacttctgacggaaatgctttagagtcaatatttggtgatgataattttgtagttgggaattgggagtcaaaggaagtacttagtcgtgatggccacctgaggttgtctacccaggtgttctttgcatcaattgaccagagaagcgaacgagctgcaggggagagtgcctgtacagcacttgtagctgtcattgcagattggtttgaagcaaaccaggatctgatgccaatccgctcgcagtttgatagccttatccgagaagggtctctggaatggaggaaactctgtgagaacgagacatacagagagcgatttcctgacaagcactttgatcttgaaactgtccttcatgccaagatccgcccactcacagtttcccccaacaggtcattcattgggttcttccagcctgaaagtactgaggatggaagtggattcgatttccttgatggagcaatgtcatttgacaacatatgggatgagattagccgagcagcagagtgctccactgaaaaacctactctatatattgtcagctggaatgaccatttcttcgtcctcaaggttgaggctggcgcatattacattatcgatacacttggtgagaggctgtatgaaggttgcagccaagcttacatcttgaagttttgacgaaaacactacaattcacaaatcgaagggtaaagaatcatgcaaagagtacatcaagagcttcttggctgccatcccgatccgcgagctgcaggccgacatcaagaagggtatcatagcatcgacgccactgcaccaccgtcttcagatcgagttccattacaccgaatcatgccccgaggagatcccgctgcctgctccattacctgccattga

SEQ ID NO: 1259 - DNA, 1330 bp, Oryza sativa
gccatggaagaggagtactctgccctcctctccaaccggacttgggatcttgttccctgtccctcgggcatcaacatcgtcaccggcaagtgaatcttcaagcacaagttccaatctgacggctctctcgatcggtacaaggcacggtgggttcttcggggcttcacgcagcgccccggcatcgatttcgacgagaccttcagcccggtggtgaagcctgccactgttcgcaccgtcctcagcttcgccgtctcctgcgactggccgatccatcagttggacgtcaagaacgccttcttacatagtacacttcaggagacggtctactgcatccaaccacccggcttcgtcgacaccgcccaccccgacatggtgtgccgcctcaacaagtcgttatacggcctcaagcaagcaccccgcgcctggtacagtcggttcgccaccttcctgctgaccctcgggtttgccgaggccaagtccgacacctcattcttcgtccttcggagcggcaccgacaccgtctacctcctactttacgtcgacgacatcgtcctgacggcgtcctccaccaggctccttcagtggaccatctccgcgcttcaatccgagttctccatgaaggacctgggcaccctacaccactttcttggcgtcagcgtaactcggcagccctccggactgctgctcagtcaacctagtgggggccctccagtacctcaccttcaccagaccgaacatctcctatgccgttcagcaagtgtgcctccacatgcatgatcctcgcgagcctcacctcgccgcgctcaagcggatcctccggtacattcgaggctccctggatatgggcctccacatacagcgatgtcccacgggcgacctcgttgtctactccgacgccgactgggcgggctgccccgacacatggcggtccacctcgggctacgccgtcttcctcggtgacaacctggtgtcctagtcttccaaacgccaggtcacggtgtcttgctccagcgccgaagctgagtaccgtgctgttgccaacgccgtcgctgaggtcacctggctccgtcagctacttcacgagcttcacgcacccccgcccaaggccaccctggtgtactgcgacaacgtgagtgccgtctacctctcctccaacccggtacagcatcaatggaccaagcacgtcgagatcgatcttcacttcgttcgggagaaggtcgccatcggcgccattcgagtcctccatgtacccacatcatcatagtacgccgacatcttcaccaaggggttgccgtctctggtcttcaccgaattccggtccagtctcaac

SEQ ID NO: 1260 - DNA, 1328 bp, Oryza sativa
  N_region (51)..(51): n = any nucleotide
gtgcgggcgaaggtgcgggagatcttcatgccggcgctgagctcgacgatnacggaggggaggatcgtctcctggacggcggcgaagggggaccgcgtcgccaagggggaccccgtggtggtggtggagtccgacaaggcggacatggacgtggagaccttctacgacgggatcgtcgccgtcgtcctcgtcccggccggtgagtccgcccccgtcggcgcccccatcgccctcctggcggagtccgaggaggaggtcgccgtcgcgcaggcgcgtgcacaggctctcccgagaggcccgggccaagaaccccttcctccccacgttcccaaggctgcgccgccgccgccgccgccaccaccaccacatgcccctcctggaccgccgccgacgaagggcgtcgccacgccgcacgccaagaagctagcgaagcagcacagggtggacatctccatggtcgtcggcaccgggccacacggccgcgtcaccggagccgacgtcgaggcggccgctggcatcaagccaaagctaaagggcccaaagggcgctccacctccgcctccgcctccacctcccgctcctcgccctccgccgccgatggcggcggcaccccggcaaccagcagcgctgccaccggtgcctggcgcgacggtggtgccgttcacgacgatgcaagccgcggtgagcaggaacatgatggagagcctgtcagtgccaacattcagagtcggctacgccgtgtgcactgacaagctcgacgcactatgcgagaaggtggagtaggttaaatcgaaaggggtcacaaagacattgttgctggtgaaggccgcggccatggcgctcacgcagcacccggttgtgaatgccagctgcagggatgggaagagcttcagttacaacagtagtatcaacattgctgtggctgtcgcgatcgagggcggccttcttacgcctgtcttggaggatgttgataagttggatgtataccttcttgcacaaaagtggagaggcctgctcaagaaggcacgcatgaagcagctccaaccagacgaatacagttcaggggacttttacgctgtctaatttgggtatgtttggtgtggatagattcgatgcaatccttccacctggtcaagcagggggctattatggctgttggaggatcgagacctactttggtggccaacaaagatggtttctttagcatcaagaacgaaatgctggtcaatgttactgctgaccacaggattatatatggtgctgatttggcagcattcctgcagacatttgcgaagatcattgaggatcctgagagcctaacattgtag

SEQ ID NO: 1261 - DNA, 1325 bp, Oryza sativa
atgatctacacggcgatagacacgttctacctgacggacgagcagctgcgggactcgccgtcgaggaaggatgggatcgacgaggccaccgagaccgccctccgcgtctacggctgcgacctcatccaggagagcggcatcctcctcaagctgaccacaagcagtgatggccacagcacaagtattgtttcatcgtttttactgcaagaaatcatttgttcggtttagcgttaagagagagttgctgcaagctgtgtttggctggcagggaagttggaggagagtccaaggagatcaaagcatataatcattgtcttccatagaatggaatgtaggagagagaacgtaccaatagaacacttagatgtgttttcaaagagaaatactcagacttgaagcatgatctggtaaggacagaacgccatctgctgaaagagatggggtttatttgccatgtagaggattcctcataagttcatatctaactaccttgcaacacttgaagcccccgaactgacgcaagaggcatggaaccttgccaacgatagagcttgcggacaactctatgtgtaagattcaagagtgaagttgtagcatgtggagttgtgtatgctgcagcaaggaggcatggcgtgcccctccctgaagatcctccctggtggaatgtgtttgatgctgatgaggcaggaattcaggaagtttgcagagttcttgctcatctctacagcctccccaagtcacaatatatacaagtgtataaggacaatgattccttcacgcataggaggacttctgatacaaatgcttcaaagaggaaagtcctgcaacgactgttgcaagcgataagggtacccctgtaccgtcaagttctagccaggaaaaggatgcactgattaaggcagggtcagataaggtgaaagaaaaaggtgacgatgatgggaagacgttaccttctgaacccaatggtaaagaaggccctgcagtgaatttgaagagtgagaagtcagaatccaatgttgatcgctctcgggaaagagaaagagatagatcaagagggcgggaccgtgatagcaggggccgggactctgatcgtgatagcaagggcagggactccgatcgggagagggagcgtgatagagaagcagacagggataggcagcggagacaccattctaaggacagaagttcagcaggatactctgacaaagagaagtcaaggcaccgctcatcaagagcagatcgtggtgatcactacagttcgcactcatctcgtgacaaagatcggcacaggcggcagtaatctagcagagctcgaaaacatgtaa

SEQ ID NO: 1262 - DNA, 1321 bp, Oryza sativa
  N_region (492)..(492): n = any nucleotide
  N_region (1239)..(1239): n = any nucleotide
  N_region (1255)..(1255): n = any nucleotide
atggcaaagcgcatagcctcaatgagcagcctcctccttatcgccttgctctgtctgagctctcacttggcccaagcccaggtcctcttccagtaggggttcaactgggagtcgtggaagaagcagggcgggtggtacaacttcctccatggccacgtcgacgacatcgccgcgaccggtgtcacgcacgtctggctcccaccgccgtcgcactccgtcgccccgcagggatacatgccgggccggctctacgacctggacgcttccaagtacggcacgggggcagagctcaggtcgctgatcgccgccttccacagcaaaggcatcaagtgcgtcgccgacatcgtcatcaaccaccggtgcgcggattacaaggatagccgtggcatctactgcattttcgagggtggcacgccggacagccgcctcgactggggccccgacatgatctgcagcgacgacacgcagtactccaacggccgcggtcaccgngagcaccggcgcagacttcggcgcggcgcccgacatcgaccacctcaacacgcgtgtgcagacagagctgtccgactggctcaattggctcaagtccgacgtcggcttcgacggctggcgcctcgacttcgccaagggatactcggcggccgtcgccaagacgtacgtcgacaacaccgacccgtccttcgtcgtcgccgagatatggagcaacatgcgttacgacggcaacggtgagccgtcgtggaaccaggacggtgaccggcaggagctggtgaactgggcgcaggccgtcggtggccctgcgtcagcgttcgacttcacgaccaagggcgagctgcaggcggcggtgcaaggtgagctgtggcggatgaaggacggcaacggcaaggcgccggggatgattggctggctgccagagaaggccgtcaccttcatcgacaaccatgacactggctccacacagaactcatggccgttcccctccgacaaggtcatgcagggctacgcctacatcctcacacaccctggagtaccctgcattttctacgaccatgtatttgactggaacctgaagcaggagatcagcacattagctgcagtgagatcaagaaatgagattcatcccgggagcaagctgaaaatccttgctgctgagggagacgtctatgtcgccatgatcgatgataaggtcataacaaagattgggacacggtatgacgtgggcaacttaatcccgtcagactnccatgtcgttgctcanggcaacaattactgcatttgggaaaagagcggtctcagagttcctgcagggcggcaccactattag

SEQ ID NO: 1263 - DNA, 1313 bp, Oryza sativa
ctggagcttggagtggacgagagctacacgatctatgtcgcggcggcgggcggcgtcaattcgatcgtgggtggagcaaccatagagacattcagtcaattgtgtgttttcaactacgataccaaaaatgtcgaagtgcgtcatgccccatggtacattgaagacgaaccacgctttgcttttcgtgggttgctccttggacacatcaaggcatttcctcccagtagatgtgattaaacaagtgattgactccatgtcattttctaagctgaatgttcttcattggcatatcatcgacgagcaatcttttccattagaagtaccatcatatccaaaactatggaagggttcatattcaaaattggagcgctacactgtggaagatgcacgtgatattgtcagaggtatccatgtcatggctgaaattgacgtgcctggccatgcagaatcatgggaaagggatatccaaagctctggccttctcctaagtgcagagaaccgttagatgttactagcaatttcacatttgaagttatttctggaattttgtctggatatgagaaaaatctttccatttgggctcttccacttgggtggtgatgaagtatatacagcgcaacatgactacaaaagatgcttacaaatacttcgtcctgaaggctcaagagatagcaattaaccttaattggattccaagggaagaaaccttcaactcattcaaagaaaatctcaatcctctaaccgtggtgcataactgaaagttgttgaaaagggtttcagatgtataatgagtaaccaaggtgtatggtaccttgatcatcttgatgttccctggcaagatttctacactagtgagccactcgctggaattaataacacagcacagcaaaagcttgtacttggtggagaggtttgcatgtggggtgagacagcagacacctctgatgttcagcaaacgatatggccacgagcagctgcagcagcaggagcgtatgtggagtcagttagaggccatatctgcccaagacctggaaacaaccgtcttggctcggttacactatttcagatgcctgctgaatcaccgtggaatcgctgcagctccagtcacaaactcttatgctcggcgtcccccaattggtcctggttcatgcttcattcagtaaacagggagctgcagagcaaagataggcataagaggggtatttgcctccatacaccttccacacttcagacaaaaatggtatcttgtcaattttagtgtactgtttctgtatgtttgtttgcattacattacctatcacacggatgtttga

SEQ ID NO: 1264 - DNA, 1308 bp, Oryza sativa
  N_region (469)..(469): n = any nucleotide
atggatcatcagctggtagctcgaggtctcttcaagcctctcctcctcttcgtcgccggcctgattgttctctacgcgctccgccgccgccgccgccaccgccggagcagcggcctgcgcctcccgccgagcccgttcgggctgcccatcctgggccacctccacctgctcgcgccgctgccgcaccaggcgctccaccgcctcgccgcgcgccacggcccgctcctcttcctccgcctcggctccgtcccctgcgtcgccgcctgctcgccggacgccgcccgcgaggtgctcaagacccacgaggccgcgttcctcgaccgccccaagcccgccgccgtccaccgcctcacctactacgggccctactggcgcttcatgaagcgcgcgtgcgtgcacgagctcctcgccggacgaacgctcgacctcatgggcctcaccggcgacatcgcggaggagatgcggagcntggtcgccgagacggcggagctcaccggcacgttcaacctgcaggactacatcggcgtcttcaagtactgggacgtgcaggggctcggcaagcgcatcaaggacctccttgacatgctcttcgacatgcacgaagacgaagccgccgagatgcgtctcaccagagacaacatcaaggcgttcatgctggacatcttcgcggcggggacggacacgacgacgatcacgctggagtgggcgctgtcagagctaatcaacaacccgcccgtcctccgcaagctacaggcggagctcgacgcggtggtcggcggcgcgcggctcgccgacgagtcggacatcccgagcctcccgtacctgcaggccgtggcgaaggagacgctgcggctgcacccgacgggcccgctcgtggtgcggcgctcgctggagcgcgccacggtggccggctacgacgtcccggcgggcgccacggtgttcgtgaacgtgtgggcgatcggccgcgacgcggcgtggtggccggagccgacggcgttccggccggagaggttcgtctccggcggcggcggcggcgggacggcggcggacgtgcgcgggcagcacttccacctgctgccgttcgggtcggggcggcggatctgccccggcgcgtcgctggcgatgctggtggtgcaggcggcgctggccgccatggtgcagtgcttcgagtggagccccgtcggcggcgcgccggtggacatggaggaggggcccgggctgacgctgccgcggaagcgcccgctcgtctgcaccgtctcgccgcggatacacccgctgccggctgctgcgtcagcatcgctgacgtga

SEQ ID NO: 1265 - DNA, 1305 bp, Oryza sativa
atggagatacaaacttcagggaagcccattgatctgctgatggagaaggttctttgtatgaacattatgtcttctgattacttcaaggagctctacaggctgaagacctatcatgaggtcattgatgaaatatacaatcaagttgatcatgtggagccttggatgactggcaattgcaggggcccctccactgcattctgtctcctctacaagttcttcaccatgaagcttactgtcaaacagatgcatggtttgttgaagcatcctgattccccatacattagagctatagggttcttgtatcttcgatatgttgcagatccgaagatcttgtggacgtggtatgagccctacttgaaggatgatgaggaattctcccctggatctaatggtcgcatgacaaccatgggtgtttatgtgcgtgatcttatacttggacagtactacttcgatagtcttcttccaagagttcctcttccagtaattcgtcaagtgacatccaatcttgagaagatgaagttgcccactaagctttctgggattactggagagtctaatcgtcatggatcagaagatactgcccgccggcctccttccgtgaaggcttctctgtcagtttcctttggacagcgtgctccgcatcgtgcatccacacgggagtcatctccagttcggaggacagtcacccatgatggccatcgtaaatcttcctcaccatctcgccgtagcggaagccgcgaggttcctgatcgtgatcgatcaagccgtgaccgttctagtcgtgactatgaccgttcaagccatgaccgtgatcgtgaccattccagtcgtgactatgaccgtccaagccatgaccgtgaccgtgatcgtgaccgttccagtcgtgactatgaccgttcaagtcgtgaccgggatcatgatagagacatcagagactatcatcggcgtgatcgtgacagcagggaccgtgactataggtctaggcattcatccgaaagacaagatgaccgaagggaccgtgaccgtgagggtagcaggcacagacggtccagctctcggcacagaagcagaagccgcagccgcagccgcagccgcagcagaagcaggagccgcagcagaaatgaggagagatccagtccttttggcaatgcaggcaaagaaaagactgctgccatctcgagcaacctagcaaagctcaaggacttgtatggtgatgtaactgagaagaaggacgacggtgaagcccctcgccgtgattcgtgcgcggaggaggttatcaggttgggtggcccgagatggagatag

SEQ ID NO: 1266 - DNA, 1296 bp, Oryza sativa
  N_region (880)..(885): n = any nucleotide
  N_region (902)..(902): n = any nucleotide
atggcatgggccgatgggcgcaacggaagtacgcaggtttggctggctaactcagcacacgtacccaaaagccaaccaagaggagaaagcaaagggaggagaaaagaagcaagcaaagcaaagcaagaagcaagaagcagctgctcagctcagctcaagcaagtaagtgaattcttgcttgatcgatccatcgatcgatcgatcggtttgctggtgatggacaagcacacttgcaagctctgcttccgccgattccacaatggccgcgctctcggcggccacatgcgctcccatgtcatggccgccgccgcggccgccgcgtactgtccgtcgtcgccggcgatgtcactggcgtccacgtcgtcgacggagatcgagatggatgagaagaaggagatgacgaagaagacggagcaggagaagacgctgacgtcgtacgtgttgcgcgagaatcccaagaggagctacaaggtgagcgccggtgaattctccggtggtggtggtggtggtggtggcggcggcgagtcgtcggtcgtgcaggacggcgagagcgacacggagtcgtccccgccgcgcggcggagcggggtcgttcttcgccgtgagccggaggcggtcgaagcgggcgcggcggcggcgtcgcgcgccggatcccgaaccggcgagcagcgtctccgacgcgacgacggaggaggacgtggccatgtcgctcttgatgctgtctcgggactcgtggacgcgttccagatccgagcacgagacccaccaccggggggcgagctcggaggccgagcagaacaacaacaacgtcgtcaacgtgttcgacgaagaagacgaggacgcccgcgacgtggccggcgaggatcacgacgaggagctcnnnnnnggcggcggcgaggccgncgcggcgcgccaccgcaccagcaggttccagtgcggcgcatgcaggaaggtgttccggtcgtaccaggcgctcggcggccaccgcgcgagcctcaagagaggcaagggcggcggctgcgtgccaccgccacgtccggcgccggcgagctccgccgccgcgccggccatccacgagtgcccattctgcttccgcgtgttcgactccggccaggccctgggcggccacaagcgcgcccacatgccatccggcggcgcgcggccctcgccctcgccgtctccggcgaaatgcggcgagagctccggctccatcgatctcaacatgccggcgacaatggaggacgacttcgagctctccgccgtgtacgacgccgagttcgccagcacgagacagtga

SEQ ID NO: 1267 - DNA, 1280 bp, Oryza sativa
gacgatggttggggatctgcacccttgaaggcagataagccggtaaaccttagaaatctgctgggtggtttaattgcaatcatcagtcgtggcggcaaaaattctgaaattcaaccgccaaaggacactaagtctagtgtcgcattcttagggtcaggtagcgatggagaaacattcttgcacgcctcagtctatgtgccaagtgctccaccattgcttgacgaagaagctctgaattacaatgtgtatagggttgtgattgaagcagaaccaccagaatggttacctgatagttatgctaactcatgcatgcaatgcgctgcttcttttactgttgttactcgtggaaggcatcattgtcgattttgtggagggatattttgtaggacatgctcaaaaggcagatgtctgttgccagccaagttccgtgagcggaatccgcaaagggtttgtgatgcttgttatgataggcttgatccgttgcagaacttattcattaattctattagcaatgccacacagactgcaaagcatgatgttatggattggactagtaccagggggtggttgaatttgcctattggattaacaatggaacatgagatttacaaggccgcaaattctgtgaggagctatagccaggtttgagcagattgcaaggctaaaccccgaaaggtctattcctcatgcagtccttagtggagcaagtgggcttgctatcctgacagttgtaaaagctggtgcacttcttacatacaaacttggaactggcctagtagttgctcgaagatcagatggatcttggtcaccaccatcagcaatcgtttcagttgggttaggatggggagcacagcaggttggtgctgagctaatggatttcatcatagtgcttcgtggtctggaagctgtcaggacttttagcagccagatgcatttttctgttggggcaggtttaagtgctgcagcagggcctgttggtagagtgctagaggctgacttgagagctggtgataaaggctcaggtgtttgttatacatatagctgcagcaaagtctgcaggtgcattcattggtgtttcgttggaagggaacttcgttgcaacccgaagggacgcaaatctgcggttttacggcgacccgtatctgacaaccagcgatattctcatgggggatatgcagagaccaaatgctgccaagtttctgtacacagcgttggatggcctgtactctgggctgagtcgttaggacgatgtaaatctcaactgtacatatttgctctga

SEQ ID NO: 1268 - DNA, 1269 bp, Oryza sativa
atggaggcaggtggtttcctcaggggcttcatcatgctatgcgtccaccttgtcctgtggtgcctggcgccgctgctgccggaagaggtgaaattgaaggtcatggtgatggtgtgcttctttgggttgaaggagaagaaggtggctagggttgcgagggcggcgctgccgaagcacttcctagagggtgtaggaatggaagggcttgaggctgtgagaggggtgaaaagtgtggtaggggtgagcagggtgatccctagggttatggtgaaaccattcctggaagattacctaggtgtggatgtggttgtggggagagaggtgaagatggtaagaggtttttatgttggtttattggagaacatgagtgatggaagttttgcccgaggtttacctggtgactccagaagaaaaacgaaaatggtcaccttgccaagagaccagtaccccaagcccttggtcttccatgatggaaggctggccttcaggccaacctttcaagccaccctagccatgttaacatggctcccattttccctccccctcaccatcttcagaacactcatctttgtcaccctcccctaccctgtttctgtggcgatcggatccgtattcggagtcagaacccgtgtcatcaactcccctgttggtcaggccaaagctgatcacccaagaaacccaaaggggcacctctacgtgtgcaaccaccggacgctgctcgacccggtctacattgcagcgatgctcaacaagaaggtctcggccgtcacctacagcgtcagccgcctcagcgagtggatatcgccgatcccgaccatccggctgacccgggatcgcgacgaggaccggaggaggatggaggaggcgctgcggcggggcgacctggtggtctgccccgaggggacgacctgccgcgagccctacctcctccggttcagcccgctgtcgctggagctcgtcgacgaggtctacctggtggctctggtgaactggtccgacatgttctacggcaactccaccggaagaagcaagtgcctggacagcttctactacttcatgaatccgcgcccggcttacgatgtcgagttcatggagaaggtgccaaccaggatggtcgtggatggcaagacctgtgagagcaaacatgtggccaacatggtgcagggtgagattggtagagtgcttgggtttgaatgcaccaagttcacccgtgagaataagtacctggcgctggcaggaaatagaggggttgttgatgcaaaccagtga

SEQ ID NO: 1269 - DNA, 1263 bp, Oryza sativa
  N_region (595)..(595): n = any nucleotide
atggagagggaagtcgtggtctccgaggacgcggccgcctcctcctcctcctcctcctcctccgccgccgccgcctcgttctccctcgcggaaaccagggtcatctgccgcgtgtgccagaagcagttcgcgcagtacacttgcccccgttgtaacgcccggtactgctcgctcccgtgctacaaggggcatagtgttcagtgcactgaatccttcatgcgtgagaatgttatggatgagcttaagcagatgcaacctgaagatgaatcaaagaagaagatgttagacatacttaaaaggttccacttggaagaagaagatatggattcagaaggcgaagatgagtcaattctgtcagaggagcttattcaaaaagttatgtctggagatgagatcaagcttgaagacctctctgatgatgaaatcaaacgatttcgtcaagctctggcttcaggtgaactcagcaagatgatcgagccatggacaccatggtggaaaaaaccttccgctagatcgatttccctcagtccagatggaagccagcttatcagacaagtgagtgtagaagacactgatacgtcagatccaatggctnacccagagtctagcatcagtgaaatcccagaagggccagaatctgctctcccgtcactcgaacagctaaccagagcggagccatctccgctgcttgcggttcacttggttgatatactgtacagttactgcttcacacttcgcctccacaatggcgattggcgctctgatccttttggtgcctctactgttgcgttgtctgtgtcaaaagtcatgggggaggatgctaaacctgagacagtatctgaagccctcacggcatgtatagaggagacatgctcaccggcttacaggcacaccggaggtttcaggtttgctatagctctcgtggatgatatcatcagccttctcacgttaggaggcaatgcgcttgtttgtgccctctgtgacttccgcaggctcattcatatcggtgagaggatgctcaaggcagagaaattgggcaaggcggagcgatcacggagcacccaaaagcttcgtgccgcagataggaagttgtacttcatgacatgctgggttcatgagcaaccaaatgaggcatggtcgtctttagctcgcctcgttgaggtgcagaaagcatctctggaggagttggattgcgggagtcaatttcaaagggctggtagaaagaacgatgcccaatccaaggttcttattgaggagatttga

SEQ ID NO: 1270 - DNA, 1240 bp, Oryza sativa
gtgaacaaaaccaatggcgctaatttgctgctaaatgaccagaacaagtacaagtcaatgcttattcgcacgtattcttcgctctggatgatggcaggatttgtgtttttgatatacatgggacatctatacatatgggctatggttgtcgttatccaaatctttatggcgagtgagctcttcaatctgctgaggaaggccaacgaggacaggcagcttccagggttcagactacttaactggtaaaaatggcatgcatttcttcttcactgcgatgctttttgcgtatggccgtttccttagtcggcagcttgtcaacacggtgacttcagacaagttattgtacaagcttgtgagtggcttgatcaagtaccaaatgtttatttgctactttctttatatagcaggggtttgtatggtttattctcactctaaagaaaaaggcgtacaagtatcaattcagtcaatatgcatggactcacatgatcctattgatggtatttgcacagtcatctttcactgtggccaatatatatgaaggaatgttttgtttaggttcctcctaccagcttctttgatcgctatcaacgatgttgctgcatatttcttcggcttcttctttgggaaaacacccttaattaagctctctccaaaaaaaacttgggagggctttctaggtgcatcagtgactaccatgctttctgcatttgtgtttcttttgtagcttgctaatttcatgggtcatttccagtggttaacatgccccagaaaggatttgtcgactggatggcttcattgtgatcctggctctatatttacaccagaaagttatgatttaccaggatggcctattcagtggcatgccttagctcttggcttgtttgcttcaataatagcaccatttggagggtttttcgctagtggttttaaaagagctttcaaattcaaggcatctattatcttttggaaaaaaaatatttcaatatcgaaatcttattcagtgtatacttttcaggattttggtgatagcatacctggccatggtggatttactgacaggatggattgtcaacagatggttatggctgtgtttgcttatatctattaccaatcgtttgtgatggtacaggacttatctgttgagacaatcatggagcagcagatactgagaaatctcacgttcgaggagcagcatgatctttacgagcaactaggcaagttactgacgagagggaactga

SEQ ID NO: 1271 - DNA, 1239 bp, Oryza sativa
atggcgaagcgggccgcttcgtggccacgggtcctcctcctcttccgggccttcgccgccgccgccgctgagccgaagcgggtgctcgtgccggtcgcggacggcacggagccggtggaagcggccgcaaccgccgacgtgctcaaacgcgccggcgcgcgggtcaccgtcgccacggctgaccccgcgggcgacgaccgtggcctcctggtggaggccgcgttcggggtcaagctcgtcgccgacggccgcgtcgccgacctggaaggcgaggcctttgacctcatcgccctacccggaggaatgccgggatcagctaacctcagagattgcaaggtgctggagaagatggtcaagaagcaggcagagcagggtggcctctacgccgccatctgcgccacgccggcggtgacgctggctcactggggcttgctcaaaggcttaaaggcgacttgctatccatcattcatggagaagttcaccgctgaaattatccctgtgaactctagggtggtggtagatagaaatgcagtgaccagccaagggccagcaacagcaattgaatatgctctcgctttggtggagcaactgtacggcaaagagaagtcggaggaggttgcaggacccttgtatgttcgtcctcaacctggggttgactatgtcatagatgagttcaattcagttgagtggaaatgcagtggtacacctcaggaaggaatccctggtcagggtttattaagtaagcataaggttcttgtgccagttgctaatggttcggaggaaatggaagctcttaatttaatagatatcttgcgtagagcaggagcaaatgttactgttgcatcagttgaggataagttgcaagttgtgacccgccgccacaaatttaacctgatagctgatattatgggtggtctgccaggtgctcaaaagctttctagtacaaaggtacttgtagatttactaaagaaacaggcagaatctaataaaccatatggtgcaatatgcgcttctcctgcttatgttctcgagccccatggtttactgaaggggaagaaggcaacatcatttccaccaatggcacacctgcttactgatcagagtgcatgtgacagtagggtggttgttgatggtaaccttatcactagcaaagccccaggctccgcgacagagttcgcgctagccattgttgagaagctgtttggtcgagagaaagcggtgcctgtcacctgtgagtga

SEQ ID NO: 1272 - DNA, 1231 bp, Oryza sativa
aatatgcggcgcttgagcttaggcaatagggaggcttccaattgttcagatcaggcatgaggaaatctggtttcgtggtcctacacgtgtgccaccacaacctacccgagaggaggacaaacctgtgctgactccagtaggagacagaggcaatggcgagcaaatgattatggaggcaacattagggtccccaatagcatcctgacattacttcttaaacaatggttccctggcattgtcacattgaagggtaaagaggagccagcatggagttggaaacattacaggatagcgccggatactccaagaagcaatcaaatacggctgccaagctgtctccatcgtgttgaggaagacttctggctttacttcaggtgggcagagggaaaagaacaagaagctagaaaggttgtccacaattgtgtcaagggccttgttgatcgcttgttttatgaaactcgcatcctagctgtgcttaattaccaaaggaaaatcctgaagctataggtagaaccatggtggttcctgaattcagaaaatgcatggcgggagttgatacgattgcggtggtgtaatccaaaatggcaggctgtctcacgtgctcataggatacggagggagaaaatgaaagggccatctcaccgccaaggcagtgctaacttgagccgttaccaaaaaaatttggtatgtgcatctctgtttaaacatgagaagaagaaaaagcggccagttgctccactagaggcctacacagaaggaaggagggaaaatcgagaggatggacaattcagctgtgacccgcgtgtagctgagaagcttgaggcctatgctgcagcttatgttcagttgcatgggccagaaaatgattggcgcacttctcccattgatcctgtcgctgtgcacatggctggtggtggaaagaaacatggccgtttcatgattggtgatggactcattgactcatcagcagtgtttggtgataattcgcgtgatgatccttctgcggcaactacaagaggagcgcgaggcaagggagcgagagcgtgaagagagggagcgtgagaaggagagggagcggcaggagaaggagcaggagaaggagtgtgagcgtgaagagagggcgcgagagaaggagcaggagcgtaaggagagggaggaagagcgcaaggagagggagttggaaaagatagcctctcaacagaaatcagcattctttgaagctgctttaagg

SEQ ID NO: 1273 - DNA, 1230 bp, Oryza sativa
tccagaactccacgtagaagggtgaggaaaactgagggtgccaccaagagcctggaagattcagtcaagcgaaagatggagcagttttatgaaggattggatggtccacctctccgagtccttccaataggtggccttggagaaatcggcatgaattgcatgctcgtagggaactatgaccgttacatattgatagatgcaggggtcatgtttccagagatgagttcggtgtgcaaaagattatcccagacacaacattcatcaagaaatggagtcacaaaatcgaagctgttattataacgcatggccatgaagatcacatcggtgcgttgccctggccacaggtaatcccagcgctggattcaagcacaccgattttcgcatcatcttttaccatggagctaataaagaggcgtttgaaggagtttggaatttttctctcgtcccaggcttaagaagattgacgaatcaccagtggatggaaaaatatttgatcggcaagcattggaagagctctccaaagaaggcgttacacttatgatgagtgattctacaaatgttctatcccctggaaggtccatcagcgaatctgttgttgctggttcattgttgcgacatatttcagaagcaaaaggaagagtaattaccacacagtttgcttccaatatacatcgtattgggagcatcaaagctgctgcagacttaactggtcgaaagctggtagtatttgttggaatgtcactcaggacttaccttgatgctgctttcagggatggaaagtcaccgattgatccatcaaccttgaaggtagaggacatggatgcctatgccccaaatgatcttctagttgttactacaggttcacaacaggcagagccacgtgcagctctaaatcttgcatcttttggaggaagtcatgcccttaaactatccaaagaggatgtccttctgtattctgctaaggttatccctggaaatgagtcacgtgtaatgaagatgttaaatcgccttactgagcttggtccaaaaattgtgatgggaaaggatgctggtctccatacctctgggcatgcctatcacgatgaacttgaggaagtcctacagattgtcaaaccacagcatttcttgcctgttcatggagaactcctgtttcttaaagaacatgaattacttggaagatctactggcataaggcacaccactgtaagtactctcttagcgatggtttag

SEQ ID NO: 1274 - DNA, 1224 bp, Oryza sativa
ggtgaatgttacttcagagtgcaatggtttttcacagctgaagacacgcaagcacaatcacatgacccgaggaggctcttttactcagacctgacagatgacaatttactggactgcattgtctcgaaagtgacaatcgtgcaagttcctcctagttccgactattactatgacatgaaatactctatcgactatagtacattctctaccatagaaatgggagctctctttgctagacctgtattgtggttgtggaggaatgtcaactggactatgccttggtgctcgtggtggtggtgtgaatctttcagcggatttccttgaactgttaaaagaatgggagaaattatgcaaaacatatgtgaaacatagtaggactaaggcatgtgttgacagtacaacagaatccaataatgaaactccagattgttctaccgtcccacctgaggagtttgaagtatggaagctagttgacatttgctttggtgatccaaataaagtcagcaaacacggcttgtattttaaggtccgttggaagggttatggccctcatcatgacacatgggagccagttgaaggattaagaactgcaaagaggcaattagggattttgttattgaaggccacaggcaaagaatactaccacgccctgtggacgttgtatgtgggggtccaccatgccaaggaattagtggctacaaccgcaatagagaattcgaggcaccatttaaatgtgagaaaaacaagcagatcatagtttttatggatgttgtgcaatttttgaagcccaaatatgtgtacatggaaaacgtccttgatatattgaaatttgctgatgcaacacttgcaagatatgctttaagtcggctagttgcaatgcattatcaagcaaggctagggatcatggctgctggatgttatggccttccacaatttcggatgcgtgtatttttattaggctgtcattctaaggaggaaattacccccttttccactgcctacgcatgaggcgattgtgaagaatggctgcccgttggcttttgagccttttggtcgagtatggtgggatgaggtagtgggaaccgtgctgacagttccaaatgcccgtatgcagtttcaggccttgatacatcctgcacaagacagactgcttactattcgtgaaagtgctcggttgcaaggctttcctgacaattacaggtttcgtggaacagtcaaagacag

SEQ ID NO: 1275 - DNA, 1215 bp, Oryza sativa
atgggaaaacctcggccgaataccacggcaactctcatccagtctcgtggcacagcgggcacaaaaaccgcgggcatatattacgcgcacacaaggatccaccaaaggaaaacgccatcacgtacgtattcacgatacgtacggtttgaaaccatggagctccaccctccttcatcctgcgacgacgacgccggcagctgccaaaagacgtccgtggcgtgcaaccgccagcgccacaagatcctcatcgtgaacctgctatatgaactcatgtttttcgctttcatgttcctatgcttgtatcacgcgttgtacgacttcccgtccgagttctccgtccagatcacggccatccacggcctcgaccggggattggtttggcacagggggccgtcgtttacacgtaagctacgggtgaagcatgcaaggcctggcagtccgaaacctcggccgaataccacgagtagtctcgtggcgcggcgggcacaaaatccgcgggcttattaggcacacaaggcacacaatccaccagagaaaaaggcctttcgtcacgtacgatttgaaacaatggagccccaccctccttcctcctgcgacgacaacgccggcgcctgccaaaaggcgtcagagacgtgcaaccgccagcgccgcaagatcttcgtcgtcaacctgctatatgaattcaccaatttcattttcatattcctatgcttgtatcacgcgttgtacgacttcccatccgagttctccgtccagattacggccatccgcggcctggacgacgcggcgccggcgtctccgacgatcatctcccctgctatcgacgtcacacttcacgtcaacaaccggcgcggcacggcgagatgctaccgcggcggcgaggcggtggtgagctacgagggcttcaccgtcgcgtccggcaccgtgccgggcttctgcgcgcaggggaagagggcaccggaggtgccgttcctggcgtcggccgacggcgtgggtctgcctcagcggctttgcggacgcatggccctggagcggcgtatcggcgccatgcagctggaggtcgaggtgaagctgttcgggcgcgacggcggcacggcgcccaggccgacgtggatgtcgtgcgggctgaggatggatgaagcgcaactgccgaacacggcgcattgctcggtgttggctttgcagaattggttctctcaacccttgttcggataa

SEQ ID NO: 1276 - DNA, 1213 bp, Oryza sativa
agacccaattgggaaggaggccaatatgaaggtgatgatgctacaagatttgaagcactccgtttagcaatggagctaggagtaaattatgtcgatattgaattgaaggttgctgacaaatttatcagctttatttatgggagtaagccagagaagtgcaaacttattgtctcggcacataattatgaaagtactccatcctgtgaggagcttgcagatcttgtggctagaatacaagcagttggagctgatatagtgaaaatcgcaacaacagctaatgacattgttgatgtgtcacagatgttccaagtgatggtgcactgccaaaaatgacaggtgcctatgattggactagttatgggcgaaaaaggtttaatgtcaagggtgttatcccccaagtttgggggatatctaacctttgggagtcttgatgctacaaaggtatcagcacctgggcagccaaccgtcgaagagctgatagacatttatgatataaggcgcataggacctgatacaaaggttctcggtgttatagccaacccagtaaaacagagcaagagcccagttttgcacaatacatgtcttcaatctgttggatacaatgctgtttatcttccacttttggcagacaacattgctagatttcttagcacatattcgtctccggatttttcaggattcaggccgtacagtgttgtcatgaacatgatccagttgctaagtcaataggtgccataagcactataattaggaggccagatggcaaactactgggctacaataatgactacattggagcaatttgtgccattgaggatggcataggaggttgttgtaggtgctggtggagctggcaaggcaattgcttacggggcaaaggagaagggtgcaagaattgtagtagcaaatcgtacctacgcttgctgccgcggttggtggtcatgccctgagattagccgagcttgaaactttcaggcctgaagaagggatgatccttgctaatgcaacatcgttgggaatgtaccccaatgtggatggcacccctattccaaaggtgttcgatgcggtatatgctccgaaagtcacccggcttctacgagaagcagaagaatgtggggttaaagttgtcagcggtgtggagatgtttctcagacaagccttgggtcagttcgagcgtttcacaaatggtattgaaggtattgtgtccttctaa

SEQ ID NO: 1277 - DNA, 1212 bp, Oryza sativa
atgggtatccttgagaggatcaaggagattgaagccgagatggctcggacacagaaaaataaagcaacagacagaataccatcttggacaactgaaagcaaaaatagcaaagttgaggacacaattattagagccccctaagggttccactggtggaggagatggttttgaagtcacaaagtttgggcatggtcgtgttgcacttattggatttcccagagtgttggaaagtcaactcttttgactatgttgactgggacccattctgaagctgcatcatatgagttcacaaccctcacttgcattcctggtattatccagtacaatgataccaaaatccaacttcttgatcttcctggtatcattgaaggtgcatcagaaggcaaggggcgtggtagacaggtcattgctgtcgcaaagtcatcagatcttgtgctcatggttctggatgcctcaaaaagtgaaggacaccgccaaatattaactagagaactggaagctgttggacttcgtctgaacaaaaggcctcctcagcagatatatttcaaaaagaagaagactggtggaatttctttcaacagcatgattcccttgacccatgttgatgagaagctctgctatcagatactgcatgagtacaaaattcacaacgcagaggtgttattccgcgaggatgctaccgtggatgacttcatcgatgttattgaaggaaatcggaagtacataaaatgtgtttatgtatataacaagattgatgttgttggtattgatgatgtggataagcttgctcggcaaccaaattcgcttgtgatcagctgcaatttgcagttgcagctaaacttggacaggctactagcaagaatgtgggaggaaatggggctagtgagagtgtatacaaagccacaaggacagcaacctgatttcacagatccagttgttctttctactgatagaggtggctgcacagttgaagacttctgcaaccatatccataggagtttggtcaaggatgtgaagtatgtacttgtatggggaacaagtgcgaggcattacccgcaacattgtgggcttggccatgttcttcaagacgaggatgtcgtccagatagtaaagaagaaggttgaggacggcggtcgaggccgcttcaagtcgcacacaaacgcgcccgctcgcatatccgacagggagaagaaagctcctctgaagacctga

SEQ ID NO: 1278 - DNA, 1200 bp, Oryza sativa
  N_region (1156)..(1156): n = any nucleotide
  N_region (1195)..(1195): n = any nucleotide
atggcggaaggtgccaaattccatgggatcgttggcgctgttggcgcgcatgatgttggcgggaacttctgtgacatggggtactaccagaagctaggggagggctccaacatgtcgatcgatagccttaacagcatgcagacaagcatatacggtggttcggttgcaatgtcagtggacaacagtagtgttgcatctagtgactctcgtaccgggatgcttaagcatcctggcctcaggggtccagtcattgtgtctagctattctgtcgggaacagcattttccgtccagggcgtgtgtcgcatgccttgagtgatgatgcattggcacaggctttgatggactctaggttccccactgagacactcaaggattacgaggagtggaccattgatttgggtaagctgcacatagggatgccatttgcacaaggtgcctttgggaagctctataggggaacctacaatggaggcgatgtcgcaattaagcttttggagaggccagaggctgaccctgagaaagctcagttgttggagcagcaatttgtgcaagaagtcatgatgctcgcaacgttgaggcactcaaatattgtcaagtttgttggtgcatgcaggaagccaatggtttggtgtattgtgactgagtatgcgaagggcggatccgttaggaattttttgaatagaaggcagaataggtctgtcccactgaagcttgcagtgaaacaggcattggatgttgcacgtggcatggcatatgttcatggccttggatttattcacagagatcttaagtcagacaacctattgatttctggagacaaatctatcaagattgctgactttggagtggctaggattgaagtgaagactgagggaatgacacctgaaacaggaacttaccgctggatggctccgaggtgatccagcacagaccatatgaccaaaaagtcgatgtctacagttttggcatcgtcctgtgggagctagtaactgggaaccttccttttgcaaacatgacagcagtgcaagctgcatttgcggtggtgaacaagggtgtccgcccagccataccccatgactgcctccctgccctcgcagagatcatgaccaggtgctgggatgcaaatcctgatgcccgttccccgtttacccgagntgactgtccggagggcccgcttccggtgttgcatctccnagcca

SEQ ID NO: 1279 - DNA, 1197 bp, Oryza sativa
  N_region (375)..(375): n = any nucleotide
  N_region (390)..(390): n = any nucleotide
  N_region (393)..(393): n = any nucleotide
  N_region (401)..(401): n = any nucleotide
  N_region (405)..(405): n = any nucleotide
  N_region (409)..(410): n = any nucleotide
atgaggaggagggatcacctgctgctcatggatgctgctcctcctccggcggcggtggcggcggcggtgcagacgctgatggagcccatggagttcctgtcccggtcgtggagcgtgtccgcgtcggacatatccagggtgctcaccggcggcgtcggcgcgaggcggagcaccaacttcgtggtggatcgcctctccgggatgctcatgccggagacgctcgcgctcgccgccgcctccagcacaaacctgagcccccgcaaacgctattccaggtgcaggagcgccatctccgcgcaccagcacacgatcgggagtggttccaccacagggacggagcagcagcagcagcagcagcagggtcgacaagcccgngcgagcggcgcgcgngcncgcgcgtnacgngcgnncgtggcgagccttgcggccgccgtcgcggccgtggcctccggcgcggcgaacgacccggacgacctcgacgacgccaagatggacgccgcgctggcgtccgccacacagctgctggcctcgcactgcatcgagatcgccgagctcgccggcgccgaccacgaccaggtcgcctccgcggtggaggccgccgtcgacgtgcggagccccggcgatctcatgaccctgaccgcctccgcagccacagagctctgagaggagcgacggcgctgaggctgagagcgcagcgggaggcgaggagcaaggtggcggcggtggcgccctacgagaagaccggcagctgccgcggcgacatatggtgcaaggaagggacgctcctgaaacgcagccggaaaggctttgcaccggaagcgcgtgccgtctacatcaacaagaagtcgcaggtgatcgtgaaactgaagagcaagcacatcggcggcgccttctccaagaagaagaagagcgtcgtgtacggcgtcgacgacgacgtgcagcgtgccggcgccgcacgcgtgcggcggcggcgccgtgcctcctgctccggagacggcgtcgtcggagaagtgccagttcgggctgaggacggcgcagggcgtggtcgagttccagtgcgagagcagggcgcagaagcaggactgggtggagtcggtgaagaatctgctccggcaggcggccggcgggacggctcagctcgagcactccttcgaatctctccggcttagcgcctcgtaaaacgtaaaaacccagtga

SEQ ID NO: 1280 - DNA, 1196 bp, Oryza sativa
atggagacgggacggcataggtcacagagcctgggatctgcagggctcgcgttccacgcactcctctgctcgtcgttgctgctcaacgccgtcttcttcgcgcaccacctcctcaggtcctcgccgacggcaacgccggagcggctcggcgacgggctgagctgggcgctgcaggcggccagggaggccgaggccgtggccgccgccgactgctccggccacggcaacgtgttcctggatggcgtcaccggcgaggatgggcggcccgggtccgagtgcaaccgctgcttctccgggccggactgctccgtccggacgcccaactgcaccgccgacgccgacagagcgggaacccgttgttcctggagccgtactggagacggcacgcggcagccagcgccgtggtgttctccgggtggcaccgcttgagctacatcaccaccggcggccgcttccattccgtcgagctcgatcgccacatccggctgctgcacagggccgtcggcaacgcggtcgtcgacgacaagtacttggtcttcggggccggctccatgcagctcatcaacgcgttggtgtacgcgctctcccccgacggcaacgccgactcgccgccggcaagcgtcgtcgccaccgtgccgtattacccgcaaaccgacatgtttgacggccgggagtacagatgggacggcaccaccgctacgtggtcaaacaacggctcgcgaaactccaccaaaggcttcatcgagttcgtcacctcgccgaacaaccccgacaccgcgttgcgcaagcccgtcctcgccggctcgtcggcgatcgtcgaccacgcgtactactggcctcacctgacgcacatcccggcgcccgccgacgaggacgtcatgctcttcaccgcttccaagctctccggccacgccggcagcagattcgggtgggcgctgataagggacgagaaggtggcgaaaagagcactttcgtacgtagagcagagcatcatgggcgcgtcccgggacacccagctccggatgctgaagatcctaaagtacgcgtgggtgaaatgcgagtgggaggaagacgtcgactgctacgagacgctgctggcggcggggatcatctcgcggtccggcactttatccgaggccgaagctcggtacacgcggatgagcctcctcaaggcgcaggacgacttcgacgtgctc

SEQ ID NO: 1281 - DNA, 1193 bp, Oryza sativa
cgcgcggaggccaattgcccgcgctgcgcggcccacatcccctgcgcggcgcgttcctcgagatcgtggggaggggccaccctgggagaagagcttcccacgccgcgggagatgtgccggaggctcgacgagttcgtcatcgggcaggggaaagctaaaaaggtcttgtcggtagctgtatacaatcactacaagagaatatataacgcgactgtacagaaaggaacatagaaatagataaaagcaatgtgcttctaatgggtccaactggctcagggaaaaacattactcgccaaaacactagcacgcattgtaaatgtaccattcattatagctgacgcaacatcattaacacagcaggctggatatgtaggtgaagatgtagagtcgatactgcagaagttactagtggctgaatataatgttcaagctgcccaacaagggatagtgtacatagacgaagtagataagataacaaagaagcagatagacacaaaagatattcttttcatatgtggtggcgcttttgtcgacttggagaagactatttctgaaagaggcgccaagattcatctataggttttggggcacccattcggataaacatgagaagttctgaagtgactgatccaatggtcacttcatcattgttggaatctctcctttggcaggttgagagtggcgatcttgcaagatatggtttgataccagagtttattggacgcttgcccatcctagttagtttgacagctctcaatgaagatcagcttgttcagattcaggttcttacagaaccaaagaattctctttccagacaatacaggaaaatgtttagcctgaacaaagttaagttacactttactgatggtgcacttagaatagtagccaagaaggctatagccagaaatactggtgcacgtggtctgagagccatcttggaaagccttctattggaggccatgtatgagaaaccaggaagcgaacgagtagacgctgttgtggtggatgaggaggcaataggttcaattgataggccaggatgtggagccaaaattcttcggggtgacggtgcattggagcagtacataacaaacactaacatgaagaattccatggtaggatacttgatacagttcactgaaaatctcttaatttgttatccaatagatcaaaagcaattaactcttcattaa

SEQ ID NO: 1282 - DNA, 1188 bp, Oryza sativa
atgccgacacccgagccctcgacctccgcctccgccatcgtctccggcacggtgacagggcaccacgtgctcaccatcgacggctactcccgcaccaaggcgaagctccccaccggccggttcaccgcgtctcgccctttcacggtgggaggacactcctggagcatccactactaccccagcggcgatcgctccgacaccgccggcttcatatccgtcttcctcgagctcaaccccgccgccgacgccgccgccgccgccggcagcggcggctccgagcccgtcgacgcgcgtgtcacgttcagcttgctggatcaggccgggaggtccgtgccgtcccacaccatggccacggatctgcacgacttcgccgccaccggcttcggcttcggtcgattcatcgagaggtcgtacctggagcagtcggagcatctcaagaacgatcggttcgccatccggtgcgacgtcgtcgtcttctccgacgagctccgtgcggaggcccgcaccgctgacgccgcagctctttccgtcgcggtgccgccgtcggacctgagccagcatctcggcggcctcctcgcggccaaggaactaggcgccgacgtcacgttcctggtcgccggcgagacgttcacggcgcacaggtgcgttctcgcggcccggtcgccggtgttcagggcagagctcttcggcccgatgaaagagagcgccgccacggcggtcatcaccgtcgacgacatcgagccagacgtgttcaggaacctgctcaccttcatgtacaccgacacgttgccagagacaaatccacaagagctggaggaagaagaagaagacgacgacgacgactacgaggacgatcaagctcaagctgctgcaatggtcgagcatctgctcatcgcggcggacaggtacaacctggagaggctgaagctgatctgcgaggataggctgtgcaagcacatcgacggcgagtccgtggcgacgatcttggccttggctgagcagcacagctgcgatgggttgaaggaggcgtgcttccagttcctcagctcgcgatcggctctgaattctctggtggccaccgatggcattgagcatctagctagatggtgcccctctgttctcaaccagctcatgtccaaggttgctgctcttgttcctgttgatttcgtcgtcagggaaacaagataa

SEQ ID NO: 1283 - DNA, 1188 bp, Oryza sativa
atgggtcaatgcgccatgtctcacacgcgctctaccaccgccggcgccgccggcggtaagccgccgatcgcgccgccgccgacgtcctccgcctccgccattgtcgccgacacggccagcgggtaccacctcttcaagatcaacgactactcgcgtaccagggacatcttccccaccggcagtgccctcaagtcccgcgcgttcaccattggcggccaccaatggcgcatccattactaccccaacggcaacacggaggagtgcggcgagtacatctccctgtttcttcatctcgacgagattgtcaccgacaagaacgtgtacgcgcagcacgggttccgtttattcgacgagtttgccggtgataatgatgacgatgatgaactgcagccttcctccatcgctgacctcgggcaggtcagtacctttggtggcaacaacattgggttgggacgactgaggtttatcaaaagggaagagttggagaaatcgaagtatctgaagaacgactccttcaccgtcagatgcgatgtcgtcgtcaccaagcggatccgctcggaggagacgccattggtggtgaggacctctccaaagccaaaggtggcgaggctcgtcaccgtgccgccgtccgatctgcaccggcatcttcaggacctcctctgcgccgagaagggcgccgacgtggtgttcgaggccggtggcgagacttttaccgctcaccggtgcgtgctcgcggcccggtcaccggtcttcagcgcggagctgtttggatcaatgaaggagagcgacaccacggtggtcatccgcatcgacgacatggaggcacaagtgtttagggccttgctcttcttcgtgtacaccgactcgttgccggagacgaagaaggaggacgagtatgccatgtgccagcatctactcgtcgcggcggacaggtacaacatggagaggctcaagctaatgtgcgaggagaggctatgcagctacatcggtgtgggcacggtgacgactatactggagttggccgagcaacacaattgtgatggcctaaagaaagcatgctttgattttctcagctctcaggagaatctgaaagctgtcacggccggtgagggattggagcatttgagcaggaactgcccttcccttgtgaatgagttgattggcacgctcggcaacttaattcagtga

SEQ ID NO: 1284 - DNA, 1178 bp, Oryza sativa
ttcatccgggaacacctcaggagtctcgccccgtaccagcccatcctgcccttcgaggtgttgtccgctcggcttgggcgtaaaccagaggatataatcaagttggatgcaaatgaaaatccatatggtccacctccggaggcattaggaaatttgaagtttccctatgtgtaccctgatcctgaaagccgtcagttgcgtgctgctcttgctgaagattctggtcttgaatctgagtacatacttgctggatgtggtgcagatgaattaattgatttaataatgagagatgtgtactcgaaccaggtgacaaaattgttgattgccctccaacttttacgatgtatgagtttgatgcgtcagtcaatggtgcacttgtgatcaagggtaggtaccgagacttcctgatttttctctagacgttgcacagattgtcaaagtggttgaacaggaaaagccaaaatccatatttctgacatctccgaacaacccagatggcagagcataatcaatgatgaggatcttttaaagatccttgatcttccaatacttgtagtgctggatgaagcatatattgagttttcgagtcttcaaacaaggatgtcatgggttaagaagcatgataatttgattgttcttcggacatttagcaaacgagcaggcaggtttagctggacttcgtgtgggttacggagcatttcctctaagcataatcgagtatttatggagggctaagcagccctataatgtttctgtagcagcagaagtttcagcctgtgctgccttgcagaacccgacttatttagagctactacaagagagggacaggctgtacgatcttctcaaagaaataccattcctaaagccatttcccagccactctaactttattctctgcgaggtcacatcaggcaaagatgcaaagaaaataaaggtttgcactgcttctattcatactttgaaaggaaatgctgatgatttagtttcaacaatataatgcctgcagcatcattcacataattttgttcaaaaacaattttcaggaagaccttgcgaagatgggagtaatgatccgccactatgacaagaaggaactaaagggatatattcgtatttcagtgggcaagccagagcataccgatgcactaatgaaaggcctgaaagcacttcaactgtga

SEQ ID NO: 1285 - DNA, 1164 bp, Oryza sativa
gtcgcctaacgccgcgcggggccgcgcgcgggggtcgccgtggaccccgcccgcgcgcgcgccgcggtcgtcacctgcggggggctctgcccgggcctcaacaccgtcctcagggagctcgtcgtcggcctccgggagctctacggcgtccgcgacgtcttcggcgtcgccgccggctaccgcgggttctacggccccgacgccgaccacgcccgcctggacctggccgccgtcgacgactggcacaagaagggcggcaccgtgctcaagaccacccgtggtggctttgatctcaacaagatcgttgacggcatcgtcgcgcgcgggtatacgcaggtttatgcaattggaggggatggaacaatgagaggagctgtggccatcttcaacgagtttaagcgccgtggtttgaacatttctattacagggatcccgaaaactgtggacaatgatatcggcatcatagacaggtcatttgggttccaaaccgcagtggagattgctcagcaggcaatcgacgcagcacatgtcgaggctgtgagcgccgtgaatggcattggacttgtcaaacttatgggcaggagcacaggccacattgctcttcatgccaccctgagcagccgcgatgttgactgctgtttgattcctgaggttgatttctatcttgaaggaaaggggggcctgtttgagttcttgtatgaaaggataaaacagaagggacatgctgttgtcgttgttgctgaaggtgctggtcaggaattgattccaaggactgacgatcaaaagcgggagcaggacgagtccggcaacattgtgttccttgatgtgggtccctggttaaaatctgagctgggtaaatggtggaagagagaacacccaagcgagttgttcactgtgaagtatatcgatcccacttacatgatacgagctgttccagcaaatgccactgacaatctgtactgtacattgttggcacattcggcgatccatgggatcatggctgggtacactggcttcgtccctggcccgattaatggaaactatagctacataccgctggaagatgttgctgtggcgaagaacccggtggatgtgaatgatcacaaatgggcatgggttagatcagtcacaaaccaaccagatttcatgaagccaaaatactaa

SEQ ID NO: 1286 - DNA, 1145 bp, Oryza sativa
  N_region (292)..(292): n = any nucleotide
atggcgaccgccgccgccgccgccgccgtgtaccttcccgaggtggatagccgcttcgccgacgccgacgaggaggaggaggaggaagcgacggtgaggccagtcgaggtggccgagagtaaggatcaggaggaggttgaggaggaggaggatgaagaggagtggtcggactccgacgtggccgatgcgctcgactggctcgacgcccggaggccgaacgcgcacggcggggtgctgtcccgcccgttccagccgatttccaaccgcacgcagaagctcgcctcgcacatcngcgcaaaacccctggagtgggaaggtagaatgaacgtggggatgtcaaattcagtgacgactgcgataagggacagcataagggagacggcaattgggaaaacaaggaacacagagaaggctgatcgtgctacagtagaacagcaggctattgatccaagaacacgcatggttctgttcaagatgttaaaccggggggtttttaataccataaatgggtgcatttctacagggaaagaggcaaatgtctatcatgcatcaaaggctgatggccaggagttagcgatcaaagtctataaaacatctgtccttgtttttaagatagagaccgatatgtccatggagattaccgctttagacatggttactgcaagcataatcctcggaaaatggtgaagacctgggctgaaaaggaaatgagaaatcttttacggcagctggaatccgatgcccaaaaccattgctcctgaggcttcatgtactggtgatggaatttatagggttgggctgctcctcgtctcaaggatgctgctttatctgatgataagttgcgtgaaagttattttgagttaattacgacaatgcggacactctaccaaaaatgcaaactggtccatggtgatctgagtgaatacaacattctttatttcgagggacacttgtatatcattgatgtttcgcagtccgttgaccttgatcatccttcagcgttggaattcttgaaggaagattgcttgcatgttactgacttctttaaaaaacgtggtgttgctgtcatgtcagtaacagaactatttaattttgtgattgatcaaaatattgctgatgaagatgttgatcattacctggaaaag

SEQ ID NO: 1287 - DNA, 1140 bp, Oryza sativa
  N_region (7)..(7): n = any nucleotide
  N_region (56)..(56): n = any nucleotide
atgagcnagaaggagacgctccaccaccaccaccaccgccgccgcctcccctccancgcgccgtcgccgtcgccgtcgccgctcgacgacgacgacctcctccaggagatcctcctccgcctcccgccggacgcctccacgctccccaccgcctccgccgtctgcaagcgctggcgccgcctcgccttcgagccgggcttccgccgccgcttcgtcgcccgccacgagccccccttcctcggcttcttcttcccctacgacttcgatccggtcttctccttcaacgccggcttccgatccaccaccgcccagcaccacctccccgcccaccggttcctccccgagagggagatcgggctgcggtgggagatcgtcaactgctgcaagggccttgccctcttcaggatcacattccgcgggggatgcaaatgcaaggaattcatggtggttgatcccatctccggcgaccgccgcctcctgcccttcccgctcgtcgacggcaagttcctctccgccacggtggttcctgccgccgccgatcgccgctcgttccgcgtggtcgccgtattcgccgagaggaacaccttcaccagcgtgttcgcctccgtttattcgtcagatgccggtgtttggagtgattatgtctcgaggttgtgtctcccatgggaggtctgggtgttgcggccgagcgttcttgccggaaatgcggttcactggtttcttgatggctataatgtgctcatgtttgatttggagagtcagaagctgggattcagtgagctaccgctggatgcgaaggatgatgaggatttccctcaccggtgccggtgtcagatcataccggcgggtgatggccggcttggcctcgcggttatagttggatccacaatgcaattgtgggagagggagattggagatggcagtgatgccacatggttgctgaggagaaccctccagctgaactttcttcccctagaagcggaggggcgtaaactgattgtgggtgttgccgaggagaatagctccatacttctttggacgcgtgttggcctgttcatggtccacctcaagtttttgcaggttaggaaggtctacggagaaatctccgtcgacaactactacccctactcaagcttctga

SEQ ID NO: 1288 - DNA, 1125 bp, Oryza sativa
atggccggagacacgacgaagcccacggagtcagccatcgtcgggagcacggtgaccgggcaccacctgctccacatcgacggctactcccacaccaaggaccgcctccccaatggctgctacatggactcccgccctttcaccgtgggaggccatctatggcgcatcggatactaccccaacggcgacgtcgccgacgcctccgcgtacatggccgtctacccttccatcgacgagaacgtcatcgtcgccgtcaaggcttttgccaagttcagcttgttcttcaacggcgagcccacgccgccggcgtttgtgcataccacagagccattcgtgttcagcaggaaggggatcgggtatggttttagcaagtatgccgagagggagttgatggagggctcgatcgtggacgacaagttcaccatcaggtgcgacgtcggcgtctccacggagctccgcgcggaggacaggccgccgtcggacttcgcggcggtggtgccgccgtccgacctgcaccggcacctcggcgaccttctggactccaagcacggcgccgacgtcacgttccaggtcggcggcgaggcgttccgcgcgcaccggtacgtcctcgcggcgcggtcgccggtcttcagggcggagctgttcggcgccatgagggaggccaccgccgcggccgccgcgtcgtcgtcggactcggaggcgatccgcgtggacgacatggaggcgccggtgttctccgctctgctccgcttcgtgtacaccgacgcgttgccggcgcccggcggagcggacgacggacaagcggcaggaggaggatcgtattcggaggaggccgccatggctcagcacctgctcgtcgcggcggacaggtacgacctgaagaggctgaagctgctctacgaagacaagctacgcaggcacatcgaagccgcctccgccgcctccatgctcgcgttggttgagcagcaccattgccgaggcctcaaggaggcgtgcttggtgttcctcagctcgccggccaaccttcacgccgccatgggaagcgatggatttgagcatttatccaggagctgccccggtgtgatcaaggagctaatatccaaacttgttccacgttgtgattag

SEQ ID NO: 1289 - DNA, 1113 bp, Oryza sativa
atggtgctcgcgcagctcggcgggagcatctcccgcgcgctggcgcagatgagcaacgccaccgtgatcgacgagaaggtgctcagcgactgcctcaacgagatctcgcgcgcgctcctgcagtccgacgtccagttcaagatggtccgcgatatgcagtccaacatcaagcgcatcgtcaacctcgagacgctcgccgccgggaccaacaagcggcgcatcatccagcaggccgtcttcacggagctctgcaacatgttggatcccgggaagccttccttcactcccaagaaggggaaaccttgcgtggtcatgttcgttggtttgcaagctttacagggttgcagcaacaaaaagtccagtgatatttattggaacaggagaacacatcgatgagtttgaagtttttgatgtgaaaccatttgtcagtcgtcttttagttgacaggcatgggagactggtcggggtttatggacaagattcatgaagtagtacccactgatcaacaacctgagcttttgcagaagctgtctgaaggaaccttcactctgagacttatgtatgagcagttccagaacatcttgaaaatgggtcctattggccagggttcatttcttttaagattatcacagcacgcttttaaatctggattggtgtgtttgcaggttttctcaatgttgcctggatttagttctgaattgatgccaaagggacatgagaaggaaagccaagctaagattaaacggtacatgacgatgatggattccatgacagatggaggagcttgacagcacaaatcctaaattgatgactgaatcgcgtattcttcggattgctcggggatctggccgacctgtcagagatgttgtcgacatgctcgaagagtacaagcggcttgctaaaatctggagcaagatgaaagggctcaagataccaaagaaaggagaaatgagtgcactgtcccgcaacatgaacgttcagcacatgagcaaagttctcccgccgcagatgctgaagcagataggcggcatgggtggcctgcaatctttgatgaaacaaatgggctcaaaagaaatgggtggcatgtttggaggcatgggtggtgataagtaa

SEQ ID NO: 1290 - DNA, 1110 bp, Oryza sativa
ggtttcataagcatcgactgtggatatatcacgaggccaagctacccagatttcaagacaaatctaacatatgtagccgatgtgggcttcacaaatacagggtttattcacactgttgatgttggcaacctgcagagggatcttgcacaacggtacacaactgtccgctactttcccaatggaactcgcaactgctatacgctcaagcagctaacacgaggtggcaagtatcttgtgagggccacctttgggtatggcaactacgatgctttcaactcacctcctgcctttgatctctatcttggggccaactactgggtcaaggtgaacattaccaactccagcagagcatatgtccatgagacgattgcagtgtctccttctgaattcttgcaggtttgcttggtaaacactgggtcaggaactcctttcatctcagggcttgacctaaggccaaggtacccagttgatcgctacgaccgcttctggcagagtctgaccttccacctttgattagtgccatggagatattcttagggcggacactgaatgagtcttccactggctcctctgatgaagtattctgtgaagaggaactgggagggtgatccttgtgctcccgaagcttttgtatgggatggattgagctgcgatctatcttacaataacctgtcaggatcaatacctgactttctgggtcaaatgccattgcttacctttctaggactggaaataaccccaacctgtgtggaaatcggaggttcaagtacaaggaactccaagtcatcacgaatgactggagaaatgtaattggggagggtggatttggtcatgtctatgctggtcaattggaggatgtaactgacgttgctgtcaaggttgaatcacaaacatctttgcgagggaatcataagcagtttctggcagagcaacacctgaccagggttcatcataagaacttggtgtccttaattggctactgtaacgacaagaaacatcgatgccttgtctatgaatacatggatgggggaaccctggagggccggctcagaggacgtgtacagcttcggagttgttcttatggtggtcatcacagggagaacagcgatc

SEQ ID NO: 1291 - DNA, 1089 bp, Oryza sativa
atgaagctcgtctaccgcaacctcgcccgcaacggccccggctccgtcaaggacgacctgtggcatgcctacaaccttattgttccgggggataccctccagtccgtcactgtgagaggaaagttctgagagagatggcatctggaggacgtgatgctgagcgtgtgaggttaaagttggaaattgtagtcgaggtagattatgataaggagggatctgtcttgcgtgtacgtggaaaaaatataactgagaacgatcatgtgaagattggacagtttcatactgtggagcttgagctgaagagacaatttactttgacgaagtgggattggttagctcttgataccatccaacaagcatgtggacccaactgcaagtgctgatctagcagttattctcatgcaagaaggacttgcacatttgttcctcattggtagaagagagcacgtattgaaacatctattcctcggaagcatggccctgcgattgctggttatgagtcggccctcaagaagttctttgaacatgttttgcaactacaggctttcctgaagcatattgattttgaagtagtccaatgtgctgtaattgcaagcccaggttttactaagcttgaagctgcacggcgagacttaagattaataattgagaacaaacagcgcattgttcttgcacatgcaccttcaggttacaaaaggcatagcctgaaggaagttttggatagcccaagtgtgatgacactaataaaagatacaaaggcggcgcaggagcgagcttgttatggacctaagcatgttgagattgcaaatgaacgtcttgctatccaaactcttttaataacagataatttgtttcgaggaactctgacattgcaacgaggcaaaattatgtgcgcttggttgaatcggtaaaaaaattcggtggcacagtgcacatcttttcttcaatgcatgtctctggtgaacgttggcgcagttgacaggaatcgcagctatacttcgatttcccttgccagatttagaggacattgagatgtgataattccaccgttcagaattggcaatatgctaacttgtaattcatgtgtaa

SEQ ID NO: 1292 - DNA, 1083 bp, Oryza sativa
atggcggcgcgcgccggcgacaccggcctgagcaaggtcaggcgctactggcccgggagggcgccggactgggcgtgggcgggcgccgctgtcgctcacgacgaggacgacgcacgtctcgtctcgacgcttgacgagatcaagcacgtggaggaggaggcgctgaggtcgccgcgccgccgccgccgccgtgtacggcagcctcccgagatcgtctcggcggcgccggcggttgactgctggcatgagcccgatcagatcgaggaggaagaagaagatgacgatgatgcccgggaggagcgcagagcgaggataagggagagggcgctgctcctgaggcagcatgaggaggagcagcttcttcttcatcatcatcaccagcggcatcaggaggatgaggcggcgtctgagtccgacgagacggcggcggaatcggactcggacgacgagcagatggccgtcgtctacatggccgcgcccctgttcgtccccaagtcacagcgcgacaccatccggctcagggaggaagaacagcatcggcagcgccggcggcttgagctggagctggacaagaagaggctcgaggacaggaaggctcagacgaggcggatcctgctccaagagatcatcaaagaagagctcctcgccgccaccacagcttcggccgaagccgaagccgccatcgacggcgtggacaccgacgacgaggtggaccaagccgaggagcacgagtcgtggcggcgccgggaggcggcgagggtcaagaggagcagggaggagagcggcatcgacgagaacccggtcgctgatgatcgtcccaagaagatgacgatcaagaagcagatgaggttcatgcggaggtactaccacaagggttgcttcttccaagacgacgccgacggcgcggcgcagacggccgccggagcatgcgaaatctaccggcgagatttctccgggccgactgggttggacaagatggacgtgagcgtcttgcccaaggtgatgcaggttgaaacacgtgtggcctgcaaatggcagaatgaagatgagcgaggtttagatttaggtgcccacgaaaactag

SEQ ID NO: 1293 - DNA, 1083 bp, Oryza sativa
  N_region (34)..(34): n = any nucleotide
atgaccgatgcgcctccgccgaggagccgcccgnacccacccagcagcagcgttgccgtgcccgccgccgcggcggcagtgatcgcagccgccttgggtcctccttcctcgccctgctgcagccgccccggcgcgccccggtcgccgcgggatccagggtcggcatgtcgaaggcgagggtctacgccgacgtcaacgtgctgcgccccaaggagtactgggactacgaggcgctcaccgttcaatggggcaggatgactatgaagttgtcaggaaagttggaagaggtaaatatagtgaagtctttgaaggcatcaatgttaacaacaatgagaaatgcatcatcaagatactcaagcctgtgaagaaaaagaagatcaaaagggagattaaaatacttcagaatctttgtggaggtccaaacattgtgtagcttcttgatattgtcagagatcaacattctaagactcctagcttgatctttgaatatgtcaacaatacagacttcaaagtgctgtaccccacgttgacagattatgatatccgctactacatatatgagctactcaaggcattagactactgccattcacaaggcattatgcatcgagatgtcaagccccacaatgttatgatagatcatgagctccgaaaacttcgattgatagactggggcctggctgagttctatcatccagggaaggaatataatgttcgtgttgcttcaagaggtatttcaaggggcctgagcttcttgttgatttgcaagattatgattattctttggacatgtggagccttggttgcatgtttgctgggatgatattccgcaaggagccattcttctatggtcatgataaccatgatcaacttgtcaagatcgcaaaggtacttggaacagaagcactaaatgcttatttgaacaagtaccatattgagcttgatcctcagcttgaagctcttgttgggagccatggtcgaaattcattaatgctgataaccaacatctagtatctcctgagcttgataagcttctacgttatgatcaccaagataggctcactgcacgtgaagctatggtaa

SEQ ID NO: 1294 - DNA, 1080 bp, Oryza sativa
atgctgcgctgccaaaagccgccgcaatgccgcctcggcgcgggcggcgcgggcgcgggggtgctgctgaggcagcggagcgaggtggcggtgcggtgccgcgcgcagcaggtgtccggggtcgaggcggcggcggggacaccggcggcgcgggcggcggtggagggtggggagaggacgagcctggcggagcggctgcggctggggagcctgctggaggacgggctgtcgtacaaggagagcttcatcgtgcggtgctacgaggtgggcatcaacaagacggccaccgtcgagaccatcgccaacctcctccagcaggaggtagggtgtaaccatgcacaaagtgttgggttctccactgatggttttgccacaactaccacaatgagaaaacttggtctaatttgggtgaccaaccgaatgcacattgagatctacaagtacccagcatggatgttgtggagattgaaacttggtgccaagaagatggaaagatcggtactcgtcgtgattggatccttaaggatctggctaatggtgaagttatcggcagagctaccagagcaagtgggtcatgatgaaccaaaatacacgcagacttcaaagagtgagtgatgacgtgagggatgaggtttttgtacactgtccaaagactccaagagattagcattccccgaggaaaataatggcagtttgaaaaagattccagttcttactgatcctgcacagcactcaagactaggcctagtgttgcagccaagaagagctgatctggacatgaaccaacatgtcaataatgtcacttacattggttgggtacttgaaagtatacctcaagatattattgatacacatgagttacaaacaatcactcttgactacagaagagagtgccaacatgatgacatagtagattcacttacttatatcgaggaaggagaggagaagagttccaatggatccgcatttgctgcaccgcacccagaagagcagcgacagttcttgcactgcttaagatttgctgggaacgggaacgagatcaaccgtgggcgcaccgtgtggaggaagctagctagatga

SEQ ID NO: 1295 - DNA, 1067 bp, Oryza sativa
  N_region (26)..(26): n = any nucleotide
atgcgacgggacgacgccggcggggnagggttcggcgacctgttcgactcgtgcgccggtccatcgccttccgcacagcacggccccggagacgccggggcctctcgggggcggggcgggatcgggttacggatcagctcgtgcctccggaagtcgagggggatgggtctgctcgggctcatctccaagagcccttcgccgccgcgccgcctgctgccgccggcgcccaggggagaggagagcccgcagatccggtggcgtaagggcgagctgatcgggagcggcgcgttcgggcaggtctacctcgggatgaacctggacaccggagaactcctcgcagtaaagcagcacataagagagctcgaggaagaagtgaagctacttaagaacctgtcacatccaacattgttcggtaccttgggacagtccgggaggaagatactctgaatattttgctcgagttcgtgccaggaggttccattcagtctctccttgggaaactaggttcatttccggaggcatacacaaagcaaattttgcaagggttggagtatttgcataacaatgcaataatacatagagacataaagggagcgaacattcttgttgataacaaaggatgcattaaacttgctgattttggggcatctaagcaagtggcaaagttggctaaaacaatgaaagggacacctcactggatggcacctgaaagctctgcagacatctggagtgtgggatgcacagttattgaaatggctactggtaaaccaccatggagccagcagtaccaggagcatgtcggaaccacaaagtcacacccgcctatacctgaacatctctcccccgaggccaaagattttctgctaaaatgcctgcagaagctcttgatctgaagaagctacaaacacctttatatgaggagttctacaacacggtgaatgctgggaattctcaggtagctgaccatacttccaacggaattttctcaaatagtcccaaattgccacctcgggagaaagtggaaagaagaattggtccaggagcttgagagggaaagaggcaagtaa

SEQ ID NO: 1296 - DNA, 1062 bp, Oryza sativa
atggcgaagctggggccggggcaggggctggggtgcgaggcggcggtggggttgctggcgccaagcaggaagagggagtacaaggcgtgcaacaagctcaccgaggggaagcggccgctctacgccatcggattcaacttcctcgacttccactactacgaggtcttcgccaccgtcggcggcaaccgcacaacctacagctgcctcaaggatggtaattttgctatcctgcaagcatatattgatgaggataaggatgaatcgttctacacactgagttgggcttgtgatcttgatggcacaccgctgttagtggctgcaggaagcaatgggatcattcgggtcatcaactgtgccactgagaagttggccatggcgattcaataaacgagataagaactcaagcattaaagccttcgctcatcatttctgcaagcaaggatgaatctgttaggctgtggaatgttcacacagggatctgcattttgatttttgctggagcaggaggtcaccggaatgaagtattgagtgttgacttccacccatctgatatctaccgcatagcaagttgtggcatggataacactgttaaaatatggtcaatgaagggaattctggccatatgttgagcaatcctttacatggactgaccttccatcaaaatttccaacaaaatatgtgcaatttccgcattctaactatgttgattgtactagatggcttggtgacttcattctgtcaaagagtgttgacaatgaaattgtgctgtgggagccaaaaacaaaagaacaaagtcccggggaggtatcctgtgccagaatgtgatatctggtttatcaaattctcatgcgattttcacttcaatcaattggcaatagggcaaccgtgaaggaaaagtctttgtctgggaagtacagtccagtcctcctgttttaactgctcgcaatgcaaatctgcgataaggcagactgccgtgtcatttgatggaagagcacaatccttgcctgcagcgaggatggcagcatatggcgatgggatgaagtggaccatccaaaagcatga

SEQ ID NO: 1297 - DNA, 1061 bp, Oryza sativa
atggcggcggcggcggcggcgcacgactacggcgaggcgctgtcgaagagcctgctctacttcgaggcgcagcggtcgggccgcctgccgtacaaccagcgcgtgcggtggcgcggccactccggcctcaccgacggcctcgagcaaggggtcggcgacggcgactcggaccactactgctggcagcggccggaggacatgacgacgtcgcggcacgcgtacaaggtggacgccgagaaccccgggtcggaggtcgccgcagagaccgccgccgccatggccgccgcatccatcgtcttccgccgcgccggcgacgcccactacgcccatctcctcctccaccacgctcagcagcagttgtttgagtttggggacaagtacagggggagatacgacgagagtgtggaggtggtaaagaactactacccatcatcaagtgggtacaaggatgagctgctgtgggcggcgctgtggctgcaccgtgccaccggccgccgcgaatacctcgactacgccgtcgacaacgccgacgacttcggcggcaccggctgggccgtctccgagttcagctgggacatcaagtacgccggactccaagtcctcgcttccaagtgctcctgcatgggccgcaaccccggcggcgccgcccacaacgccggccgcactccggcgggcctcctcttcatccgcccgtggaacaacctccagcggcggacgccggcgaggtgctggagttcgcgaagtcgcaggcggattacatactggggacgaacccgatggcgacgagctacctcgtcgggtacggcgaggcgtacccgcggcgggtgcaccaccgcgcggcgtcgagcgcgtcgtacgcgcgcgaccgcgacttcatcgggtgcctccaggggttcgactcgtggtacagcgcggcggcggagaacccgcacgacctcgtcggcgccgtcgtcggcgggcccaacggcaacgacgtgttcaccgaccaccgcggcgcgtacatgcagacggaggcctgcacgtacaacacggcgcccatggtcggcgtcttctccaggctc

SEQ ID NO: 1298 - DNA, 1061 bp, Oryza sativa
cgggggatcggcgaggagtgcatccaggaggacgagctcatgaacctgctgcagaagaagcccgtccccatctgctacgacggtttcgagccctccggccgcatgcacattgctcagaatgttaacaagatggtcagagctggatgcaaagtgaaaatttggatagcagactggtttgctcagctaaacaacaagatggggggtgatataaaaaaaatacagactgtgggacgctacatgattgagatttggagagcggctggtatgaatcttgatggtgtggaattcttgtggtcctcagaggaaatcaataagcgtgcaaatgaatattggccacttgtaatggacattgctcgtaaaaataatgtcaaaagaataatgagagatgttgtcagattatgggtcggaatgattcggatgagttgactgctgcccagatcttctatccttgcatgcagtgtgctgatatatttttcttaaagttccctttgtaggcagacatttgccagttgggcatggaccaaaggaaggtcaatatgctagccagggagtactgtgatgacatcaaaaggagaaacaaaccaattattctgtcacatcgtatccttatctgcccttccaaatatgctccctggttttaaggagggccaagaaaagatgtcaaagagtgatccatcctcagccatttttatggaagatgacgaggctcaggtaaatttgaagataaaacaagcattttgccctcccaacattgttgatggcaatccatgcttggagtacatcaagtacattgttttcccttggtttgaaacgtttgaggtggttcggaaggaagaaaatggcggtaacaagaactcatcgctgattatgagagtggtgctttgcatcctgctgatgttaaaccagctcttgcaaaagcgataaaccaaatattgcagcagcctatccgtgaccacttcaaaaacaacagtgaagcaaaagttctgctcaacactgttaaggtatatttttttttgagcaatgctacacgtactaaatttttcttactaaacttttactaa

SEQ ID NO: 1299 - DNA, 1034 bp, Oryza sativa
  N_region (980)..(980): n = any nucleotide
  N_region (1012)..(1012): n = any nucleotide
atggggaggtcggtgctggagatggtggtggcggcggcgcagggcggcggcggcgcggcgggggagtcggtgttgggcatgttcaggtacgccgtgctgcccatcgccaaggtgttcgtcgtctgcttcatggggttcctcatggcgtccaagcgcgtcggcgtgctcaagcccagcggccgcaagcttctcaatgcgcttgtgttctctctgctccttccttgcctaatatttgcgcagctcgggagatcaatcacaattgacaagatcatggagtgtggttcattccagcaaacattgctctgggtgcagtctctgcatctttggttggacttatagtggcattgattgtacggccgccttatccatacttcaagttcaccatcactcacattggaataggggaacattggaaatataccacttgtccttatctcggcattatgtcgcgaccaattaaatccgtttggtgactcgaacaaatgtactcaagatggaaatgcatacttatcatttggtcaatgggttggtgccattattgtttacacatatgtgttcaagatgcttgctccacccccccttgcaattactctcggtgttgtgccattcttgaagaatttgatcctcacagatgacgcgcctctattctttttaacagatagctgtctcattcttggggctatgattccgtgcattttgcttgccgttggtggcaatcttgttgacgggaagtaggagacttggggttcggaccaccgtcgcgattatatttgcacgcttgatattggttccaattgctggtattggcatcgtctcatttgctgacaagcttggatttattccaaaaggagacaagatgttcaagttcgtcctgttactgcagcactctatgcccacatcggtactatcagggtgctgttgcaaacctaagaggttgtggcaaggaatcagctgcaatcttgttctgggtgcacattttngctgtcttctccatggcaggatggattatctnatatcttaccatgctgttctag

SEQ ID NO: 1300 - DNA, 1030 bp, Oryza sativa
atgggaaaccccctcctcgacatctccgccgtcgtcgacgaggccttcctcgcaaatatgatatcaagccagggaatgcaattctagcagaggagaagcatttgcctatgtacaatgaattggctagcaaggtcaatgttgaatatatcgctggagggatccactcaaaattctattagggttgctcagcagtggatgctccagattcctggtgcaacaagttacatgggttgcattgggaaggacaagttcggtgaggagatgaagaaagacgcacaaaccgctggtgttaatgcccattattatgaggatgataatgctcctactggcacatgtgctgtctgcattgttggtggtgaaagaggtcacttgttgcaaacttgtctgcagcgaactgctacaggtctgaacatctgaagaggccagagaactggacacttgtagttgagaaggcaaaatatatttacattgctggctttttcctcacggtatccccggattccattcaacttgttgctgagcatgctgctgcaactaacaagaggtgtttatgatgaacctttctgctccctttatatgtgaattcttccgtgatgcccaagagaaggctcttccgtatgctgactatatttttggaaatgaaactgaagcaaggacctttgctaaagttcgtggttgggagagactgagaatactgaggagattgctttgaagatctcgcaattgcctaaggcttcaggagcacacaaggggattactgtcattactcaaggctgtgacccagtagttgtggctgatgatggaaagaggtcaaaacattccctgttatcgttttgcccaaggaaaagcttgttgacaccaatggtgcaggatgcctttgttgggggttttctctctcaattggttcaggagaagagcattgatgaatgtgtcagagctgcttgttatgctgcaaacgttatcatccaacgctcaggctgcacttaccctgagaagcctgacttcaactagagccatttcagcatattga

SEQ ID NO: 1301 - DNA, 1024 bp, Oryza sativa
  N_region (534)..(534): n = any nucleotide
atggtgggcggcgatgggatctcgctggactccggtggagatgtggtgggaggatcgtgggacgagtcatgcacgtggatggtgaaccgtgtgatctgcaggtggatcctggaagagattatgcgccttggcaggagctcgccacctcgaccgcccaccaccgtggacctcgcctcctcgaccgctgcctccctcgatctgctccatccacagcttcccgcgacaagcaaccgcggcgtcgcctgagaacgattcacggcggtgacaacgcagtggcgcggagatccgacatcgacgtggtgggggaggacggcgatggcggcgtggtgggggagcgacgcggtgggggagcgacggcgatggcggcgctggggtcggcggcgtggtgggcgaggacggcgatgggggacgcggtggaggaggccggcgatggcagcgctggggtcgacggcgtggtgggggagcgacgcggtgggggagcgacagcgatggcggcgctgtgtcggcgatgcggtgggggagcgagcgacgcgntgggggagcgacagcgatggcggcgctgtatgcgtggtcgcgatggtgttcctttgcgagggggcggcgggctgcaccgggtacgggtgggaggaggaaggccatgaagtcgctaagggcatggacatgttatcctccccggcccaccccctcctttcccaccccaaagccacctcgaaatccgccaccgccgcggaaccgttcccttcttcctaaacctgttgcgtgtcggcaaccgcacgctaggacaaagacggcaaaggtgtcatctgcttcattgtggcggtggaagcgaaggaagaaaattcgattcgggttgaaggaaaaaaaaaagcggagtgagccggcatgggtttggggacatcatggccgagctagctcctctcccgccagccgctgtccttctccccgccaaccactgccccgccttggagtttggataaatgagaagagaggggaggaagagagagagagagagataaggccataa

SEQ ID NO: 1302 - DNA, 1022 bp, Oryza sativa
ggagctgctggggcagtcattcattacatgggctatacgcctggtcttttcattgtaggattatttggaatattgattatgtggatgtatggctatttctggattacaggaatgcttctgattgctggagtctttgaaacatgcacgatttgtgatacctgtgttggctatgtatgctgtttattgtgtggctgttcgtgttggatcgcttggtgtcttcttgacattgaatctttctttcctgacaaatgatcttctgaataagttgctgcaaggatacgagtctgtttcattggatgagatgaagaggatcatggatggtttgacccattatgaagttttgggtattcctcggaatagaagtattgatcaaaagattctgaaaaaggagtaccacagaatgcttgtacatcctgataaaaatatgggaaatccactggcctgtgaatcattcaaaaagcttcagtcagcttatgaggtactctcagatttcacaaagaaaaacacttacgacgaccaactgaggaaagaagaatcactccgaagagtccaggcgtatacagtgcacaaaatgtggtaattttcatctgtggatatgtaccaagaaaagcaaagcaaaagcaagatggtgtcagcatccagctaaggatggagatggatgggtggaaaataaattttcgtcatccttcaaggaaatacctcgagcttttgtttgtgcggagagtaaggtatttgatgtgtctgaatgggctacttgccagggcatggagtgcaaacctaacactcacggcccatcttttatggtaaacatggttggcgcagataggatgtctcagagatcctacagttctcgctatccctttagtttgaatgctgagatgatccctgaagatgaatttgagctatggcttcaacaagcattggcatcaggtgtcttctctgacagcccgaaacgcaggaaaagctggagccccttcaaactacctcaaaaagggataaaaagttggcggcgatcctcataa

SEQ ID NO: 1303 - DNA, 1021 bp, Oryza sativa
ggatgggaggagggaggttcagctgggccctcacacgattcagacacatggagttagattggccagaaatcacctgcatgattgggtcgttcttattttacttgctgcagttgtgattgccctgcatttcgctcctccatttagccggtttgttgggaaggatatgatgacttatgttagttacccggtgaaacaaagcactgtaccagcatggggtgttcctataatatccatagtttgccctgtaattatctttctatccgtttatatcgctaggagagatgtctatgatcttcatcacgcaacattagaggtgtgctttactcggtgctgataactgcagttgtaactactgtggtaaagaatgcagtaggaagacctaggccagacttcttttggcggtgttttcctgatggaaagcagcagttatatgatcaagtgacaggtgatgtgatttgtcatggagagaaaagcttcttaaaggatggacgcaagagttttcctagtggacacacgtcgtggtcttttgctggacttggatttctgtcactctacctatctggcaaaattaaggtgtttgatcgccaaggtcatgttgccaaactttgcattatgattcttccccttcttattgcttcactcgtcgggatttctagaatagatgactatcgacaccactgggaggatgtgtttgctggcggcctactagaggatttatcatggcgatgctctgttacttgcacttctttccacctccataccatcatcaagggttggggaccgtatgcatacttccatatgcttgaggagcttcaagtggccaactcccacaatgcagaaagccagcagtcagtgtgtgggcatcatgttgagctatctagactacacaatagcaggacatcaagaaatgatctggaagctggtcgtgtgtaacatccctagcatgttgaaaaccgaggaagcggcatgtacaggttgcaccgtccaacggtgtagtgttcctaactctgtcagttcttag

SEQ ID NO: 1304 - DNA, 1019 bp, Oryza sativa
gaggcatggtacgactcgtttgccatgagcgagtcggacggggaggacgatttccacagcgtgcaagatgtgtggcctcctgccaaacaattgtttgccttgtattgcctccgctgttggtgtaaatgagaagaagagaccactttccacaagcccaactcattccatgaagatgccctccttaaagctctcattcaagaagaagtctggagaagctcatccttcttccacactatcttgaaaggcctctagcaggttctcaagttcagttatgcttactggaaaagaaaatactgaacagctggtctcatattgatcctggcactttccgagtccgtgggtcaaactattttagagggataaaaagaaagagcttgctccaaattatgcagcgtactacccatttggagttgatgtatacttgtcaccgcaaaaactcaaccatatatcccgatatgttcaacttcccgatgttcaaatctccagtaaactcccaccacttttggtggtcaatgtacagcaggttccactatatcctgcctcattatttcaaaatgaaatcgatggagaagggatgagctttgttttgtattttaggctctccgatgcttactcaaaagaactacccccatcatttatagagaatatcagaccatttcgagaacgggcttaggatacttggcccggatggcaaatctggaaggaccttcctttaagtgcggcagaaaggaagctaatgcatgcatacaatgagaagcctgtgctttctagacctcaacacgagttttacccggggtgacaactactttgaggttgacattgacatgcataggtttagctacatctcaaggaaaggtttcgaaacatttttggacaggctaaaaatatgcatgctagatgttggtctaaccattcagggaaataaagctgaagaattgcctgagcagattttatgctgtgttaggttgaatgggatagattacacacaatataagccactgatgacacatggggcctga

SEQ ID NO: 1305 - DNA, 1011 bp, Oryza sativa
gaaacggttgaacagatcttacaagaatcaaagaatagctactcgatcatctgtgacaaccttaagaaagtgtaccatggaaaagatgggaatgcaaaaaaaattgctgtcagagggctatctctttctatgccacgtgggcaatgttttggtgttcttggaccaaatggcgctggaaaaaccactcttattaacatgactggatttactaaacctacgtctggcacggcgtacattgaaggaatggacatacaattcgagatgaacaagatttatgcaggaatcggtgtttgtccacagcatttgctatgggaaacactgactggtcgcgagcatctgttgttctatggtagacttaagaatttgcggggtgcaccattatctcaggccattgagaaatctttgaaaagtgtgcgcctgtttgctggtggcattgccgataagcttgtaagcaaatacagtggtggcatgaaacgtcgtctcagtgttgcaatctctctaattggtgaccctaaggtagtttatatggatgaaccaagctcagggttggacccagcatcaaggaaagacttgtggaatgctgtcaagtctgccaagcaggacagggccataattctcacacattcgatggaagaagctgaatttctatgcgatcggataggaattatcgcaaacggcagcttgcaatgcatcgggaactctaaagagctgaaagcaaaatatggaggctcatatgtcctcacagtaacaaccgcgacaggcgaggcggaggagatgaggagactggtccagtccatctcccctaccatgaacattgtgtaccacatctccgggacgcagaagttcgagatggcgaagcaggaggtgaggatctctcaagttttccgggccatggagcatgcgaagctcaggatgaacgttcttgcctggggcttggctgacacaacgctggaggatgtcttcatcagagttgccagggagagtgacagtgcatcatcctccgtggcctga

SEQ ID NO: 1306 - DNA, 1007 bp, Oryza sativa
atgtccgcttgctgcaaaaaactttccagcctcaaagctctcctcgtcttctccgctcccgcaaaaaaccctagcttgctcatctcggtcccttctccgacgatctccggcggcaatggatctcgacaagtccacttccaccagcgcgtccctgaagaagctgcaggaggacggtgctctccctggtcgcgggaccatggagagagaaccaggagaccgtggagcgccgcgttggtcaggtgatgatcagcggccttacgacgcctctgaccgacgtcatcgggccgctcgcggaccaccagtcggcggcggcgtcgttaaaggagggcgtcgccaagtgttaacggccaaatttgtgctgccgcgacgagtggcagcaacgttccgaagagagggaggaagttctcctccgtgctcgggactcgtcggaaggcgcctaccccatcgcctcacctggggggagctccaagctgagatggagcgcatccttcaggccggcgctcgcggcataggatgcgagattgaggttgccaaggcggcggcggcgtcgtcggcaaatgaacgtgccgacaaactagcgcgtgacctagcgaaggtccgcgaggacctccagaaaatgagggagctggtggccggaaacgagagatgtcgatgtcgaggatgtccagcagcgtgggcagcctgagttgccggtggtcgttccggcagatcgtcgtatccaatattggaggacgaagttcgaggtggtcgaactcgagaggactatggtggaagtcaagaaggaccaagccgtggaagcactccaaggtcgcgaggtgtggttcaactcgtacctcaggagctgttgtacggccatggccggagtctgtagggagctccgagtacctcacgggaatcccgaggagttggcggccgcatacatctcgtggttgaatggagcctgtgctcagcttgaaggcatcggcaggcatatcgatcgagccgatatgctggagggcacatgctag

SEQ ID NO: 1307 - DNA, 988 bp, Oryza sativa
attgacgagaatgtggcgagggagatcatcaaccaccggtcgctgcggcaccccaacatcatccgcttcaaggaggtggtcacgccgacgcacctggcgatcgtgatggagtacgctgccggcggcgagttgttcgaccggatctgcaacgccgggaggttcagcgaggacgaggttcagcgatgctcgaatcgactctaatcaactccatttcttggccaggtatttcttccagcagctcatctgcggcgtgagctactgccacttcatgcaaatttgccaccgggatttgaagctggagaacacgctgctggacggcagcccggcgccccgcctcaagatctgcgacttcggttactccaagtcgcagtcgtcgctgctgcactcgaagcccaagtcgacggtcgggacgccggcgtacatcgcgccggaggtgctatcccgccgggagtacgacggcaaggccgatgtgtggtcttgtggagtgactctttatgtgatgcttgttggtgcttacccctttgaggaccctgatgaccccaagaatttcagaaagaccattgggcagtacaaaatacccgagtacgtccatgtatcccaggactgcaggcaactcctttctagaatttttgttgcaaaccctgcaaagagaataacaataagggagatcaggaaccacccatggttcctgaagaacctgccaagagagctcacagaagctgcacaggcaatgtactacaagaaggataacagtgccccgacctactccgtccagtcggtcgaggagatcatgaagattgtcgaggaagcgcggacgccgcctcggtcctccacccccgtggccggctttggctggcaagaggaggatgagcaggaggacaacagcaagaagccagaggaagaacaggaggaagaggaagatgctgaggatgagtacgacaagcaggtgaaacaagtccatgccagtggtgagtttcagctcagctga

SEQ ID NO: 1308 - DNA, 988 bp, Oryza sativa
atgtcctttctattcaagtcaagcaatggtgctacaacagagaaaaacttgaccctagaagagcagcaggagaagagataaatgacttgcgtaaggagcttggtgaacactcatcagaagaaatacaagatttcctttcagatgcctcgtgcctgagatttcttcgagcaagaaactggaacgtgcagaaagcaagtaaaatgatgaagtcagctgtaaagtggcgggtgtcatatatgccacaaaagattaactggggatgatgttgcacatgaagcagagacaggaaagatatatagggctgactacaaggacaaacatggaagaactgttcttgtcctgaggccaggcttagagagaacactacttcaggaaagggacagatcaaatatcttgtttactgtctggagaaagcaattatgagcctgacggaagatcaagagaagatggtctggctgacagacttccagagttggacattggggagcacaccgctgaaagtgacccgagagactgtgaacgtcttgcaagactgttaccctgagaggcttgggttagcaatcctttacaatcctcctaggatatttgagtccttctggaagagatagtgaagccatttttggaccatgagacctacaagaaggtgaaatttgtgtactccagcgataaagagagccagaagataatggctgacgtctttgacttggacaagctcgactcagcattcggaggaaggaatccagctaccttcgaatacaatagctatgctgagcgtatgagagccgatgacattaagatgggttcttcattcaaatcaaacggcatcaccctgcctcaggaccattcacatgtatccgctgacaaggaggctaatggtggcggttcggacgcctcaagtgaggcctccttctatagtggaactgattccccgaatcacgaagagggaggtagcatactggcttgagagctcctccctcttcgtgcttag

SEQ ID NO: 1309 - DNA, 987 bp, Oryza sativa
atgaatccggacaacttcacgcacaagaccaacgaggcgctcgtggcggcgcacgagatagcgtcggaggcggggcacgcgcagctgacgccgctgcacctggtggcggcgctggcggcggacaagggcgggatactccggcaggcgatctcgcaggcgtccggcggggacgccggcgcgccggactcgttcgagcgcgtgggacgccacctgcctgacaaagcgatcgacctcgtcgacgaggcctgcgcgaacgtgagggtgcagctggacagccagccagaggagatcgacaacctcgagaggaagaggattcagctggaggtggagcaccacgcgctggagaaggagaaggacaaggcaagcaaggcccggcttgtcgaggtcaagaaagagctggacgatctgagggacaagctgcagccattgacgatgaagtacaggaaggagaaggagaggatcgacgagatcaggaagctgaagcagcgccgcgaggagctccagttcacgctgcaggaggccgagcgccggatggacctcgcccgcgtcgccgacctcaagtgaggaggcacttccgtcctgagctcctgaaccggctcgacgagattgtgatattcgatcccctgtcccacgagcaactcaggaaggtcgcccgtctccagatgaaggacgtcgccgtccggctcgccgagaggggtgtcgccctggccgtcaccgacgccgcgctggacgtcattctgtctctgtcctatgatccggtttatggcgcgaggccgatcaggaggtggatcgagaagagggtggtgacgcagctgtccaagatgctgatccaggaggagatcgacgagaactgcacggtgtacatcgacgcggcgccgcacaaggacgagctggcctacagggtggacaaccgcgggggagcgacgccgcgcaggcggtgaagaagatgaggatcatggaggacgaggacggcatggacgaagagta

SEQ ID NO: 1310 - DNA, 984 bp, Oryza sativa
gagctcgatgccgtggccagcttcagcgagatcgtgccggataccgtcgtgttcgatgacttcgagaaaggtttgcgccgaccgccgccacggtgagctcgtcgctgctgctcggtatcgctggcctcccggatacaaagttcaaggctatagatacagcgttggcagacggtgaatgtaacacaatggagaagcccgaggaccggatgtcctgtttcctaaccaagaatgttggagctgaaatggctcatctagtccctggtcgggtgtcgactgaaatagatgctcggttggcttatgatacccaaggaattatccagagggtgcatgagcttttgaagctatacagtgatcatgatgtcttatctgaacgcctgctgttcaaaattccggctacatggcaaggtatagaggcctcgaggttgcttgaatctgaagggattcaaacacatttaacatttgtgtacagagttttgcccaagcagcagctgcagcacaagccggtgcatctgttgtacagatctttgtgggacgtgttcgggattgggcaaggactcactctggcgacccagagattgatgaagctttgaagaaaggagaagatgctgggcttgctttgtatgcctacattcacaaaaatgggtataaaacaaagttgatggctgctgccatacgcaacaagcaagatgtgtttagcctcctggggactacatcattgcacctctgaagatattgcagtctttggaagaatctgtcactgatactgacgtgaagtatggttatgtcccaaggctgactcctgctcttggcaaaacgtacaacttcactgaagaggagcttgtgaagtgggaccaattgagtctagcagctgcaatggggccagctgcggaagaactacttgcttctgggttggaaggatatgtgaaccaagcacgccgagtggaggaactcttcgggaagatctggcctcctccgaatgtttga

SEQ ID NO: 1311 - DNA, 980 bp, Oryza sativa
atgacgacggacggcgtcggtggcgaggaaacaggaagccggcggcagagcgcggccgaggagaagaaggaggcagcgaggaggcagtcgcggcggcggggcagcacgacaccgagagggcgtggccagggaaggagggagggagaggtggcgcccggagctcctcgtcacgcgttcacgcttgcaccggctcctctggtgctcggcgacggacggcgacgacgagagcgggacgggcggcaacaaagcggcgacggtggttcggcaacaatggcgcggtgggtgtgagggcggaggcgatgtcggtttgggaggggagaaccgaccttggtggtcaagcgcttggctggcggcagcggcggtttcgtgggcggtgcgaaagcggcgacggtgtggatgcgttgggcggtggaggacggtggatcgagcggcggaaactgaaacgcgagcgcgggctggtagcgtggagcggtcaagagcacaagcgaccaaggggtggagacagggcgccattgcccgggaggggaaaaaggaagggaggacggtggaaagggggacttgccccttccggtttgggagaaggaggtgggagagggagtgctctgcctccgggatttggacggacgcgggtagagcggcttgggcacgcgctgcagagctcgcggcaggcagcggggccgagcggcagcgcggcgcaggcgcggacggcggcggcgaccgggtggtcggccacgatcagcgcgtgcgtgggaaccaaaggcggtggcgggttcaaaaggcggcggcgggaatcggcgccggggagagaggaagcagagagggcgagagtgagagagagggcggcgctctctctcggctcaggcacgacgcgcgtgctcagcacgtgcgaaggggaggggaaacgggctgagaggagggatgggccgagggaaaggaattcggcccacaaaaacagagggacgcaaaatagacttttatag

SEQ ID NO: 1312 - DNA, 975 bp, Oryza sativa
atggcggccgtgcagcgactcctgcgggcgtccgcctccggtggcgcggcggcggcggcggcggcggcgaggaggcgcatgtccacggcggtggcgccggagcagacgcctgcggccgcggcgttcccgttcgcggcggcggcggggagggcgaggcagcgggtggcggaggagaggaacgtgcagtgggtgttcctcgggtgccccggcgtgggcaaggggacttatgccagccgcctctcccgcctcctcggcgtgccccacatcgccaccggggatctcgtccgcgacgagctcgcttcctccggccccctatctgtgcaggttaggccctccgtccatcgcttttcagcccggatcagaccatcctgcaagtcactgatctggatttggttttttcgttcgagtggatcgctggctgaaattgttaatcaggggaaattattttctgatgaaattatcatcaatctgttatctaaacgtcttaagaaaggagaagagcagggggaatcgggatttattctggatggttttccacgtactgtaaaacaagcgggaaattcttgatggagttactgacattgatatggtggtcaatctaaagttgagagaggatgtcctagttgagaagtgccttggcagacgtatttgtggccaatgtggaaagaacttcaatttggcctgcattgatgtgaagggtgaaaatgggctgccaccaatctacatggcaccactattgcccccaaataactgtatgtcaaagcttatcaccagagctgatgataccgaagaggtcgtgagaaatcgtcttcagatatataatgacatgagagccaacctgttgagggtttctaccggcaacaggggaagcttttagaatttgatttgcctggaggaatccctgagtcttggccaaagctgctccatgttctaaatctcgaggaccaagaagagatgaagctggccactgcgtaa

SEQ ID NO: 1313 - DNA, 960 bp, Oryza sativa
atgccggaggacgccgccgtgagggccggggagtcgcggccgcggccgcggtacccagagcgatccgtgcacctcctgtccttcgccatggtggggttgatcccgccattctctaggttcttccacgaggttttggatttctacgaaatccatgccttgcatctcgcacccaacgccgtgatgacgctggccatcttcgcgcacttgtgcgagattccgccgcatggttggcggtttcagagttgggcgaggagtacgacgcagtgcaggaccgcctcatgggcctgcgaaaccagggcctaacgggggcgatggtcttcggcgattacttccgtcactgaatcgcacctctccaggagcggtcccgtggcgcgttggagtacactgggcccaacgatcccatgcgcacccacgtgggtgtgcgttgggactggggcgaggaggacgcgaagacggtgatccggcgggtgctgggtctggacaccaccgagcaaacgctgattccagatgggatcctccccctctgcagtgaccgcgaccgggagagtatcctagctgtgatgtcggtcgtcggcgccggcaggggtcggtcccgccggagtggcgctggtggtggcggcagcagcgccggcagcagcagcgcaaccacaggtggcggttggatcggcggctccggcgggggcggcggctccagggcgcccggtccaagccgtgggcccggtggagattcggccagtgacctgaaagggaagcgaaagatgtccgaatcccgaacgccttctcccccgcatggtgggggcgccgagtgaacgacggaccgaccaccggcgggccacaagcgcccgctgtgtccgagatcgagcggaagaagaagcggctctggaagatagggcaaacagagccgtgccgggggagtttcatcgagcccccgaagtggaccttcaagtgttccccacgcag

SEQ ID NO: 1314 - DNA, 939 bp, Oryza sativa
atggtggaatggattcattgttgtgaactgatcgatgcttctaatctgcagaggttcttctttggtggtcggctaatatttggacctgatgctaaatccctgcttttttctgttgcactgatttttgtcccggttgcggtcttctgtgcgtttgtagcacggaatcttcgtcatcaatttcctgcatacaatgcagggtacgcaattcttgccgtagcaatagtgttggcaatctatgtgagtattttggtctatttcttgtaggtgctttcgttacttttcatcaccgcagctcaggatcctggtattgtacctcgtgcatctcatccaccagaagaagagtttcactatgacaatttatctcttgcggacacacctggcagactagtcttccctcgtgtaaaagatgttatggtaaatggggtgcctgtgaaggtcaagtactgtgaaacttgcatggtttttcggcctcctcggtgttcgcactgttccatttgcaacaattgcgtggaacggtttgaccatcattgcccctgggtagggcaatgcattggaaagcgcaattaccgatactttttcctatttgtttcttcggcgagtatcctatgcatttatgtatttgctatgtcagcattgtacataaagattctcatggatggagactatcccacagtgtggaaggctttgaaacactcccctgcttctcttgcattactaatatattgtttcatctgtctttggtttgttggtggactcacaggatttcatacatatctcatcagcacaaaccagcggacaaaagtggaagatgaccttgacataggtggtgatctcagtcggggtgaaagaagtcgaagttcggacctcgcatcagaaggcatcacaacaagtgctccagtctcccaacctgcattcccatttcggagagaagctctttag

SEQ ID NO: 1315 - DNA, 936 bp, Oryza sativa
  N_region (49)..(49): n = any nucleotide
atggagttcatcacgccaatcgtgaggccggcatcggcggcggcgggcngcggcaaggtgcaggagagtggtgggaggagcttggcggcggtggagaaggagcacatgttcgacaaggtggtgacgccgagcgacgtggggaagctgaaccggctggtgatcccgaagcagcacgcggagaagtacttcccgctggacgcggcgtccaacgagaaggggctcctgctcagcttcgaggaccgcacggggaagccatggcggttccgctactcctactggaacagcagccagagctacgtgatgaccaaggggtggagccgcttcgtcaaggagaagcgactcgacgccggggacaccgtctccttcggccgcggcgtcggcgaggccgcgcgcgggaggctcttcatcgactggcgccgccgccccgacgtcgtcgccgcgctccagccgcccacgcaccgcttcgcccaccacctcccttcctccatccccttcgctccctgggcgcaccaccacggacacggagccgccgccgccgccgccgccgccgccggcgccaggtttctcctgcctccctcctcgactcccatctacgaccaccaccgccgacacgcccacgccgtcgggtacgacgcgtacgccgcggccaccagcaggcaggtgctgttctaccggccgttgccgccgcagcagcagcatcatcccgcggtggtgctggagtcggtgccggtgcgcatgacggcggggcacgcggagccgccgtcggctccgtcgaagcgagttcggctgttcggggtgaacctcgactgcgcgaattccgaacaagaccacgccggcgtggtcgggaagacggcgccgccgccgctgccatcgccgccgtcatcatcgtcatcttcctccgggaaagcgaggtgctccttgaaccttgacttgtga

SEQ ID NO: 1316 - DNA, 935 bp, Oryza sativa
atgaagtggcaccctgacaagaaccccaacaacaagaaggaggcggagaacaagttcaagcagatctccgaggcgtacgaggtgctgagcgacccgcagaagcgagcggtgtacgaccagtacggcgaggaggggctcaaggggcaggtcccgccgccgggcgccggcggggccggcccgggaggcgcgacgttcttctccaccggcggcgacgggcccaacgtgttccggttcaacccgcgcaacgcggaggacatcttcgcggagttcttcggctcgtccagcccgttcggcggcatgggcggtggcatgggcggcggcatggggggagggcccttcggctcggcgttcggcggcggcgccgacgggcaccacgggatgcacggcggtggcgccgggagggcgttgaaggcgccggcgatcgagaggaagctgccgtgcagcctggaggagctctacaaaggcaccaccaagaagatgaagatttccagggaaatcgctgacgccagtgggaggagatcctgaccatcgatgtgaagcctgggtggaagaagggcaccaagatcaccttcccggagaaaggaaacgagcagccgaacgtgatcccggccgacctcgtcttcatcatcgacgagaagccgcacccggtgttcacccgtgacggcaacgacctcgtcgtgacgcagaagataccgctcgccgaggccctgaccggccacaccgtccacctgactacgctcgacggccgcagcctgacgatcccgatcacctccgtcatcaacccgggctacgaggaggtcgtccgcggcgagggcatgcccatccccaaggacccctccaagaagggcaatctcagggtcaagttcgacatcaagttcccggcgaggctcaccgccgaccagaagtccggcgtcaagcggctgctggggcagtag

SEQ ID NO: 1317 - DNA, 925 bp, Oryza sativa
atgcgaccatgctccatttttgtgtgcaacacgttttatttggctcgacgtacttctggtgtcggacggaccacgcgcgcggccgaattatctacaacggtgtcgcagggtcgtagccctgggaacggccgtccaccctctgttaccttttcagccgcacccgttccctcagctagacgcgcggcacttcgctgggacacgttcctcaccatctttttactgaggcaccgagccgggagacacattgcgagggtgagtgtcccttggccaccactcctacacctagagttcctcttccaccccttgcctcgtcgtcgtcctcacgactcgtgagagggcggcggcgctaggaccggcggtggaggtgacgccgggggttggcggcgtgccagaactgggagagagaggcggtgaagaggaggttcgtcggcgacggcgacgatgagctctgtcggcgacggctggaggaagagaggggagcgggaggagggcaactgggtgctgccctcgccggcgagccgccccgttgctgcccgaggccagatctagcaagcccagactggatccggccaccccgccgccactcctctcgcgtggtcgctgcttgccgccactgctcgatgtcgggggaaagggaggcaccgctgccactccgctgcactgctcgatgccaccgccgtcattcgtcgcgccgctcaacgccgcgcgccgtccgccgccgcgacctgcgaccacccagagagagaggcaacgacgagtggaaggagagttgcggagtcggtggcgggcgcgacggaggcggcgacagggagaggggcagagttggcagagagagagaggggcgagcggcgatctggatgacgtggctggggtggatgattttctcgagggcatcggtgggctggtgggaggggtatggaagtaa

SEQ ID NO: 1318 - DNA, 924 bp, Oryza sativa
atgtactctagtatttttggtggaattaccacaaatccttctgcaatggtgataccaatcgatgatcacatggtccacagaggacatggtgtttttgatactgcagctattatgaatggctctatgagttagagcagcatcttgaccgcttcctgaagtctgcatcaatggccaaaatcacgctgccttttgatcggtcaacaattcggagcatacttattcaaactgtgagtgcatcaaaatgcacccaaggatcactcaggtactggctatctgttggaccaggagacttccagctatcttcagctggttgtgcaaactcagccctgtatgctattgtcattgaaagtccatcgttaccagtaccagcaggatgcaaggtgatcacatcatcgataccgataaaatctcaacagtttgcggtcatgaaaagtgtaaactacctgccaaatgcactcactaaagtggaaggcgaagaaaatggtggattcaccggcatatggttggatgatgagggtttcgtagcagagggttccaacatgaatgttggcttcgtgacacaaagcaaggagctcctcatgccccgtttcgacaagatccttagcgggtgcacggcaaaacgggttctgacccttgccaagcagctagtggcagatggaaggctcagcgggatcagttcaaggaatgtgagtgtccaggaagggaaggcggctgatgagatgatgctcattggtagtggtattcttgtcaaacctgttgttcagtgggatgatcagataattggctcagggcaaagaaggcccaattgctcagatgcttttcaacctcattcttgaggacatgagatccggtccaccttcagtccgcatccctgtctcctattgaaactgctgacatctcaccgatctttctacagatatgtga

SEQ ID NO: 1319 - DNA, 906 bp, Oryza sativa
atggatgctccagttattacactcctcgtcttcctcgtcgccgtcgctgcggcaactgcggcggcggagatgccgcggatggagcacccgcgcaagggcgacgggtcgctgagcctcctcgccgtcggcgactgggggcgccgcggcgcgtacaaccagtcgatggtcgccgcgcagatgggaatagtaggggagaagatggacatcgacttcgtcatctccaccggcgacaacttctacaagaacggcctcaccggcgtcgatgataaggccttcgaagaatccttctccgacatctacaccgccaagagcctccacaagccatggtacaccgttcttggcaaccatgactacaggggcgacgccctcgcccagctgagccctgttcttcgcaaggtcgacagccgctggatctgcatcaagtccttcgtcgttagcgcagagatcgcggatttcttcttcgtggacacgacgccgttcgtgctcaagtactggactgatcccaagaacagcaagtacgactggagaggggtttctccccgtgaaacctacattgcaaatgtcctcaaggatctggaggatgcactggagcagtccaaagcgccgtggaagatcgtggtcggacaccacgccatcaggagcgtcagccagcacggcgataccaaggagctcctggagcatctccttccaatcctcaaacaagattcagtacctgacgagcgggccgggtcgaaggcgtggcgcggggtgcagacggcgaacacggacaaggtggagttcttctacgacgggcagggattcatgtcgctgcggctgacggcggcggaggctagcctcgccttctacgacgtcgccggcaagatcctccacacatggatggtcgccaaaccagccaccgggtactga

SEQ ID NO: 1320 - DNA, 889 bp, Oryza sativa
ggcgaggccgcgaagccggccctgcctgcgctgaagagcgccggcgagcaggcgctgaagctcgcctcgccggtggtctccggcgcctccaagcaagccacggaggcgctccagggcgccggcgtcgaccccgcccccgttctgtccgccgctaagaccgtcgcggacgcggcgcagcagggcacgaaggtcatcgacgccgcgaagcccatcgcgtcggcgacggtggagaccatcgggtcgctgggctccgcggactacgtcgtggtcgccggagcggcgttcctcgcgtacctgctcctgccgccggcatggtccctgctttctttcactctccgcggctacaaagggtgacctgaccgctgcacaagctctggacatggtgacctcgcaagattacgtgctgatcgatgtgaggaccgagaaggacaaggccaaaaccggcgtgccacagctcccctcgaacgcgaagaacaagctcatctctatcccgctggaagagcttccaagcaagacgaagagcatggtgcgcaacgcgaaacaagccgaggcggagatcgccgcgctgaagatctcctacctcaagaggatcggcaagggctccaacgtcatcatcatggactcgtattgcgacagctcgaagatcgtggcgaagacgctcaacagcgtcggattcaagaactgctgggtcatggccggcggcttctccggcaggaaagggtgggcgcagagccggctcgggacggactcgtacaacctgtcggtcgtcgaagtcgtcacgccgtcgcgggtaattcctgcggccgctgatcggctcgtgacggcttcgtcgtcggcttcacggacgaccacgagtcgtaagcttcttcccggcagcgtggacggctga

SEQ ID NO: 1321 - DNA, 881 bp, Oryza sativa
atgcagacggaggcgagagtggggatggccgccgcaacgatggacagcggcgccgccgccgcggccgctcggagctccttgccggcggcgtcgcgggcgccgtcagcaagacttgtaccgcgcctctcgcccgcctcactattctattccagcaggtgcaaggaatgcattcagatgtggctaccatgcggaagactagcatatggcgtgaggcatcccgcattgtctacgaagaaggcttccgagcattctggaaaggaaatcttgtaactattgcacaccggttaccttactcctcaattagcttttacacatatgagaggtacaagaacggtggtttgtctggaataacagcagcttcgatgacatatcccttggacttagtacggactcgtcttgctgctcagtactacaggggcatatctcatgctctttacgccatctgcagagacgagggtgtcaaggggctctacaagggccttggtgccactttgctgggagtaggtcccagcatagcaataagcttctgtgtctatgagacattgcgatctcattggcaaatagagagaccaggccatatgattcccctgttctgatcagtttggcttgtggaagtctttcaggaattgcatcctcaactaacatttccgttggatctagtaagacgccgcatgcagttggaaggcgcagctggaagggcccgtgtctaccaaactggactttttggaacatttgggcatatcgttcgcacagaaagtttaagaggattgtatagaggaattttgcccgagtactgcaaagtggtcccaagtgttggcattgtttttatgacgtatgagacgctgaagtccatcctcacggaactggcatcagatgattag

SEQ ID NO: 1322 - DNA, 869 bp, Oryza sativa
atgaagtttgccaagaagtacgagaagtacatgaaggggatggatgaggagctcccgggcgtggggctgaagcggctcaagaaattgctcaagaaatgccgcgtatgtgatgggagttttttcccatctcttctcaatgagatgtcagccgttattggctgcttcaatgaaaaggccaagaagcttctcgagttgcacctggcatcaggtttcaagaaatatacaatgtggttcaccagcaagggtcacaagagccatggggcattgatacagcaaggcaaagacttggttacttatgcaattataaatgccgtggccatgagatacattactcgaagcaagggcaggaattcaaagctcaagcccagagtctgcatattgaaatacttcaatccccatggctctgtgagctgatggctttctacatgaacttgagaagaagcaagaagaacaacggtgctatggagctctttggggattgttctctcgtattcgatgatgacaaaccaacaatttcatgcaacctctttgactctatgcgtgtcgacattagcttgacatgttcgatttgcttggataccgtgtttgatccagttgctctttcctgtggtcacatatattgctacttgtgcagctgttctgctgcatccgttacgatcgttgatgggctgaagtctgccgagcgcaaatcaaagtgcccactgtgccgacaggctgtacacttggatgagctgaacatgctactaagctatagagttgtccagagtactgggagaagagaatacagatggagcgggttgaacgtgttcgtctggctaaggaacactgggagtcacagtgcagggcattcttgggcatgtgattctaaa

SEQ ID NO: 1323 - DNA, 866 bp, Oryza sativa
ctccacttcgtcaagtaccagggccttgggaacgacttcatcatggtggtggacaatagggattcggccgtgccgaaggtgacgccggaggaggcggcgaagctgtgcgacaggaacttcggcgtcggcgccgacggtgtgatcttcgtcatgccgggggtcaatggcgcggactacaccatgaggatcttcaactcggacggcagtgagccggagatgtgtggcaatggagtccgttgctttgcccggtttatagctgagcttgaaaacctacagggaacacatagagcttcaaaattcacactggcgctgggctaatcattcctgaaatacaaaatgatggcaagcaggtaaaggttgatatgggccagcccattctctctggaccagatattccaacaaaactgccatccaccaagaatgaagccgttgtccaagctgatttggcagttgatggctcaacatggcaagtaacctgtgttagcatgggcaatccacattgtgtcacatttggcacaaaggagctcaagttgcatgttgatgatttaaagcttagtgatattgggcctaaattcgagcatcatgaaatgtttcctgcccgcaccaacacaggaatttgtagaggtcctgtctcgctcacacctcaaaatgagagtctgggagcgtggtgctgaggtgcgacgcttgcttgtggaaccggtgcttgtgcagtagttgttgcagctgtcctcgagggtcgagctgaacggaaatgtgtagttgatttgcctggtggaccattggaaatcgaatggagggaggatgacaatcatatttacatgactggtcctgcagaggctgtcttctatggatctgctgttcactag

SEQ ID NO: 1324 - DNA, 862 bp, Oryza sativa
  N_region (249)..(249): n = any nucleotide
  N_region (251)..(251): n = any nucleotide
ccgctcatgcgcctccagctcggcggcgtccccgtcgtcgtcgcgtcgtccgcggacgccgcgcgcgaggtgacgcgcacgcacgacctcgacttcgcgtcgcggccgtggccgcccaccgtgcgccggctgcgcccccaccgcgagggcgtggtgttcgccccctacggcgccatgtggcggcagctccgcaaggtgtgcgtcgtggagatgctcagcgcgcggcgcttgcggtcgttccgccgcgtncncaaggaggaggccgcccgcctctcgttccgccgcgtgcgtgaggaggaggccgccaacttcgccgcggccgtcgccgcctcgttgtcgtcgccaccggcccgccgcgacgccgtgaaccggcggcgccatggaggaggacctgctggacactctcctcaggatccagaagtatctaaagcttatcatcaaggagactctaaggttgcatcctgtggtaccattgcttcttccaagagagtgtctccatgcgtgcaaggtcatgggctacgacgtgcctaaaggcaccaccgtgtttgtgaacatatgggcaattaacagagaccccaagcattgggatgaccctgaggtgttcaagccagagcggttcgacttcaaaggtgcaaactttgagtatattccgtttggtgctggtaggaggagttgccccggggtgacattcgggcatgccaccgtggagctcatgcttgctacgctcttataccactttaaatgggagcttcttgaaggagttgcgccgaacgaactagacatgacggaggagataggcatcaacgtgggaaggaagaatccactttggttgtgtcccattgttcgtgtgcccttgcagtga

SEQ ID NO: 1325 - DNA, 862 bp, Oryza sativa
  N_region (33)..(33): n = any nucleotide
  N_region (130)..(130): n = any nucleotide
  N_region (136)..(136): n = any nucleotide
  N_region (153)..(153): n = any nucleotide
gtcatcggcagcggcaactggggcagcgtcgcntcccgcctcatcgcttctaacaccgctaagttgccctcctttcatggtagttcgtagatgaagtaaggatgtgggtgtttgaagaaatattaccaancaggcnagaagctctctgagtcnttaaccaagccaatgagaattgcaaatacttacctggtataaagctcggagctaatgtaattgctgatcctgatttggagaatgcaggtgaaagatgcaaatatgcttgtttttgtgactccccatcaatttgtggagggtatatgtaagaagcttgtgggtaaactaaggccaggaactgagggtatctccctcatcaagggcatggaggtcaagatggaaggaccatgcatgatatctaaattaattacaaacatacttggaatcaattgctgtgtccttatgggtgctaacattgcaaatgagagattgctgttgagaaattcagtgaagcgacaattggatataagaaagacaaggaagtggcaacccgatgggctaaactttttacaacaccttacttcctggtttctgttgtagaggatattgaaggagttgaattatgtggaacactgaaaaatgtcgtggccattgcagcaggttttacatgcaggtcttgttgatggtttggatatggggaacaataccaaggctgcaataatgaggattggtttgcgggaaatgcgtgctttctctaagcttctatcccctacagtcagggacaacactttctttgagagctgtggtgtggctgacctaataactacatgccgtatggtggaagaaacagaagagtcgctgaggcctttgcacgaaatggtggcaaaag

SEQ ID NO: 1326 - DNA, 858 bp, Oryza sativa
  N_region (18)..(18): n = any nucleotide
  N_region (225)..(225): n = any nucleotide
  N_region (228)..(228): n = any nucleotide
gggctggggctggggctnccgctggacgcggccaagaacgcggcggcgaggtaccgggaggccgtggggctgcaggtggaggcgttctggaggcgcaactacatgctgctcgtcggcgccggggcggtcgtcgtctgcatcgcgctgtggagggtcatgttcggcatcgccagcaccttcgtcgggctctccgagggcatggccaagtacggcttcctcgccctngcnaccgccatggtggcgttcgccggcatgtacacacgctcaagattcaccataaatcctgataaggtttatagaatagcaatgacaaagctcaacacatctgctgcaatccttgaagtcatgggtgcacccttagccggtactgatgtcagagcatatgtcatgtctggaggggggcctaaactcaaggacttcaaatttaggcttggtggcaaaaggtgctttctgatcttccccattaaaggatcagaaagaaaaggccttgtaagtgttgaggtcaagaagaaaaagggacagcagtacgacatgaagctactcgctgttgacataccaatggcgtcaggacctgatcagcggttattccttgtcggtgacgagcaggagtacaaggtgggtgggggtttgatatctgagctgcgggaccctatagtaaaagctatggctgcagagaaggagtttgattatcttgatgaaagagaggatgcggaggatgaagcgagggagcgtgaggaggctgagcgaagacaacaggaagaggaagctgaagcattgaggcgtgaggaggaaagattacgtgaggagtacgaagaaaggaagcggcaagaagctgagaacctggagaaaaccacttga

SEQ ID NO: 1327 - DNA, 857 bp, Oryza sativa
atggcggagtacgcgacggcgaagacgtcggtgtggtgggacatcgagaactgccaggtcccccgcgcctgcgaccccaacctcatcgcccagaacatgagctccgccctcgccgccgccggctacaccggccccgtctccatctccgcctacggcgacatcggccgcatcggcaacgccgtcacccacgccctctccagcaccggcatctccctcaaccacgtccccgccggcaggtattaaagatgcaagtgataagaagatcttagttgacatgctgttctgggctattgacaaccctccaccagcaaactatttgttaaattctggtgatcgggatttctctaatgcccttcataagcttacaatgagacggtacaatattctactagcacagcctcaaggtcttataagaaatatattaggtgctttggaagtattgaagacagagaagattccaccaatagaacagcatatttcagattgtatacgttatggagaagctaacttaccaaattttgatgttaagaaggctcttgaacttgccattcagcatcaagccatcgtcttgaaaatgttaggtcctatgtcattctatttggggaagaaccaaaatctttggaaatgtgtgaatataatggatataaatgcaaaatatccaaaagtgcaggtatcaagctgcaattgtcttaaagaatcaatgcttgaaacatcttgcccttggtgaagttcttcagattttgtatatcataatcaatacaaagaagtggtttgtgccgcattcttcagggtggcagccgttgtcgtttaacattatagtggttgatgccacgacaggtgctggtgggaaagcttag

SEQ ID NO: 1328 - DNA, 854 bp, Oryza sativa
tacacctacacatccattatcttgggtctcgcaatgcacggccaaggcgaggacgccctgtctctattcgccggcaggcaatgagccggcgtgacgccgaacaaggtgctgtcgcgccggactcgtcgaggaggggctccagcaactcaacgccaagccagaaccacgcatcgagcattacggctgcgtcgtcgacatgctcagccgcgccgggagactagaacgaggcagaggagctcgtcgcggcaatgccaatacaccctgacgcgctcatctggggctcgctgctcgccgcatgccgcgcgcatggcaaagttgagcgcgccgagcgggtgatgcggcggcgcaccaccgacgccgatgcggacgccggcgactacgtgctgatgtcgaacacttacgcgtcgaatggccggcacggcgaggcggtgaaggtgaggaggcagatgaggaggaacgagatcgacaaggtccccggctgcagcctcatcgagatcgacggcgtcgtcaacgaattcgaagcaatcccagcaaattccatccgataaaaacacaacaagattcatcaaagaacaggttatccgagtggtcgtggttttcggtgccggagatggcgccctcgtcggcggggacgaagacgccggtctcatggtcgggcacccacgcgtcctccgggcccgccctccaccgtctcctcctccgggagcgcctccacgttcttgcggttcagtgccgcctccaccaaggttctgggattcaattgcagaaaaatttcgggccttaccgaaatgggcgaaattcggaaatttcggaattttcggacaaaatttggccgaatttgttgcaaaatttga

SEQ ID NO: 1329 - DNA, 840 bp, Oryza sativa
tcgtgcccccacacctccccccaaaacggtaaggctgagcgcatgttacgttcccttaataacatagttcgctccctcctgtttcaggctagcctcctaccaccttcttgggtagaagccctccacacagccacccacctcattaaccgccatcccaccaagactctccaacaccacacaccgttcttcgccctttatggtgcccatccctcctacacacaccttagagttttcggctacaagtgttaccccaacctctccgccaccactccccacaaactcgcgcctcgctccgtcatgtgtgtgtttttaggatatcctaaggatcacaaagggtaccggtgttttgatccttcctccaacagggtctatatttcgtgtcatgtggtgtttgatgagatggaggaagagtacaatgctctcttggccaaccgcacttgggagctcgtcccgcgtcctcatggcgccaacatcgtcaccggcaagtggatctttcgacacaagtttcaggcggatggttccctcgaccgctacaaggcacgatgggttctctgcggcttcactcagcgccccggcatcgacttcgatgagaccttcagtccggttgtcaagccagccactgtccgcaccgttctgagcttggcagtctctcaggactagcccattcaccagcttgatgtcaagaatgcctttttgcatgggactttacaggagacagtgttttgctctcagcctgctgggtttgtcgatgcttccaaacctgactttgtatgccgtctaaacaagtctctttatggtttgaagcaagctccccgcgcttggtacaaccgttttgccagc

SEQ ID NO: 1330 - DNA, 837 bp, Oryza sativa
atggaggtggttctgcatgagggggatgccaaagattgggtttacaaaggagaaggtgcagcgaatctaatcctcagctacactggctcgtcaccttctatgttgggtgccaatcatgttgatggcgggaaatgtggatttcttccgtcatctgaatacatatcgaaggagaattctatcaagaaacaagtaacacggtataagatgcatcagcacctaaaatttcatctgggagagatatcgaagacaagtgaatacgatcccctagatttattttctggatcaaaagaaagaatacatatggctatcaagtcatttttttcaactcctcagaacaactttagaatttttgtggatggttctttagtttttggtggcatgggaggtggcgcagatagtgttcatcctaatgaaacagagaaatgtcttgaagatctgagcaaggttactggcttacaactatctgactttattgagctcctgtcagaggcaatctttaagtctggagtgttgggtaaacttttagccactcaaaaactggatgatcatgacatcgaaggggcgattcatctgtactataacatcatttctcagccttgtttgcattctcttccattggacaagagtgagaagattgtcagggactttcttatctctgctactgcaaaagattgtagcctaatgatcagctttcgatttattgatctggatgtgaaacccttggataagatggtacattactttaaattggatcaaaagatagtcaatttctacactagaaatggagaagttgggggagatccacgtgatcctccaaagggatgtggccctaggtga

SEQ ID NO: 1331 - DNA, 837 bp, Oryza sativa
atggcacgtgggccaatggatctttggaacgagtgggcgacccagatcctggtgctcttgagcttcactctgcagatcatcctactccagcttgccgggattcgtcgccgagaagctccagctgtgctgaggcttctcctgtggttggcataccagctggctgactccactgcgatctacgccatctgccacctctccctcggtggcacaccgcgtgagcaccagctggtggcattctgggcaccattccttctgttgcaccttggtggcccggacaacatcaccgcatattccctcgaggacagtaagctctggctccgacaccttctcactgtcgttgtgcaggtcttgggagctgcatatgtcctctacaaacaattcaggggcagtggaagcccactcctactcgccaccattttgatgtttgttgtaggtgttgtcaagtatggggaaaggacatgggcactcatgtccggcaacatcgacaccatccggagtacactcaagaaggagccgcataccaagtgccattcccacattgagtataagccccaccagatgagcttcagtaatgaagggcactttaggagggaggctaatgaagaggaattcctgatctgtaatgctcacgccctgttccacatttgcaagtatgcggttgtcgatgattcttcatatgacaatactagggatacccgtgccagtgacgccgcaatacttcgtggccttacggacgaacagaagtatgcagtgacggaaattgagctctccctctctccctcatgtacgatatgttgtacaccaaggttaagtgactctcaatttaaaacttattaa

SEQ ID NO: 1332 - DNA, 836 bp, Oryza sativa
atgcccacctgcccctgcctggcccggactccaccccgacctcctcggcatccaccgtggctcagaaccagctgcaccagtgccagatcttcctcatgcagcaggcccaggcgcaggcgcaggcgcaggggcaagggtacacaccgacgccgcagcagctgtcgcagcaggccatgtccttcttcccctccaacatcgatgcccacctgcccctgcctggcaggctactaccctaccatgtggttgctgactatgaggctgaagaagatgacagaatccttgacagtgatacaactggacagattccttcgcgcctgcagcaatgggatcataacattctggtcaaaattgctgagttcacaactacttttgagaaacaagttttggcgtacaatataatgaccaagaaaagagccatcggcgagttcagatcagaggagcggctcatgctggagcaggctttgttaatggaggaaaagcaagctatgatggggctaagagcagagatagaatcaagggagaaagcaggtcgtgaggctgctgaagctaagatgcgtatggcaatggctgaacaagctcgagcggaggcccaagcgcactcggagatgataggtcatggccctttgagggcccatgctgcagcgtcccaaggcgaagatggccctagtcatgagatgatgcaagagcaaggtgaagatggatggggaaatgctcaaagggacgatgaagatccatctgaagatttccttaatgatgaaaatgaacctgagaatgggaactctgatatgcaagaggactggcgcagatcaggagaactcgatctgaactctaggtaa

SEQ ID NO: 1333 - DNA, 822 bp, Oryza sativa
ctgcaacagcatccccactaccatggctggggtggaaacttctcgtatggtccacctacccagccgccggcgccggcgccgccgtatgttgagcaccagaaggctgtcaccatccgtaacgatgtgaatctcaagaaggagactctccgggttgagcctgatgacgagtgccctggacgattcctcatcaccttcacctttgatgccaccgtcgctggaaggtttacttctttgcaaaggaggagctgaactgtaaccttacagcaacgaaagaagatttactcaagccagtcactgtaacatttaaagagggtcttggtcaaaaatttaggcaaccttcagggacaggaattgacttctcgttgtttgaagatgctgaattatttaaggagggagagatggatgtatatccacttgcagtgaaggctgaaacaacattctcaattggtcaattctcagaaggggaagaacaaaagtcacaaactccaaattcacagatcacccaggctgtatttgagaggaaggagaatggggattaccatgttcgtgttgttaagcagatcctttgggtcaatggcacgagatatgagttgcaggagatttatggaattggaaactctgttgaaggtgacaccgaagggaatgatcctggcaaagagtgtgttatctgcctatcggagccaagggatacaactgtcctcccatgtagacatatgtgtatgtgcagcgagtgcgcaaaggttctgaggtaccagaccaaccgatgtcccatctgcaggcaacctgtggagcgtttgctcgagatcaaagtcaacaacaaag

SEQ ID NO: 1334 - DNA, 820 bp, Oryza sativa
  N_region (17)..(17): n = any nucleotide
  N_region (27)..(27): n = any nucleotide
  N_region (47)..(47): n = any nucleotide
  N_region (81)..(81): n = any nucleotide
  N_region (99)..(99): n = any nucleotide
  N_region (246)..(246): n = any nucleotide
  N_region (276)..(276): n = any nucleotide
  N_region (314)..(314): n = any nucleotide
acccacggcggcgggcncggcgcggcntgcgacaggggaaaaggggnttcagtggggagctcaccgacgagagaaacggantcggcggcgcggatggantcgcggcgaggcggacgcgacggcggggcggcgcggcaccgagagggcgcggccgggaaagaagagatggagaggcgcgaggatgggggcggcgcggagctcctcgtcgactcctcgtgctcgcaagctccccgacacgcacgacgncagaggagggcgagaacgacgacgaacggngaggcggcagtggtgtgatggaggagaggaagcgaganagctgcttctcccactcttggatgggtgcggcgtggagcggcgggggccatggatgacgtcggcgatgacggcggcggtcggtttgtcatggagcgggggcaaggcggtagcacgtggcgtcggcgacgcaagggctgatggcggcggcgttcggctagtcggccacctcgcgagcgagcgcgcgcgacgcgggggtgcggccggatttcgaacggcggcggcgggaaatcggcgccggtgggggagcttctacgggagagggagagacgagagagagagagagagagagggagcgaggatgagaagagagtgggcgatctctctctcgagcgcggcgcacgcgcaacgcacgtgcggagagaggggaggggaggaacggctgagagaggagatgggccgaggggagggggatcagtcccatccaaaattagaaggaggcaaaatagacttctgcagagagatgatttggaagggatttggatttggaatgaaatttcgaatatga

SEQ ID NO: 1335 - DNA, 810 bp, Oryza sativa
tacaaatctgttgctgagaggggcccctggagctcactttctagatgggctctggaatcttatttgaaaggtgacatagggaaagcattactcctgtattctagaatggcggatcttggatatgaggttgcacaaagcaatgctgcctggattcttgataggtatggcgatgaaagtatttgcatgggagaatctggcttctgtacagatatggaaagacatctccgtgcacatgctctgtggtggcaagcatccgagcagggtaacgaacatgctgccttgttaattggtgacgcctactactatggccgggaggcatatatgcatgcgcaatcacaatctaatgctcaggccatgtttaaccttggttatatgcatgagcatggccatggacttccccttgacttgcacctggcaaaaagatattatgatcaggctgttgaggtggatccagcagctaagctccctgtcatgcttgcactaacaagtttatggataaggaagaactatgatggaagctttttggattcactgccggaggtatatcctgtagttgaggaatgggtggaggatgttcttatggatgaggggaacgcaacaatatttactctcttcgcttgccttgtaactgtcctatatttgcgagagcgtcagaggcgtcaagctgcggccgccaaccctcaacagcctgatggtgcacccatctaatttcaacctttgcatcatgatgctgggattgaagtggacgttaagcttgaggtacatagtcatttattctcagccatatcataccatcaaagttttgtttga

SEQ ID NO: 1336 - DNA, 798 bp, Oryza sativa
ttcaccaagctgtgcaagggcctcgccgtcgtcttgttcctcggccacatcgtgatccggctgttcccttcagctgtcacctacctcgcgcttattccctccagaggacaatcccatttgcttggaacctcgtaacttcaggctatattgagcaaacaattccagggagcatagttggtcttcttgttttgggaaaagtgttggagcctttgtggggtgctaaggaattactaaagttcatttttcttgtcaatctctcaacttcggcttgtgtctttgtaacagctattattttgtactacataacacagcaggagatctacctgggttctatggagttctttcaggatttctggtgggtatcaagcaaattttacctgatcaagagattactcttttcctgctgaatattaaagcaaagagcttcttcatgaaggattcagtgtcatacatcccaatcatattatttggcatctacctgagctggatttacctgcgttacttccaaaagaggctagaagcaggcttaaagggggacccaagtgatgaattctcattctcaagcttcttccctgaatttttgagagaccagttttggacccaatagcatctgtgttccatacacttgtttgtggacgatccgaaagatctgaagccaatgatcaaacactggatgggctgttacctggttcatattctattgaggcaaaccgtagaaggtgtggattctctttcttttcctattcatcctatctagtccatttggggaaaccatcatatataatgctggccatatga

SEQ ID NO: 1337 - DNA, 783 bp, Oryza sativa
atgaaaacgacaaggactactcggattgtatccatattggtttccctagttctacttggacaaggggacacctatgggtataaatacaagacccaccatggaggatcaacacctaacacaatcgacatagaagcctacatacgccaagacacgccgccggatgtcgacttcagggataagcacgctagtaccctacggtgtctccggatactgttaggagagacgaaagcgctatctctgatctcgccgggcacggattcgaggaggaaggctaccctgttgtcgactacgagtcagatcgtcagaccgccatgtcgacaacagttatataggctaccccacatattgtactggtgtgattatcatgaataagagcaataccggcttcggccaataggatcactttaagtggtcgagttacgactactgcctggtcctcgactagcgatgtcccactacttccactttaagtggtcgagttacgactactgtctggtcctcgaccagcgatgtagcgtctctcccactacttccactttaagtgatcgagttacgactactgcctagtcctcgaccagcgatgtagcgtctctcccactacttccacttcaagtggtcgagttacaactactgcctggtcctcgaccagcgatgtagcgtttctcccactatttccacttcaagtggtcgagttacgactactgcctggtcctcgaccagcggtgtagcgatttctcctactacctctacttcaacaaagttgatagcaggtacacaatatcg

SEQ ID NO: 1338 - DNA, 777 bp, Oryza sativa
atggcgattactttgtccaatgtcaactctgaggcaggcctccagaagcttgatgagtacctccttactcgcagctacatcagtggggtaccaggcttcaaaggatgacatgactgttttcacctcacttccttctgctcccgcagcaagctatgtcaatgtcacaaggtggtatgatcacatcagtgctctcctaagatccagcagtggagttaccgcagagggtgaaggtgtgaaggttgagtcaactgcttgttctgtgtctccaactgctgaccaaaagcaggcaccagcagctgatgaagaagatgatgacgatgttgatctgtttggtgaggagactgaagaggagaagaaagcagcagaagaacgggccgcagctgtcaaggcttctggaaagaagaaagaatctgggaaatcatcggttctgctagatgtaaagccatgggatgacgaaacagacatggcaaagcttgaggaagctgtgaggaatgtgaagatggagggcctgctctggggtgcattgcagccaaacttgtaccagttggatatggcatcaagaagttgcaaattatgatgaccattgtggacgatcttgtttctgtggacagtctcattgaggattatttttacacggaaccagctaatgagtttattcagagttgtgacattgttgctttcaacaaaatctgtaagttccttggcaagtttggtgcttttagtttggatttccaaataactgaaactaatggtttgattgaatatgcaaaactctaa

SEQ ID NO: 1339 - DNA, 774 bp, Oryza sativa
gggatcgtcgggttcggcaacttcgggcagttcatcgcgggggggatccagcggcaggggcacgcggtgctggccacctccagatccgactactcgggctactgcgcccgccacgggatccgcttcttcgccaccgccgacgagctctgcgaggccgggcccgacgtcctgctcgtctgcagctccatcctctccaccgaggccgtcgtccgcgccatccccttccgcaagctccgccccggaaccctcgtcgccgacgtgctctccgtcaagcagttcccccgcaacctcctcctcgagttcgggattgtatgtacgcaccccatgtttgggccggagagtggaaagcatggctggagtgggctaccttttgtctatgacaaggtccgtgttgccaaggaaggggatcaggcggccaagtgcgaacagttcttgagcatctttgagcgggagggatgtaggatggtggagatgttgtgcgaagagcatgatcgctatgccgcgggaagtcagttcatcactcacactattgggaggtgagcaacagctaaaccttgagtccacaccaatcaacaccaagggttatgagacccttctgcaacttaacacgataagtgatagtttcgatctgtactatgggcttttcatgtacaatgtgaatgccacagaacaggacagggcatttgagaaggtgaagcagatgctctatggtaggctgcataatgtactaagaaagcagatagaagagagggtcccaatcccgtagccccttca

SEQ ID NO: 1340 - DNA, 766 bp, Oryza sativa
  N_region (61)..(61): n = any nucleotide
ggaagtgcgtaatcatgaaaaggaggagagagacatgaaagagccaccaattccattgttncacacttaagttcgagacaccaccatcatcatcttgaagaggacatcaaaggtaaagtaaatggtactgaaattaatcaagagagcaaccgttagtggaaccaaatgttggaattcctttgtcacaagttgatttactcgctgttccttgtgataaagaagagttgtgtgataatgcttcacttatatccatgccacaactagtgaatgaacatgctattcctagtgtttctttgtgtgctgattttaagcatgctgttcacattcctaatgaagttgaggaacgtaaattgctatcttctttaaatactttgggctatgttcagtttgatgatttttgtgcgctcgataatttgaaggagaaattatttgctaagtctgatttgccatatccaaccaatgttatatttcacatttttggcgaatataatgatcttggaatatattttgtgcatagagtttacatctgctcggatttagaacttactgtacatgtggataaaacatacaagctagagagaaatgttattgctaaccaaattgtctcgagtttgccttgttttaattggaagaaacaggttgttgtaaatggactatgcaaagagcaccatatggaaaaaccgaggacggttttctgtgaagaaggggaggatgatgtgaccatggctaccacggatgcaaccattgctcacatcatggatgaaca

SEQ ID NO: 1341 - DNA, 765 bp, Oryza sativa
  N_region (16)..(16): n = any nucleotide
  N_region (37)..(37): n = any nucleotide
  N_region (45)..(45): n = any nucleotide
  N_region (699)..(699): n = any nucleotide
atgcggcggctcgacntgcccgcgcgcgacctccgcntcctcganccgctcttcgtctacccctccgcgatcctcgggcgcgagcgcgccgtcgtctgcaacctcgagcggatacggtgcatcatcaccgccgacgaggcgctcatcctggtgcggaggtacgtcgctgagctgcagcgccgcctcgacgatctgccgttcgagttcatcgccctggaggtcgcgctcgaagctgcctgctcgttcctcgacgcacagcaggctgtcgaattggaggctgacgcttatcctttactggatgaattgacaacgaaaatcagtacccttaacttggaacgtgtgcggcgcctaaagagtaagctggttgcattgactagaagggtccaaaagaaggtcagagatgagatagagcagctgatggacgacgatggtgatatggctgaaatggttcatctttctctgctccagtttcgccagtttcctcaccccctgcttctcgaaggcttgagaaggaattgagttttgccagaagacaacgtccgaaaccaactgatccaatttgaactgctgctgaccacggctacattcgtggtggccatcttcggagttgtctcgggagtttttggcatgaactttgaggtggacttgtttaatgtaccacatgcgttcgaatggacgcttgtcattacaggcgtatgnggcttagtcatattctgctgcttcatctggtacttcaagaagagaagggtttttcccccttggtaa

SEQ ID NO: 1342 - DNA, 750 bp, Oryza sativa
  N_region (708)..(708): n = any nucleotide
gatccgacgaagttcagatttactcacgagacgtcgttcgtcaggcagcacatgaacgtgctgaacaagacgccggcgtcgttctacattagcaatttcttcaggcagttcttcagatcagtcaggagggccgactactgcgcgttgcgtcacagcttcgtcaacgttcatttagctcctggcagcaagttcgatttccagaagtacatcaaacggtctctcgaggacgatttcaagagccctcccctttgggcatctgctctcatcttcctgctcctcaatgtcagcgtgttccagggttgcataccatgctttggatctccatcatgccagtggtgatcctgtcggtggggacgaagctgcaggggatcatctgcaggatggcgatcgacatcacggagcggcacgcggtgatccaggggataccgctggtgcaggtcagcgactcctacttctggttcagccgaccaaccttcgtcctcttcctcatccatttcaccctcttccagcagaatggcttccagatcatctacttcctctggatactgtacgagtacggcatggactcctgcttcaatgactccaaagagttcgtctttgctcgcctctgcctcgggttgtggttcagttcttgtgtagctatgtcactctccccctctatgcactcgtctcacaacagatggggtcaacgatgaagcagtcaatctncgacgaccagacgtccaaggcgctcaagaactggcgcgccgg

SEQ ID NO: 1343 - DNA, 750 bp, Oryza sativa
tggtgcaggtgctccgccgcatcgcgcagagcggcagcgtcgtcgtcatgacccatgaccatccaccagcccagcggccgcatcctcaacatcctcgaccgcctcctcttcctctcccgcggccgcaccgtacgtctactccggcacgccgtcggggctcaagaccttcttctccgtcttcgccgcgcccgtcccggacaacgagaacccagccgagagttcgccctcgacaccatcggtgagctcgagcaccacagcacgacggcgccgccatgctcgtcgaattcaactccaagtggcaatcatcgctcggcgctttcctcatcgatgccgacgagacagcccacaacgcctaccgccgcctctcctacgtgatcgccaacaccgccgtcgcgttcccgccgctggtgtccctgtcgctggcgttcgcggcgaccacgttcttcgccgtcggtctctccggtggcggttgcttctcccgtggcgtcgagatgttcgacggcacgccgatcgtcgggttgtcgaaggccgtgaagatacgctcggcaccactttgacggcggacacctgcgtggtgaccgcgccgacgtgctggcgcagcaggctgggatggatatcggcaggtggaagtgcctgctggtcaccgtggcgtttggtttctttttccgttttctgttttatattgtcctgctctttgggagcaaaaacaagaggcgctagctaaaccttcgggtgtgtgtatgcatgtaa

SEQ ID NO: 1344 - DNA, 741 bp, Oryza sativa
atgttgctcagcgatcagaggaatggtttgctctccgcaaggacaagctcaccacaagcaccttcagcactgccttggggcttctgggctggcaacagacggtcagagctgtggagtgagaaagtatttggatcaacagaaatcaagttggaggatgcggcgaggtctgctatgaactggggcacggtgaatgaaagtgtggccatagagcagtacacaagcatcaccggacggtcagtgggttcccttggcttcgcagtgcacacagaggccaactttgggtggctcggagcttcacctgatggcgttctagggtgtgacccagatggtgggatcctagaagtcaagtgcccgtacaacaagggtaagcctgagctcgctctgccatggcgtgctatgccatactactacatgccacaggtgcagggcctgatggagataatgggcagagattgggtcgagctctactgttggactcccaacggaagcagcctgttccgagtgccccgagatcgcgggtactgggagctcatccatgaagtcctgcgtgatttctggtgggggaatgtgatgccggcccgggagctggtgctgctggggaaggaggccgaagctagatcctttgaaccacagcccaagcaccggtcgacaaacctggtgatttttagaagcaggaagctagcttctgaagccaagttgttgtgcaaggatattggcggtcatgtagaattcttcccatga

SEQ ID NO: 1345 - DNA, 737 bp, Oryza sativa
atggccgtcgcggtggccgcggttgtcctcctgctccaccctgccgcttctgcggcggcggcggggccgaagaaggtggcgacggccgcgaggaaggaggacatcccctacatccggtgccaggtctgcgagcggatcgcgcgggagatctcggcgcaggtggcgaagaagcagcaggcgctcccggcaacgaagaaggagaatgtgtgcaacctgaagaagcaggaggcagactggatgctcaagatcgatatcgtagagaaaggcgataagctcgagttacagctcgttgagcaagatgaggaagggcactgtaatgcagaatgcaaaaccattgagcgtagcatgtgatggggtatgctgataccgatgttgctgaattcgtctacaagaaaaaaccttcagctgatcagctggtcaaatttctttgcaaagatctttctgaagcatgcgttgtggatccaccaccagttccaaaatcactattgaaccatcatattcctgacatacatccattgcaaaaactgcaggatcgggtccctggcgaaccttttgctgctaagccatcaaaagatgctgagatggataggatattgaaatcgatggagcagggtattccaggagctccaagcatgaaaatgtactctagagatgatctgatgaagaacaattttggtgttgacggtgatgatgacgatgatgatgaagatgaggacgatgacttcccaaagaacttg

SEQ ID NO: 1346 - DNA, 732 bp, Oryza sativa
gttcttaacgagttcacaaaagggaagaaagaatcggtgagcaagtcagagttccagcgtgtcctctctgacatacttcttggcatggcggctggactaaagagggaccccattgtgatcttgaggattaacggtgaagatttgaatgaatttgttgagagcccaaggtacgaaccggagatggctgccatattttcgcaagttgaatcaggaaattcaaccttgcagcagtgcatgctagctgctattcgacaactgacggtcgaccacggcatgccaccggcttcagattcatggcaacctgtcactcaagaggtcttcttccaggaattcagaaagttcttggcaatcctcacgcagcgactccaagggcaccctgtgattgtagcacataccgagaacacctttgatgggaatggtatcaagaagctgctgtcaaacaagctcgaattagataagaagcagtacattcgggttgcgttcgataggatggctgactccataaatctaccaccatatggagctgttgaacaggccgaggacgggaaggcggtggatgaaacggagttcaagaaattgctcactgagatccttggggcagtgatgctgcagctagatggcaatccaatatcggtttcgaccaacagtgtactccatgagccaatgtccacttcttccaccctgctttcgccatcgccgccgtcgccaatggtgtcatcaccgagtgaatag

SEQ ID NO: 1347 - DNA, 732 bp, Oryza sativa
atgggcagcagcgctgctggtggcaccagtgccttctaccagccctacggcaccaacttacctggtgcaggggctaacagtgccatccagaactttccaggggtccgtctacgagggctcccctttgactgcgacgatcttgacatctgcaagttctttgttgggctggacatagtggactgcctcttggttcacaagaatggccgcttcaccggcgaggcttttgtcgtattcccatcagccatgcaagcagagtttgcactgcaccgcaaccggcagaacatgggcaggaggtatgttgaggtgttcagatgcaagaagcaagagtactacagtgcaatagctgctgaagtgaaccagggcggcttcttcgactcggagtaccgtcactccccacctcctccacggcccaagaaaccagctgaagacaagagcagcatggagtatactgaggtgctcaagctccgtggcctgccctactctgctaccactgaagacatcatcaagttctttgtggagtacgagctgacggacgaaaatgtgcacatcgtgtaccgtccagatggtaaggccactggagaagcctatgtggagttcccgacagcagaggttgtgaagacagccatgtgcaaggacaagatgaccattgggacaaggtacgtggagctgttcccatcaaccccagaggaggccagcagggcgaaatcgcgagtttgtgtgtgtgtgttttag

SEQ ID NO: 1348 - DNA, 731 bp, Oryza sativa
  N_region (131)..(131): n = any nucleotide
atgctccaccatctgcttcgttgctggtggttaggggagggcgctaccaccgctcgccgcctcccctcttgtgccgcggcctcccctcccgccggatccgatggaggggagggcaccgcctacaaccattnggagcttggcgagagggtgcaacgacgcgacgtcgacagtggccacgcccatgcggtgcctttggcggaaggaggagacagcggtggggatggaagaagttcaggtgttggctgggatccggtcgcgccggaggtggatcccccttcccccttcccctgagggcggatctggtgcggggagagctcgcggcaacggcttcggtggcaacgacgcagagctcgtggtgacggtggcgacaatggctggacgacaacgacagcgggtggctggccaacggcagcaacggctgatggctgctgtggcaacgaggtgcacccgcggcaggagcggctgtcacggcagcgacagcggctggacggtggcgataatgtggctggccgatggcagcagtggctaccgtggctgcggtgggaggaggcatggcggacttggactgctagctgggggagtggcagacggccacacctggctggcgcgacagcgattggacggtggcgacaatgtggctgggggggcgctggtgcagtggtcccacatgtcgccagaggatgagcggtggtggagcattggtgcgtcagccgtggacttgtatgtggtga

SEQ ID NO: 1349 - DNA, 728 bp, Oryza sativa
  N_region (328)..(328): n = any nucleotide
  N_region (595)..(595): n = any nucleotide
ttaagttgccggggccagaaggcaacgtttgaaccgcgggggggtgggtccggagtccggacgctgcgatctgaccctgggccggagacttctcgcgccaaacaaaccacgagctcgggctccgccaccgaaatggcgtcccacggtgagccgagccttgccctcgccaactctaccctccgaagctggagtgacaggcccgcgctaccagacccggcgaccgagtcggggatgtggccggatttatcgcgcgcgcattccgcgcgaaatggcgaggtgggactaaagagtcgccgatcgatccgctacctgaggaaggaagaaacangcacacacagggtcccgtccccgtcgtcgtcctagccctcgccaactctaccctccaaagccggagctacaggcctgcgctactaggcccggcgatcgagccggggatggagtcggatttatcgcccgcgatctgcgcacgaaatggcgaggtgggacaaaaaatggtagtccgctgggcgcgccaaacaacaaacccgatcgagctcggctccgccgccgatcaaagtggcgtcacgcgcgagccgagccttaccctcgccaactntaccctccgaagctggagtgacaggcccgcgctaccaggcccggcgaccgagccggggatggcgccggatttatcggccgcgcattccgcgtgaaatggcgaggtgggactaaagcgtcggtcgatccgctag

SEQ ID NO: 1350 - DNA, 702 bp, Oryza sativa
atggacgcatcctaccgccgcgacggccgcggaggcggcggcggcgggggcggcggcggttccgcccctcgctccgtcgaggacatcttcaaggacttccgcgcccgccgcaccgccatcctccgcgccctcacccacggagaaggagaatctgtgcctgtacgggtacgcgaacgaggcttggcagctgccggcggaggaggtgcccaccgagctgccggagccggcgctcgggatcaacttcgcccgcgacgggatgaaccgccgcgactggctcgcgctcgtcgccgtccactccgactcgtggctcgtctccgtcgccttctactacgccgcgcgcctcaaccgcaacgaccgaggaagcgtttgtttggcatgatgaatgatttgccaactgtttacgaagtcgtatctggttcaagacaatctaaggagagggacagatccggcatggacaacagcagcagaaataaaatttcatcgaaggaggaagatgaaggctacgacgaggacgatggcgaccacagtgagaccctatgcgggacttgcggtgggatatacagcgccgacgagttctggatcggctgcgacgtgtgcgagaggtggtaccacggcaagtgcgtcaagatcactccggcgaaggcggagagcataaagcagtacaagtgcccgagctgcagctccaagagacctagacagtag

SEQ ID NO: 1351 - DNA, 699 bp, Oryza sativa
  N_region (9)..(9): n = any nucleotide
  N_region (43)..(43): n = any nucleotide
  N_region (71)..(71): n = any nucleotide
  N_region (98)..(98): n = any nucleotide
  N_region (113)..(113): n = any nucleotide
  N_region (130)..(130): n = any nucleotide
  N_region (182)..(182): n = any nucleotide
  N_region (277)..(277): n = any nucleotide
aacgcggancggaagttcttcggctttggtgccccaagccgangcccttgaacgaagagcttcctgttcangggatcggccttcgccgtgcgccgcanggtcgtcatcatcantggggtcgtcttcgcantcggccgcctttcccctttcccgccggcgaagtggcccccttacccgcccangtggacggccgccttcgaggatgcgcgcgtgcgccgccgaggatgccgaggtcgacgtcaacatcgtccgcagccacggccgcggcggcgctgcntccgccgccgggctggttcctttctctccgctagtttccctcccaccggccgccgcgccgcgccccttctcccagccggacaccgtcctctccccggcgcccgtgaaccggagagaagagaaagaggagaggggagagagatgaagacagagaagatggtgaagaggagaatcagaatgacccagcgcaagagagagacgaagagaggggaggaggagagagaggaagcagaagaggaggggttaattagactgacatgtggggtccgcgtgggtcccaccattattattattattatttttattgtgtgtgaaactgacatgtgggtcccacggggtttattattttccggatcgaattgccacgtaagggccacatcagtgccacgtcagatcaaaaccgagtcaaaattagccacgtag

SEQ ID NO: 1352 - DNA, 684 bp, Oryza sativa
  N_region (171)..(171): n = any nucleotide
  N_region (186)..(186): n = any nucleotide
atgaccatgacgtcgacgacgacgaaggccatggcgatggcggcggcggtcctcgccgccgccgccgtcgcggcgacgaacgcgcagacgtgcgggaagcagaacgacggcatgatctgcccgcacaacctgtgctgcagccagttcgggtactgcggcctcggccgcgantactgcggcacgggntgccagagcggcgcctgctgctccagccagcgctgcggcagccagggcggcggcgccacctgctccaacaaccagtgctgcagccagtacggctactgcggcttcggctccgagtactgcggctccgggtgccagaacgggccgtgccgcgccgacatcaagtgcggccgcaacgccaacggcgagctctgccccaacaacatgtgctgcagccagtggggatactgcggcctcggcagcgagttctgcggcaacggatgccagagcggcgcgtgctgcccggagaagcggtgcggcaagcaggccggcggggacaagtgccccaacaacttctgctgcagtgccggcggctactgcggcctcggcggcaactactgcggctccggctgccagagcggcggctgctacaagggtggcgacggcatggcggccatcctggctaacaaccagagcgtctctttcgaagggatcatcgagtcagtggctgagcttgtgtag

SEQ ID NO: 1353 - DNA, 681 bp, Oryza sativa
cttcgtgtcttcggttgcaagtgttatccaaacctctccgccaccacaccgcacaagcttgccccccgttccaccatgtgcgttttcctaggctaccccctctaccataaaggatatcggtgttttgatcccctgtccaacagggtctgccttcacatgcatgaccctcgcgagcctcacctggcagccctcaagcggatcctccgctacatccgtggctctgtggacctgggactccacattcagcggtcctccgcctgcgacctcgccgtctactccgacgccgactgggccggctgccctgacactcgtcgctccacatctggctacgccgtcttccttggagacaacttggtgtcatggtcctccaagcgctagcacacggtctcccgctccagtgcagaggccgagtaccgcgccgttgccaatgcagtcgccgaggtcacatggctgcgccagctactccaggagctacattctccgccgtcgcgggctacactggtctactgcgacaatgtcagtgccgtctacctctcctccaacccggtgcagcatcagcgtaccaagcatgttgagatcgaccttcacttcgttcgggaacgtgtcgcggtcggcgccgtccgtgttcttcatgttcccacaacatcgcagtacgccgacatcttcaccaaggggcttcct

SEQ ID NO: 1354 - DNA, 672 bp, Oryza sativa
ttataggatctctttagtggaggtagcgagacatcggcgactacgcttcaatgggcgatgtcggagctaataaagaacccaatggttatgcaaaagacacaagccgagctacgtgacaaacttaggagaaagccaactgtgacagaggatgatttgtctggcttaaagtatgtaaagctcattattaaggagaccctaaggcttcaccctgtggtaccactgcttgtcgcaagagagtgtcgtgaatcatgtaaagtcatggggtatgatgttccaaaaggcaccactgtatttgttaacgcgtgggctatcggcagagacccaaagtactgggatgacgctgaggagtttagaccagaacggtttgaacacagtactgttgacttcaagggcatagacctcgagttcataccgtttggcgcaggacgaagaatatgtcctggtatggcattcgcagaagcaatcatggaacttctgcttgctgcgctgctctaccactttgactgggaactccctaatggaatggcagcgagcgagctggatatgacagaggagatgggcatcaccgtccggaggaagaatgaccttcacctccgcccccatcctccgtgtgttgtaaggtcaaacttccgtagttttgttgagagagagagagagaggcacttcgtgtag

SEQ ID NO: 1355 - DNA, 659 bp, Oryza sativa
ccttacaggatcttgatcctggcgcgactgatcgccatcgtagccttctaattcgcgtggcgcatacgtcacaagaaccgcgacggcgcgtggctgtggacaatgtccatggccggcgacgtctggttcggcttctcctgggtgctcaaccagctccccaaactgagccccatcaagcgcttcccggacctcgccgccctcgctgaccggcactccgacgagctccccggcgtcgacgtcttcgtcaccaccgtcgaccccgttgacgagccgatcctctacaccgtgaacaccatcctctccatcctcgccgccgactacccggtggacaggaggtcgccaagttcgccgagctgtgggtgcccttctaccggaagcactgcgtcgagccgagggcgccggagagctacttcgcgatgaagacgcaggcgtaaagaggcggcgtggccggcgagctgatgagcgatcgccgccgtgtgcgacgagagtacgaggagttcaaggtcaggatcgactcgctgtttagcaccattcgcaagcgatctgacgcgtacaacgccaagcatgccggtgaaaatgcgacatggatggctgatggcacacattgggccggcgcatggtttgaaccggctgagaaccaccggagagggcaacatcag

SEQ ID NO: 1356 - DNA, 654 bp, Oryza sativa
ggatgtgaatttgattgtcagaggtcttcagaccagatgtgctgtgagcactctgtcgctcagttctcttcagatcaacaacttaaccctgaagaaaatttagctttatactgcaagccacttgagttgtacaactttattcgacaccgagccattgaaaatcctccttatcttcaaagatgccttctttataagatacgtgcaaaacaaaaaaaaagtaggatacagataactatatcattacctggaagtaacaataaggaattgcaagcacagaatatctttcctctgtatgttctgtttgctagacctacttcaaatgttcctatagaaggacattctccaatatatcggttcagtcaggcccgtttgcttacttcctttaatgactctgggaataatgaccgtgctgaagccacatttgttattcctgatctggagactttaattgccacccaagcttatggtcttacttttatccttgttagccgcggtaccaaaaaaaataaagggcgaactggacaaaatctttgtgaaaatgactgttctgagaaacatgtggactactcttctctccgaagtaagtctgtgatcgaactgaataattggtacagtgtaataactttttgcttccttatgccatggatgatgtaa

SEQ ID NO: 1357 - DNA, 653 bp, Oryza sativa
atggcggcggcggcgcagaggctcctggcggccagcacgaagatcgtaggggtgggccgcaacttcgtcgcccacgccaaggagctcgggaaccccgtccccaaggagccggtgctgttcctgaagcccacctcgtcgttcctccacgcgggcgtggccggcgccgccatcgaggtgccggagccggtcgagtcgctgcaccacgaggtcgagcttgccgttgtcatctcccagcgcgcgcgcgacgtccccgaagcatccgccatggacttcgtaggagggttatgcacttgctttggacatgacagcaagagaacttcagtctgcggctaagggtcttccttggactttgggtaaagcacaggacaccttcactccaattagtgcagtgcctgatgatctagagctctggctaaaggttgatgatgaacttaggcagaagggatctacaagtgatatgatattcaagataccatctctaataagttatatcagttccatcatgacattaatggagggtgatgttatactgaccgggtactcctgagggtgtaggcccagtacgaccaggacagaagatcaaagctggtataaccggcctcattgatgttgagtttgatgttcagaagcgcaagcggtcattttctacttga

SEQ ID NO: 1358 - DNA, 635 bp, Oryza sativa
atggaggccacggcgaagtacaaccggggcaacccggcggtgaagcggatccttcaggaggtcaaggagatgcagtccaacccgtccccggacttcatggccatgcccctcgaggaggacatcttcgagtggcaatttgcgatcctggggccacgagacagtgagtttgagggaggaatctaccatggaaggatccagctgccatcggactatccgtttaagccaccatcattcatgctgctcacggtctccaagtggaagatttgagattcaaaagaagatttgtttgagcatatccaattaccaccctgagcactggcaaccatcatggagtggtgcgcacagctcttgtagctttgattgcattcatgccaacaccaggtggtggggcattgggttcgttggacttcaaaaaggaagatagacgggcactagctatcaaatcacgtgaaacaccaccaaagtttggctctgcagaacgccaaaaagtaattgatgaggcaatccagaagccaaagcatgacagattattgaccttggctgcatttggactcactcttgctattatggcccttgtgatcaagaagttcttcaaaatcaatggtctggccggttacattgagggcaagttttag

SEQ ID NO: 1359 - DNA, 630 bp, Oryza sativa
cctcatgtacaacagttctttgatgcaaatccaaacctagaaaaggttgtggttccacttggcgggacaatctttggtacaatgatggcttggtttgtcatgcctatcgttttaaggaggattcacaagtattcgatacagagtcctatatcagcacttttggggagctcaacaaagaatgatgtctcgtatgaaactagcctctggagtgcattggaggatcctgcgaaataccttatcacatttatggcattttcagaaatggtgcaattgttctctcttttgtctggttccttcataggtggaaaacaaacttcatcactaaagttgctgcctcaagtattgatcaaaccaggttgtcagcatttgataagatctcgtcattaggactgattgcacttggagtaatggctcttgcagaggcttgtggtgtagctgctcagtcaatactaactgttggtggtgtgggagggtgttgctactgcctttgctgctcgggatgtccttggtaacatgctcagtgggttctccttacagttttctagtccattcaaagctggagaatacataaaggtgccttcttatatatgtggtcactttttctgtatattcagggggctgtatgtataa

SEQ ID NO: 1360 - DNA, 625 bp, Oryza sativa
  N_region (163)..(163): n = any nucleotide
agcccaggcgacacagtaagtgtcattggagaattcactgaccatggaatatgtattattgatcatgacaaaaatcttgttatagtgcatccagaattactcatatctggaacacgggttgcttctagttttcattgtccaagaaggtctgttctcgatgacngactaaaaagcaatgaatattcaacaagtgctttgattggtactctgctgcatcaagtattccagcaggcagggctacttgaagatgttccttcaacgcaattcttagagcagcaagccaaagaagttcttttgaaaaatattgagagtttatatgcatgtggaggtaatggatattgaggagatggcctgggctccaagatatggtttgaaagggattattgatgcttctattagatcaagggtttcatgcaatggtagttcatacgacagagtaatgcctctggagttcaaaactggtaaaggaactagtggtcaggaacacactgcccaagtgatattgtacacgctattgatgacggagaggtatgatctatctatttcttccactgcaggctttccatatatatatattccttaccatgcttttccatgtcttcagatacttgaacaaggatattga

SEQ ID NO: 1361 - DNA, 617 bp, Oryza sativa
tggaggagctccctggtcgagaagctggccgggatcgagctcaacctcgagggggttaagtttcggatgagcgtcgagatcccgccctccgatgacttcagggcaatgaagaagtcttgggagaatttctacgccgacaccattcttgtccggggtgtgccatccaggtggtttgcggagacgaggatatcatcgaaagcctccacgctggtcacacacactattttctcggcacttggtaaaataagaggaaccttaatatttctagtgatgatgaatggggagcaaaacaagacggaaccaataaggagattatatctggactaaattgcaaagtgtgggtgcaatttgagaactacgacgatttcaacagtgcaatgcaggcattatgtggacgttcattagaaaaattgaaggaaggatcacggttgaaggtagactatgaagtaacttgggatcatgaaggtttcttccgcaatgcacaatacgagcctgttcgcagcaatttagaagagagaaattcatcggctcatggaaggaagaaacattacacatcgcgaattgagtcagatcatagaaagagatttagggtaggacaacatatcaaatctttctaa

SEQ ID NO: 1362 - DNA, 617 bp, Oryza sativa
atgtggcggccacgtggcagccatgcgggcaactgggttggatggcctcgatccactcggggtggatcggacggcggagggggcggcacgcggccggtgcgggcggctcaagctgacccggggccatggcgcggcagcggcgcggcaccggcagcgatcggcggacggcggcggcgattcggcagatggcgacggcgcgacaacggctatgcggcggcgctactaggggaaaagagaggaggaagaaagaaggggaaggaggggcgtcctcaccgaaggggtccgactggcgtggagggagacgacggcgaccggcgacgaggaacgacggagggaggtcgacaagcggcggacggggtccgggacggcctaaggaacaaaatgggggaaattagagacggagagagagaccataaagggcgggaacgccggccgaaggcggcggccatggcgtttcttaccggcgcacgacgggaatggggcttcggcggcgaattcggctggggaaacggcggacgaggtggtctccgggcttgcgaacccaacggcgtcgacggctaggctcggccggaggttagggatgggcccgacatttggggcccacctgtcggtgaccc

SEQ ID NO: 1363 - DNA, 614 bp, Oryza sativa
atggccgccaacttctggacgtcgtcgcactgagcaagcagctgctggaccaggaggacgtggacaaggtcccccaggcggacagcgaccggggcatcacgctggaggagttccgcctcgtcaagatccacatgtccttcatctggcgattggcacaacaggtgaaagttagacaaagagggtgatagctactgctgttacttatttcaggcgtgtatacacaagagaaagagcatgactgaatatgatcctcgtctggtagcaccaacctgtttgtatttggcatcaaaggtggaagagagcacagtgcaagcaagacttcttgtcttttacataaaaaagatgtgtggcttctgatgagaagtaccggtttgaaatcaaggatatccttgaaatggaaatgaagctcctggaggcacttgactattatttagttgtttaccacccatatcgtcctcttttacaggttattgcaggatgctggcataacagatctgacacaatttgcctggggaattgtcaatgatacttacaagatggatcttattctcatacacccaccatatatgatagcattagcctgcatccacattgcaagcgttcttaaagacaag

SEQ ID NO: 1364 - DNA, 613 bp, Oryza sativa
  N_region (308)..(308): n = any nucleotide
ggggagaggacggtgaggaagctgaggctgtccaaggcgctgacgataccggaggggacgacggtgtcggaggcgtgcaggaggatggcggcgaggagggtcgacgccgtgctgctcaccgacgcgcagggcctcctctccggcatcgtcactgataaggatgtagctacaagggtggttgctgaggggctgcgggtggagcaaaccatcatgtccaagatcatgacaaggaaccccacatatgccatgtctgatacgcttgccattgaagcattgcagaagatggttcaagggtaaatttagacacntcccagttgtggaaaatggtgaggttattgctatgctggacattgctaaatgcctttacgatgcaatatcaagactggaaaaggcagcagaacaagggagtgcaatagcagctgctgtagaaggggtagagcgtcaattaggaggcaacttttcaggctccttatgctttcatagaaactctaagagagaggatgttcaaaccttctttgtcaaccattgtcacggagggcacaaagtacagtagcaattgtttctccttcagacccagtgtatgtagcaacacagaaaatgcgtgaatttcgag

SEQ ID NO: 1365 - DNA, 602 bp, Oryza sativa
atatgctttttttctacttgtggacaggtttatcactctagctttgttgatgacaccgggattaccaaagcatgcggctgtcctttgcttccactaaaaactcatataaggggcccagcgccagcattcgatcaaggacaaggctgacattgttgatgaagcaattacattcttccgagcaaatgtcttcttcaaaaacttcaatgtgaaaagcccagcagacaagttactgatctatctgacattttacatcaatattgccctgaaaaggctggaaggttgccgaacactggctgttgggacaaaggcaatcattaatctgggtttggagaaagttcctgtgcctggggaaccagggtttcccttccctggtcttttcactctaccccaatctcaggaggaagcagtcagaactattgaggaattatctgaagcagataagggaggaaacaagtggaaggttgcttaactgcgcatacagagctaatggtactccaaacaaatggtggttggcttttgcaaagaggaaattcatgaacattgtcattctttgaagtataggtattttccgcgacatgtttgagcaattgagcagcttgtag

SEQ ID NO: 1366 - DNA, 595 bp, Oryza sativa
atggacgcctccgccggctcgtcggcgccgcactcgcacgggaacccggggaagcagggtggcggcggcggcggcggcggcggacgggggaaggccccggcggcggagatcagggagccgctgttcccggacgacgttggcatgatgatagaggacgccatgtccgggcaaccgagctccccagccccggcgcaaaccccggctacgagttccccgaacatggcctggccgcagcaattcgcgccgttccccgaaggaagcagaggttcacctgccggagctgaagacgagggatggtgtctccatccccatggaagacatcgggacgtctcaggtgtggaacatgcggtaccgaggttttggcccaacaacaaaagcaggatgtatcttctcgaaaacacagggtgattttgttcgttcaaacgagctgcaggagggtgatttcattgtgatctactccgatatcaagtcaggcaaatatctgatacgtggtgtgaagggcggctgcaagggcaagtccccgcacggcgtgcggcgttctcgccaggaggccgccgccgccgcctccatgagccagatggcggttagcatctga

SEQ ID NO: 1367 - DNA, 591 bp, Oryza sativa
  N_region (281)..(281): n = any nucleotide
atgtcggacgaccacagcggcggcggaggcgagcagcggcaatgccggcgagggttcgcggtggacgtggtggagctcggtgcggccctggctctggccgacatggccggcgccgccgtcaaaccggccatgcagctgcagctgcagccgaccgccgctcaggaggaggacgaggagatggcgaccacgaggctgagccttcagctcggcaacaacgtcggcagcatcatccagtcctcctcctgctccagcagcggctccagcgccggcttccccgcgcnaccgccgccgccgccgccggccaccgcctacggcaccaagcccctccacatgctcaccgagcaggaggagaaggaggcgaagcggctgcggcgagtgctcgccaaccgggaatccgcacgccaaaccatactccgccgtcagcaggctattagagatgaactggcaagaaaggtcgcagatctgtcaacacagaatgagagcatgaagaaggagagggagacagtgatgcaggagtacctctcactgaaggagacaaacaagcagctcaaagaacaggcacagcatcatctttcgctttccttgttctaa

SEQ ID NO: 1368 - DNA, 590 bp, Oryza sativa
atgggagacggcggcggcggcgggctcgacgtggtggtgttcccgtggcttaagccggattggatcataatcgacttcgcctaccactggctcccgcccatcgccgccgagcacaatgacttcaccgcgccgccgagctccccgacgggttcgaggagcggacgcgcgggcgcggcgtggtgtggacggggtgggtgccgcaggtggaggtgctcgcgcacgccgcggtgggcgcgttcctgacgcactgcggctggggctccaccatcgagagcctcgtgttcggccacccgctggtgatgctgccgttcgtcgtcgaccagggcctcgtcgcgcgggcgatggcggagaggggcgtcggcgtggaggtcgccagggaggacgacgacgagggctcgttcggccggcacgacgtcgccgcggcggtgcggcgcgtcatggtggaggatgaacgcaaggtgttcggcgaaaacgccaggaaaatgaaggaagcggttggggatcagcgacggcaggagcagtacttcgacgagctggtggagcgcctccacaccggaggaggggagatcaatgacgaaaaatactgttaa

SEQ ID NO: 1369 - DNA, 588 bp, Oryza sativa
atggcggcagcaaacgacggagccgacgccggcgacagcaagatccttctgatcagctcggacgggcagcacttccaggtgacggaggcggaggcgagcatgtcgaagctagtgagcaacatgatcgaggacgactgcacggagaacggcgtccctctccccaacgtcgcctccaacgtcctcgccaaggtgctcgactactgcaagaaacacgccgccgccgccgccgccgctgccgaggacgtcgccgtgaaggatcaggagctgaagagcttcgatgccagcttcatcgatgtcgacaacacgatgctgttcggcctgatcttggccgccaactacttgaacgatcttgcgtgtcaacacacggctgacttgatcaagggcaagacggtacaggagatcagggacacgttcgggatcgtcaacgacttcacaccagaggaggaggaggagatccgcaaggagaacgaatgggccttcgagaactgaaccatttccttttatcttagaagaatttccaggctagtagggaagaagtttgatcggaataaatataaaatctttttcttaatactatttaatgattga

SEQ ID NO: 1370 - DNA, 579 bp, Oryza sativa
atggccgcactggtcctcagtgtcgtcagcttcttcgtgccaaagaggtgggttcaagttcgccggagacggaatcgggaagcgcggcggtgcggagaccgaactagctgcaggcgccaccactccggccggcggtcggcagcggacagcgtcaaatgcgctctcgcgcacgccgacgtttgtgtgcgagtgcccgctcgagagcggcggcgagatagtgcggcggcgacgaggacacgcatgggaccacgctcgatccagctcaagggcctcctccgccgccgccgagccgacgccgacgccgctcgacgcggccctcagtccccgcagcgacgtgtctcgccgggaggtaccaaccaccgctcaggaagccgagcaccggcgacgcagccgatgtctgctcccgcattgcccgatgagctctggactgaccacgacttacttgagcgctgcagcaagctgctgagcagcatcgacgtttttgccgccatcttcgtcgctgccgtcgccgaagccgaagctgcctcctctgccaccgccaccaccaccgccgccgccgccgttgcaagctggggttag

SEQ ID NO: 1371 - DNA, 578 bp, Oryza sativa
atggcggcggcgcgggggcagaaggcggttgcggcgctgccgcatctggtgaaatcgctgcgcagcgagcccgtctccaacgccccgaggctccggcacctcccgtccctcagaggaccttctctctctacgatcagatcaacctcatcgatagcgtcccgaacaaagtaaagtatgaaggaagcttgttgatagtagaaaacaagataatgacatgggcacccaaatcatttgcagagataacagctgaaagagtttatcaatcttcaaagtagtgcaccctatcccagccagagattctgattcttggttgtggtagacacatccaaccaatcagtcctgagctccgcaaattcattcggtcaactgggatgaagctggaagcagttgattcgaggaatgcggcttcaacatataacattctgaatgaagaggggaggccagtcgcggctgcacttcttccttgcggagtcacttcttgaaacacgagtgttacctttgtggtggtgagcgtcttctccttccagtcgatactcgatagagttgaaatgaagcatattgtcgcatgggaacactga

SEQ ID NO: 1372 - DNA, 573 bp, Oryza sativa
atgtcgccagtcgggtggttggtcttgttgttgccggcgctgctgcggcggggcagcagcggggtggctgcggcggggaaggtgccggcggtgatcgtgttcggcgactcgtcggtggacacgggcaacaacaacttcatcccgacgatcgcgcggagcaacttctggccgtacgggcgcgactacgctgacggcctccccaccggccgcttctccaacggccgcctcgccaccgacttcatctccgaggccttcggactccctccctgcatccctgcctacctcgacaccaacctcaccatcgaccagctcgcctccggcgtctccttcgcctccgccgccaccggcctcgacaacgccaccgccggagtcctagcaggttttgaaaatgcagtgcaaggttgctgtgggacaggactcttcgaggccggttacttctgcagcttgagcacctcgttgttatgtcaaaatgccaacaaatacgtcttctttgatgcaatccatcccacggagaaaatgtacaagatcattgccgatacagtcatgaacaccacacttaatgtgttcctataa

SEQ ID NO: 1373 - DNA, 570 bp, Oryza sativa
aggggttccaagaagaaggagaagaaaaggcaagaccgagaggcccagcgtcagcaggccgaagaagcagcccgggattcgaggaggactaaacaagatcgctatgcagaaatgaggaggaagaaagacgaagagcgtgaggcacaagaggaagaagaagcaagggcgaggaaagccaaagaggaggaagctgctgccttggaatttgagaaatggaaaggagccttctcagttgatgctgaaggtacaacagagagtgacacacaagatgatggccagggtttgctccacaattttgtagagtacatcaagcagaagtgtgttcctctagaggaccttgccgcagagttcaggatgagaacacagggtgtcatggatgatcgtgggaagttcatatacatatctactgaggagatgaaggctgtcgcagattacatcaggaaacaagggagggtgagcatatcacatttggccagtaactcaaatcaatttattgatttggagccaaagccccagtacaatgaggagagcaatctcgatgagaatgccgcagcaggcaccgagctttga

SEQ ID NO: 1374 - DNA, 559 bp, Oryza sativa
gaaactgtaacacaatccgaagctacaagaaagcgctatcgttatctaagtcacttctcattgacaacaacgttccagactacgcagttctgtgaaattgacctgggtgatatgctgcctcctagctcattagctccattcatggatgaaatcaagaagcgagagaaacagaggaaacgaactgccaagaagaaagccgaagttgctgctgctgcacaggcatctgcaatgctgtttgaacatacaagcttctctcccagtagtgggccacatggcgattttatgttctctctggatgactttgaaggctcttggaaacaatgctggaccctccacgagtccaccagccagcgaaagaaagcttttctccgatgttgcacggcttggctttgcgtctgcccaagactcgcctcctctaagagttgaatctggggatttgactggcaaaagtgaaagcacggggggaacaaggtatggtgacacacgatgcacctttggacgctggcacttaccagtgtgcggcagtgcccatttttcttctagtgaaatcctggcataa

SEQ ID NO: 1375 - DNA, 552 bp, Oryza sativa
  N_region (62)..(62): n = any nucleotide
atgataaaaattgacccgggtcatctagtgcatgtatattgtactcgtagctatatcgagtnacgtggtgcatacatattgtactcatagctatatcaagtgacgtggtgggcacaccaagtaagaactagccgactagaatgtggcggtagatatcggccacaacgtacgacgtcacctagtggacagcgagatacactgctgttgtcggacagagagtattggaaggaagtaccaaggtcgctagcatccatgagtggcaactcctccggcggccactcgttagacacgctgctcctcctctcgaaggtgatggctggctgcatggaagcgcaagaatttttcggcaataaaacgacgcacgactggggctcattcaagtcaaaatctgcggaaaaagttgcagtttggcatgttgttgagagctgtagcgatcgacccggagaaattctgcacaaggaattaaggcctgtttattttgtgaaatgaaaatttttggtgccacgtcagacgtttgaccagatgttggaagaagttttcggacacgaatga

SEQ ID NO: 1376 - DNA, 544 bp, Oryza sativa
atggacacgggcgggtacaataatggaggtggtggtgggggtgggggtggcaatggcggcggcggcggcgaccaccaggagagcagcagcagcggctaccgcggcgggcagtcatccaggctcgcggcgcgcggccactggcgccccgccgaggacgccaagctccgcgagctcgtcgcgctctacggcccccagaactggaacctcatcgccgacaagctcgacggcagatccgcgtgcagggaagagctgcaggctgaggtggttcaaccagctggacccgaggatcagcaagaggccgttcagcgacgaggaggaggagaggctgatggcggcgcacaggttctacggcaacaagtgggcgatgatcgcgcgcctcttccccggccggaccgacaacgccgtcaagaaccactggcacgtcatcatggcgcgcaagtacagggagcagtccaccgcctaccgacgccgcaagctcaaccaggccgtccagcgcaagctcgacgccaccaccgcctccgacgtcgtcgtcgcccaccaccac

SEQ ID NO: 1377 - DNA, 543 bp, Oryza sativa
atggggagatcaccgtgttgtgagcaggacgccgacgtgaagaaagggccatggacgccggaggaagacaagcttctggtggagtacatcggcaagaacggccatggcagctggcggcgcctcccgaagctcgcccagatggtcgtccatcgcgacgaagctcaaggggaggacggacaacgagatcaagaactactggaacacgcacctccgcaagaagcttctcagccaggggatagaccccgtcacgcaccgcccgcgcaccgacctcctcgccggcctccccaacctcctggccgccgccaatctcggcggcgccgcccaccagctgcccttggacttgaacgccatcaagctccaggccgacgccgccaagttccagattctgcagggcctcctccgcgtgctcgcctccaccaccgccccgccgcccaccgccgctgtgctacctggcacagacctcatgacgtccatcctcggcgccaccctcgccgccaactccgccggcatactcggacagcagcagcagctcgccggcgttga

SEQ ID NO: 1378 - DNA, 533 bp, Oryza sativa
ttaactgaaaagtctacatttatatctccaaaattgtttggattctttcaatcttctctccctgggaccttaaagggttgtcactgggttttgctatatagttttgatttcttcattctttgttgttttggcaaatgaagtgcagcacttggaagcatggaacatcgctaagaacacttttccgtaggagtgaaaatctccagggtccatgcctattgggagacatgcggggggctgtgtttggtggcttgttaaatggtcctctcaggcctacagagaaaagaaaataccagcagggaactaatcagacatttgtattcacaacgatttatggtgaacctaggcttttcagaccaaccgggtgccaacaggtactactacttatgcttgaatgatgctttggcatttggaggaggtgggagtttcgcgttgtgcctcgatgaagatttaccagtggatcatgtcagacatttgggaactcatgcttggctcatagtccagattttgaactgaagaatgttgaggtaagatga

SEQ ID NO: 1379 - DNA, 531 bp, Oryza sativa
atgccgctgatggcgctgaaccacatctcccgcctctgcaagtccatcgacgcctccgtccgcttctacgtcaaggccctcggcttcgtcctcatccaccgccctcccgctctcgacttcaacggcgcctgcttttcaactacggagttgggatccatctcgtccagagagacgacgcgaggagagcgcccgacgtcaaccccggggacctcgaccccatggacaaccacatctccttccaagtaccagtgcgaggacatggggatgatggagaagaggctgaacgagatggggatcgagtacatgaagcggaccatcaacgaggaggagggctcgcccatcgaccagctcttcttcaaggaccccgacggcttcatgatcgagatctgcaactgcgagaacctcgagctcgtccccgctggcgccctcggccgcctcaggctgccccgagaccgccacaacccgccgctccggatggccgccgccggcaacgacgaggcgtgagaaaaacgtacatccaagtgtacgtag

SEQ ID NO: 1380 - DNA, 525 bp, Oryza sativa
gaacaatcagaaacacatgcttggtgttggtgcagcaacgccaccagaagcccgtccagccatcttcatcgcgagcggatcccatgccttgccctcagtgtcactgcaattgccagacttgtttggatacatgtcagccacggtggtggaatcggcgtcgccctttgcagccaatgccttcagacgaatgcgctcggccctcgacccgattgtctggccaataatggaggctgctatggtgaatgccatggcagtcttgggcatgttcacagatttcctcagcattccgatgaatggaacagcggcatggacagctgcaaaccactgcggggagaatttcttggtgtgctcacgccacaccccgagagggatgtttgctgccattccaagcaacgcaatggctaccatctttgcaggcaggggctggggacggagagacttcacaagttcagtccgtgcaagggctgcacgtatagcgaccacagcaggcgggcacttcagcttcacacctgctggtggttgtaa

SEQ ID NO: 1381 - DNA, 524 bp, Oryza sativa
gcggggtgggatctcatcgtgcacccgggcgtcccgctgtgccacgccggcgatgccaagttcacgctcgagtcgttcatcacgctcaatatgttcgttggcttccaccagtgggacttcggcctgagcgccctccacgaccggagctcctatgaccggcgacggttcttcgacgagttcgcggagcttaaggcggcaccagcggcagagttcctcgacgcgcggagctcgcggtggggcgcgctcgacgagttcccgtgcgacggtggttcgtcgagttcgccaagatggcgcgccacgtctggttactgcattgcctcttcctcacgttcgatggcggtgtgagcaccatcttccaggcggctgccggggggcgatatggacgccaacggtgacagtgacacagcgctgggggcggcagcggtgaccgcgctgtcgggttcaccgtcgtgctggggttcaaagttggctggatggtgatgcaatgccgtgtatacctctcacgcccggtgcgacaaccatga

SEQ ID NO: 1382 - DNA, 522 bp, Oryza sativa
ggctttgctgaacccacgtcagacaaactgctaccggatcttgatcctctaaatcagcatatcttcactctagttcttgatctgaatgaaacactcgtttactctgattggctggtatagtgaagaagcgtgaaagaggatggaggacttttaagaggccaggagttgatgcttttatagaacacatggggaaattttatgaagttgttgtgtattctgatcagatgcctatgttgtcaagacctgcaactaagtatcaagatggtaaacattatcggtaccaggatttgtcaaagttgaatagaaatcctgcacaagttatttacatcagcagccacgctcttgaatcttgcttacagccagaaaattgtgttcaaatcaaaccttggaaacttgaaactgatgacacccagctgctggatctgatcccatttctagagtgatattaggactgtgcttgcttcctatcaaggtcgtgatgttgctgcagagtttatcgagcgttcaaagggaacaccagag

SEQ ID NO: 1383 - DNA, 522 bp, Oryza sativa
  N_region (45)..(45): n = any nucleotide
aggggtttctctacattccatgcattggttgcagctgttgtttcnttttacctggttgtgatatctgacctcttctcgattggttactttttgacagatttggtgatgattctgtggtatttcccctctttaggtggaaaggaatataatggattggctctgtttgtcggatggctggtagttgctcgggtaatcttgttcatatatttcttcactcacatgtacttccattttgatcagcaggtgaagtccatcttccccctgggcttctacagtatactgacggtgccaccggcgctggcagtgatgaacctattttggttctggaagatattcaagggaatgttgaagaccctgtctaaaaggagacagcaaagtgaaaacggaaaggcagagtagaacttacaaggaaggtggaaggaggttttgttcacttttattgttagtgcgtctaactttcgacaaatcaaagttaaacatcctttgtacttacattacatttgggcgttttctattcattag

SEQ ID NO: 1384 - DNA, 517 bp, Oryza sativa
  N_region (493)..(494): n = any nucleotide
  N_region (496)..(496): n = any nucleotide
  N_region (500)..(500): n = any nucleotide
atggcatctgctccttcagctcaggaagaacccctacagccagggacgatgcaattcaggaagcagcttgctgctgccgtgaggagcatcagttggacctatgccatcttttggtccatttcaactactcgtccagggtaattaactggtcacagactctataatgagagtcctgacatggaatgacgggttctacaacggcgagataaagacaaggaagatagagaacaacctagtgacggagctcacagctgagcagctcctcctacagagaagcgagcaactgagggagctgtacaactctctcctctctgaggcctgtcactgcactatcgccggaggatctcggcaacgtagaatggtactacgttgtctgcatgacctacgccttccgccctggacaatgccaggtaaaagctttgcaagcaatggatgtgcctggctgtgcaacgctcagtctgccgatagcaaagccttcccgcgcaagctcttnncnagangtacgtacattaattaa

SEQ ID NO: 1385 - DNA, 495 bp, Oryza sativa
atggcggcagagaagaaggaggttgccgacgccgccgccggcagcggcagcgacacaatcctcctaatcagctccgacggcgagcacttcaacgtgccgtcggcggcggcgagcctgtcacagctcgtctccaacatgatcgaggacgactgcacgacgaacggggtgcctctccccaacgtcgcctccaaggtcctcgccaaggtcatcgaatactgcatcaagcacgccgccgccggggaggaggaggagaaggatctgaagagcttcgacgccgagttcatcgatgtggacaagaacatgctgtacgacctgctcctggcgtccaatttcatgaacatcaagagcttgctggatttgtgctgccagcacacggcgaacctgatcaaaggcaagtcgccggagcagatcaggaaggagtttgggatcaagaacgacttcacgccggaggaggaggaggaaatccgcaaggagaacacatgggccttcgagtag

SEQ ID NO: 1386 - DNA, 492 bp, Oryza sativa
acagtgttacagtttgggaagacaagaaagctgtctgttgaacgagctgatcccagaaacgcagtcggcagctcctacaaaaacgccagttctttcattctcacagggctcaaccaatggcattggagcaagttttctcagatcgtgatagtgaagatgaagttgatgatgacattgctgattttgaagatagaagaatgcttgatgattttgttgatgttacaaaagacgagaaacttattatgcatatgtggaattcatttgttcggaaacaaagagggtactagcggatggccatattccctgggcatgcgaagcattctcgcagtttcatggacaagaacttgtacaaaatccagctctactatgtgttggaggttttttatggtcaaactctggaaccacagtctactggatgcgcgagccatgaatgcctgcaacacaattcttgaaggctacctgaacggaagctcggatccaaagaaaaattga

SEQ ID NO: 1387 - DNA, 485 bp, Oryza sativa
  N_region (57)..(57): n = any nucleotide
atggccgccgccgccgccgtggtgaactacccgctcgtcgcggcgctcgtggcgttngcgctcgcgcagtcctccaaattcttcaccacctgaaagagaagcgttgggatgccaggcaacttatagcttctggggggatgccatcatcccactcagccacagtgacagcgcttgcagtggccataggaatccaagaaggctatcgtagcgccacctttgcaacttcagtaattattgcatgtgtggtgatgcatgatgcttttggagttcgcttacatgctgggaagcaggcagagttgaatcaaattgtgtacgagctaccagaagagcatccattatcagagacaaagccattgcgtgaaattcttggacacacagttcctcaggttagcttagtttgcatgattctgtcgaattttagctatttctgtggccttgtaaatactgatattcaaagcagaaagaaccgtaggaagattctctaa

SEQ ID NO: 1388 - DNA, 482 bp, Oryza sativa
tcaagacaggacctagttttactgaagctgctatgggacggcttgctcaaggaactaaagtcttagcagaaggtggctatgaaaaaatattcaggcaaacttttgaggttcttcctgaggagcagctgaaaatatcttatgcatgctatctatcaacatctgctggtcctgtcatgggagtcatgtacatttctacagctaaaattgcattctgcagcgacaatcctctctcttacaaagctggaaataaaactgaatggagttactacaaggcaagaattgttcatttccttgtggtcattcctctgcaccagctaagagcggctaatccttcagtgagcaaagtaaaccctgctgaaaagtatattcaggttgtttcagttgaaggccacgagttctggttcatgggttttctgatgtatgacaaagccgtgtgtagcctccaagaagccatgaatagtgcccgcgagatgcaaccgtag

SEQ ID NO: 1389 - DNA, 458 bp, Oryza sativa
atgggaagatcaccttgctgcgatgagagtggcctcaagaaggggccatggacaccggaggaggatgagaagctgctccactacatccagaagaatggccatggcagctggaggacactgcccaggcttgcaggtttgaacaggtgtggcaagagctgcaggctgcggtggacgaactacctgaggccggacatcaagaggggcaagttctcccaggaggaggagcagaccatcctccacctccactccatcctcggcaacaagtggtcggcgatcgcgacgcacctgccggggaggacggacaacgagatcaagaacttctggaacacgcacctcaagaagcgtctcatacagatggggttcgaccccatgacgcaccggccgcgcaccgacttcttcgccgcgctgccgcagctcatcgcgctcgccaccctccgtgaccagctcgccgcgacggc

SEQ ID NO: 1390 - DNA, 444 bp, Oryza sativa
atggcgaagtcgcggccgcccaagcggatcctcgagtcctacaccatcaagggctccgacaaagtcatcaagcattatgggagttcagtctctggggactgtgtgctaatgagggcatctgatacatcaaagccaccctatgtggcaagagttgaggctattgaggctgcagggtcacgaggcacaaatgtgagagtacgggtgcggtggtactatcggccagaggagtccatgggtggaaggcgtccatttcatggtgccaaagaggtgttcctctcggatcactatgacgtacagagtgctgacaccatagagggaaagtgcaacgttcacagcttccgtagctacacaaagcttgattctgtcaatgctgaggacttcttctgtcgctttgagtacaaatcagccacaggaagcttcgtgcccgaccgcattgctgtgtaa

SEQ ID NO: 1391 - DNA, 438 bp, Oryza sativa
atggcggaagaagatatcaacaagatgatgagctccgacggggagatatcatcaatggcagagagggcggcgagtctgttgcgggaactgcggcaactgatcgaggacggctgcgccgccgccaaacccctcgccgagatggtcgagtactgcgccaagcacgccgccggcgacgaagctgaaggcaaggaagaggaggtattagatgatggcgagtccagcgacgatgaggaggagacggacatgctcaggctggaggccagctcgatggacgtggagaacatgctcagcgtggccgcgcagcgcacggcggagctcatcaaggacaaggacaagccgccggagccagagccgtcgccggagccatcgccggagaacgaccccttccacggctttcacagtttgcattcatttactgagcactgctacacggactaa

SEQ ID NO: 1392 - DNA, 427 bp, Oryza sativa
atggggtccggatctttgctcaaggttcttgccaagaacttcgatgttcttgctggtacgcttcagttaaggcaatagaaaccaaatcccctgtggatgatcaacaatggctcacatactgggtgatgtactcattaataacactgtttgagctcacatttgcatcaattattcagtgatgaaattgatctttatttgctggcttgtcttgccatacttcaatggtgcagcctttgtgtaccaaaattatgtgagacctatgtttgtgaagcaccaaatggttaacatttggtatgtccctcagaaaaagggccttttcggtaaatccgatgacttcctcacagcacttgataaatttattgaagaaaatggacctgaagctctgaagaaactgactaacaaggtatattggtctaaatttagttaa

SEQ ID NO: 1393 - DNA, 422 bp, Oryza sativa
atgggagtgaagaaactagtcggcagtagacgtagatagcttgtgttgaagatgatgacgcctattagcggtgatggcgacgtagccagccgtgaagaagatagcatcagttggcgtcataataggccagacgtgcaggcggaaacaccagttcggcggcggacgaggcggccggcggaaacaccagtcggcggtgaacaaggtggctgggcagtgaagatgtagacgcctaacaacggtgttgtgaccaaccaaccgtataggcgaagacaccagtcggcggcgacgacggcaagccggtggtgatgttctgactgatccattcctggagcgtaagagataagcttaaagccataaatcccttttatgcatatctggatttggatcctacagaacaaacatataggatgagtagtatctga

SEQ ID NO: 1394 - DNA, 417 bp, Oryza sativa
tttgtgaacaaggatggcacagagcagacaatcagtgtccctgttggaatgtccatcttagaagctgctcatgaaaatgacatcgaacttgaagggagcatgtgaaggttcacttgcgtgttcaacctgtcatgtcatagttatgtattataataagctagaagatccaacagatgaagaaaatgatatgcttgaccttgcatttggacttacagaaactctcgtcttggctgtcaagtgatagcaaagccagaacttgatggcatgcgactggcattaccagcagctacacgaaactttgcggtggatggctttgtaccaaaaccacactaaaagactgataactgagactgagaagtgagaacacaggttcttacacagcatcatcaattttgtagcccaacacttgtaacttaa

SEQ ID NO: 1395 - DNA, 414 bp, Oryza sativa
atgcagccgcagggcggggcagcgggagcgaagcgcaaccgcggattggcggcgcgggaccgatcccggagctgtgccgcacgttggagaagcggtaccgcgacggtaccgcacattgggcgtgcggtaccgaggcgcacgcgcataactgccgtgcggcaccggggtggattgcgggaccgggcgtgcggcaccggcggattgcgggaccggccgtgcggcaccgcggtggactgcgggactggccgggggaaactcggtcccgcacgttgggtgtgcggcaccgttgcagtcccagaacagggggcggtcgcgcgcgctggttctgcggaaccggggcggtcgcgcgcgctggttctgcgaaaccgtggcggtcgcgcgcgctggttctgcgaaaccgtggctaccgtctag

SEQ ID NO: 1396 - DNA, 413 bp, Oryza sativa
atgggatcgaggcaacccgcaggaagtagcctcgtcgcgcctcctcctccggtcaccgccgccattgccgcgaaatggaatcggttgctcgccgccgccgccgccgccgcctccatagtcccacacggccaccacctgccgccgccgccgaagccccccgacccgacctccatctccgacgaagctcctcattgccatcgcgcggcccaactgccgccgcggcgagcccgcgagagcccaataagtgtcagttcgatctctcccgttcttcaccggctccgtgcaaagggacaaacaggagaagttgcagcatcaataatgaggcgtttgtacgcatccaatccacaacgatatatcttaatatctatatcccggctatgatgcatataagggagatcgagagagatcgatag

SEQ ID NO: 1397 - DNA, 405 bp, Oryza sativa
  N_region (72)..(72): n = any nucleotide
atgcagttcttggggcagcagaacgcggcgagggcggcgatggggttgccggcgctggtgtgggacgagcgngtggccgggtacgcgcggtggtacgcggagtcgcggcgcggcgactgcgcgctggtgcactcgtcggggccgtacggggagaacctgttctgggggagcggcacgggttggtcgccggcgcaggccgtgggcgcgtggctcgccgagcagccgcggtacaactactggagcaacagctgctacggcggcatgtgcgggcactacacccagatcatgtggcgcgccacgcgccgcgtcggctgcgccatggtcgcctgctacaacggcaggggcaccttcatcacctgcaactacgacccgcccggcaactacgtcggcatgcgcccctactga

SEQ ID NO: 1398 - DNA, 386 bp, Oryza sativa
atggccgccgccagccagtggaccaccttcttggtccccctacgacctgcgcgcgtcgatctactaccggggaacgccggatgcaggccgtcgtggctggatctaccagcgctggtgtacgacggcacgaagttttgcaatggcgtcgtgcttgggacaataggagttggtgcgattttgcgccttttgccacaaccaacctcaacatgggctagcgtgaaggttctcaaggaggtgaccaagacgaggaaggtgcctgtgctggaggtgcccttggcgttgaccaagatcaagaaggcaaatcttgagacatcctcattctttgagactcttagagggacagagttcccggtcaggacatggatgcgcatctttgtgaaggttag

SEQ ID NO: 1399 - DNA, 385 bp, Oryza sativa
gtggaagtgtgccttcagacatttggtccaggccaaaggacacccatccacaggcactcatgtgaggaagtttttgttgtgttgaaagggaaaggcacactctttctgggatcaagctcaatgaagtaccctggccagcctcaggagatccctgtctttcagaacagcacatttactatccctgtaaatgatcctcaccagcatgaggatttgcaggttattgtggtcatatcgcgcccgcctatcaaagttttttctacgatgactggaatatgcctcacacggctgcaaaactgcagttccccatcttctgggacgaggaatgcttaattgcacctaaagatgaactccattataggcatagtttctgtgttgaactttattc

SEQ ID NO: 1400 - DNA, 385 bp, Oryza sativa
ccccctagttgatattgggcttgcggggaaggaggctgatattgataattcaagttgccctcttactgctgccttggtggtgtttgctgaactggttgcacaacctgttgctggattggttgtacaacctgttgaactgggagtgtctgttgaatcggttgctgctgtattggatcgacagcaggttgaggttgcagaaacgtggcaacaacctgatattgggtcagccgattcgcaacctgcccactatgctatggctgctctctcattaacaaccgagggttcaccagctggcctggtgccatcgctgacggagcaggcaagggagtcgatgccggcgccatcggctgagctgatggtgcaatggagggaaccgcctgaatag

SEQ ID NO: 1401 - DNA, 381 bp, Oryza sativa
cacgcgaagctcggggagagggaccagcaggagtggctgagcggcgagaggttcctcactgattgcaagcggcgggagtcgccgttcctcaccagacgggagaggttccgcaacgagttcatgcgccgcgtcgtgccgtgggagaaggggaacctcacgtggcagaatttcccttactacgtcaagagtgtacggcgtcccacctgcggcacaatggtgtcacatctgagtatggttctcgtttgcaatcctctggggggaggatattgctccagagcttaccagggaactgagctttacagggagagattagtaagagctctcgcacacgagttgcaggtgccgctgctggtcctggacagcagcgttctagctccatat

SEQ ID NO: 1402 - DNA, 367 bp, Oryza sativa
  N_region (342)..(342): n = any nucleotide
atgtacgattttttttcatttcatatagatggatcgacaatggatgtacgctgaccggcggtccaaagagtttatcgacggcgtgcattattttttgagaggccgaagctaacaagtggaacggttttatttgttgtccatgcaataagtgtaagaaccagaaggagtattctgcatccaggactattcatttccgcttgtttgagtcggggttcatgccaagctataattattggacatcccacggtgagcaaggggttgaaatggaagaagatgaagcggaggacgagaacattcctgactgggctcaatacgctggatttgaaggaaatcaaacgggtnaggtggacagggatgctggcgataa

SEQ ID NO: 1403 - DNA, 366 bp, Oryza sativa
aagcaaatatctacaccagtgcgggtgcaaggccttgagaatgtaaaggtgattgctgtaggtgcattccataatttggctctaacagaagatggaattttgtgggcatggggtaacaatgagtatggtcaactgggcactggagatactcaaccaagatcgcaaccaatccgtgttgaaggattatctgacctttcattggttgacattgctgctggaggttggcattcaactgcattaactaaagagggagaggtgtatgcttgggggagaggagagcatgggaggcttggatttggagatgataaaagtagtcacatggttccccaaaaggttgagcttcttgctggagaggatattattcag

SEQ ID NO: 1404 - DNA, 358 bp, Oryza sativa
  N_region (160)..(160): n = any nucleotide
gtcaaaggccactggacagtggaagaagacagttagtggaacaatttggactgaagaagtggtctctgataggggggatgctgcctggaagagtaggaaagcaatgcagagaaagatggttcaaccatttgaggcctaacatcaagaaagatacttggancgaggaggaagacatggttctgatacagatacacaaggaagttggcaacagatgggcagagatagcaaaatgcctacctggaagaactgaaaactccatcaaaaaccactggaatgcaacaaaaagacggcaatttctgcaaaactacatcaaaagtcttgccatttctccacaagaatcacagatgaacaatgagag

SEQ ID NO: 1405 - DNA, 356 bp, Oryza sativa
cgcgtcgccgccctcctcggcggccgcgtgcgcgccagccaccgcctcctctcctcctcgagattaaaagaattacatgctaaagaaccaccttctgaaggtaagatgctgcgattaagtgttgaagctggtggatgttctggattgcaatattctttctctcttgacgtcaagaaaaactcagatgatcgaggatctttgagaaagatggtgttaaattggttgtggacgatgtctcatatgactttgtgaaaggtgccactgtggattatgaggaagaacttatacactccacgttcgtgaatccaagtgcagttgggggctgcagttgcaagagttcttttatggtcaattag

SEQ ID NO: 1406 - DNA, 351 bp, Oryza sativa
gttattaagaaccatcctagttcattaaagctttatgaacagaaactgctaggaacaggcgaagtctcaaaagaagacgttcagaagatccacgagaaagtcaacagaatcctgaatgaagagtttgcaaaaagcaaagattatgttcccaataagagggactggctttcggcttactggactggcttcaagtctcctgagcagatttcacgcgtccgcaacactgggtgtactatgagcttgatgaagaacggaagaagactgaacgcagtgatgttgcaatttgcagagttgaacaactttgtccattcccatatgatcttatccagagagagctaaaaagatatccaa

SEQ ID NO: 1407 - DNA, 348 bp, Oryza sativa
  N_region (92)..(92): n = any nucleotide
atgacggcgcgatttgcggaggtgggagaacggagggaggcgcctgcggggaggtcgatggaagaaggcggcggcggcgcgcataggaggangggggcttcgccggcggcggccgcgacgcgcatcggcggcgcgcggcggaatttcggaagagaggggaagatgagaagaggagtggatggctatttggcgatttttccagggtggtttctgcaaaaaggacggggacgcgagggggcgcgggggtgtgaaatggacggcggggagatggcccgcgtgggatccgcgcgatctgggccgtccgtttccacgtcggccgcctttgtgtcccgcttcggcaatttttga

SEQ ID NO: 1408 - DNA, 334 bp, Oryza sativa
  N_region (326)..(326): n = any nucleotide
gggtacattaaaaagtttgaggtcatcgatccccatagagttggaaaaatcaatgtagagcttcatggaaggattaaagattcaggatattagagccaaggaaatagaacaatacagagttcggatgcttccaacacggcagcagtggggctatgtcgtgatcacaactccaaatggtgtactggatcatgaggaagcaattaagcagaatgtgggcgggcaagtgcttggttattttcattgagaagtaacattgttttcctgtcttgttatgtctggccttgttctcctgtgtgttatcactgaactcttttttttttttttgnacttttga

SEQ ID NO: 1409 - DNA, 333 bp, Oryza sativa
atgggcgatgtgtgcgtcagagccggcgccagccctctctcccccttgtcctccctctccccctccgcacgccggcaatgggacctacggcggcggcgacggacttggctgcgagcgccagtcgtccctccggtcgcatgggcaccggcgccgcatcgacctttgccccacgtcgcatggagacgacgacaacagtgtggtttcggcgcgatggagctaatggccctcaacggtgacggccacgctgcggggttcgctagcgcggggagcagcaagcgacgtcgactggtgtcatttctgcatcgcgggcaaatcggaggacttggaccttag

SEQ ID NO: 1410 - DNA, 330 bp, Oryza sativa
tatcggttaagatccaaggttgagatagacaatgttagtaaggaattcctgtgttggcaaagatttggacgcaatgcaccgctagttgagtctgacaaagaagccgatgagcgccattacttgctctggcggatagagaatggagttgcagaaggctcaactgagatcccgaaagtgctccaggctcagaagtcgtggacaaggagtctggcaagaaaatcggtacagttaacactgctcttggcagccgtggtatgggcctgctgagacttgaagaagccctgaagcaaaattcaagccttgccatcaaggataatagggatgtgagag

SEQ ID NO: 1411 - DNA, 326 bp, Oryza sativa
  N_region (60)..(60): n = any nucleotide
  N_region (87)..(87): n = any nucleotide
tctccaagacgcaatcgtctgcacggcgtggtggtgggcctgaagattcgcgtaggggcncggtggccagcggacgatgacatcgangcgagcccgcggccggcgtttccaggcatgtccgcgacggggcgaggagggccgatgacggatcctcgtcggggggcggcggcgcggcgcggtgagcctgcgggcggtgcttgcacggcggatccatgtcggcgaggcgtccacgtcgacgaggcgaggaggatccgcgtcggtgcgaggcgcggcggcgaggcgaggcggatctacgtcggtgcgaggcgcggcggatgcgcgtcgac

SEQ ID NO: 1412 - DNA, 322 bp, Oryza sativa
aagaactggatggtcgacctcggccacccgctcctcaaccgcgtcgccgagagcttcgtcaaggccgccggcgtagtgaaaagcgtgagcaaagagtctctccagtggggggctcgcggccgggttgcactcggggctgacctacggcctgacggaggcgcgcgggacgcacgactggaagaacagcgtggtggcgggcgccctcaccggcgcggccgtcgcgctcacctcggaccgcgcgtcgcacgagcgggtggtgcagtgcgccatcgccggcgccgcgctgtccacggccgccaacgtgctctccggcatattgtga

SEQ ID NO: 1413 - DNA, 321 bp, Oryza sativa
gttatgacagacccagatgtgccaggaccaagtgatccatatctaagggaacacctacattgattgtaactgatatacctggaacaacggatgcctcttttgggacgggaaatcataagctatgagagcccaaagcccagcattggtatccacaggttcgtttttgtgctcttcaagcagaagcgtaggcaggctgtagttgtgccatcctctagggatcatttcaatacacgccagtttgctgaggagaacgaacttggccttcctgtcgctgctgtctacttcaatgctcagagagagactgctgccaggagacgctaa

SEQ ID NO: 1414 - DNA, 303 bp, Oryza sativa
aaaaaaatcaggaagcctaagccctggaagcacccccaaccgataacgatggtccagctcacgaagatgcgcgaggagttttgggacacagctcctcactatggtggtcggaaaggaaatctgggatgccctgcgtgttgcggcagagtctgaagtgtcccttgcacaggcaattgtggaaagtgcagccataattgtttctaatactgatctgactctctgctatgatgaaagagaggtgcgaagtatgaactgcccaagtatgtcttgagtgaaccaaccaacctgattcaagacagctga

SEQ ID NO: 1415 - DNA, 3165 bp, Oryza sativa
atggccgacgtcacgtttggcgccgtgaaattggtgctgggcctcatccaggatgaggcccggctgctcagcggcgtccgtgaggacctgcgcttcatcatgcaagagatggagagcatgaacaacgtgctccgccacctcgtggcaaacaaggggagtgccgccgctgactaccagctccgtccgtggatgaagcagatcatggaactcgccttcgactccaaaaactgcgtcgagctctacacgcagtccggtggcgggcactgtggttggcagccctggacaatggtagctcgccaccgggtcgtcacccggatccgcgagctcaagatccaggcgcgcgaaatcagcgagcggcaggcaaggtaccacattgctggtgttgctcatgcccagcagatggacgcgaccaccacaatagagcgctgggatgctagtgtgcccaaccagagtcgcgcctgggccggcagctctaacaacccatcccggcgtgccatactccacgacggctggtttggcgactacatcagcgtggatgaggctctctcgcggctcaacccgttcacgctagaccgttatgaggtagagccaccggcgcggttggacagcgatgacgagcagcagccacggcctcagttgaacagcgacggtggcaaggagcagcccctagcgccgcagtcggatggcagaaacaaggagcagctgccgcctccccaatccggaggcggcaatggcatcaagcagcagcagccactgcctccgcagtcagatggaggcgacaaggagcagccgcctccttcgctgtcggatggtggcgacaaggaccagccgcttcctcccgactgcggcgtcaagcggcagctgccgccccagtcggacggtgatgacaagcagcagccgccgccccagtcagacggcagcgatcagccgccgccgccgcagccggatggaggcgacacggagcagcagccgcctcagtcagacggcggcgacaagaagcagaagcatattagagtcgtcacaatcagtgtgcaagacggcacggatgaagctgttgctgcagaggccgtgatcgagcgtttcaagagccgctgggcacggcggggactctggtcgcagcagctctgcctccacgtttctgtccatcggcctccgattctctcggagattacaaaggtcatggttgaaaagctgaaagagaaggaggatgatgagaagaatgaggcggaagacagggagtggcttggccataaattgaaagatgaagatgtgctgcttgttctttccggttttaattacccagcgttatggaaccaggttctggatttgctgacctcgatgagctgctctgactgtgcagtagtactctgcacaaacgatagtaagatggcaaaatattgctgcagcaatgactctgccaacgatgggcctcagataatctactctctcgttgatatttacctcaacagagcgctcgccctgctttcccacagctacggatacgaggaaggacacttgaaagaaattctgcgcaacatcctcgccaagtgttgccttgatgtcttctgcatgaagatgctcctccatgccctctactacaatcctgacatgacgaaacaccaactgcagttcctgaatataagccttggtaaagaatttacagatcatgggagacaggaccgaataatggccttctgctaccaagcactgccaaatagttacaagaactgcttatggtattcaaccattttcgcccgtggaagcggcgtccgaagggcaagtttaataagacgatggattgcccaaggcttgatagcccaagtgaaccagtcaagtgcagaggacgaagccgggcactgtttcgaagccatgcacagccagaagcttattgtttcttctggtcttagtggtacacgcaaggtaaagagctgcaccgtgcatccagtagtttctggcttgatcagcagggagtcttcgacagttgaggacctattgctcaacaaccagctgccacttgacttggatctcctctactcaatccggcacggcatgcaactccatccggcaaactctaatatcaaaaagttcttgaactcactttccagcagttcaaggttgctgctgacagtacttgatttggaaggtcgcaagggcctcaaggcaggcgacctccataccgtatgcaagattcataaactcaagtatctaagtctccggaacacagatattgcccaactgcccaaggaaataggtcagctcaagctcttagagacacttgacatccgaggaacaagggtacaagtgttccacacggcgctaccaatgctaaagcacctgcttgctggttgcattattgactacccaaaggaagacatcatcaagtccaaggaatcattctccacggtttccatgcctcgtgctgttgcaactatggaaaagatggagatattgtcccgtgtcaaggtttcgaacagtgctaaagaactgaacaacattggtgacaagctcgagcacctaaagaagttgggtgtggttctatctggcaagaaagctagcttgatagatttgttccttcaggttgacaaactccacagatgtcttcggtccttatcaatccgaatggatccaccaggtaactgggattctattgatgttattttattgagacctccaaagcttctggagagcctacacatctgcagcatcagaagcgggttgcctcccaggatcaaggagctccatcagcttgccaagataactctacgtgacacctttttgaatcagggtgccctcgatatacttagcatgctcaaaggcctacgctatctcaggctttgctaccattcattcgcagaaggcgctctgagcttcgtgaagtttgtggaacttgtggatcttgtcattgaagatgatattgttaacagtgtcgccttgggtaataatacttatggtggagaccctgataaacttgaaaagatagtttggtccttcactcacatggaggagctttcaggggtcagtacgctgcagagtctgacacacatcgaactcaatgggagaacatggcacctacagaatctggaaaaactgaaaagagaagtagatgaatgtgggattactttcacgctcaatccacctgagaatggccaaggatcaaggctgtag

SEQ ID NO: 1416 - DNA, 2703 bp, Oryza sativa
atggacgatgagcctgttcttgttgatttcttgtcgatgaccctggtcaacctaaaatctagaaagcagcggtctgtggcatggtttgatgacactgggaagtgcttttatccttctctattctttgatgaggaagctgatgaagtggctaaagtaggcggtgattttgagggcgccacacagggaataatgttggataaggttgcaaattctccaccagaagtggtgaagcaagttgtccttgaatctagtcctccagttccacagaagcctgccactgcagacatattacgcaaaaagatcgcatctgtggaacgaggcagtgaaggctttctttttgcgcaggaccttttcctctctggcatgggtccatttgcaacgccaaataatatactgcacatccaccgctactctccgaatgatatcactgcacagtgtagacttcaagcttttgaaaaacaaatgatgtccaccaaggaagaacgtggtgatgcaaatgtaaggtatggatggctgggatctaggaagaatgacatagttaggatcctaattaatggttttggtaacaatggaaaacctgctgagaaggcaggcttgagtgctggtgtttatctttcaccagaagaccgagcattttccagtgttggtctttgtgatgttgacgaaaaaggagtgcaatatatgttgctctgccggttgattttggggaacatggaggctgtcatgcctggatcacaagattcttttccaagcagtgacatatatgattctggtgttgatgattgctcaaatccaaagtgctacgtcatgtggccatctcatcttagcacccatattcgtttagaatatcttgttagtttcaggctttcctcgaaagttcgaaattatttacttggtttgaagggtttatggtttcacccatcaccaaaggaagttgcggtggatatttctactcttgtacctataatgagtggaaatgctgagggaccaacttccccttggatatccttcagagttctttttgccatgattcaagaaaatatatcatcggtagcaagggaattgctcttccatcattatgaagagctgaaggaaaacaaaataactcgtgaggagatggtaaagcaaatgataatattagttggagagaagttgcttttggaaaccttgaagaggcttcattactgtccatcattatggtataaatctgctggcaaaatagcatcttctgatcctgcgaggacagctgcagaagacaggtctttggatcaaactgggaattgttcattaattgttagtgttgcgcatggtgattctcatgccccaaatgcagtagctgaaaacagcaccagtctttgcaccaaaggatgtgatactcctgcaacaggcatgatttccaagggctatgattctctggcaccaaaaggtgtgccggaaacttctacttctgtcggccccgtacatggggcttctccaagtgtggaacccaaagtgagggattctcctatacaaaccgttttatcaggaaacattgctactgattgtgccaaaaggcaagatccattggtatcaagagtggcacctgtagctcataatggccttttaaggatgccatctggaaaatcagcatctctcgcagcgcaagtttgcaattctgttagaccaagcacaggaccttcaggtcgtgcttctacagaaccaaataatgcctctaaaagttgtgggatttttgctccgggtgtagaaggtctcaattctgcaccaagagcgacacctccgggtattaggccaaagggcggtgaatctcttgttcatggtttggcattgggaaattccaaatgtgcaggagcagaaggtatcaattctgcaccaagagtgactccactgggtatcaggccaaagggcggtgaatctattgctcctagtttggcattgggaaattccaaatgtgcaggtgcagaaggtatcaattctgcaccaagagtgactcctccgggtatcaggccaaagggcggtgaatctattgctcctagtttggcactggggaattccaaatgtgcaggtgcagaaggtctcaattctgcaccaagagtgacacctcccggtatcaggccaaagggcggtgaatcttttgttcctagtttggcattgggaaattccaaatgtgcaggtgcagaaggtctcaattctgcaccaagagtgacacctaaagacaaggagtttctttcattgagtatttcatcacaacaaagcccagttcttaattcagggcatggaaatcctaaagctttggccactgaggcccgtggttctctatctctgagtattgcaccgaatgtccatgaccctccagcatcaagtaaggagcctaaggacgatgcatctccaatagcaggcatggtctcagaaagccagcactctcaagcacctaatgacagtcaccaagggtacctaaggagtcaaaaggccagcatttacagagtggagtgcacagtcaatcgtctgggccagacgatgctagcagcagcaatgtcgctcgggcagctgataccatcgtcgccctatcaactcttcgagagaagggcagtaaactttgtcatggctggtatcttcggtgtccgtatgggttgtgttgcctcggtgtccgtatgggttgtgttgcttcggtgtccatatgggttgtgttgccggttttccagttag

SEQ ID NO: 1417 - DNA, 2138 bp, Oryza sativa
  N_region (159)..(159): n = any nucleotide
  N_region (628)..(628): n = any nucleotide
atgaaggagtattggaagcggcgtgatagggagcacctcgtccttccaggctcaactatctccttcgactacaacacgtacacccctcgccagcagagcacgtgggagtcatgcctccacctatctgcggtaggagggtcgtctgactacaacaacaanaggccagccttccactggtacagtcgccttcccatgggatccattggaaactgggcaaccatgaaggaagtattcaagaagcactttgttgctatgaagaaagatttctctattgttgaactatcacaagttcgacaacggagagatgaagccatcgacgactatgtcatccgcttccagaatagcttcgtgcgtctcacaagggagatgcatcttgaagacgcaatcgagatgtatgtcggccatgctattgaagattgcatcgccttcaaagaatggctccaaagggcagtcaacgagaaaagaatcaatcttgatgcagatgccatcaacccagactaccatgccgtcaatatggtgtccgttgagcctttccctcaaaaacaaagagaagaaaacaagcaacaacttgggcgaacagcaccggcagccgacatcattattgaacccggcaccgagacaacccctnaggcaagatggattccaagcaaggaagccgcgcttgcacaacagggagtggtcaagaagagagttgcagagatagaggaggttataaaccagatcaagatggatccccttgatgccttcgacacggcgtttagaacccctaaagggaacttctactacactgtcatgctgttcgggttgaagaacgccggtgccacataccagcgtgccatgcagttcgtcctcgacgatttaatccatcattcagtggaatgttatgtcgatgacatgaaagcaattaagggccaagccttggcagaatttcttgctgtacatccagtgccagatgactccccactcatcaccaatctaacggatgaagagattttcaccgcagagcttcaggaacagtgggagctttactttgacggagcctcacgtaaggacgtcaaccccgacggcacccctcgacggagagctggggcgggattggtgttcaaaactccacaaagaggtgtgatctaccactcgttctctcttctcaaggaggagtgttctaacaacgaggcggaatatgaggctctcatctttggtcttctcttggcgctctctatggagaggaagactggcgtcaacccttcctcgattacttcaagcacggctctctacctgaagatcctgtcgagagacgccaactacagtgatgacttccctcatacatctacaaggccggtgtcctctacaagcggtcttacgggcaagaggtcttacttcggtgcgttgatcggaatgaagccaatcaagttctccaagaagtccaccatggagtatgcgatccatgacaatttcaagcaccaaccgccggctctgcttcacccgacggtcccttcttggccgttcgatgcctggggaatcgacgtcatcggcctcatcgatccaccttcttcaagggggcatcgcttcatcctcgctgcaacagactacttctccaagtgggcggaagctgtgcctctgcgtgaagtgaagagcagtgacgtcatcaacttcctcgaacgacacaacatctaccgcttcggggtaccacatcgcattacctccgacaacgccaaagcctttaagtcccagaagatctataggtttatggagaaatacaagatcaaatggaactactccaccggttattaccctcaagcaaatgggatggccgaagccttcaacaagaccctcggcaagatcttaaagaagacggagcttgatgccgtggaggaagagcgcctaggcacccttcaaaatttggagttgtatcgccaaaacatggtgagagcctatgataagctcgtcaagcaacgagtcttcaagaagggcgagctcgtactcgttctgcgacatcccatcgtcgttacacacaagacgaagggaaagttcgagccaaaatgggaggggccatacgtcattgagcaagcatatgacggaggtgcttaccagctgattgatcatcaaggatcacgaccaatgccgccaatcaacgggag

SEQ ID NO: 1418 - DNA, 2097 bp, Oryza sativa
  N_region (2064)..(2064): n = any nucleotide
atgagtgaccaagagtgcttggaggccaatcataggctagaggagaagatcgatctgattttgaagaagttgaatgagatagaagctaacaggagcaagttcttcgaggagatgagcgcctccatcaaggcgaccactactgtcctcacggctgcatcacatcctccactccaggcaccaccttcttcgacgcccaccacctgtttgatgaagtgctccaacgacgatcgtccttgggcgacgtcgagctcaggccacatcgacaaggagactgctccgacagttgccctagaccttggggatggcgaggacaaggttcatgacccctgcatcgtcaccaaggactcatccaaggtcacgcccaccatgtgttcgatgaaatgctccagccccgatactaagcccgatctcaccatggttgcggaggttacctacgccagcgcagccactgcctctatggagttggtaactgctcaggaaaccattggtgccatgtacagcgacacctctgaccattccaaggtgatgcacaccaagtgtttgacggttgtcctcgatgccattggtgacaccggtcaagctatggttgtgttccagacctggacagatgcatttaaggacgatccaacctccgttcagttcatggactttttctcatcaagtatgatggctaacatcaagtggaacacaccaatgcccactaagtgttcggtacagtgccttgggcatggcagcatggcattgatgcctacaaacccttttgatgttaatccatggccacctcctactctagaaaaatatagaagtcaagcagttgtgcatatgttgttatttgagacactattcaatgaggagctaaggttggagagaattgaattgaagccatggccacctccaacctacgatggagtaattagtggatgggattcacagcctatggctggtccaaaattcaaactctattgggcaagagtacgtcgtttgccaccttggccgccacctatcgaagtaagttgtcttgcattggtgtgtcatgacaatgtaatgattttcactgagctgaaggatattaatttgcattggggtgagctgaaaccatggcccccaccaagtcaaacaaacttcaaaaatattatggttcagcccgagcaatgcaagtattggaaaattagagtagaaatgagtatatttgctaggaaggagaagtggaatttacttaatcagaaaagttgcacaatggttgcaatatctagcttgaaggagcatgtcaatgggcaagaacagatctggtgtagaccttggaatcctagtgactacaaggtctcccctgacataattatgttgattacttcgtccgtactgcacccctatcatttggaccatattgttagccttacatatcctgaaggtttggacactctagttagtcataaggtggttcagtttgggagggctgatactgcatgcagtcatcaaaatagacatacaattgttaggacaacagggacatttgttaggcctgagcttggtactgggaatggtacacacatattacttgtttcagaggcagaagctggatatgtgtccataaggaatttgcttgaactgacaaggaatgctaggcagtggcataattccatggttgagtatttgtcatggtttgtggatgcatggatggcaaatagggccagcaattttgacacttctatacttgagatgaacacacatgttcagaaacattcagcttatactcaagtgcatagcagagctgagtcctttgctatgcttgtcagcaacaagattgaggacaatgattttgtattgctgcttctgaaacatctcacttccttaagattgatagctaagattgcattgatcatgccatgggatctagctgaaagcgaaggacaaatttataaagcttttgggacagtacaagggattgttaggatccgtgggctgcagcagcaacaagcttccaagatcgatcaaatcagttggcaagacggcgaacggcgacagcgtcctggttctgggcttggaaccttggcgatctccttcccnacctctcctcctacctccaaatcctttgcttag

SEQ ID NO: 1419 - DNA, 1980 bp, Oryza sativa
atgctcctcctccctggccctgtggtcccgccgtccctctcaaccctcgtcctcccccacacctcatcggcatcttcttacgccaccgtcgccgcatccacatcctcggacaacaccacagcctcgtcctcattctccgtggaagactacctcgtgaacaggtcaccttccaggcccgacgccgtgcttgcattcctcgccgaagagctcgggctctctccgcccctcatcgccatcaccgtggctcgcgaccccaagattctcacctgcagtgtcgccattctggctcgggtacctccgcggctgcgtcgactgggaggcctcaccaacgacgacatcggctggttctgcgtctcctacgcctccaagctgctcgtggcagcaccagatgtagccaaggctgtcctagtgatcgccgacgagttcggggatgcgaccattcaaggacgtcattgtcgcagcgttcctcttgaaaccggagcatctcgcctggaaggcggccttcttcagggacgagcagagctcgggtggacggaggcgcaggtgaagacggcggcagccaagataccgacggtgctgatgctgtccgtggagcggctgaggaagaactgggagttcctgaccaaggaggtcgggatggacgccgagcgcgtcgccaacttcccgtgcaagcgcggccgcacggtcggcgccgttgccccaaatggtgccgcgccctggatggagtctccctgggcgtcactggatggagatatcatccgccttgtcgccgagcacgcgctggctggcgacgtggcggattacctccggctccgcgctgtttgccgccattggcggtccagcaccgtcagcccgcgcggccgcagcgtcgtggacccgcgcttccatccgcgccgccatggcctcttccctggccaccgcaagctccacgggagggttcgcttcttcaacgtctccacgggcgccttcgcgcgtctcctcctcccgttcttcccggatcacttcgtcatcgactcggtcgatggcctcctcctcttgcagcgggatcgggacagtgctatccgtatcctccaccctttcaccggtgacattgttgagttatcatccctggagaccctacggccgcaggttgagcccttcttcaccagcactgagttggcttatatgagagccatggagcgaaaagagatgggcatattctcatatttcaatcgtatttgcgctgctcttagcttcggccctgacggagtcatcactatcatgttcgttgttaccagagtacagcgcgttgcctttgccacctctgcggatcagcaatggaccttgtcaaattggcagaccaacctctcatggaaatacatggcattccagggcaagatttatgcagcatcaatatgggtaaacttctctccaaacagaattttcgtgatagacccaccccgggtggaggcgaatggctctgcttcgtctttttccctaccagaaccaaaattgtttgctacatgtccagtagaaaagctgtttgggttcgcttatctggtgaactgtgaatcagaggtcttgctgatcggtcacactgatcgctcgtactcgcaggccgtggtttacagacttgctgacattatcttgggaaggttcatcccgttaacaagatttggggactacaccattttcatggatgaaaggagcctgtgtgtctcctcgaaggctgttcctggcattgcagatggctctctcatctacaggcaccacgggaaattccttgcacaataccatgttagaagtggcaccctgtcgacagctgctgagggtagaatcgaggaaggctacagactggctccgtacagcctcatccaccatctttttgcttgctgtcttatgacttttgctcttatatgttcatcttacgactttgattatgcgttgataaccaatttactgatcaccatgactcgcatgaaaaaaatatgtactacttag

SEQ ID NO: 1420 - DNA, 1821 bp, Oryza sativa
atggatgctaaaaagaagaggaacaagaagaagaaggggaaccaagggaagaacactggtgatgtaacgtccagcactgcagaggctgccattcggtcccacaatcatgagacagcccctaatgaccatcataatggcactgatgctgatgatgcaatgtccactgttggagaggaagctcctcagtaccagaatcatgagccagatcgacaggcaaatcatgatagcacaaacactgatgatgtcatgtcctctgttggagaggggattccatttcagaaccttgaccctgccatgacacatgaaaatcacaaagtcagtagtacagcccatgctgatcagaggagtgttgagatgtcagattccaccgtggagcttgacatgcacagactatatgaagcaaagcttatattgccaatgcaggataaattacatgatacgataaagaagttggaagatgagaagagtttgtggcatcaaaaaatgagctccatggagattgaggttgaaaagttgcataacaaagtggattatcatgcacagaatgaggtccgtttggaggaaaagctcaataatttacagaatgggtatgatgtgctgattaagaaggaggtagctttggataacaaagtcaggtccatagaggtcatcaatgatgccttaactcatcaggagacgtctcttaaagagagattaagtggactggaggagacaaataaagtactgcttgtacaggtgaaggtgctggaggaagcttcaaacaatactgttgaggaaagccagaggttggtaaaaggttttgatgaactggcatcaagattaggagtctttgaagcaaagtctgctcttactgaagcctccgtgactaaaaagggtaatgaactgattgttgatagaagtgtaaacagttctgcagcaattacttctgtggataactatagtccaatcaacagcagtcctagcaacgcctatgttagtaatcatctagaagaagctccaatgcaacttccagaaacaacaatcaatgatgtttcttccgagggcctcattgacatgaatgcacatcaaaggtcaaagcaagattttgatgaaccaagaacaagcgaagaaattctgccagttgcattagatgatatacagattcatgaggaagacccacaaccaccggtagccgatgatgaggcagaggaggttccattttctgatgctccaatcgtcggtgctccattccggttgatttcattcgttgctagttatctcgctaagattgtgaggatgtatacgatggatgcactgaattcaacagagatatggaacctctgttcagttcttggtagtgtgctcgtgtcactaccagtttttcttcctcccctgtcaatttttcaggggcagcagaagctcttgttccccagttatagtgttatacacacaagaggccttcctgaccataaagttgaccatttggatttgatgtattgcattgattggatggttgctatacaatgttgttttgtcaaattggaaccttttggtgtccccgatttaatgtttgcccctggtattgctgatctctgcggtgccgcattgttgctccatttgtttgtcctagtgttggacctatggatgtcaactgttacttggctttctcgtttgcaatttttcatagcgaagacagacaaccgcaaaaccatgaacagaaaggaactaaactgccaatcacgttgtctcctctaccttgatttttctttccccatagaaaaagactccctagtgacaatttctaatgaacgcaagttaccaacaccggagcacagcatgtaa

SEQ ID NO: 1421 - DNA, 1770 bp, Oryza sativa
atggcgtacaacgacgacgagcagactgctccgacgagcaccgccaccgagccggcgaggccgacggtggggatcacgggccaactggtgaagcaagtgcgtctcaacaagtaccacaacgacgtcgcgtccatggcaccccatgaccaggagctgctgctcgagctcaggggctcctcctcgtccaccgacagggcgggcctggacctcgtcgccgtcatcgacgtcagcggcagcatggacggggacaggatcgacaaggtgaagaccgccctgcagttcgtcatccgcaagctcagcgacctcgaccgcctctgcatcgtcaccttctgcaccaacgccacccgcctctgcccgctgcgcttcgtcacggcggccgcgcaggccgagctcaaggccctcgtcgacggcctcaaggcctacggcgacaccaacatgaagggcggcctcgagaccggcatgagcgttgtcgacggccgcagtctggccgccggccgcgccgtcagcgtcatgctcatgtccgacggctaccagaaccacggcggcgacgccagggacgtccatctcaagaacgtccccgtctacaccttcagcttcggcgcgagccacgactccaacctgctggaagcgatcgcgcgcaagagccttggcgggacgttcaactacgtcgccgacagcgccaacctcacggggcccttctcccagctccttggcggcctcctcaccatcatcgcccaggacctcgagctcaccgtcacgcggttccatggcgaggtcaccatcaagagggtggtctgggtggacgcggggacctacccgcagaccaccgccagcgacggctcctccgtcacagtcagcttcggcaccctttacagcgcagaggcgcgcagggtcatcgtctacctcgcgcttgctgacaagaccgcctcccctccgtacgacgccaatgtctgcttggcacagtacagattcaccttccaggcccagcaggtgacctccaaccccgatctcatcaccataaaacgcagaccgagtgctgcaccaggcgcggcgaggaagccacagccggtggagaacgagctggcccggcggcagcacgccgacatgatcagggcagccagggacatggccgaggccaacaagatggaggacgcgcggaacaagctggaggaggcgcggaaggcactggaggagaatttcaaccaggcggcgaacccgacggtggccatgctcctggaggagctgcggcagctgcgggggctcatggagaggcagtacctctacaacaaggagggccgcccctacgccgcctcctcgctcgcctcccacgaccgccagcgcgtcgccaccaggggccaagccgacggcgtccggctctacaccacgccgcacatggacacctacctcaagcaggccgagcagttcgagaagaaccccgacgaggcgccgccgcccgccacgaagcacgtcccggagccggatcaggtggtcgatcaagagccgccggcgccgcccgccgaggccgacgtcgtcccggacgtgccgcgagacatggcggcgggggacaggaggacgctgtcggcggcgctgcgggtggcggcggcggtgctgagcctggcggcgttcgtgctcatggctagtgtccggacgtccgggtgggacagcgaccgctacgacctctacgaacagtactacaggttattgcatgatcacttgcctgttgcgtctaaacatcatgcattcttaacatgcaacaagtctagatgctag

SEQ ID NO: 1422 - DNA, 1713 bp, Oryza sativa
atgtctgtggagtgtcatatccgactagttagaggaacagttggtcacgccttttgtcaggtttccacagttcatgtcaccaagaaagataaacgcagaagatggagcactttcaccaagaaagacaaattaattgagcacgacgagggagccggtctggcgccgtcgtcggggacggtggaggagacggcgaatttgcgaaaatccaaagttcgcaaatacaaactgcaactccaggttcttgctgaacagagtgatcctgaacagatccggcgacggggagagagggatgcgatgggcggcgatgagagagagagggaggtggccctactcgtcctcctcgtggccacaggcgacagagaggcgattgacggcggcggcgagagggagagagagagaggcgaagaaaaagagaagtggaggggcggcggcgaaaaaagagagattttgtgcgggagggagagattagggggaactcaaacagagagtcggaatccactgcggaacggattggcggccgccacgctgatgtcgcattttcgccgtctccaccgattcatcagggcagggcagatggaatcaggcggcgcaagcgagcagcagcgtaagaagagcaaggggaggaggagaaatcgcatatttttcgtggtggatgagaagaggctggatactggtggcaacggcatatacttcgtcttcaccctaaatctcaagcccatgttcgccgacgccggcgacgacgacgattgggcaacgatgagggccttacctcctccaatcgcgccgttcgattcgctggagcggtgcgccgagcgcctcgacttcgccctggtcggatccaacgtcgtcgctgtcagcacgcagaagcgcaccctcctctacgacaccgccgccgccgtggtgtcgaacggtccggagctccggcacgcgacgatcggcggcacggccctcatcctgctggggacccgactctacgccatggacaaccgcccgtgcgagcccgacccctgcttccaggtcctcctcccgcccgccacccctgtcgccgggtccggcggccggcgccggcgccattggtcgtggcgcgcgctgcccgatccaccggccgacttctccatggtccgtccggcccccgcgatgatcttctgcaacaccacggccttcgtggccgccggcgcgcgcatctgggtgtccgcgccggacaggggcacctactccttcgacaccaccgcccatgggaatgccatggcgtggcgcaaggtaggcgactgggagcttccatgggtgcggcgcgccgtgttcgtgcccgaactcaacctttgcttcgccatgtgccggacaaggtactgcctctgcgccttcgacgtcccctccgccgagccggcggcggcggcgccggtgaccaggtacgcgtgggtggaggagacgtaccctcgcgagtgcctggagcggggatatttcccgcatgggccggcgagcctggcctacctgggagatggcaggttgtgcatcggctggaccatcatcgtcgagttcggcgagcaatacggctattctaatatgcccacgcgcttcgccctcctcctcatggctgtccaagtcgtcgccgtcgccggagaagaaggacagctgcgccttgtgaagcacaaggcgcgctgctacctcatgtcaaaccgagcacaagagatcttcctcctccagccctctttgtga

SEQ ID NO: 1423 - DNA, 1638 bp, Oryza sativa
atggcagaggctgagctgggaagggcgacccacgagaagttcatccccgacctcgctgtcgtcgagtctgccaggtggatgagccaagcccagaccgtgccactgcattcccactttactttccccccctttttccgctctgtggatggcggggagggtgctgtacgaggtatgggaggcttggacaccgccatccggtggtggtccttatcggaagcaacaatggaagaggggttcacaaaagatttactgggatgggagtgcaaagagatcatcccgccagtccattccgagcaaagtgtgcaacagacgcctaataagttttctgtccttgccgagcgaggtgataaagatggaagtacacctcttcattttgctgtctcagtggaagaccgttcatttatcaacatatgttggttccccttttaccggacgatcaacgtcccaatatgtgatctgttggaggttaaacaatctgtggcgtttcaacctgatataactggatctttccccatacacattgctgcttcgatgggtgtcctgaatgccatctccattctactcgagaaatgccacgattgcggtggtttgcccgacgctaagggaaggaccttcctccatgttgctgtggagaagaagaggtgcaacgtagtcaagtttgcttgcagaaacacaaagttgtcatggatgctgaatatgcaagacagcgatgggaacactgctcttcacctagccatccaagcaggcgatcttgggattttcggctggctgatggggaaccagcaagtttgcttgaatttagccaacaaaaatgggcttactcctctagatctcgcggagagtaagattcctccgcagttcagttataaatggactgcacggaacttgatgtacgaaacactgaaatgtgccaaggccgaacacggtaacattcgccgggaccgctttgaaaaggactacacttttcaagcagatgttgagaatgaatccgagaggatgacaaagctagcgcaggctgccatcgtcgggtcggtgctcatcgccacggtcacgtttgctgcggccttcacgctacctggaggctaccgtcaggacgacagtggcacaccgacactcgccgggagctacaccttccacgcgttcgtcatcgccatggcgttcgcctacgtctactcctcgctcgcaacatttgggctcatctactcggcgatgccattcatggacatgagcgtccgtcgcatgtacttccgaggctctctgcaattgatcgcatgctcgttgagaaccttggcggtttcgtttgcgttggccgtctatacggtggttgctccggtcgatcgctggactgctctcgttgtgtgcctgactgcttctgtcgtgatgggcttcgggcatgctaacgttctgcaaacccttgctcttgcatggaagttgctcgcaagaatggggtatcggttgtcggcgatgttactggcaaggataattatgcagttggcgttggcatattggtcatatatacccatttttggtttgccggcgtatctaaagtcacgcagcatcggcggacatgacccttatagccaaatagccgcctacaaaaatgcaaatcggggtgaagttcactgtcggaccacttaa

SEQ ID NO: 1424 - DNA, 1632 bp, Oryza sativa
atggcggaggaagatggagtggagagaggggaggaggagttggccaccgacgaggtccactctggtggcggcggagaagaggggtatcaggctggtctaggtaccaggtatatgatacctaggtacccaacgtactcagatggtaccaggtatctgataccccaggtactcgatgccctataccagatctggtacctatgggattcatgccgatctaggtaccaggtacccgatgcccagtaccagatctggtacctatgggattcatgccgatctaggtaccaggccctcatgccgatgggagctatgagaaaaagggaaaagagacgaggcaagcacaaaaataagatggctatcttccttggaggtggaagaacactattccttcttgttgccatccttgattcggatcgccgctgctacatcctcgacacgcatgtgaccatgatgtacacgagagttcccatgaccaccatcaacgatgtgatgttccgcacaacgagagctaacaccgctctgggagagaggcgtagaggaggagaggcgaaggaggaggacgaccaagcaaagctccgggagagagagagctccacctcgacggcggtgaacaccacgaacagctccgggccatcacggtgttcgtcgtcggtctccaagaacctggcgatgcaggaacctgccgacgaggtccgtggcagagagaggaccatgccactgccatcactagccggtgagaggccgtgctccgggacgtactcggcgaggccgccgatcgaacggcagcgtccagtcgtcggcggcgcgccgtgtcgaagcgcgctagtcctcgccgccgtggtcatcgtaggcgtagatgagcccatggaagcaaccaccggcgaccggcgaatccgaggcgttgaggcagattgtttatctggcatcctggccccgcctgccatagactcatcggtctctggccccacctgtcatagactcatccgcttctctctgctcgttagttgccttcgtcctcctgccgcctcgggtgttcttccttcctccatcgccatggcggcggcggcggcttcccaccgcgtgttcgtctacgggacgctaatggcggaggaggtggtgcgcgtcctcatcggccgctcgccgtcctcctccccggccgtcctcccaaaccagtccgtccacgagacatctgtttcttcttcttcttcttgccaagaatcccctcctctctgctgcgaaattctgatcggccaccgtctcctgcagccagaggttcagcatcaaggggcgcgtttacccggcgattcttcccgtcgacggcaaggaggtctcagggaaggtaagcccctcttgcttcctctctcggttttcaagggcatcactgacagggagctcaatgtgctggatatatttgaagatgaggagtatgtcaagagaaccgttgagatatcactaactgacacatcggagaaattgcttgcttatgcatacatttggggcaatcaggatgatcctgacctctatggtgaatgggactttgaggaatggaaaagggtgcacttggaggattatgtcaagatgacacaagagttcatggaggaactggaacagctcgaaccaaagaccgagacctga

SEQ ID NO: 1425 - DNA, 1614 bp, Oryza sativa
  N_region (836)..(836): n = any nucleotide
atggcgttcgacggcgcactcaacagccaaggagcaggggcaggattcatcttgacatcaccttttggagatcaattcaatcatgcaattcacctcaacttcagggcgaccaataacacagccgagtacgaaggactactcgccgggataagagctgcagccacactcagagtaaggcgactgatcgtgaaaggggattccgaactagtcacgaaccaggtgcataaagattacaagtgctctagccccgagttagccaagtatctcgcagaagtcaggaagctggagaaaaggttcgatgggatcgaggtccgacatgtatactgcaaagacaacatcgaaccagacgatctagcacggcgtgcgtccagacgagagccactcgaacctggcacctttctggacgtcctgactaggccatcaggaaaagaggcaagcggcgaagatagcccgcacgccgttgccgatatcgagaccacggacgactggcgcaccccactcattaaattcataggcagcgaagagttgcccgaggacgacgcagaagccaagaaaatatctcgtaaagcaaaagtctactgtatgatcggcaacgatctatacaagaaggcaccaaacggggtactcctaaaatgcgtctcgtccgacgacgccagacacctcctcctcgatatacatgaagggatctgtgggtcacatgccgccggtcggacattagtcggaaaagctttccgacgggtttttctggccaaccaccctcaaagacgcctgcgacatggttcagcgatatactcgggccattcccacgaggaccagggcggctacgaggttcctanttgtagccgatcgacaaattcacccaagtggattgaagcgacacccatgggggaaatcatggccgacaatgccatcaaattcatcaaagggatattctgcagattcggattgccccaccgtatcataatagacaacggctcccatgtcatcagtgccgatttccaggattactgcatcaggctgggagtcaagatctacttcacctcggtttctcaccctcagagaaatggacaagtcgacagggcaaacggcatagtactacaagtaatcaagacccgcgtctacgacaggctcatgtcacatgacaagaagtgggtcgaggaacttccatcagtactatgggccgtgcgtaccacactgacaacgtccaacaaggagacacccttcttcctcgtgtacggctcagaggcgatgctccccaccaagctacgacatcaaagtacacgagtacagaagtattccgatgaggatcaagaggagcagcgatacgatgatccagctaccaacatgcccttcgccgttaccacgagaagcgcatccgagcacgcacactttcgatcggcgactacgtcctccgacgggttcaaagccaagcagggcgaaacaagctctcacccaaatgggaaggaccgtacacgatcacacaagttctgcggccaggcgcattcaaaattgcagacggcgatggtcgcgagttggcaaattcttggaacattgatcaattacgtcaagaccacaatcaaagtgttccttcccgatgatcccttacccagatga

SEQ ID NO: 1426 - DNA, 1542 bp, Oryza sativa
atggcaacagctcgacacaagcgccacctcactcctcccttctcttaccgacacctccctctccccaccgcctcaaactccaaccgccgccgccaccgcctatcggctcttcaagacgatgaagccttcccactccccggctctgtcaccgtcccgctcctcatcgttgatgtggcacgagcacggctttctttgacaatgcctctcactccttggagacacatttttcgcagggatgcaccagttgcctatatggaggggaatcttctagatgcgatccacgccgcgcccccgccgccggagccgacgacgagtcggctgacgccgccgccattccctgcttccgattctgccccgcgcgccgccggttcgatgggctcccgcaggttcgccgcggttgtcgtcgtgctcctcctggctttggccctgattcccggccccgcggcggcggcgggtggatcacataaagaatcggcgaaatcgtcaaatggccagaatcctgtgaccaaggagacgcaccaccaaacgccaccgccggcaaagccgccgaaggatcaaacaccaccgccgccaccagctgtgtcggagagcaaggggcagaagggggatgccggtaataactctgggcacccggtgccaccgacggatgcgcataagacgagtcccccgcctgaaggtcccgggccaactggtgggaaggagcaggaaggaggagcgggtggggagaagaagaatccgacagaagaaattaagaaggtgttgagttgtgaggatgcagcggagaaatgttctgttccaggagaaattaccgcttgccttcaggtttttaaggatggttcaattaggccatttgttgtagtccagaatgaagggcagaatgatgttaaggtcgatgttgttattgatggtaaaatgctgccattacagctggccaagggcttctccagacaggtaaacataacctatagcaatccaaatggtgtagaaattacagtaaaatctgggaaggggcagtgttccttacacaccaagcaaacagtttttgattggcaacaacagtttcagcagtttgcagcttatgcaacacgcgcgaatccaatctacggagcctccttccttgttttcactgttgtcttggtgggagtggtctgtgcttgttgcaagtttgcaagaaggcgtgctagtggagtcccatatcagcaacttgagatgggagaccaagcccccaactcatcaggcgtggaaaacactacaagcactgtggatggttgggaagatggctgggatgatgactgggatgatgaagaagcggcagcaaaaccttcagataagaaaccatctggaatgcttcaccggcacaagtttgatcttatcgccggagacgatttcaaatcagaagttgttctgaaactgaacagaaacactgtatgttcggacaaaacaatgcggggctctgtttgcccatttgccaagcagagcatgcatgccactgtgaaagattccgttcttcattgctctcatacggttagcagtgtgaaataa

SEQ ID NO: 1427 - DNA, 1383 bp, Oryza sativa
atggcgacaacgggcggcggcctccccttcaccagatctggagggaggggaggccgggcgacgaccgtggcagcggcgcatgaggcagcagcggcggcaaggccgcggcaggcgggtagcagcggtggtggcgctgcacatgaaacggagaatgttccagctgtgtccccggcagcaccaaccaaaaaacttgacgagattcttgtgcttagcttcgctgatagtgctgacttcggcgaagaagtctttatgctcttggctggactccctcactattttcttcacagcaacttcacgctccaaccgcttcaggaatccgctgtacactaccccaaaggccccctctccgagcttgcgatcatcagagaaattgccagtcgcgatggccaaatcgtcgtattcgaatcgcctggcgccgcctgtgccctttccaaaggaggtggggcccatgttttcaccagctcgccagagaagtcacttccgcgccgaagaagctcgctagagagggagaggagtaggggcgctgaatccgagccagatccgcgccgagcttgccatcctatctggcggcgacgagaggagctagcccgcggaggtggtgaagcgacggcgccctcgccagccgacgccgagctcctccgccgcccgcttccgagtgccgacctcgctgttgtttcggggagagggtggaagagggagaggagtgtggtgcaccggcaagctccaagccctgccacccctcccatcggcggtggaggagctcggcccggctcggcactatgtggtggggaaaagtacaaatgcatgtggcgcactatgaacgcccttacagtgatgcactcgcgtggtgccaacgctcatgtcacccgctctcgcatactcgctgtcctctccactgccaactgctttcccctctcctcttttcgtcacttgcctcttgaggaagggcctggtgccgctgcttatactccctgctatctcacaattgatggttcgctctcggtgtcacgtcgccaccacgaagctcttgattccaaacgagcactcagcccaactcgccccaaacctgacccgttgccaaccctaataaggccttatatatttgcacaactcttgctcaactatctcctagtcctcctgccccataccccacggcgtgcagtccgtgtgaaactgggactccgatatggtgctctgcggctgacgtaccacatcttggggtgccgtggtatccaaccagatattcgtccacccttctctgacctgcgaggacgccacataatccttactgggtcagcaaggggttctcacaagatgatgcttgggtgtgggatccgacacctttccgagcttaaccatacggcgtgctctgggaagaggtga

SEQ ID NO: 1428 - DNA, 1362 bp, Oryza sativa
atggacgtgaagacgaggagcaggaataggaagaggaagaggactgtagtaccacctgcagcagctacttttcctgatctgctgccggaggagattgtggtggagattctggctcggctgcccgtcaaatccctgctacgcttcaagtccgtctgcagagggtggcgtgcaatcatctccgagccatccttcatccgaacgcaactccagtgctcggcttctaaacaggagccatccatcctcatcagcccccacaccctccttgggcgttgcgatattcaacccccagttggaggactaggtgattggcccaacaacttctccacccaaatcagcttctaccaatggcagcgaggtgcctccattgccaggttcatggatgccacggccttccctgccaacgagttccacctcgtctgccacttcgcccactgcgatggcctagtgctcgcccccacagacaccaacctctacctcttcaacccggccacgagggacaccatcactctccctgacggccatggtgataaccaccaccatggcacggaaatggaagcttgctacgctgcagggctaggcctagatcctgtcacacgcaagtacaaggtggttcgagcattctaccgttcaatggaccccatccgcatggggatggaggtgttcaccgtcggtgaaacgggcgcaggctgtggctggagggagaccgtcactgatcctccctaccctgtcagtagatggctcactgccttcactgtcaatggtggctacttgttctggtacatggatcggtttcgctaccctaatgacactctccatggtggcctcctttggtttagcctgcaagaccaagcgttccgcgtcactcttcttcctcattcactggaccctgccctagatgacaaggtcaggccggacgtgctacacggcgaattgtgcgtccttcatgccaacagtgacaccatgcctgtgacgatttggacgacaaattcgccgtcttttgatgattgggagcggcgatactgcatctatgtctcgagactttgccatccaatgggccttcttggtgatggcgggatgttgctgtgggcaaaacacaccatccaccgctacgacctgtggagcgatgagctgacggccgtgtgcgagctgggtggcatcagtgagagtctggtcagaattactgcgcgctgcttaaggcttttacgccatgagaagcaacttgtatttgatgtatatcaacctattaattttatcactaaaaatagtgcaaatgatcgaagagatctggtactgagtactgactattgctacttgtttgtgtgtgagagaagcaaagaacagattgcagatgcagagagctga

SEQ ID NO: 1429 - DNA, 1266 bp, Oryza sativa
atggccgacgcaaacatggcgtgggcggagctccccgaagagtgcgtcgccggcatcctccaccacctcctttgcctccctgaccactccatgttctccggtgtctgcacaaggtggcgcaccatcgccatgcggcatctgccgcctatgcaaccgtggttgttcatgccgtccaccaacgcgacctccttcttctgcgtcgcctgcgagcgcacccaccaggggccctgcctgccggacaacgcccgcggcgcgcgcttctgcggcgcccaccttgaaggttgggtcgccgccgccgagattccgcatgatgaccgctctgtcccggggaatcgtgcccccgctctgctcaacctctgcaccggcgagtgcgtcctcctcccgagatccctccgcaacaacaaccctgataccaccttcatcaaccacatccaagccgtcatcctctcctataccccatgtcaggctcacccgtactacgccgccgccatagtttccggcaagcccaacatcatgttctggcgtcccggcatgagcgattgggtgccgcagatgctcaagtgggactcggggttcaaaatgtggcagaagcagctatccaaggacccaatcgaggacgccaactacatcttcttcggcccgctcggcgggggattctatgtcctcaacaacaaggaggacctcctggtgtacgcccccaaggccaacgacaggcacggcgagctcacgatgtcatccgtgaacaagtaccagctccgcagaaatccccgacccaccatgccggagccaggggaggtgctcgcccgctacctcgtggaatcccgcgggcatctgctcatggtcgtcaggttcgtctccacggagaaggccacggtggcgttcgacgtcttcaagctggagctgaagccgccgtcctggaagaaactcaccttggacaccctcgcagaccagacgatcttcctcgggcgaggctgctccttcgccgtcgagatgaggaaatccagccagtgccctcccaacatctacttcctggatgactccgtgagtttcagcggcgcagggagctcgacctcgcaggcgcagcaggtccaggggccgttcccctgcggcgacacgggcagatgctgcgagcagggcatcgtccgctgcccgccgcgagagccgccatcagactcctcgccgtggacttggttctatctgcccccatacgtcgcctttcttgaatggtttaagacgcaagcaatcaaacaactggaacagttctga

SEQ ID NO: 1430 - DNA, 1251 bp, Oryza sativa
atggaccgcaatgagcagacataccatgagaattcttctgcttctgaggatgaggacgatgatgaggaagaggctgtagagtggagcaaagatgagcttgatgccatctcggcactctttgaccggccgatgcgccagaagccaccaaagccgccaaacccggtgaggcagcgacctctcccgctgccactgcctcacaagacacgactgcccaatgctcctgcaccaaagcagcatatcaggctggcagcaagggctgcactttcttcacgctcttcattcagtgaccaggtgtgcaagaacccggaggtcctcattgggattgcccgggagattgcagcgctgccaccggagtctgacgtgtccattgtgctcgatcggtgggttcggttcctccggaaaggatccttgtcaatgaccattcgggagcttgggcacatggggctcccagagagggcattgcagacactttgctgggctcagaggcagactgtcgtgccactcttccccgacgaccggattctcgcttcgacaattgaggtcttggcacgcttcgaccagctgaagatggaggatgcgctagagcagtgcgtcccttcagcgagccgtgctgttcttgaagccatggtcagtgggttcatcagggcaggtaaagtaggccttgcccgaaaactcctcgagttcgccacgatcaacaagaggacactgagcccgagcgtccacgtgaagctgatgctggaggccgtccgtacgcctgagggctacgggctcgccgcggcgctgctggacgagctcggcgagaggccggagctgcacgttcggcagcaggactgcacggccgtgatgaaggtgtgcgtgaagctccggcggtacgccgccgtggagagcctgttcggctggttcagggacaccggcgggaggcccacggtggtgatgtacacggcggtgatccacagccggtgccgcgacgggcggcaccgggaggcgctgtccctggcgtgggagatggagcggcacgccggcggcctcctcgacctgccggcgtaccgggtgctggtgaagctgtgcgtggcgttgcgcgaccacgagaggggcgtccggtacttggcgaggatgaaggacgccgggttcgtcccgaccggcgacatgctacgcggcggaggggaggatgggcaggtgccggaggctgatcagggaggcggagttggccggcgtgaagctggagaggaggctgctttcgcgcttgtctga

SEQ ID NO: 1431 - DNA, 1218 bp, Oryza sativa
atggcaggcaattcatgcgcggaaacattccctgctctctctgacgaccacctcatctccgccctcacctactccaccgccgaccaccacgacctcgtcgacgctgctcctgcggttgcctcccaacccaacgaggacgtctgggatggcccctgcaccgccaccggcgccgcctgcgagccctgctccctcacgctccacttcctccgcaacacctgcggcctctcggaggatgaggcggccgcggccgccgcgcgcgtccgcctgcgctccaccaagaaggcgcacgccatcgtcgccctcttccgcggcatcggcttctcggccgccgacatcgcccgcctcgtcacctcgaacccgtccttgctctcttaccgggccgacgccaccctcatgcccaagatcgagttcttccgccgcgagctcggcctcaccgacgccgagatccgccgcctcgtcctcgccaacccctaccgcgtcctccgttacagcctcaagcgctgcatccgccccaactacctcatcctcagagacctcctcggcagcgacaagaacgtgaccgctgccgtcttgcagtccacggatctcatccacggggacgttcgtggcatcctcctccccaagatcaagatcctccaggactacggcgccacgaacgatgtcatcgtcaagctggtcaccacgcaccccagggcactcatgcatagggcctcccgcttcgaggagagcttggctgccatgaaggagctcggggtcagaccttcctctggaatgttcccctattccttcgggctctttgccagattgcatccaaggaaatggaagggcaggatggacaatttcttgagcttgggatggacaaaggagcaagtgattgaggcgtttgtgaggcacccgtactgcatgtccgtgtcgaatgacaaggtgaagctcatctggcagtttctcgcgaagaagctcaggtggaccaccgattatgtcgcaaggagcccgatggttctctccttcagctacgataagcgaatcttgccaaggtgcacggtgctgaacttgttggcatcgaggggcatattcaacagggacatcaagacatcccatctggtactgggggagaagaagtttaaggagaagtatgtcaccccttaccaggatgaaattcctgaggtactggaagcttattcttctgtggcagaaagtcgagtccccgtgtataagtag

SEQ ID NO: 1432 - DNA, 1215 bp, Oryza sativa
  N_region (29)..(29): n = any nucleotide
  N_region (35)..(35): n = any nucleotide
  N_region (214)..(214): n = any nucleotide
atggcgccgcccgggacgagcaggagganggggcngcgtggtcgtcgggcggcgggccggtgcgcggggctgcccctcgacgcgctgttcgagatcatgctgcggctgccggcgagggacgtctgccgcctccgcgccgtctgccggtcgtggcgcgccgtggcctccgaccgggccttcgtcgacgcgcacgcctcccgccacccgggcccgnacgtcgccgcgtgcttctccgatgaagccgacggcggcgacggcgacgagtcctgcggcggcgtcgacatcgtcgacctgtcctccggcgacatcgtcaagactatttacaccgaagtcagtggatccagagtgcagcgcacgcgcctcgacctcgtctgcctcgttgaagggcctagccccttggatgtcaccgtgctggatccggtcaccggtgctacctacatcccggcaaagagtatctctgcggataataaggatttgctgagttcaggccgtctcataatggaatcctgtgcttttgggaaggtcccctctacaggagagtacaaggtggtccgtctccttggttctggtaatccatgtgagctatacgagtgcgagatcatgaccgtgaacagtgctggcgctttgcaatggagggcgatacaaggacctcagttgcctgtttgttcaagtaacaatatgagaagtgtggtcatcaatggggttgcgtatttcctgttagattattcgaggctctattgctcaaatgatggcttgcttattcgaccaggtaacatagttccatttgaccttgagacggaggaatggatgggtattctaaacggaccgaaaccagtcgccaggggacgggatatgattgttatctcctcaaccttggaaattatggagcccctctcgctagccgacttgaatgggtccttagtgatggtgcatgctgtatacggttcccccatggacctgtggtttctgtcagatcttgagcaaggactctgggttaagaagtacagcatagatttcgaatactataataacaatgcttatcctttgctgctgttagacgatgagaagattgtcttcctactgcggggaactaatgttctacaaagttatgatctaaaggatgacacatacactgatatattggtggtgccagatttcagatccgttggcatttatactggagatctattgagcttggagggtggtctgaactga

SEQ ID NO: 1433 - DNA, 1173 bp, Oryza sativa
atggctactgcatcggtggttacctatcttcagaggccgagagagcttccggtgccggagttccgggcaccgccgccgtctccggtcaccggcgtcctcacgagcagtagctccggctctcttgcatacggcgagtgccccgatagcaacgaagacgacgagatcggcaggttcttgcgccgctccgccagagtcccggtgctgcggctgccggagagggccgtcccgcggaagaagaaagcggcgtgggcacctccggtcatcgacgtgcgcctgctggccttgccggaggccggcggtccggtggcggaggcgctgaggtcggcagccgtcgcgtttggctgcttccaggtggtcggccatggggtcgaccggagcttggtctcagcagcgttgcgtcatgtggcagctgcaactgcaagggcagcgacgccggagccggaggaggtggaggtcaacggagacgatgagaacggtgaggagatgtggtggtcgcctggtgacggaggccaagaaatggcgggaaattgggcgctccaaagtggcgccagccacttcaggaacacagcagacgctttgttcattcagctggagcaaaccgcaaccaaaataatggacgtcctgcagcgaggcggcgccgttgccacgcaatccatcgccggagctgacacaaacggctcgctcctctgcatccgcaagcaccgccgcaggcaagacgaccgcagcggcggcgcctctggcccgatccgccacgacgacatcctgaggatgctggtccggagctcgcggtgctcgcgggccctcgccctccacctctgccccggcgcctcggcgttccacatcttctcccggcgaggctggtccagattcaggcccatggacggcgccgtcgtcgtcaccgtcggcgaccagctccaggcatgcaacggtgggctctacaagagcgtggccgggaagccagcgtacagcaatgacgacctccgaggaaacggcggcgacaccggtgtcgcctccgcggagttgttctactgcttcccttcggccggcacggcggctggcaaggcgagcgaggtgttgagcgcggatgccggcaagatcatcccgttgaacctgcagttcatgtctaatgtagaaattttaaacaacctggcatcccaggttccactagcctag

SEQ ID NO: 1434 - DNA, 1163 bp, Oryza sativa
ttctcctttttgcccgcacaagcagcagtgcagcagcagcatacgcagtcacaaacaccggttattattggtcgatgcgtgtttcctgcttcctttcctagccaatcagccaccttctcccaaaccagtacaggcgctatccggttgaccaaaccagcctaccaacccgtcaagtcatcgacacagggatcagatcgatcaggagggcctctcatctttgccaattccatctttcttctcatcccgtctctctcctcctctgtttccatcatcatcatcatccagaggccaccaaccctcctcgattattcagagcagccaattagtcttggcgtcttgacgtgttcggagaatttcctctcatttatatgcaggttgcttcggctcggggtgggttgggttgggttgggttcgatggagaagtggagcagggggctctcctgccgggccgccatctgcggcatcgtcgtcctgctctgcgccaccgcgttctcctgctccctcgccgccgaattccgcaaagtcaaggagaaggacatgaagctggacggtagcctctgctccctgcccaagagctccgccttcgaattgggcgtcgcggccatcgcgttcctctccgtggcgcagctggtgggcaccacggcggcggcgaccaccatgtgcgccgcgtccaagcgcagcaagtcgtccaccaccaggcgccgcgcggcgtccgtcgccatcctcgtcctctcatgggtgagcttcgcgctggccgtcgtcctgctggcgaccgcggcgagcatgaaccacgggcagcggtacggccggggctggatggacggcgactgctacgtcgccaggaacggcgtgttcggcggggccgccgcgctggtcgtcgtcacggcgctcctcatcctcggcctcacctccaccaccaaatcatcctcatgcgccacctcggcagcatccgccacaacgacaatccgtctcgacgcggcggccacggacgccgagcaggcgagcgggcgatcgaagcagcgggtggacggtgctccgcgctgttcgtcccgcaaaggccaagcggcgtgggggcaatctccgcttgctggcaaaggccaacggctggtgatgggtgggggcgggtataccggtgggttagaagatattttagctggacaaag

SEQ ID NO: 1435 - DNA, 1131 bp, Oryza sativa
  N_region (451)..(451): n = any nucleotide
  N_region (477)..(477): n = any nucleotide
atggcggcgcagaggaggaggaggaggagagcccccgaggagagtagggttttgcggattggtggtggtggggaaagcgaggagcagcgagcagaggacgatgaggagggcagcggcagcaggatcgctactgtttctttcccccttcgcttgctgtttgcagctttatttgagggagaaactttcccggaaatacccctgcactttcggcaaatcttcatcaactactcctcctctctacgaaatacgtcttcggagaacaaattacgccttcagtgctcgcgcgacaagtccgaccaccgcggcgatggatttctccggcggcggaggcggcggcggcggcgcaacgctgtcggagatgtaccagagcgcgcggcggctgctgctctcggcccgggacggcttggcccgcttcgagcgcctcgcgtcggcgcccacctcgtcttcctantcctcggcgccgctcgtcgggggcgncggcggttcccggggattcggcaagccgccgaggaggtgcggcggaaggtggcccagatccaggggctgtgcgcgcagatggaccggctctggcgatccatccccgccaagggccagcgtgatctctggaagagaaaagtggagcagttgtctgaagaggttgattcgctaaaggaaacccttgacagacattctctgcggcaaaaaaagagggttctagaagcaaaagaaagggcagagctatttgagagagctaatggtgagtcttcacatgtccttcggatatttgatgatgaagcccaggcaatgcaatcagctcgtagctcctctcgtatgcttgatgaagcatatgaaacaggagtagctatccttcacaagtatgctgaccagagggatcgtctaaagcttattgagaggcggcaccgtgtggacaagtggattgcatatgctggtatgatgatcacagtggtgcgttacaagggctttctctgggggggcataaaagctgcttttctttttcaacgcgggtttccggcatgccagtatatatgccactatgtctatgtggatcaaattcttttctgtatgcacatcacaatatatatactgcacatgtacagaaaaactgatagggttactgtctgcggattctag

SEQ ID NO: 1436 - DNA, 1119 bp, Oryza sativa
atggcggcccgagcgggctcccggccgtggtgggaggcgttcacgacgaacgtgaagaaccaggggtcgctggtcatcgacatgctcaagcagcttgttcatcgggaggaatcggagtcgcgagacgaggagaagctcaaggaggtgatcctcgagatgaaggagcagagcaacaagagattcgcgggatggtttcgctcagagctggccaaggagtgctggagggagcacctccatggcgcttctatcccgttcgagaccttccatgtcgagcccccggccgctgacttctcctcgtcgtcgtcctcctccgccgccgccgatcaccgtggcggatcggtccttccgggcgaccttgaggttatgcatgcggagagcaccgccaggctcgaggcctgggggttcgaagtcctcgagaagatgaggagggagcagctggtcgagtcggtttctgggttccaggattacttcgacaccgcgccctccaccggcacgaacgacgacgcctcctccgtcgaccactgcgtcggcccgatcctcatggcgctccagagcaacctcaggtccgcccgcttcgcggcgtgggcaaactcggcatgggctctcgcggcggcggcagcggcggtcgacgacgacgacgaggggagttggatggagccccgcatcgagccggtgctggcttgcgagccccccgactacttcgactccgacccagctccccccacgccgcctccttcctcgacgccgaccaccgccaggccgcctcgtcctcttcctcccgcgttgccgccgccaccctacgcctccacctccttccccgacgcccatcagcgcgaccccgccgccaccatcgccgccgaccacagcgaggccaccgcctcctcctcccgcatcgcctccgcctccgcctccgcctccgcctgccacagcgaccccgccgccaccatcgccgccgaccacagcgagccaccgcctcctcctcccgcatcgcctccgcctccgcctgccacagcgaccccgcctccgcctccctcgaccagcactacgtccatcgacatcgagacgtgggtttccattggggtcctcgctgtggtactgatcgttttgattcgcacctga

SEQ ID NO: 1437 - DNA, 1113 bp, Oryza sativa
atgcagtgggttggcggacaagggtggacggtgaggccgcggcggcgctgccggagccgcggggtcggcagtgggcggtggccggtgttggtggcgggcacaaagcatggtgaaggggagggggaggaagtcagccaagcggggccacgccagcacattgacgcctattggaaggcggggcaacgacatgggacggcgctagggctgccgcccacagtggcgcgcgccgccagagggtggtgcggtcggcgcgagctagccggcctccccgctcccctcgtgtgggccgccggcggggcgaggcaggaaacgagcggcaaggtggcatcgcgacgcggcggcgatgggccagttcaagtattcaaccatgaagaatatatgctcaaattagaaggtatcgcatttgttcttacatggcttggggatgtgctcctcgaggtcgtcgtggacggggcactcgacggtgactggcgactgcagcgtgacgatggtcagggagtccttggcctccacacccgacatgccgcgcatgtcccgaccttgcgggctgccacggtggcgtcgcccctccagtcagtcgccctcgtcacgctggggccttccacgccggcgccgggtgcccgtggcggcgacaatggcggtggagggaggaagcggaagggcgtggtggccggaccgcgacctctgcgccagggcagcgctgtgcgcgagcggcgtcgctgggacacgtggacgcgctccgggagctcgggcactgcctgcaagagggctacagcgtgcgctgcttcgtgctcgacggtcagtcgccgcctcctcatccaggccaacgcccgtgagctcgccgccacggtcatcgcgtcggcctcgctcctccacgccaccgacaagctggctgcctcccgcgtggcactcgtgcctcctctgcgacttcggctgccacgccgcggcgaacgcacccagctgctcccctgtcgccaggtggagaggatcagaggagaggagagaggtggaggggggaggaataagaggctaacgtgtgggacccacactgagtcagctgccacgtcggataaaaccggagtcaaaaccgccaagagacctagtttgcactga

SEQ ID NO: 1438 - DNA, 1092 bp, Oryza sativa
atggccggcggccgacagagctcgtcacggtggaggcagaggccggcgtttctctgggaaacgatagacgccggacaacggcaaggtctctcttccggttcagcgaactccggcaatagaatttggtgtcaagtcaatatcgaggcaatagaattggggtctaatagtccccagatcttggttgatcagaaccaaattaagaccaaatctgcagaagccgccgtgggtcaagtcagcttagattgtacaggggaagctgtaggagataacgatcctaagaacacctccaaaatttaccgttgtttgaagtttcaacgcgcagagagacgagagattctagctagatacgggcaaaacgtcagagaaaggcaaggcgatttgccatttgtagataaaagagtatggtgcaaattgccaaatattactcgtttccatgaccaaaaggcacaggtatataatggtattattgctcatgcgaatagcatgtatacgcacccctgtttctccggcgtgttcgcggcgtgcgtattagtgcttagccatcagttctacctgcttcgttgcacaagaacccatgcaggcttcctgccggcgtcgaggcgctgcagcacgccggattatgttgccatctgcaaatctctgcgcaatccctgtgcttcggaagatggcatgagacggcagccgtcgcggaggagtcctccacggtgcaagctggagactgcctcgacggagcttgaccttgccatcgccaacatgggcacgaccctccacctctcgctgaggcatatcgcccagagagtgttggtctgctccattgacgatggcccccatgtgttctcgtcttggtccggcccatctgcggatggggacgacaccacggcggcgacggccagccaaggtcacacaacggcggcgacggcacgcatctggccatctggagaggaaagacgtcgatccgatcgagttcccaaaattttctatgcgaaaagaccaccttacccttccacccgtgcggtaccacccaaacgactaagcgataccgggtggtaccgatcaatttcagccgttggatccaattcatctgatggttag

SEQ ID NO: 1439 - DNA, 1062 bp, Oryza sativa
atggatcggctgctgaacctaccaggaccacctctgggcagtatcaacaatatcaaattgaggatgttgagaagtgcagcatttgaccaacggtgggtagaatggaaaaaacatttgttccaccaatcggcttcaatgtacctgacagatctgttccctgaagccatccctcaaacaacagaatcttctcctactcatcacagtaatagcggcgtagaaatccaatatgctctagggctactgcccaatggtggtggtctatctcctccagtcatcggctacaatgcccccaagacctcaacactgttgcacgaaaaaatcgaagaaacaaaaaatgctgccaatgatctgcaggccatagatccagatgtagcagaattcctggaggacgaagaaatggcagaagatgtggatgaagcggctgagcaccctattcatcctccaactccgatttctgaatctaccgatgatgtgaaaacaaccctcctggatatttcaacatggctagaaggttctttggaaactctggtaaccaactgtggatctattagagatagattccatgaaatccacgacaaaatcctagacgagttagccgaagctatcactccagcggcatacctcgagcaacatcggctcaagctcgaaaaagccaaacaaaggattgttgatcgacgtgagagaagagaccttgaagcaaccatccaagttagcaggacttctatcaatgaagagaaagctaaactagacgagttagtagctggcccaaattccactcaagccaatatcgatcggctgaatgctcggaagataaaactctcggctgagttggagcagtgcaatgcacagatcgctcttgaacaacaaaaacttgccgacttgccaaaagccattgaggatcagaagtcgaagttgaaagcatctgtcaagcacatgactgatctgaccaaatctttgaaggtgatcccaagcactgatgcagccgatgcccaaataatagatgaagtagagcagatttggcaaagggcaatatcggctatccaaaaatatgtatctggatga

SEQ ID NO: 1440 - DNA, 1017 bp, Oryza sativa
  N_region (304)..(304): n = any nucleotide
  N_region (357)..(357): n = any nucleotide
  N_region (452)..(452): n = any nucleotide
  N_region (609)..(609): n = any nucleotide
  N_region (613)..(613): n = any nucleotide
atggcagattcggattcacccgctacctgggagttgagcttacctcaatcagaggggtatgtcattgagctgcatcggatgttgaggcgtctgcgataccctgggttcccgtcataccgagtgagacagtgtggctcagtttgggaggctcgggtcgagattcacccccgagtcccttccaagttggactacagcttccagacacgtcaccaccgagacctgccagagaccgcgatgcaggatgccgcccgggaggccttcctccgactcagctctattcaccgagctgagttagtgagtaccnagtttgctcatcacccgttccgggaggagggcaactcagtttgcacagttcangacacgccctgctgctacaacccgatagtgactcggttgtcacgatgggctgaggcagtagatgactactacgaggaggctctgttggagattgncgaccaccagagacgtgtgggggagttagagactgaggtgaccgacctcacagcacagcagcttcagttggaggaggagcaccaggcttggggcagtgagatagactcactgaaggcacagctccaggtccacggagatcagttccagcagttatcngacnagtacaacgatcgccgcgggatgatggatactcttgaggagcagctgagagagagtcaggagcacgtcagccagctggaggagccgcttcgagcagccaagatcagcactacaggggcctctacttccacagcagtaggccgtgaccgctacttcttcctcaccccgccgtacccaccggcgttccacgctcttctgggagaggctagtatgctagctaccgagtcaacgccctacctagtggacccgacagcggcacagccacctgttccggagtttggtgcacactccactgatccctacaccttctccacagctgggttccagtttggagactccgatccaggtcgactccgagacagagggaaccgacaccgagccagagatcgagccagacatcactga

SEQ ID NO: 1441 - DNA, 1014 bp, Oryza sativa
atgacccccacaagacgcgtgaagcgtacaaggataaacttagagatgaaggggctgcggattttgaaaggcaaattgatggatttctgcgtcaagcacatgcttttgcctccccccgaaatcaaagaacctgagccagattaccccttcgatgacctcaagaatgacatatcctttggattgggcaccgacgccacgcaaaaacctgtggtgccaaaaccggggttgggaaaaccttcgagacctcctaagaggaaggtgactgataaggtggaggaacccgagatgcataaggaaaatcctatgccgaaagtgccaccggagattgcagtgccggaggtgcccgtggagattgtagtgccggatgtgcccatggagattacagtggcagaaccagaactgcaacttgtggcattagtcgggatagaaatagaagaagtaccaggattggaatgggacggtacagagccagaaatattggaagacgcttctccgtcgaaagaccccgaggtgcaaaagaccacgatccctgagaaggccactaccagttctgaggtgcctagagtgcttaggagccacgactccaagtccaaagatgagaacaaggagaagttcatggtaaccatcttcagtgggggaccatgggagatgagaaggttacataccttctacatggaggccagcaagaaaggcttgggcaatataacagctcgatcgccggcagattgtttcggcatcgaaggttacgtatggctagatttctcagatctccacagcatatatcgtcgggataagatggatgtcaactttgtcggtgtttggtgcatgatgcaatacatagatgctaagaagaaaaaagaacctatcggcttcttagatccaactcggatctgtaaaacacagcataccgtgaggctagcaccagggtcagacgagctgaagggcaagactccaaaagagatagctgaatacaagaagggcttgcacaaagagaaattgattaccgtcgcatag

SEQ ID NO: 1442 - DNA, 960 bp, Oryza sativa
gtaacaaattcttcaaaaacaaaaggtgtgagaaatggagatccttctggtcccatcaaggcacatcaatcattaataccgtccacaaatggctctgctcgagctccagttaaaactgatctttcaaaggtatctcacgcaggaaatctaaaaatcctcacccgagagcaaaactgtactatacacactgccaaagactgtcctgacaatcctatgagtcctcctccagctcctgttgcttcagtggaaccactgaaaaagccatgtgttagccaaaagcttaaggttgccacccatgacattcctctctctatactgcaaagtgcttatgtagataaaaaattaaatgcaagagataagcatagattctttgagtcgttgaggatcaagtcttcaaatggttcaagctcaactgctgagtcaggttgtccatcaccatccagtgtagctgatgtgaaacaagattcttgtcttaatgttggaaaagatgtatccttgtatcattctggaaaagatatatccttatatcattctggaacaaaatgtatgggaaatggaaagtgttcctgtgaagaagcaaattcttctgatggatctcagaggcatctgtctgataatgagaacaattcatccttggatcacactgcagatggggtttctcagaatcttctagtagaaagcaggtccatctcatcatctgaaccttctgataggggagatgaattccgggtgtcctatcaaacaataccgaaggcagttcatcatcagcacctgctgattcagatgatgggtacaagagatcccagtctggcagtgagggctaatgaggagctagagcagaaacttttgtccatggaagacaatgccaacatcaagatcgttctcctgtatatctattcgggcagagggctggataaggagctgatgaagcctaacgcaggggataaaaacaatgcttga

SEQ ID NO: 1443 - DNA, 936 bp, Oryza sativa
atgcttgggccgggccaaaatgccgtgccgtgggccggaccttgggcctctggccttatggccatctatatccctaatgacgtgatgcttcttatttgctgggtcgattatttagaatacttggacaaaattaagtatgaaaccctgcttatcgatcttaactactacgcgcagattgatcgatcagcagcgaaacaacgatttgctctatgtgatcaccgcttctccccgaagcaaccgacaccattgctccccgcgaaagccgccatctccaatcaccggagtcagcccgcgtcgaatcccgtcagcacctacacgacgaccacaccaagccgtgttcctacccccaaagttcgtcgcaaacaattccgctctgaccaccgattcaccatctgtcaatctagccccgagccgaagccgacaaatcacatgccatcttcccagccactgaatgacccgagcgctacgtctagccatctctctgttaaacgcagctcatcgaaaggcccgagccaccctgcccgaagtgttcgattccaccacggagaacaccgatcacctccagcttcaatcaaccccgagcatgaggcctcacgtttccctgttgaaaatagctcaccggaaaggttgggccacccactcaaagggtcgaacccaccgattggatcgccaatcgcttttgtcgccatcaacccgagcatcacgtccgccccgaaaacgacatcattgctaagcgcagaagaaaaacgccataggagatccaaacacgatgacgacaccgaggcacgatatttgataatgaagttcagccgaggcctacatctccggggcactgattacgggcgctcctccccaatccagcatataacagcgtatcagaattacaacgactcacggccggtcgccgccagcagctgctccctcttgctatgctaa

SEQ ID NO: 1444 - DNA, 921 bp, Oryza sativa
atggtagggatcaagaaagacggctgtgctttggcagaagtgaagttggggttggcacacgtacgcgaggccgttgtcagagatgggaagttcagagaaagaaatggagaaacgcaccaggcaggaattgcagagtttccgaagaaatgtgagactggccagtctaaccaccgtgtttgggccggacgtggaggagggcctgtaaaggacaagaccaacccctatttaagagataaggccggttcaattaaagttaccaatacgatttttggcgactccgctggggacgtcttcatcatgaccaagccggagattgatccttccaatgtcctgccaatctcattggaggatttggacgaggagcaatgtcgggagattgaacaacatctcaaggcgacgcaagaggcgtttttgataggatgcttcatcaagacccatcaaggagttgttcggaagccagtatttagtaaaaccgatggggcgaccatgaaatcaaccagggaggaaaaccctagattccctactggtctgtccgtgccttcgtccggtctgaccagcggtttccacaccggtccaaccgctttgcctcacggtctgaccagcaatcctctggccggtcagactgcacaaacctatatcggtcagaccggccaaccggccagtccgaccacacctctggccactggtcagatcgggctctgggccggtcagactggcgcaatcgtaccgatacaggaagttgatcctatgactaataacggtctcttatctcatattcatgtacatgatcctcctgtagctactattaatcctcaagttcctctacatatacctaatgcttacaatgatcctaataggggataccctcaggatgttaggtatggccaatataacaatattgagccaccgctaccactttag

SEQ ID NO: 1445 - DNA, 906 bp, Oryza sativa
atggcggaaagatcagaggaccgaggaagaagaggggagaggagactggaaaagctgacctggaacccttggcgatggcggcggcggtgcatccatcccgccatgatgtcctcaccgccggcgtcctccaccgtctcggtcgatcgagatccagcgcgcgcggcggcttggacgtggccggagccatggagacctatcagcagccagggcgccgccgcctcgccgccgacgaccaccaccgtggtctcgaccgagggacctacagcgtggcggcgaacctgccggtgttcaccgagacgaccaacaacggcggcggcgacgccagactcctacggcatcggcccgagcttgagcttgagcttgcaccagcaccacaccggtgtgggcggcgccggcgaccagaccacggtgttcgccggcggcgacacgctcgccgcgaactacctatacagctacgcgacaccggttgcttactctgctcaagattggcaccgcatcgatgcggggggcggccagaacacggtgttccccaacgtcgatcacgctttcggcgtgctcgccccttactttgctacggcggatctccatcacatcggtggaggtggcgaccacaacacggtgttcttccccaacatcgacgcccgcgccatgaacgctttcagccgcgccgcaccaaaccagtactctgctgcggaattcgactacaacggtgtaggcagcgagcagaattacgaggaattctactacaacggtgtgagcggtgtgcagaacatagtgccgcacaacatggacaacctcaccgcgaatgctttcagcttcgccacaccggcccattactctgctgtggaattctactacaatggtgtagggggtgagcagaatattgaggaattctactacaactag

SEQ ID NO: 1446 - DNA, 864 bp, Oryza sativa
  N_region (74)..(74): n = any nucleotide
atggaagttgcggccgaaacggccgcggacgagcctgctgatgaccgcaccgagacatgcggctacacccccantccaagcccggaccatgtcgaaactggggtggagtcgaacagcttccccttccgccgaaaggatttggagggggcaaaggcgctggttttgattgcagcggccaaggtggcgaatggagggtcagttaaggaaagctccaagaagaaagggctcgtggatgtcgcctgtgtcttcagcgacgacgagtcttcggatgagacccctacttcgcctgctgggcggagcctgggtctttcaaccgctcccggtgctacgaccgacacgggggaagcaggagggagtgctgcggccggtacttcagcttctgctgaccgggttttgcaggccactgtcaagctcttcggaagccttcttcgccatacaccggcttcgccgcccgccatccagaaagggaagaaggtggccgttgaggcatcggcttcggattactcgctggcggcaccccgcttcgcccctggggatttcgagacctgggcagatcttatccccttcgtcgagggggtaagtcatctcgtttctccggctgggagcccgagccagttcaccgagttgaacgagttcgacgagggctattctgccatcaagagcttagctgattggggtattaccgaccattccaacaatcacaaccgtcattacctgcctataaaaggagctcctcttctcacttcactcacacaccttgagcatctagctggtggaataggaatagagcagaaatcaggagtccggaagccttcgaaagtgttcgggggtagcttctcgaagtaccaggagggcatcggatag

SEQ ID NO: 1447 - DNA, 840 bp, Oryza sativa
atggccttgtcctcctcttcgcacctcctccccttctcccggcctcccgcgaccttcccacgagcacgccacgccggcggcgggaggggccgagccggcgccacggggaggttcatagcgtgctcctcgccccctcctcccgacgtcgtggtcacccgcgagcgcgggaagaacgccaagctcatcgccgcgctggaaaaacataatgtacaaagtcttgagcttcctcttattaaacatgttgaagggccagatacagataggctttctgctgtcctgcgcggtactgaaagagtttttgacgaagtaattcaatacaatgatggatcccttgaggttgcattttctccttctaaagctatgggtaaatttttggcctcagagcttccaaggaccactgaaactacttgtaaagtgttatatcctgcatctgcaaaggctggccatgaaatccagaatgggctatcaaatcgaggatttgaggtgacaagactgaacacatatacaactgtatctgtacaggatgtcgatccgctaatattaaagcctgctctttcagctccagttgttgcagtagcttctcccttctgctctccgtactccctaattagatggttcagagcttggctaaatcttgcttcacaagttgacaactggggcaacgccattgcctgcataggcgagacgactgcctcagcagctaagaaatttggcctgaagagcatatattatcctaccaccccgggacttgacgggtgggttgaaagcatccttgaagcgctcagagcccatgggcaatcgaaagaggtcctctctcgtcctcgtggatactttccttga

SEQ ID NO: 1448 - DNA, 822 bp, Oryza sativa
atggatgccaatagggatggcaatttccccggtggggacggggatccagcggatacccacccctatggggccggggacgaggctgttttttgccctgcgggcgcggcccaagggaaagtgcgcggtgcggccaagcctattgggccggcgcgcggggagagaagggcggtagtccgggtggacgcggtccaccacgcgggtctcgggtggggcccgcatgtcggggacatggttcacggcgggacgagttctcacggaggggctctagggttttgtgggattggctcacgggtgcggtgcgccgggtggaccggatggcgacgggcccacgtgcagccgctcggctcacagtggaccacgtgcacggggagaaggggacggctgacaggcttgaccgggcggcgctccagggacggcgcgacaccgagaacgtgcggccaagaagaggagagggagtgcacggaagaggcggtcagcaccacggagtgcctcggcttctcgcgcttgtcggcagaagtagcggcgacggcggcgagcagccgggcggcaacaatggcgcggcagcgatggagagtgaagcgggagggattgagaggaggggctcggcattatagtggaggcgatgtcggtttgggaggcgtgggcgagctggttggtgctcagctggagatcacgtgcggcgcgagaatggcggacgatgaggatgtaaggagcggtgaaggcggcgaggcgcggaaaggcggtcacgcgaggcaggcgacgaccgggtggacggcctccatgcgagcgcgcgcgggaaaggcgaaggcggcgcgggtttga

SEQ ID NO: 1449 - DNA, 795 bp, Oryza sativa
  N_region (178)..(179): n = any nucleotide
  N_region (185)..(185): n = any nucleotide
  N_region (187)..(187): n = any nucleotide
  N_region (189)..(191): n = any nucleotide
  N_region (195)..(195): n = any nucleotide
  N_region (199)..(199): n = any nucleotide
  N_region (203)..(203): n = any nucleotide
  N_region (206)..(206): n = any nucleotide
  N_region (212)..(212): n = any nucleotide
  N_region (328)..(328): n = any nucleotide
  N_region (363)..(363): n = any nucleotide
  N_region (597)..(597): n = any nucleotide
atggccaagaacacaacaacgcagcagcagcagacgacgaggtcgtcgaaagaggcgggcggcggcgccgcggcgaggtcgagaggggtgtcgtcgaagaagtcgccgtggtaccagcgggcggttgaggtgttgctgctgatatggaagcagccgacgggggcggggacggggacgnngacgangncnnnggcngcgncggngangggggntcggctgcggaagtcgtcgtcgctgaacgtggcggcgtcgttcacgcgggtctgcctgtgcgcgcctatctcgtcgtacaatgagcaggcgctctacttccaggcgggcgacgtgncgccgcgccggagctacagctacccgcgggcgtcntcggcgtcggcgtccgggtgcagcggaggcggaaacagcaacccgctggtggcaccgccgcccgcggccgagcagagggcgctgatgaggacgcctggccccggcggggagagcgcgaggcggccggtgttccgcggcaagtcgctgacggacgacatcctgatgcggcggttcgtcgtcgacgaggaggccacgcggcggcgcaacgagatggaggtgatccggagccgccangcggccgccgccaagcggcggcgcctcggccccagcccgctccgccggatggccctagcggaatcggagtcggaggccgacgacgatgaggaggagacgacgacgacggaagcagcggagccgacgtcacggtctcacggaggaaaccccaagccgtaccagtcgcagcgcggattttcgcaggcggacattggctag

SEQ ID NO: 1450 - DNA, 745 bp, Oryza sativa
cgcgcgttcgatctggggattacgcatttcgaccttgccaacaactatggcccgcctccgggatccgccgaacgtaattttggccgtattttgcaggaggatttcctgccctggcgcgatgagctgatcgtctcgaccaaagcgggttataccatgtgggagggcccgtacggcgactgggggtcacgcaaatatctgctggcaagcctcgatcaaagcctgaagcgtatggggctggagtatgtggatatcttttatcatcaccgtccagacccgcatacgccgctgctggaaaccatgaaagcgcttgaccatgtggtgcgccaggggaaagcgctgtacgtcgggttatccaactacccggctgttctggcccgccaggcgattgatatccttaacgacctcggtacgccctgccttatccaccagccgaagtactccctctttgaacgtgcgccggaagcggggctgctggaggtgttgcaggaaaaaggggttggctgcattcccttctcgccgctggccggcgggcaactgaccaaccgctatctgaacggcattcccgcagactcccgcgcggcaagcggcagtcaattccttaaccctgaccagatcaccgaagaaaagctggagaaggtaagaaagctgaacgccatggcggaagcgcgcggccagaagctgtcgcagatggcgctggcctgggtattacgccatgagaacgtgacgtcggtgctgattggggcaa

SEQ ID NO: 1451 - DNA, 732 bp, Oryza sativa
  N_region (26)..(26): n = any nucleotide
  N_region (32)..(32): n = any nucleotide
  N_region (180)..(180): n = any nucleotide
atgtcgtcttcaacgacgcccctgtnagcctngctccagttcgcgctggcctgcttcgaggagcttctcgagaccgcggtggtggacgtggcctccgagtgccaccgcatcgcgcgcctgggcctcgaccgcggcgtcgacgccgaggaggaggagctccgcgcctgggccgcccgcgancacccgggggccgaggagggcggcggcgccttcggcgttggcggagggaacaagggggtggtcgatgtatttggccaggtgctccccgccgtggccgccgacctcgtcgactgcatgaactgcggacgccccgtcgccgccggccgcttcgcccctcacctcgagaagtgcatgggcaagcttgtcatgtttactccatgtgagatatacacaatgtgcaggcctatgccatttgacatttctgacaaatgttgcactttcagggacgcaaagctcgcacaaaaacaacaagaagtagtaccgctggacgaactaggaacaacaatggtagcgcggcttcttcatactccccgtattccagcccagctatcgctaacagagcaagccttcctaacggtgtcactgatggcagtgccagtgtcacaggagaggatcacagcaatcacatattgccggagccctgagcacctgactgtaacaccgtgtttcagccaccttaccaaataccagtgtttgggcaccatggccggtctgcaacacattccttggtaa

SEQ ID NO: 1452 - DNA, 696 bp, Oryza sativa
  N_region (107)..(107): n = any nucleotide
  N_region (400)..(400): n = any nucleotide
  N_region (444)..(444): n = any nucleotide
atgaaggaagagccaggcggcggcggcggcggccgacggcgacgctggttcgccgtactgctgtgcttcggaggagacggtaacgacaaggatgaggcggcggggangccgccgcggaggaggaagcgcaccgtgccggtggacggcgccggaaacgacgacggggcgcgtaatgtcaggagaaacagcaacagcagcaacgacgtccatggcgggcagcggcagcagcacgagcccaccgcgccgccactgccgcgaccggccgagctgccgccgccaccgccaccgcctcgacgacgccacgacgtcgtcgctccggccacgacgcgcggcgccggcgccggcgccggcgccatcgccgacgccgagacggccgaatcaaaaggcgacgtcgtcgtcntggcgagctcgcgcgaacgcgcgagcagctgcggccacggcganttcgggccggcgatgggggtgtgcgtggtggcggcggtgtcgatggcggggctgctcggcggccggctctgggccgtcgtctgcgtgtgcgcgtggctcgccgcggtgtacgggctccagctcaatcggcgccgggcgaagccgccgccggcggctgacggcggaggcgaggaggtcgtcggcgacgtgaactcgaaggattacaagaagctggttgtgctcaaggggcttctccagcgtgatcgcagatag

SEQ ID NO: 1453 - DNA, 693 bp, Oryza sativa
atgaaggatcttggcagcttgcatcacttgttgggcatctctgtttctcggcaatcctctggcctacatctcagtcaacgccagtactatctcgaggttttggaacatgctggcatggcagattgcaagccgtgtgctactcctgttgacaccaacgccaagctgtctgccaccgatggtgccccggccagacatctcctatgctgtttagcaggtttgccttcacatgcacgatccacgggagccacatatgtccgtggaacggttgattatggtcttcacatccgctgctcttccactgttgacttgagtgcatactctgacgccgactgggcaggttgtccggacaccaggaaatccacctcggattatgctgtgttccttggcgacaacttggtctcctggtcctccaaacgtcagcttactgtatcgtgctctagtgccaaggcagaatatggggcagtggccaatgcagtggctgaaacttgctggcttcgacagcttctccatgagctccatacccctccgagccgatccacactggtttactgtgacaatgtgagtgctgtatatctctcctctaacccagtgcaacatcaacgtaccaagcatgtggagatcgatctacacttcgttcgagatcgcgtcgctgccggatctgttcgcgtgttgcatgtacctactacatcatag

SEQ ID NO: 1454 - DNA, 663 bp, Oryza sativa
  N_region (414)..(414): n = any nucleotide
  N_region (425)..(425): n = any nucleotide
atgggtctcttatcggccaaaaacctcacccatcggccgccgcccccgcgactcccacctacgccagcgtcgccacgcgccaccaccgagctcactcgtgccacctgcgccgccgcacgccagccccgtgctcgctgcgcgcactccacctgcgctgtcgcgccgccgcacgtcacccatgccgccgcatgcagtaggaggctaggggccgctctccgactcgccgaggcaggaccacagggcgcagccactgaggctgcagccgcgtcgccatctcgccttcttcagccttcatacccaaaaattccagacacctccctcttcccaactccacagcagcatggcgatggtctttggatgcattgtaggatggctggatctccaatgagtatgggtacccaatgggtacccgtnacccgtgcggntgtgggtatgggggaatttttcacccgtgagcgggtgtgggtattggagtggggacatttgatttccatgggtgtgggtatgggggtgacgactgatggggaaaagggcagcgtgtggctggcaagaaggagttgggtagcggcgtcgaaccagggaagttgttgggaggttgggagcatcagacaagaacctcgtcacgtcgctgtcactagtggcgcgcacacaagccaaatgtga

SEQ ID NO: 1455 - DNA, 633 bp, Oryza sativa
atgcggggagaactctgcgtggcccagttgtcttccgtggcccaacagcggtggcgatgtcggtcaccgccgccgcgcggcgccttcttgaaccgcacccacatccgcttcaggtcgctcgccgacgggcgggagaaaccaatcgatagacctttcataatgcttcagcttggttcaaatcataatgtatactccaatagaatctggatgagggagggggcggttgaggccggcatggcgctagggttcccagctccggcgtggctggcgcgtgggggatgggggaggcagtgcgacgcggggaggggaagcggctgcatccgcggcaggtccaggacgcagctcgcgcacgcgtgcatggggggagaagcaagcgtggcagaaggagatggaaggggaagcgagtgggggaagtcgaagggagggggaagcgatggcgggcccgcggcgcagctcgcgcgcgcgcacggggcggagaagcgagcggggccgctcaagaatgtttttgctcgtcgtctcaatgacatgaacaagaatgtttttgcatttatttcatgctcgctagatgatggaaggttgctactgcgcaaatgtgagctcatctatgtaccacgccgctacatctttccatga

SEQ ID NO: 1456 - DNA, 621 bp, Oryza sativa
atgggcgcgaacggccacccgccgccggcgagcgccgccgcgcagaacgggtcccattccagtggcggcggcggaggaggagatggtggaggagggggagcaaaccctagccccggcggcacggtggcggcgctccggcacgaccccggcctggcgcgggagtggtcgccggaagagcagtccaccctcgacgagttgctcgtcaagtatgcatctgatgctcctgtaattcgttatgcaaagatagccatgaagttgccagacaaaacagttcgagacgtggccttgcgttgtagatggatgaataaaaaggaaagtggaaagagaaagaaagaggaccacagctcctcgaagaaaagcaaagataaaaagcacttactatgccccacaaaagcatctgtgaatttaatctgtttcaaccatattgtccgtaatataaatgggttcttttgcaaacaagctgttagcttggcggtagtgcttccacttgagaagccgctggtcctgggctcgaacccaggatttgccccaaaaaaaaagagccctcgtcagcttttccgtgttccacccgtaaccattgtggttgccttcagtgaaatgtatgaggccaatatgccctga

SEQ ID NO: 1457 - DNA, 603 bp, Oryza sativa
  N_region (184)..(184): n = any nucleotide
atggagcacaaggacaggcagcggcatgcagcggcggcggtggctaagccgcggcagcggtcggcgtcgttccacgggcgcggcgaggcggagcagcgacactcgctgctgaagcagcggccgcggacgcagcccgacctgcttgccggcctcagggggcagagcttccggcgaggcggcggcnaggggcgggcgccggcggggccgagcagggtgctgctgaccgtggcggtgcggcagagcatgtggccgctgcacgtgatggcgcgcgcggagtggagcgtggccgacctggtcgccgccgccgtggagctctacatccgggaggggcgccggccgctgctgccgtccgccgaccccgccgccttcggactccacttctcccagttcagcttgcagagtttgaacccggaggagaagctcatggagctcggcagcaggagcttcttcctctgccccaaggccgccgccgccgccgtggctgccgtctcgtcgggcgaagacaccggcggcttgtccggggaagacgaggccaactctgccaagaagcccagcgtgttggctccatggctagggttccttcacttctggccgctgctgtag

SEQ ID NO: 1458 - DNA, 597 bp, Oryza sativa
atgttggtcactgtcattgtgacaatggtagaagtaaatttagtgaaggtgcaaaagatcagaaacccttgtcgacatcatccacatcctcgagctagcccggatagcggcctcaatgaaccacaccccaccaccaccaccaccgcaatccaccaacagctcgccggaatccatggagactgcaagcctcccggccgtcttcgccacgcgttgcgcctccagcatgctctcgggccatcaccacggcttcgccaccctgtcctagaactcggggaggaggccgtcgatgaacgtagacttgaggaacaagtcagggacgtccgcgcagctgccgccagggaactgtcgaggacgggtgaaaacggtacggaaacggacggaaacaacctttatcgttttcgtttccatatttttttcgtaatcggaaaccccggaaacgaaaacggaagaatgttatcgaaaccaaaaatggagcgaaaacgaaccggcgcagatacggtaaagaaaatttatcggaatacaaaaacccctcaaactgagcttcaaacttttgtcaagatcaattctcaagccttaggagtcaacaattcatcataa

SEQ ID NO: 1459 - DNA, 597 bp, Oryza sativa
atggccgataagacactccgcgaattcactgccccctctgctgacaatgtgccccacttacgggtcagtccagacgccgttaggctccgtctgtttcctttctcactcctgggaaaggcaaaacagtggttctatgcgaaccgggcaactgtcaatacctgggacaagtgctccacggcgttcctctcgaagttcttcccgatgggcaagaccaacgcccttcgtggaaggatttcaagtttccagcagacaagggatgagactattcccaaagcatgggaacgtctgcaggagtatgtggccgcctgtcctcacaacgggatggacaactggctcatcctacagagtttctacaatgggctcactctctcgtccatggatcacctggacgttgttgctggaggaaccttcttctcgaagatggtccgagcggccattgatcttatcaagaagatggtgtccaacatgggctggagcgaagaacgactccagacccgccagcgtggtatgcataccgtcaagaagacggacatgttggccgccaagctggatctcctgatgaagaagctggacgatcaggagaaggccaaaccgtag

SEQ ID NO: 1460 - DNA, 594 bp, Oryza sativa
atgtcccaagttggatccgcccctgctttcaggactgggtcacctaagaagcatgaactgaagtccaaacagaagcttgagaagaagctcagcttctacacaaaagtgaaagatgcagtaacctccctaaatgctacaaagactatctgcaagcttgtttttactgttattgttttgctccatgagtggcgtgggcgtataacgcaaccaatgcttagatatttcaaggataaattccaaattaaatctaaacagaggagccgccagaagaaactgaaagcatatgatctctcaatgctctctgagttccttcctgaaacagatgcctcaaatctgcacaccgaagcaaaactgaactgcaaatcgaagcaagctttagtgcaacgggaggctgcccaactgaatgctgtgctgaccaatccgcagttccagctcgacccgtttgcggcgatccatcagcacctgttgtcaacacagccaccctctgcgagaaaggagagcaattccgccaagcaggggaaggaccctaaggacaagaaaagaaagaacaagaagaagaatgcttcatcggcctccgaggcaatggatatctga

SEQ ID NO: 1461 - DNA, 585 bp, Oryza sativa
atggccgcgcccttcttctccacgcctttccagccctacgtctaccagagccaggaaggatctgtgacggcgttccagatatccggcggcgatgtgcaggtcctgcaggtgatggttaagtcacaggaaaagttgaccgtgaaaccaggtacaatgtgctacatgtctggtaatattcaaacggacaacaactacttgcctgaaaatgatggaggtgtgtggcagtggatttttgggaaaagcataagcagcagtgttttcttcaaccctggctctgatgatggatatgttgggatttctgcaccatttcctgggagaatactgcctatggatctagcaaactttggtggagaacttctttgccaggcagatgcttttctctgctcagttaatgatgtgtcagtcacaagtacagttgagcagaggccgcgaaacattgaaattggtgcagaggtgatcctcaaacagaagcttaggggtcaagggatggctttccttgttggtggtggatcaggatgcattgaggatatatactatctagtgctaaaggaacataatatggtgccacagtttatgctggcatga

SEQ ID NO: 1462 - DNA, 559 bp, Oryza sativa
ccttgccggcggcggcggcggagggcagcggcggaacatacaggccgactcatcttcatccgcgaggacatggagaaagccggaagccgggtggataaagctcaacttcgatgggtcgtctaagcacgcgaccaagatcgcgagcatcggcggcgtgtaccgcgaccacgagggcgcattcgtgctcggctacgcggagcggatcggcagagcgacgagctccgtcgcggagctcgcggcgctcaggcgcggcctcgagctggtggtgcggaacgggtggcggcgcgtctgggcggagggcgactccaagacggtggtcgacgtggtgtgcgaccgcgccaacgtgcggtcggaggaggacctgagacagtgcagggagatcgccgcgctgctcccgctgatcgatgacatggccgtgtcacacgtgtaccgcagcgggaacaaggtggcgcacggcttcgccaggctcggacacaaggcggtgcgcccgcgggtgtggcgcgccgcgccgcccgaggaggtgctccggttcctccaacaagacgccgatcaacgataa

SEQ ID NO: 1463 - DNA, 558 bp, Oryza sativa
atgggcgaagaggaatcctcggaggaagaggaggaaggagacgacggcgaggatgatgcagatggagaagatgatgcaggatcaggagacgatctcttcgccatgatctctcgcgttggtgcaggtgcagccactaacccacgttcccacgattccctccgcaacagcgcttccacgttctttctcctgatagataaggaggccgcgatgcctccgaaaccacaccttcgcctgagatctgcaccgggtaggcgggtgatcaggtttttggggagtgcctcccgcacgactgctcatcaccatgtctggagttgccaccgccactgctggcggaggtggtacgccgccgacaggagctcgatccggagctggtgcgccaggaggtgccgtgaacgacaacaacaacggaggcaattctgcctcaccatccagcggagggagtgcctcccgtacgactgctcatcgccatgtctggagttgccaccgccactgctggcggaggtggtacgccgccgacaggagctggatccggagctggtgcgccaggaggtgccgtga

SEQ ID NO: 1464 - DNA, 552 bp, Oryza sativa
  N_region (381)..(381): n = any nucleotide
  N_region (389)..(389): n = any nucleotide
  N_region (399)..(399): n = any nucleotide
  N_region (489)..(489): n = any nucleotide
  N_region (499)..(499): n = any nucleotide
atgcccgcagatatcccgaatcacacagattcgtttctgaccactcaggtcatccatctgccacataggctgattctggttacgattcccacaccacaacaacttttcacaaagcactggggtacactttacccacaagacacgaacttactccagacactggccgggtgtcccattccaccttgtggttgtactttgattatgctcgatgagtttcccacaggaatcggcccttatatgcgaatacgggacagcgccacgcttctcaaacccatttcccaattttcgacaatcaacggtgtatgtgggataattggtatacacgctcaaagagcacggataccgaagtaccacaagggtggagcgacaaggaatcagggngcaattgntcaaagggtnacttgccttgctcaaggtcttcacggagcttcacgaatcttcgagaaaaccacgattgacgaaaatccgagatctcaactttacgggaantactggaagntgaacgggagtccgatcgaagttaccggatcggagatatatgaattttggaag

SEQ ID NO: 1465 - DNA, 546 bp, Oryza sativa
atgaaaaagttcaaaaagcatcaaaacatgattttttggacatactggagtgtattgggtgcgtttgtggcaaaaactcacttcgtgattcgcatgcagaacttttctcaattagtgccgatattggcacacgatggtgcgatgtttctggccggaatgaaaaagttcaaaaaacgtcagaacatgacttttggacatattggagtctattggggaagccccttcaccagcttcgcccaggtgttcgtcgccgccgcccgcaagaggcgcctccttgctccagcgtctcctcccgacgaactcttcgacccgccgtactggagcaagctggtggccaagatcaagcacacagacccgttctggtggctggacaaggccgcggtggtgacgccggaggacgtggtggtggtggggcccgccgcaggtggaggaggtgaacttgcttgctggatcatcccggtgtggtcgtcgtcgatcgtgtactacgtcatgctgacgcagctaggcacgtacacggtgtcaggtgatgtagtcggaccgacgtga

SEQ ID NO: 1466 - DNA, 516 bp, Oryza sativa
atgccgattggtggttccaccacgtcagccagccgctgtcagcttgcggtgtgtgtggatgtgcagcagcgaattattgcccaggccgggacttcgatcgatcgatcgatcgcaacatgcaatgcgtacgctacgccgtaccagatccaacttatcaattcggagctcgggaagaatgctgcgcccatgtggcacatagcggtgcacggtttcgccgctttgattgataccccaaagttaccaaacggggtttacacctcgagaagaattccgtgtgcgcgagaagaaaaccgtcagcaacaggacactgaaagccaccggaggagacgcatcatcagcagcgccgagagagacagacagcgacgcttgctgtgctacccaaaaccgcatcatccaacggaacggaacacgcgtgttttgccgatcgccacgctggattggatccgggaacgatccaagttcatcgcccacggcaagaaacagattcaacacgttgtaatccccgaaccatcataa

SEQ ID NO: 1467 - DNA, 513 bp, Oryza sativa
atgagcagtttactgcagggcactagattgtccgtggggtttttgtacgatgccactcgtcagcaaaatcaagaggagcatgaaccattgtcttcagcctatgatggatcatctccagcttctgctatagttgctgttgacacaaatctggatacatccactcctgatacttaccgagcaccacctgcaccattgccttatgatgttagtttgccagtcccagaaaaccctgatttggagaagtcagacctgaagagcaaaaccgatgaccaacaggaggaatctttagaggtggatgagttcaaatcatgtgaaaaatgtgtcgctgaagataagcctgatgaggaggatgtttgcccaatctgtcttgaagaatatgatgcagaaaatcctcgctctttaactaaatgtgagcatcatttccatctttgttgcatacttgaatggatggagcgaagtgatacctgcccagtttgtgaccagattactttgatagatgatatgtatgaatag

SEQ ID NO: 1468 - DNA, 495 bp, Oryza sativa
  N_region (318)..(318): n = any nucleotide
atgcagaggagcgcagcggcctcggggatgagcggcagcggcggcggcatcagggatgagcggcggagcttggcgtcgaccttgatttgtgttgccgcgatgttagcgatttttccaaatctcctcggggccgagcggcaagcggtcacgagcgggcgggggcgcggggcaacgcgctctatagcgcttctctccgtgggagcgagtgtctcttctgaggcgcggaacctagcgccacgcaagctcgattccgacgtggtgcatcatagcaccgatccacggtgttgcactgtgaagggccttagccactcattcccngccctcgcagtcggacgggctgccatgagaaatcatcatgggaactgcaggggcattcgcctccttgtccgattactccatgccatggactccctccctggcttccttctacgtaggattgcaatcaacgctcttctccctcttcttaccctttctgcagccttaagtctgagctaa

SEQ ID NO: 1469 - DNA, 495 bp, Oryza sativa
  N_region (15)..(15): n = any nucleotide
atggctgcggcggcnaggaaggggacggcgacgccgctgggcgcggtgttctcgccggaggagacgaggagggccgtggcgcgggttgccgaggccgtcgccgaccgccgcgccgagctcggccgcctccagggcttctccgccgacaacgccgccctcgtctccctcgtccagaggctccccgacgaggtctcccacgacatcatggttcccttcggtggcgcggcatttttccccggccgtttaatccacacgaatgaactactggtgcttctaggggaggggtactatgtggagagatccgccaagcagaccaccgagatattgcacaggagggggatggagctggaagctcaagtggaagcgatgaaggcaactatctctgaccttgaagctgaggcgaagttcttcgaatcaactgccgccgaggcttctgtaaggctttcttttcttgtgttgtatgtttcgggcaggcagtggtatgttagtgtttaa

SEQ ID NO: 1470 - DNA, 493 bp, Oryza sativa
  N_region (3)..(4): n = any nucleotide
  N_region (7)..(7): n = any nucleotide
  N_region (14)..(21): n = any nucleotide
  N_region (23)..(23): n = any nucleotide
  N_region (30)..(30): n = any nucleotide
  N_region (33)..(33): n = any nucleotide
  N_region (36)..(36): n = any nucleotide
  N_region (40)..(40): n = any nucleotide
  N_region (46)..(46): n = any nucleotide
  N_region (50)..(50): n = any nucleotide
  N_region (59)..(59): n = any nucleotide
  N_region (62)..(63): n = any nucleotide
  N_region (66)..(69): n = any nucleotide
  N_region (72)..(72): n = any nucleotide
  N_region (75)..(75): n = any nucleotide
  N_region (77)..(80): n = any nucleotide
  N_region (92)..(93): n = any nucleotide
  N_region (100)..(100): n = any nucleotide
  N_region (103)..(103): n = any nucleotide
  N_region (140)..(140): n = any nucleotide
  N_region (284)..(284): n = any nucleotide
  N_region (377)..(378): n = any nucleotide
ggnnaanaaccctnnnnnnnngnccggggngancgntaancgcctnaccnctgggaatntanncannnnggnaancnnnnggacaagggaannggttctnagncccttttcaagggtggggttcaaaggaccgacattangactcaactggagctttccaagaaatagcttagtagccacattagcagcgcttgggatgattttaggcgcggcgtattccctttggctatataatcgtgtggtttctggaaatttaaaacctgatttcctctataaattctccnatctaaatggcagagaagtttccatatttctacctccaacagaccgacaaggaatgaagtcaaccttagaaagtagccgatgggagtatcccnnaagccccggactcatctgccacaatgtcgggagcatacctcatcaagttgtcgcatttcatattgtagtcctgaaacagtaccactcccttgttttgaggctaaacggaattgct

SEQ ID NO: 1471 - DNA, 486 bp, Oryza sativa
atgacgtccggggcggcggccgcggcggcggggaggaagccgacgtggaaggagagggagaacaacaagaggcgggagcggcggcggcgggccatcgccgccaagatcttcatggggctccgagcactcgggaactgtcgtcgttgtcgatctggtctcgaactggtactcggcgtggtcggagaggtcggcggtgacgactacgaggaggagatggagggggcgggcagcagccggacgcagcgcagcacgtcgtcgtccggccatggacgtcacgggagctggtcaggccatggaggagcagtgagcggaggggtcgatggcggcgttgggacggggcgatgcgctcggagccgagggcgccgtggggagcaacgcggcggagggggcccggcgacgctggccgtggacctcggcgcagagggcggccgtggacctcgacgcaaagggcgccagggcggaggagatccagcggagaccgaataa

SEQ ID NO: 1472 - DNA, 479 bp, Oryza sativa
  N_region (69)..(69): n = any nucleotide
  N_region (74)..(74): n = any nucleotide
atgcatgcaggcgccgatattagcttcattgtcctttcatatggaatgtactaccatgattacaatgcnaacantcttgttgcgaggatcagattgagtgaacggccggacgttgtggggcccgtgaacaagaagattgcccatggtgagccttccacggcgccgagcttgcactcggcagctactggcactggcagtgcagtgcagagcaaaaaagaagaagcaaaagacacagatgacccgctcgatggaaagaaagaaaccagctacgactgttcattctcagtcagggcatttgcattgtgctgtgtttcatctgcttctcctccgtccgcctcttccaccaccgcaccgcaccgccaccgcaccatgacgccggcgagaggtcccaggctggactgccatttcgcgtgggacggcaacgacgcgcatggcgtcccgttccttccgccggttacgggacagcccgtggacagcac

SEQ ID NO: 1473 - DNA, 471 bp, Oryza sativa
  N_region (3)..(3): n = any nucleotide
  N_region (7)..(7): n = any nucleotide
  N_region (29)..(29): n = any nucleotide
  N_region (35)..(35): n = any nucleotide
  N_region (37)..(37): n = any nucleotide
atngcanggggaaaatgccttgaggaatngcaagntnccccttggggaagggcctttgtcctcgggcaaccggatctaggtcccgctccggatttcgctaggagcggcgggatgtcgccacggccggtgactgcgggtgcggcgacgacaaggagggcagcgtggctggcaatggttggagtgagggacgagtggatctccttctctctcgccctctccctctcctcaacccctctacatgaggataatccagagctcatcgatgatcttctgtgtggagtcgatgttcggtgggttgtttgcgactaccttataggtttagcggtgattggcttggtgctagcttgttctcctaggatgtgcaaagagctaccagcttgcagtggccgtccaaaagctgttgagagtgcatctgtgcatggaaaggcatcgaagagaagtatggccgatatatcgatcgatcaggacgat

SEQ ID NO: 1474 - DNA, 453 bp, Oryza sativa
atggaaaagggattatatggcgtgctgggctggatgaaagaagcaactacgcccctggtacatttcaacgcccatgaattctatatttcagcagtatctgaggccatagctctcaactcagcttcagcactcgagcgggacactgcagtctgcttcttggttttccaaaggtccggaggagcggaagagtttatagtcgagaaggggctttcgggcatgccacatcgcattccagattatccagatgcttacgccggatggaatgctctgagcactctcaacggatcctccacgcgctgcgctgggcataccatagttcttccgtgcgtctttatcgtggcggaaacagaacaagagggaaagacccggctggctcattccattgataagctcatcgggctgctcgtcgttaggaagagaaagtcctactgctgtaaccgcaacatcaagcaa

SEQ ID NO: 1475 - DNA, 438 bp, Oryza sativa
atgaaccatcaggagcgcatgagcggcaggcacagggaccagtgggagcaacctcccgcggcgcaggatggcggcgatgacgagcaaatccacccgccggtcaactgctccatccgtcgctggctatcagcgtcagctccttgccgagctcagcctcctctcccctccactctcgccctcgatcgacatcccctgaagcgaggaggcggccggctcgagcacatcgaggaggcgcaagggggcttccatccccctccgccggcgtcgcctctccctcccccaggtggtgcatgtccaggcggagcagtccacgagtgtcgtagccccataactcagattggtcctttcaccagttacccaagaatcgccggtgaaatgcaactggatggccatatgtttggcaacatcgaaacaagcctcatcattggcagaatctag

SEQ ID NO: 1476 - DNA, 427 bp, Oryza sativa
  N_region (6)..(6): n = any nucleotide
  N_region (27)..(27): n = any nucleotide
  N_region (42)..(42): n = any nucleotide
  N_region (45)..(45): n = any nucleotide
  N_region (50)..(50): n = any nucleotide
atgcangcctgcggacacgatatccanaccagcgtgatcctnggngccgngctaaagctgaaagagcgggaggcctcgcttaatggtcgggtgcggatcctgtttcagcctgccgaagagaactttggcggcgcgaagagcatggtgcgggccggtgccctgcgtgacgttagcgccatcttcggtatgcataacgaacccggcctgccggtcggcgagttcgccacccgcggcgggccgttctatgccaacgtcgaccgctttgtgatccgcattaccggcaaaggggcgcacgccgcacgtccgcacgaaggcaacgacgccatcgtgctggcgagccagctggtgacggcgctgcaaagcgtcgccagccgcaacgtcaatacgctggattcggtggtgctgagcgtgacgcgtattgcaggcg

SEQ ID NO: 1477 - DNA, 417 bp, Oryza sativa
atgattcagcaaatgctcatcaactttgaagatcagctggagaagaactcagagtcattctctgaccctagcctgagtaccagcacaacgctcaaatttatgcagtaccaagagaagtacatgcttgcctcctgggaacctgttctgtattgcctacaggataagatgccgctgtggtttcctaaacactcctcacagctgtcaagattcaagtcagaatttcagaaaacatgtactccacatcagaagctatggaaggtccccaacccaaggctcaggcagaaactgcgagaagccatcactgataaggtcattactggatacaaaaggtacctggaggaccatccggagctggagaaatgcagcagtgatctacaggacatggaagacatggtcaacgagctatttgaaggatga

SEQ ID NO: 1478 - DNA, 387 bp, Oryza sativa
  N_region (42)..(42): n = any nucleotide
  N_region (51)..(51): n = any nucleotide
atggaaagggtgggtgagaatgtgttgtgcaggcgacggctnacggttgcngccggagtccgcgggagaggtggagccgtgcagcggctgcggtccccacctcacttcttctcccccgccttctctcacgctctctcttcttctcccttaatcactacccttctctctggccctctctccggcgccactgtcatcgcctccctccacgaccaagctgtcatcgttgagggcaacactgccgcatcggccgacggcgaggccgagccaccggctgaatctagtgaccccgggctctccgctggtcgatctgactggccagagatggcatgcggctcgaagaagaggtggagcgggaagacgaccggcggcaggactcaagacctttag

SEQ ID NO: 1479 - DNA, 384 bp, Oryza sativa
  N_region (17)..(17): n = any nucleotide
atgtgcctccccccaancctcacctcttctcactcgctctccccgagccgatcgagccctcgacgaacacggcgactccgcgagacgcccacccacccccagagcagatcagagaccaccacagcacgtcacgatccaccgaccagagcgcgggcggtgggcgttcgcggcggcggcggcggcaactgcgagagcgccggcgtacgagggaggcgtcgtcgcgaggaggaggaaaaggaggggttttgcagcagcagcagcatcaacacgacgacgcgagctgggcttggtcagatgggcctccgcggcgcgagcccagctaactcagattcggctcggcccataagaaacccgtgggggagacgagtcggcccggcccagtag

SEQ ID NO: 1480 - DNA, 381 bp, Oryza sativa
ggtttccccaggtccgacatcgacatcccggccgtcctcgcccagcgccgcaagctcgccgaattgcggaatgatcacaaggatattacgaacaaaattgagaagaatctggaagttttgcactcaacaaaattgtcaagaaatgaagcgtcaatccctgcaagttctggcacacctgcttcattgcacagtgggttatctcaaaatgatcctatggaagaagatgctgtgaccagacttccttttgccataattgatgaactgacagatggttctcctgctgctgtggatggcttgcagctttgggatgagatagtaaagtttggaaatgtggaagcagacagagctcttgcagaatcagcgataacattcaacatctaa

SEQ ID NO: 1481 - DNA, 375 bp, Oryza sativa
atggtgagaaaatcatttaatgatggtagttttatccccaatgatatttttcagatggtgccgcatggtgcatcgccggggttaggggggcaatacatgtcgcaggtgccaatgttcccccccaggacccctctaacgccccagcagatgcaggagcagcagctgcagcaacagcaagcccagctgctctcgttcggcggtcagatggttatgaggcctggcgttgtgaatggcattcctcagcttctgcaaggcgaaatgcaccgcggagcagatcaccagaacgctggcggggccacctcggagccttccgagagccacaggagcaccggcaccgaaaatgacggtggaagcgacttcggcgatcaatcctaa

SEQ ID NO: 1482 - DNA, 372 bp, Oryza sativa
atggacgagggggaagaacaagatggggaagagatcaaccatggtatagttagtggccttacaaaggcaagaagcatcgagttgattgctcccctaagagaggaagtgtgcgaatattgcctccaagagccacccacggcacccccgctggttaaagaatttaccgctgattaccttaagaagatcacaatctatttctggttaggtgatgaaaggaagggggattgtccgaagtaccctccaaccgtcattggggtgcaatcttggacgtccatgccgaaccttggcctcaacggtggagatgggggttcggccgaaccccctggtttggccgaaccatgggctggcccaaaccagcccatcttcggctga

SEQ ID NO: 1483 - DNA, 369 bp, Oryza sativa
atggagctatcgatcttggtggctcttgcactgccgatcgaacgcaagcgcctaattaagctggccgggatgtttgacggactggtcatcagccaaaagttccaagatcaaggtcgtcgttggaaaaaaaaaggttgggtggaagcttcgattattggtagcttaattcgcgttaagcaagcgatcgaagtacggcagaggaatggcggcatcgatcaccatcaccaagtctttgctgggaagagtacgtccgtgcaatgcgcgtcgtggaatagtttgagtagtagcctcgatcaccatctgtttttgctcgcccttttccccgttgaaatccaacctaggcctggtttagggtgtgttcgggagtga

SEQ ID NO: 1484 - DNA, 369 bp, Oryza sativa
atgtcgcaaatccagagcttctcgcggcagaactgcgtgctcctcgcggtgctgtgtgggaagcacgctgagaagcgtgcccaggcgaggtcggggctggaggcgaagcggctgcggccgtcgtacccgttcccggagctcagctcgtcggggagattggaggtgcacacgctgttcaacccgacaccagagcagttcctcgaggcgcagcgcgtggttcagcccaacttcttgtacatccaggggcaacagcttgaggatgagaaggagattggctcgctcgtctggggggacaatgacgtatctgatccgcaggcgtttagttgtctcatcagcccgccatttccgaccatattgaaagagcagtag

SEQ ID NO: 1485 - DNA, 354 bp, Oryza sativa
  N_region (3)..(3): n = any nucleotide
  N_region (9)..(9): n = any nucleotide
  N_region (15)..(15): n = any nucleotide
  N_region (18)..(18): n = any nucleotide
gcnaaggcnagggtngcngcgggtagaggagagctcggggaaccttttaaaggggctcggaggcggcggcgaaggcccacggcgaccggcgacgagaaggaaaattcgggctcggagagagaaaagccgatccgattcgaactcgaatccaacactttccaagccgatttagccgaagattccaaaggggaaaaggtggaggagatcccggagattgtttcccctcttaagattcggccggaaacggaaaggaacggccggattggaaagcggcggcggcggcacgaaactagacatcatcaccagcacctctgcttcatcggccctgacatctccgctgttgctaatggatga

SEQ ID NO: 1486 - DNA, 351 bp, Oryza sativa
atgaataagcccgaagttgttgtccctgaaatagctgaagccttggcgattagacgtgcgctgatcctggcacggggaggagggataccagcaggttatcatggcctcggactgcctctcattcatccaacgcttccagtctccaacgagatcgttctgctgctggttgcgtgcatatacaacgtattagagttacaacgactcacggctggtcgacgccggcagccgctccctctcgctatgctaagtcgctatgcggttacaacagacatgcccctatttatgagagatcctaggatagagtccgactcatactctagtcctaatacctattacaactccaagtcttaa

SEQ ID NO: 1487 - DNA, 334 bp, Oryza sativa
  N_region (124)..(124): n = any nucleotide
agccgaggccgcttgggcagacccggatgcgttggcggcggcggcggagaaggcgatggacgacagttcggggaagttggccgtggcgctcgacgggtcggcggacagctcggcgacgcagagngccgccggcgctggtggcggcggcggcggcggcggtaccgacgccggtggcggcacgcgcttggcgtggccaccgccatggccgtgcttggaagaaggccccgcccgtgagcacagagtgctcgacgggagaaccaccaggacgaggaggacgatgagcaccattgccgatggcgccattgatgccattggtgtttctctccttgtgcct

SEQ ID NO: 1488 - DNA, 321 bp, Oryza sativa
atgcctcgagatagaggagcgtcatcaaaaaccctcgccgagctcggatacgtggtcggcatggagctccaggctggatcaggacccggggccgtttacgagtgctccttttattctgaagaagagattgtagggagtcgtcacggccagttgctcgatcgggtgattaagccgatgatgtgggggctaaacgcatacaatcttcacaccgcacaggacgtagagctcatagccatttcagctaaaactatgagcaactatgagctcatagtctatgattttggaggcaccggccgcatcatccctgcgcttcaagaatag

SEQ ID NO: 1489 - DNA, 300 bp, Oryza sativa
  N_region (45)..(45): n = any nucleotide
atggagggtctaatccgcgcggcagcggcacggctcgaggccgcnatggaaagcgcacgcggcgacgggatggcgacggcgaccggcgcggcagtggtggcgcgcggcgcgaggcggcgatgggatgcacgcgcggcgcggggcaggacgcgacggcgacggcgcggccgcggcgatgagatggcgatggcgacggtggcgcggcggcaggcgacggcgcgcggcggctcggggcgcgaggcggcgacgcacggtgacggtggcgacagagagagggggaaaaaggaggagctgggttag

SEQ ID NO: 1490 - DNA, 11919 bp, Oryza sativa
  N_region (4425)..(4425): n = any nucleotide
  N_region (8000)..(8000): n = any nucleotide
atgtcgataatgcggagcagtgactgggaagtgctttgcagatcgaaagtatcttgtcaagctgtgctggtatcagcacctcagcagttcatacaagtgctttttggcgactgtgagagtacacatcttgatgctgttactcgacactacaagagcatagcgctcagagttgcaactgtaattcagaatttagggaatttatcggtttggacaatttacttctgcttatcactgacagttatggcctggaagcctggaatgtggtgtatggctaaaaatatgcaaggtgatgtagaactcacgaacatgcagttgaagcctgaggctctcaattcattaaagttacctgtgagggtgaaagctggttttcttggttcagtgaagctcaaggtcccgtggagcaggcttggtcaagagccagttttggtttatcttgatcgaatatttatattagctgaaccagcaacacaagttgaaggttgcagtgaggatgccgttcaagaggcaaaaagaagtagagtcagggaaatggaaatgaagttattggagagccaacaacagctgaaatctgaactgaattcgtcatggcttgggtctttcattagcactgtaattggaaatattaagttgtcaattagcaatattcatatcagatatgaggacacagagagcaatccaggccacccttttgcagcaggtttggcactctcaaagctttcagcatttactgtggatgatcgtggaaaggagacttttgccacaggcggggatttggaccgagttaagaagtcagtcgaacttgagagcctggcattgtattttgattctgatagcagtccttggagtgtggataagtcctgggaagatctattaccttcagaatggagtcagatttttgagttcagaaagcaggacagttctaatcctccttcaaaaacacacacttacattttacgacctatctctggcaaagccaaatatacgaagatacaacttgatgaagcaaagaaaaccggacaggctttgcaaaatgcagctgttgatttggatgacgttactttgtctttgtctaaggatggctacagggacgtcttgaagatggctgataatttttcttcttttaatcaacgtctcaaatatgctcactaccggccatctttgccagtcaaatctgacccaaggtcttggtggaagtatgcatacaaggtggtggttcatgaaacaaagaaagcaagtggaaatctatcatgggagcaactactgaaaaatgcaagacttagaaagacatatgtatctgtatatgcatccttattgaaatctgacatgagccgattggttgttgatgataacgaggatataaagaaacttgatcgtgaactagatatagaagtcattttacaatggaggatgttggcccacaagtttgtagagcagtcagcagaaacacatcaatatgctcaacaaaataagcagcagtcctggtggtcatttggatggactggctcttcaaaggatgagggagactcaaagagttttagtgatgaagattgggaaagattgaataggattattggctacaaagaaaatgatgactatattcctgttcaacaggatatgaaattgatgcagttctattttgaaatacgcatgaagcataatgcatcgaagcttatcatcgataactcagagtatcttgctgatctgtcatgtgaagatttctgttggtgcttttacctgaaaattgaaattcatttgacaccaagagtagcccttaccattagccagactctggcgatagagactgctgctgctgtgcaggagatatgggattcccgtgcttcagaagagcaggatatgtatctgaatttcaatctagtgctaagtgatgtatctgcatttttagtggatggtgattaccattggaatgaaagatccaatgaagtaaatttattgtcagttatcgacaagtgtggaattgctttaaagcttcagcagatccagttagaaagtgcactatacccttctacaagaatggcagtacgggttccatccctgggttttcatttctctccagcacgttatcataggttaatggaaattttcaagatttttcaagataatgatagcgacaaaaacagttcagatcttgcacatttgtgggatcaggctgactttgagggatgtaaaactgttaatatctatgaatgtttttgttatgagccactagtagttttcagcgtatatttgcggagaggatctttatcgcaacttttaattcttgaagacactggcgctttgattatgttgtttgacaatgaggaagcacgaaggatatggcagaaccgcttgcagggtgctatataccgtgcatcgggttctgccgcactttccagctttcctgaagttgcattcccatcagagacccattccttcaagggcagctttcaagatgttagcattgaaaaattgttcgttgctggcattcttgatgagctaaagatctgcttctcatgtggctatgagagcaaccacaaactcaaaaaagttctgctagctaaggagagcagcttgtttgaatttcgggcagttggtggccaggttgaactctcaatgaagggtggcaatctactaatcggtactatcttgcgatctctggaaattgaagatcagtataactaccctggtagtcctgtaccaaggtatttggcgagatcctttatcaatagcgtgcaaaccaacgaagtcccaactcctagtcgaaagaatagtgcaggacctagaggtactgcactgaagaaaagtgacagtgaagaaaggttttttgaagcatcagatgattttgatgaatttgaaacacctatgctgcatgagaggagtatatcagattatttcagcacacagaactttttgcctactagcctcccttctttgcagccacctgcattcagtcgaattcctggtttgctgccagatattgagcttcaatctgccggattcacttcaggggacattacttttgaaagttttgtgaaagctcagattgtgatttatgatcagcagtcccctcaatacaacaacttggataacagggttgtgataagtgttgctactctgacctttttctgtcatcgaccaactgttattgcaatcatggaatttatgaatgccatcaaccttgcaaatgtccctgatgctgataaaaataaagatacaacatcggatcctgtagaacataatatggttgaggaacctaagtctgatctggaagcaggaccagtcataaaaagattactggctaaaggtaaaagcagaacagtttttcatctaacatcaagcatggcagaggcacaaatattattaatgaatgaaaatggtgaccggcttgctactttatcacaaaataacctctcaactgatataaaggtgttcacatcgtcgttcagtatagaggctgcacttggaaaccttaaaataagcgatgacagtctttcttgcaatcatccctacttttgggtttgtgatatgcgtaatccaggaggaagttcttttgtggagattgactttagttcatacaatgttgatgacgaagactatagtgggtatgactatagtctatcagcgcagctttcagaagttagaattgtttatctcaaccgttttgttcaagagattatcaattatttcatgggccttgttcctaagagctctgatagtgttgtaaagctaaaagacaatgtaactaactcagagaagtgggttagcaaaactgatatggaaggatcacctgctctcaaattggatgtctctttcagtaggcctataattgttatgcctcgtgaaactaatagttctgatttcttggagcttgatgttctatacataaagatccaaaataaattccaatggatcggtggtgacaagaatgagatgagcgctattcatctagaaattttaacggttacgagcagaaaaataagtgggattctgggaattgtacttccttatgatgattacgctgtattccttatatctgttgagaacatatattttttggacaagaaagtaaaggacataaatctaactattggtatgaatatggtgtgtggtgaaactataattcaagatgtggaaggtctctccttcgagatccatagatcattacgtgacctgatgcatcagttaccagcggtggaggcttcaattaaggtggatgttctgaaagcagcgttatccaatcgagaatatgaaattatatctgaatgtgcattgtcaaacttctccgagacaccacatgttgtgcctgctcttgatgatcctcgatatggaactactacagctgaatctcatgtatcttcatcttcttcatctgaaagtattcaagatttgtctcaagatgcggagacatggataactaataaaatatcngtttcgataaatctggttgagctttctcttcattcaggatcgacaagggactcacctatggctagcatgcaggcaagtggcgcatggcttctgtataaatcaaatacgagggaggagagctttctttttgctactctcaaaggcttttctgtttttgatgaccgtgaaggaacaaaagatgagttaaggcttgccattgggaaatcagcaacagttagagacacatcatctgctgatggctatgataatcctaatgaacttgattcaggtgaacgaagaatacaaaaagatctaggccttgagccaatcccctcaatgctcatttttgatgctatcctgcgaaaatcttcgtcaactgtgtctgtgtgtgttcagcgtcccaagtttcttgtggcacttgatttcttgctagcaattgtcgagttctttgtgccatctgctcgtagtctgttatctaatgatgaagataaggaccttctgcacatgacttctccactggtattcagtgatcaagtttactatcaggagcgttccactatgagtatttcacctcagaaacctctgattgttgataatgagaagttcgactactatatatatgacggaaaaggtggcaaaatatatttgcgggatagggagggaaaaattctgtcaggccctagtgctgaaagattcattcatgtgctctgtgaatggtattgctctgaacatctagctatacctgaggctattggaccagagcttactttctacagcacatcaagaaattctggtgaaaatttagcactatcaactaaggttattcatgcccgtacagatgcattttgcaggcttataatgaagggtgacagtatggagatgagtggaaacatactcggtttaaagatggagagtaatggcatcagagttatagaaccgtttgacatgtctgtgaaatattcaaacgcatctgggaagacaaatttgcatctgctggtttctgagatttatatgaatttctccttcagtattctgaggctgtttttagctgttgaggaagaaatttcagcatttctcaggatgtcatctaagaaaatgtcactgatgcctcaagttttaaggagattgattcttttttctaggtggaatgactctcctactaaaggagttcttgctttgaacacaaacattgtaagggtcaaaaggcctttgtcatacaaactagtttggcgatctggacctccacaaacaaatgaacttcaacacagtgagaaagatttgaagaacaagccttctaatgttgaccggttctgctcagtttggttacctgtagcacctgtgggctatgttgcattgggttgtgtttcttcaactggaactgctgaaccacctttatcgtcagttttttgtttgtctgcttccttggtttcttcatgtggcctaagggattgcattccactgagcggtaatgccaatatgtcattctggcgggttgataatgcttttggttcctttttacccggagatccagcacatatgcgtgtagatggaaatgcatatgatcttcgccatatgctgttcaatgatgcggactcttccaagactagctctatagggcaagatagtcacaatgatgcttcgcagatagagagatcagcattgacctcaggtcggctatttgaagcagtagcaagctttaaactaatttggtctaataatggcatgtcttcaccaaagaaactatctatatggcgtccaatgttgtctgaaggaatgttttactttggtgacattgctgttaacgggtatgagccaccaaattcagctgttgtacttcgaaattctggcgatgatacctttctcagagctcctgaaggttatcagcttgttggtagaattaagaagcacaggggtactgagggtgtatcgttttggtttcctcaagctccaccaggttttgttgctttaggatgtgttgcatctaaaagttcaccagcgaaagaggacttgcatttcttaagatgtattagaagtgacatggtgaagggaggccaattttcggaggaaagcgtgtgggactcatctggtgctagaacatctgaaagttttagcttatggaccgttgataatgatgttggtacatttcttgttagaagtggatttagaaaacctccaagaagacttgccctgaagcttgctggtccacctacatccagcagttcagatagcataattattgatgctgaaatcaaatcattttctgcagtttcatttgatgattatggaggaatgatggtaccattatttggaatatcatttaatagtgtggggtttagttatcatggtggtcctcaacatctaaatgctactgtgggtttgtcatttgcggcaagatcttataatgacaagtataattcatgggagcccttcattgaaccaactgatggctttcttaggtaccaatatgacatgaacacaccaggttctccagggcaacttcgtattgcctcaacacgagatctgaatatgaacatatcagtttccaatacaaacatgttatcacaagcttatgctagctggaacaatattagccttggcaatgagttatacaggatggaaacgtcttctactagtgaaaggtcgattcttgatgtgcacgaaagaagaagttattatgttatcccacaaaacaaacttggccaagacatatacattagaaccactgaatataggagttcagatgttacacttctgtcatctggggatgataggtctataaaagttccagcttcaagggatcttctggattctcatttaaaggggagatctgttaggttatatcgcttgatggttactgctattattgccaatgctgagattaaggttggtgaaggactagccactggtgaatatatggtagcactacggatctattcagaagattgtattgcatctggtgttcagcaacaaagtgctcgtacctgtgctgctgctggagaccaatcttcacaaaacataagaaaggtggaatggaatgaaatgttcttctttaaagttgaaagcgaggataattatgttctggaatttgttgttcttgatgctggtggaggccaaccagttggtatttactctactccattgaagcaagtggtgcagaagcttccttctgcctctggttctaactatgcaaaatttgatttgactttaggaggtcttacttcaaccaaaacagtggaacatgaaactgttaaatctagtggaaaaataagatttgcagtgcttatttctggtagggctagcacaaaacaggggtgtagagccaatcaggccagaagcaaggctggatacattcaaattagtccctccaaagaagggccttggacaaatatgaagctaaactatgctgtaccagcagcatgttggaggtttggcaattgtgtgattgctagtgaagctacagtcaaggagggcaatagatatattagcatgcgctcccttgtatcaattactaacacgactgattttattgtcgacttgcgcctaaaaggacgatattctcgaagttctcaatcagatggacagggtgagaattctantaaagatgatcacatttctgttggacttctagagcctggttctactgctccaatccccctgtcaggtatctcaaatcctgttgtgctttatacgctgcaactaagaccaacaaatcatcatgagctagtgcagtactcctggagtgatgttcaggagagacgcagccaaactgagtaccgcaatgaggagatccttgacatatttgtatctgatctgtatgaatcagagaacttactgttctgtgcgcaatcagatggcacttccagtacttctcaagggctatggttttgcttaagtatagaagccaaggaaataggcaaagatgttcacacaaatccaatatatgactggagcatcattatcagatcaccattgtctttatcatactatcttcccatttctgcacattatgttcttagtgctagccaccttgatgaggaagatacaagttgttcgcagggtaccttaaatcctggtgaggtggttagggtccaaaatgttgatccaaggaatcctttgtacttgtcacttgttccacatgggggatggacatcacatgaacctgttcctatatcacatcccaccgtagctccatcaaaatttattaatctaagaagttctctatctgaaaggattgtacagattgtacttgaacaaagcagcgataaggactatttgatggcaagagctatcagaatatatgttccctattggatatcttttgcaagactgcctccgattaacctgcaattaattgatatctctggaagaaaagacaagaggcgttttcttgcacgccctcgttcagaaaggagcgagaaaatactttatgaaataaaccatgaagaattggttgaaggatacactatagcatctggtttgaacttcaaaggcttagggctctcagcaagtgcctgcagacatgggagtggacagtttggattgctcaaagaactatcacctcttggcgacatggatggtgctgttgatatttctgcctatgatgacgatggaaaatgcacacatattcttctttgctcaaaaccatcctcatatcaggctgttccaacaaaggttatctatgtacgcccatacataacattcacaaacagggctggacaagatttttacataaaacttagtgctgaagatgagccaaaggtgctacatgcacatgactggagggtttcttttatgcactcagaaggaggaactgaaaaattgcagcttagatttggttatgcaaaccactgttatttgaaaatgtgtggctgtatggtccggcttgtggatactgactggtgtcagcctctggatatagtaaaagaagacaccattgttatagtaatgagaaagcaggatggtacccagaaatttataaaagctgagatacgtggctatgaggaaggttcaagattcttgattgtatttcgtttggggccatcagatggaccaatcaggattgagaaccggacaagtagtacaactatcagtgctcgacagtctggtttgggagaggattcttggatacaagtgaaaccactttcaaccaaaaaatattcttgggatgacccatatggacatacaacttttgatgttagcatccagcaaggagatgttactttctttcagtgtgttgacctggaaaaccctgatgaatgttccgctggttttagagaacatcacctcaagctcagtatagttgagactgctgatgttaagattttgaagtttgctgattacccaagaagacaagagggagggtacagatctgatctgggtgatcaccaagcctcgccagttatgcaaaatgatacagatacaggtgctggactattggaacttattgttgaacttggagttgttggagtctctttgattgatcataaaccgagagagcttttgtacttacatctgcagaagctttttatttcatacatgactggttacaattctggtaccactagcaggtttaagttaattattggccatatgcaactagataatcagttgccattgtctataatgcctgttgctttggcaactgagagcatgcctgactcaaaccatcctgtatttaaagcaaacatcgccgtaactgatcaaacatggaggttgaatattcatgaacctattatttgggcattggttgatttctacagcaatcttcgttttgtcagcaccaacaacatctcaactgtaacagaagtggatcctgagatacgaatagagcttgttgatatatcggagataaggttgaaaatatctctggaaactgcgcctactcaaagaccacgtggtgtccttggcatatggagccctgtcctatcagctgtaggcaatgcacttaagattcaggtgcatctgcgtaaggtcatgcacagaagtcgttacatgcggaagagttccatcattcccgcaatcacgaaccgaatcaagagagatctgatccacaatcctctgcacctaatattttcagtagattttcttggagtgacaaaatcaactttgtcatcacttagtaaagggtttgcagagctctctactgatgggcaatttcttcagctgagatcaaagcaggtttggtcaaggagaataactggtgttggtgatggactagttcaagggactgaagcatttgctcagggtttggcttttggggtttctggtgttctaagaaagccagtcgagagtgcccgacagtatggtgcaattggcattgcacatggtcttggccgtgcttttgtggggtttattgtccaacccttaagtggggcctttgatttcttctcattgacagttgatggaattagtgccagctttatgagatgcgtggatattctgaataataaacatgtccctcagaggattagagatcctcgtgctatacaccgagatggtataataagagagtacgacaaagtacaagctgcgggccagatggccctttacctagcagaggctagcagatattttgcatgcacagatttatttcgggaaccttcaaagtatgcatggtcagattactatgaagatcattttatcgtacaaaatcagaaggttgctttggtaacaaacaaacgagtgatactgcttcagtgcgtggatctagataaaatggataagaagccttcgaaaatactttgggacgttccttgggaagatgtgcttgcattggagctggcaaaagctgggtatcaaaggccttctcacgttcctgggggccagcacgatgtatatttcgcatttgatgaagatatgagggagttccacagttttgctaggcctttgctaagcccaaggggagcagcaagtaatgttgaggagcgactcattaacgatacagttaacttccagaacatgtggagcagtgaacaagaaattcgaagcagatgcaaactactttcaaagcaggttgcagatgatggaagggtgtttagtatctggaggcctctctgccctagtgggtatgtctcaatcggagatattgctcatgttggcattcatccaccacatgttgctgctgtctacaaaaatgtgggtggaaatttcgctctgccacttggctatgacctggtttggagaaactgtggtgaggattacaggaatcctgtatcaatatggtttccacggccacctgaaggatacgtagctctcggatgcgtggctgtatctgcttttgaggagccccctctcgactctgccttctgtgttagtgagagatttgcggaagatgcagtatacgaggagcaaattgtatgggcttcgtcagatgcctacccatggggatgctatgtttaccaagttcagagcaagtcactgcaattcatggcgatgcggcggccaaaagaagagtgtgagctaaaacctaagaaggtatcagagtcttatgcccagcaagcattggagaggtcctga

SEQ ID NO: 1491 - DNA, 5514 bp, Oryza sativa
atggacccccccgcccgcagccgcaggtgcactctcctcacgcgggccctcctcctcgccgtcgccgccctcgccctccgcctcatctacgccgccttcctcgccggcatggcgctctacccgcccctccccgccgccgccgtccttggctccaagacctacctccactccgccgtcgccacccccgacgcctggcgcacccgcgactggcggaaggccgtcgactaccacgccaccctcctcgccccccacctcgccgacggcatcctctccccgacctcccgcgccgtctgcctcggcgccgtgcaggaggccctcgccatgcgcgagctcggcgtctccaccgccgtcgccgtcgccaggaagcgctcccccccgctcgccgtcgccgggaacgaccgccgcctccccttccaggactcctccgtcgacttcgtcttcgccgcccgcgccctcgactcctccaagcgcccggctgacctcgccgccgagtccgcgcggatcttgaagccagatggacatctcgtcgtcctcactaccagcgccgccgacgcattcagcctccgcgcgctccaggcactcctcccctctctccgcttgctccgatctcgccagatcaaaggccccgacgactccaccctgcgggagctcgtcttccagaagatccaggactccactgacgatcctgtaaacaagtgcacaattggggatcacaagctccaactcctcacacatgcggagccactcatccaagaggagccgcgcaagccatggatcacgctaaagcggaacatcaagaacataaagtatctcccaactctcgcagacatcagcttcaagcgcaactatgtgtatgttgatgttggcgcccgtagctatggctccagtatcggcagctggttccggaagcactaccccaagcagaaccatacattccaggtgtttgccattgaggccgacccggccttccactctgagtacgccgcaaagaaggctgtcacgttgcttccatatgctgcttgggtcaagaatgagaccctcaattttgagatcaatgctgatcccgggaaggaggatgaggccaaggctaatggccgcggcatgggccgcatccgccccatggctggcaagaagatgtccggtgaggtgcggagtgtcccggcattcgactttgccgagtggctcaagcgcacggtgtcggagcaggactatgtggtgatgaagatggatgtggaggggacagaattcgacttgatcccaaggctgtttgatacaggcgcaatctgcttgatcgatgagctgttcctcgagtgccattacaaccgatggcagaaatgctgccctgatagagctgaagcatttgagatggcaaaaggggtctcatgcttctactggagtattcagtttccaaatttcaaagaccacctctgtttcagaaactgcagcaatgctagtagtacaaggcacttcagttacaggtctcttttgatccgaacagaaaagccagttactactagaaaccatgcatatgcagaagtagttgtatttgtcttggatcagaatcctatgtttttcctattcctccgttttttctaccctgcgattcaaaggggccctaactgctggtcatctgctaactccacagtgatgaggcaagcatttgaggtgttttatgatggatcatggcatggggtaaattgtataaggataaggaacggcaacctgtttgttaaatttatctactctggatcaacagtcgagcataatgttgatggggattgtctacgcttacggtcgagaagggcgacttgttctgattgttcaaatgttctcaagccaggtgttgatgtctgtgtgcagtcatctcatacacccgaagcaagttcacaaggaggaacaaacgcttctgtgttactgcgtcatgatgcaaggcttatcacaatcaagaagaatcatcaagaagataagtgtctctgcttgtttgttgttatactctacaagaaccagtgtcctggcaatgcagaaaaagtgataactgatagaagagcagaggtagtaaccataaacgatattttcctcctgcaaaagcttcaacctgaggtccatgaaggaagcatgaaatggagtttttcaaaggatcgcctctctcttaataaaggcaggctaataagtgctagattctcctcagaaattacacatctgatagtcttgtcgatcttgaggggaatggaattcaacatcaaattggtagaaggccagatcgtttatcaaataatcaaaggagatcaagcacaatggaatcttgattccatggccatccctccaggcttcgggaatacaatggagataatatcattccaattgcgtgatgaggccttgcgcccaacaatcacaaatatccctatcactcatgtgaaaaagaacaatatcacagaagacatgagattcactgtgaagagtgaaatggatagtgaactggatagggcattagatgttgagatcttgtatgagcatgtggatctgaggcgttcaaagcgcttgaagactcagccagatcgctttacaagttacgatacacctaggttccttagtggctacaagaagaaagaagcaagttcatcacccaccaagcatgtaaggggagctgtgcattgtgattcaccggtagacgattccaaaaaagaagtagaatcatgctgtgtagagattccagggaatgttacacagaagcaaacaggtgtacactctcccatggtcgatgaaaagtcaaactctccagaaggacagcataagaacacaactaagagaactacatgctctcttgtgaaggaaaaagcaagctctccagaaggacagcatgagaaaacaacaaagagaactacatgcgctttgcctgtgaaggaaaaagcaagctctccagaaggacagcataagaacacaataaagagaactacgtgctctttgcctgtgaaggaagagccaagctcagtggaaatagaggagaaaagctcaaaagagcaaagcacccttggtgttaactgtgaaccagcattctgccaaaaggtgggcgggaaaagaaagaggcacatgtgcgagagagaatacaaacaaatgattgaccaatgcataggaaacattgagagtgaaatggagagggactctatgtttaacttcgatgccaatatgatgaattacgttcagcattcttatcgagaagaggattttacatggccaccttctgctgataaccaagaggtggaggaggatgagcttgaagaactgtggaaagaaatggattattcactgacgacattagcacttcttgagcaaaagcaggtgatggctcaaagtaggataaacatgctggtggataattttgatgggttgaggctggattgtttaactttgacggatgattacagatgctattatcaaaaaaaagaaaagtttgcagagtcaggatcagttaatgagagcaccgattattttggaaaagttggaggaataccatgccatcatgaatgcatactggatgaggagcttggactagcatgcagattatgcaatgttgtatgcactgaggcaaaggatatatttccagaaatgttcaatggaaatgactacaaggacagacctggatgcagcaatatttgccttgatgatgatatacttgatccttctcttcttgcaaacttggcaccagagttgtcagaattgaagaactcagggagcgtgtggagtgcaatatctgatcttgatccaaagctgcttcctcaccagagaaaagcactagattttctgtggaaaaatttggcggggtcgatacaggttgaaggaatggataactcaaatgtcagtacaggtggctgtgtgatagcacacactcctggatctgggaaaacactgctgcttatctcatttctggtgagttacatgaaagctcacccaagaagccggccattggtccttactccaaaagctgcaattcatacatggaagagagaatttgagaaatggggcatttcacttcctttacatgtgttccaccatgctaacagaagtggcaagccgttgggggcaatggattctaaactgcggtcgttattaaataattttcacagaccaacctggacaaatatgcgccttatggattctttggacaaactattcaagtggcatgcacatccaagcgtcctcctcatgacatactcatctttcttagggatgacgaaacaagactcaaaagtgcgaaaccgataccgagaatttatcgcagaggtcctgatgaacaaccctggactcttgattcttgacgaggggcacaacccaagaagcaacaagtccaagttgaggaagctgctgatgaaggtgaagactgagttcagaatcctcttatctggcacggccttccagaacaactttgaagagtacttcaacaccctatgtttggccagacctcggtttatcggtgatatcatgagtgaactagtgccagagaggaaaagagaaacagttggcaggagagccaaacatcaagaagcagtggcacgccgcgcctttgtggagaaagtgggccagaagattgagtctgacaacaaacatatcagaagtgatggtatcagtttgctaaacaagcttactcgtggattcatagattcattcgagggagcgaagctgatcaaccttccagggatacatgtgtataccgtgttcatgaagcccacggacattcaggaggagatgctggcaaaggtaacaatgcccaagctcgggtcgtcccggttccctctagaggttgagctgctcatcacgattggctccatccatccttggctcataaaaacgacgaaggccgtcagcaccttcttcagtccagccgaagtgaagaaggttgagaggtacaagcgagacttcgcggcggggtgcaaggccaaatttgtgatcgatctgctgcacaagtcgtcgttcagaggggagagggtgctgatattctgccacaacgtgtccccgatcacgttcctggtgaagctgatagagatggtgtttgggtggcggctcggggaggaggtgctggtgcttcagggtgatcaggagctgcctgtccggtccgatgtgatggacaagttcaacggcgacagcgcggggaagaggaaggtgctgatcgcgtcgacaacggcatgcgcggaggggatcagcttgacaggcgcgtcgaggctggtgatgctggactcggagtggaaccactccaagacgaggcaggcgatcgcgcgggcgttccggcgtgggcaggagaggacggtgtacgtctacctcctggtggcatctgggacatgggaggaggagaagtacaacagcaacaggaggaaagcttggatgtccaaaatggtgttcctgggacgctatgttgatgattcctcgcaaaaccgtgtcactgacatcgatgatgaggtcttgaaggagcttgccgatgaagatcacaccggcaccttccatatgattgtcaagcaagactga

SEQ ID NO: 1492 - DNA, 5241 bp, Oryza sativa
  N_region (2310)..(2310): n = any nucleotide
  N_region (2392)..(2392): n = any nucleotide
  N_region (2525)..(2525): n = any nucleotide
  N_region (3097)..(3097): n = any nucleotide
  N_region (3167)..(3167): n = any nucleotide
  N_region (3378)..(3378): n = any nucleotide
  N_region (3765)..(3765): n = any nucleotide
atggacacacctctgcactgcgcggcgagggcagggcacgccggcaccgtgacgatccttgtaaatctggcccaggactgcgaggagaatatcctgggatgccagaacgcggccggggacacggccctacacatggcagcgaggcacgggcatggcgccaccgtggaggctcttgtcgtggcacttgttgagagcgttgatcaattccctaagagatcaatactcatggcctcgtcgtccagtacggctgccacaaatccgttccaaggccacccaatctcagagaagcttgggaaggcaaatcatgcgctctggaaggtgcaagtaagcgccgcagttagaggagcgcggcttcaggggcatctcaccggtgcaaccaagcggccgccggcagagatcgctgtcacaaaagatggcgccaccaagaaggagccgaacccagcccatgaagactgggaagccaccgaccagcaagttctggggtaccttctctcgtcgctgacaagagaggtgctgatgcaggtcgctacatgcgacaccgcggctgaagtgtggagcgccatcgagcagatgtactccacccacacacgagcaagagcgattaacactcggtttgctctcaccaatacaaagaaaggagatgagatggctactgccggaggtcgcccgatcgatgaagaggagctgattcagtatatcatcaccggccttggcgagggctacagcgaggtggtgtcggctgtctgcgctcgggttgaaccaatctctgtgagtgatctgtactctcaagtgttgaactttgaagctcgccaagccatctaccgcggcgcacaggaggtcaccgtcaatgttgccaaccgtggaggcttcagccacggggggcgtggcaacagcaatggtggccaaggaggttcgcgcggcggcggcgacggcggcggccatggtcgcggcaacggaggaggtggccgtggtcgaggccgcacaccaggaggcgttgataaaagaccaatctgccaagtgtgtttcaaacgggggcacacggcagcagattgttggtataggtacgacgaggattacgttcctgacgccaagcatgttgcagctgcagcggttaactcctatggagttgacacaaattggtacatcgacactggtgctacagatcatgtcacgggagagctggacaagctcactatgaaggaaaaatacaacggtggtgaacaaatccacacagcaagtggtgcaggaaaaactctccttaagggaagatcatggcgcaggctatatcctctaccacactcctccttgaagcaagcctacagtgccatcaaactatctttggaccggtggcatcatcgtcttggtcatccttccattaccacgcataagtctcaagtgtttgacaagtttcaggagtttcaagtcatggtagaacgtcaatttgatagaaaaattctagccatgcaaactgactggggaggcgaatatcaatcccttaactcttttttttctaagattggcattgttcatcatgtttcctgtcctcatactcaccaacagaatgggtcggctgagagaaaacatcgtcatatagttgagatcggtttatctctcctatctcatgcatccatgccattaaagttttgggatgaagcctttcaggcggcaacttatcttattaaccgtgtgcctagcagagttatccataatattagtccccttgaaaaactgttcaaacaaaaacccgattactcctccttgagaatttttggttgtgcctgttggcctaatcttcgcccctacaataaccacaaattacaatttcgctctaagcgttgtgtttttcttgggtttagcactatgcataaagggttcaagtgtcttgaggtctctacaggacgcatctatatttctcgcgatgttgtctttgatgagaatatttttcccttcactgaacttcatgccaatgctggtgcccgtcttcgttctgagattgatattctcactcctgaactgctaggacccatacggtctgttgggaatgaacaatgcatgcatccagtgactaatccattatctgctgatgtttctgctgctttatctaatcgtgctaatgagccacatagagatggtgcagtacatcccgctgatgcagaagatccgccggcgacgcctcctctggatgccagttctggtccagaaccagaccgtgtcgtccaccactcccctgcggccacgtcatcaggccgtcatccgggtcccacacctggttctgtgccacggggggcagcatcatcgctagcagagganacagcagaagactcagtgtcgcaggcggtgcaggagcaggagtcgcaggtggtgcaggagcaggagcagtcctcaccagcgnaggaacatgcacaggctgtcacagatgagactaatacattacagcatgcagatgtgactgacacaggttcagaggcaccggcaggaccgcgcaccaggttgcaaagtggagttcgcaaagaaaaggtatatantgatggtactattaaatataagcattcttggtttactgcttcaggtgaacctacaaatgatttagaagccttaaaggataaaaattggaaactagcaatggattcagagtatgatgctttagttaagaataaaacttggcatcttgttcctcctcagagagggagaaatattattggctgtaagtgggtgtataaaattaaaaggaaagctgatggtaccctagataggtataaggcaaggttagtagcaaaaggatttaaacagaggtatggtattgattatgaagatacctttagccctgttgttaaagctgccactatcagaataatattgtctttagcagtgtctaaaggttggagtcttagacagctagatgttcaaaatgcctttctgcatgggtacctagaagaagaagtttatatgctacagccaccaggttttgaggatcctactaagccacatcatgtgtgtaaacttgataaagctctgtatgggttaaaacaggcacctagagcctggttctctagactaagtaaaaagttgatggaccttggttttaaaggatcaaaanctgatacgtctctgttctttctgaataaaggtgatataactatgtttgttcctgccagctcttcagaganggccactgcagctttacttcaggatctaaaaggggaatttgcactcaaagatcttggtgagctgcattattttctcggaatagaggtaagcaaggttcagaatggcattgtactgaatcaagacaagtatgccaatgatttattgaagaaagtgggcatgatagattgtaaacctgctaatacacctctttcagtaagtgagaaactctcncttcatgaaggctcattgttagggcctgaagatgcaagtcactatcgcagtgttgttggtgctttgcaatatttgactcttactagacctgacatagctttctctgttaataaagtttgccaattcttgcatgctcccacaactgtacattggattgctgtgaaaaggattcttaggtacttaaagcaatgcactcggttaggacttgaaattcataagtcaggatctactttaactttacttgcagagttagagattaaaagtccaaaagctgctaaaatatggtgtgataatcttggagctaagtatttgtcagctaatccagtgtttcatgccagaacgaaacacatagaagttgactatcactttgtcagagaacggttgttnagtcgtttcatcaatctcggcttcggttgttctcagctgcgccgaactctgtatcgccacgatgggggctgttcccatcacatatatattaacacgaaggcgacgcacaggattagtgcgatcgtttccacccaaactaattcacagaccgagctaaacaaagccggtgtgtcaccgttgtacttggcaagtgatgagcaggctcagtgcctgccatctcaagcacaaaacaagaatgtgtttgtcaactcgattgataaatttgtgtctttggcagagatggttcacttattattgcaatggaagccagaactggctagccaggtcgactgcaatggcagcaccccactccatttcgcggcatccgacggcaaccgcaaaatcgtacatgcaatcctagccatcgtgccaactggcacagtgtacatgaaggactcggatggcctctccgctcttcatgtcgcggctaggttgggacatgccaatgttgtcaagcaactaattgggatctgccctgatgctgttgagctccgtgacggccatggagagaccttcctgcacaccgcggtcagggagaagcagtcctcgatcgtgtccctcgctatcaagaaacacaagcaggtcggtggccttctggacgcgcaggacggggttgggaacacgccgctccacatcgccgtggttgccggctcgcctgacattgtgaatgccttactccataaggggaaagtgcaaagcgatgtcttgaacgacgatggacactcgccgcttgatctcgcttcgacatcgaccaatttgttcaacatggtaagctttgtggtgatattagttgcttttggggcacaaggccgaccacaaaggaatgaccatctaaagccgtggagcggccgcgacataggtaaagggatagagaggacaactgacagccttgcggtggtggccgtgctcatcgccaccgtcgcctttgccgccggattcaacatgccaggcagctacggagacgacggcacggcgaacctcaagggcaggttctcattcaaatggttcatggtcctcgacaccgtcgccgtagcggcatcggtggtcgccgtgatcctactcgtctacgggaaggcatcgcgctccgccggctcgtggaagagcttcgtggcggcgttgcactttatctgggtctcgctcgtcagcctgatcctggccttctttgcggcttttcgcgccacgatgagaacctcgagggcagtctccatcgtgttcatggttatctacgtgtgcctcatcgttttggttgtcaatgtcggaacatgggttgaacctgtaacgacgatgcgtatattctggaggtttgtgtggcgcagtcaccggactaatgccgtcaagaggcagtatccattggccgtcgctaccgtctacaactgtcttctcttttcggttataaattttataatatttgccggtttgggagtggtaccgtcctag

SEQ ID NO: 1493 - DNA, 5012 bp, Oryza sativa
  N_region (4618)..(4618): n = any nucleotide
  N_region (4842)..(4842): n = any nucleotide
acaagcaaggactggatactgagatgcctctttctcctcaatggcttatgaaggtgggagaaaacaaggaacccagtttactgggtgttcgttcagatggttcaaagataccaggaaatgatgaggacacaagcttcagtgtgaaaagaaaggatgttttcagggcctctgtgcttgatggtgaaactgggtgtcgtgaacgctggcgtgatgatgaaagagaaccaaattcagcccctcggtggaatcgctggagggagacagacaaggaacatggtgatacacgcaaactggaaaggtggtcagatgactcctccaagtactctgtggatggtcgtcgtcctccacaggaacgttggagtgactccggtaacaaggagggaaactatgatcaacgccgtgataacaaatggagtgctcgtaggggccctaatgataaggagtctgagaattggcgtgacagatggggtgattcaggcaaagatggtgatgctgcccgtgaaaaaggtttctctcactacatagctcatggaaaagacggcaacagtcatgagaaggatgctgaaagagatgataatatttctagatcatggaaatctagttatcctgtgggccgtggacggggagattcatctcatcatccctcacagaatacacaaaaatcatctgcaacatatggatatggtagagggaagccagacaatgaaattgcaagttttccaggttctcgtggaaaatttacatctggaagtacaaacacagccagttcaggatcatcacgtccattccatcttggcctactttctgacaggcctggtggtacatcaggagatcgcacagcatttagatatagtagaatgaaactgcttgacatatacagaacttctcatgttactgacttcaagatgccccttggtggctgtgaggaactctctgcatttatgcaagaagaaactttggaacctttagcattgtctgctcctactactgatgaagcggccatcttaaaagcaattgataaaggggatatcataaacagtggcgtccatcaggcttccaaagatggcccggttggaaaaaatggtagagaagatcaacaaggaggcatggaagatgtcaagggagaaacagctgcaagtctcagggtgtctgttaaatcattttcccatgctaaaggttgccactgttggtttataataggttttcctggtaatactgatttgccggccagagcggattccttgcggccagaaacatctgcttatgttgttccacaaagatctaggctcattggagaacataggcctggaccaactgctgactatatacagcaaatgccctttgcattagatcaggaaagtaaagtcgctgttattacaggtgttgatggatttgccactccaacttatcctaatccagaaagcttatctttatattacaaagatccacaaggtcaggttcaaggccctttttctggagctgacatcattggctggttcgaggctggttactttggtatcgatttgttagttcgtgttgcaaatgcaccccctgatgcgcctttcttattgcttggggatgttatgcctcatctacgagcaaaggcaagaccacctccagggttcgctgcaacaaaacccagtgacatgctaatgccagaaactctatcaactgggaattttgtcagctcgagtaacacacatgcaggatcagccagtgttggagcatttgacagtgggctaagcaggaaagatggtgcagttgaagctcaaaatcgctttttggagtcgcttatgtctaatagtgttcgtgatccttcagctgaaatgcttgctatgactgcaggtatgactgaatatggcagcagtggcattggtaacattactgtgtctggaggagagactgggaacagcatgacttaccttttggtacagaaaagattgttggagaggcaaaaatctttgcaaaatcctggttcattttggtcaggagacagtattccagctgcacaagtgcaaaacaaagatatagaagcatctgctctacacactaaattgcaccctcccatggctgatccacctcgccaagctttgcaatctcagaatgttgatttgcttgcgatgctgcattctgcagagaaacctcaagcacctgcttctaattctggattgccagcatggtcaaactaccctgaagctaagaatcttgatcctcgtgggcatggtgtggatctcactcaagggtcacttaacatgcatggtgcaagtgtgcagagttcccaacaagccactactgctattcaacagcaaaacttcatgccactgaacatgtcacaaatagctcatttgggacctgagaagttacgtgctgaaatatcccaagacccacagcttttaactaggttgcagcaccagtatctactgtcacagctacaattgcaaccacagctacctgtgacgcctcagcctcaacctcaacctcaactctctatgttggacaagatgatgttgctcaaacagcagcagcagcagcaaatgcaacaacagatgcaacagcaacaacaaatgcaacaacaaatgcaacaacaacagaagcaacgattgcaactgctgcaacttgagcagcagcagcagcagcagctgttgttgcagcaacagcacctgctttctcaagttatacctcatgggcattccagtcagcaacctgatgatctttatgggtcacaacgtacttcattgccaactggtgattcttcgaatcttggccttcagaaaatgaaagaggttcttgaggcagaccgcgttttgactgcccatggtacacaggaggggcagcaacctagtgatccaagtattatgaataagaagggtatggagggtgtaggtccatctcaaagctctgtaccttctttattgccccatgaaatttttggtggtgtaccttcaaaagatcgctactctcacccccagaagttggaagataaggtcaatgtcaatacacaattaaaagccagtatagtgaacccgatgctaacagaagttgcaaataggcgtgaagatgattctgatcaacaggaggttagatctcatgaaaggggcattggaataggaaaaacaggaatcatgtctgaaaatattttgggctctggatcttctgaggtcataggggcagctccaagtgcacctaaggagtttcctgaggcaccgtttgatccaaaacctgaaacattgtcatctcatatttccaatcaggtgcaagatttgaaaatatcttcagaaaatatcctcggtggtagtgaaccaactgtggcaactgaagttaaagcctctgatacacaggacacaaaaaaatcagaaaagaaaaagaagcagaagaagaaacaggcaggtgcggatgtagccaaaggagctacaaagacggttacttctcaacagccaaggcaggaaactctagttggttcagatcagggtggagctaagcatgacttgcaagatgatgcagaggagctattttggggttcccccatccaagtggaaagttcttctaaatctgctgacccaccgctaggattggaatcatctctggttctacctgcgaaaagtttttccgaggattatgatactaacaaaggtgaatgggaacctaatgctgccgcagtaaaccagcgtgggtggaaacctactcagggacctagacctaaatcacttctggaaattcaagctgaggaacagcttagagcacagaggggattagcaatggagaatgctaagccagctgtttctgcagcttcagtgccatcaattccttggaatggcatgctgaccacttcggaccagcagttgatggctcctgatgctcctgcttttgatgatactgacttcattgaggccaaggactctaagaagagcaagaaaaaggcgacaaaagcaaaaggatctgcagtcaaagccccagcacctgttgtttcctttgattcatcgactgtatctgtacctactgaaaagggaaagccttcaaagcaatcacatcaagagaaagaaatactaccggctccaccaagtggtccgtcttttggagattttgttccctggaagagtgatcaggcaagtgcagtacctgctccagcatggtctagtgagtcagcaaaggtgcaaaggcctctgtctttgagagatatccaaagagagcaagaaagaagatctgctgttgcccagcagcaaccaccctcgccaaccccagcaaaggtatctatcaaccaaaggaatcatgcaaatgttccttcctggcaagcttctggctcatctccatcaaaggctgttgctcctgtccagatgagctctaatgcttccagtcgttccaaatccaatgctgaagatgatttgttttggggcccttctgagcatgctaaacaagataagaaacagtcagaattcccaactctttcaagtcagactagaagctccagtattaaagaccagtccccaatgaaccgtcaaaaatcccaggccagcagactgcccctttctactgctcctactgccaaccacgctggtaaagggaaagcagaggcagcaaacaggcaaacagaggcaatggacttcagggattggtgcgagantgagtgggccagactcactggaacaaatgatacaagcttcctcgagttttgcatcaagcaaccaactgttgaggcagaaatgctcctccgggagaaccttggctcttttgaccgcaatggcgagttcatcgataagttcctcaactacaaggccttcctgtcaactgatgtgatcgagatggccttccagctacctgcccgtgctgtccgtggggacggtgcanggcgtgcaaaccatgcctctgcagccaaaggagcctccagcaccgagacggagctggacggaggaaagaagaaagggaagaaggggaagaaggtgagtgcagcagttttaggattcaatgtagtcagcaaccgtataatgatgggtgagatccagaacgtggaagattag

SEQ ID NO: 1494 - DNA, 4986 bp, Oryza sativa
  N_region (4750)..(4750): n = any nucleotide
  N_region (4764)..(4764): n = any nucleotide
  N_region (4781)..(4781): n = any nucleotide
  N_region (4787)..(4787): n = any nucleotide
atggcctccgacgccgacgccgacgagctccgcctcgcccgcgtctccttccgcggatggctcggcggcccccgccactgggacctctgggtcgccaagctccgccccctccacgaccgcctctggcgccacctcgggatcctcgacgccatcgtcgcctccacctacaggttcaagcgggacgccgcactcgtcctccacctcgcctccttctggtcgccggcgaccagctccttcgccttcccgtggggcgaggccaccgtctcgctcctcgacgtcgccctcctcggcggcctccccgcgaacggcggcccggtcctggcgccgctgccgagccactggcgcgccgacgaggccgcgctcaacgccgtccgcctcggcttcaaccgcagcgcctgcaagaaggcgcaccactccgcctggatcagccacttcctcaccggcccggccgccgaccccgtcgtcgagcacgccgccttcctctcgctctggctcacgcgcttcgtcctcccggggcacccggagtccaccatgcgccagtcgctcttcccgctcgccgtccgcatggcgcgcggcgaccgcgtcgcgctcgcgcccgccgtgctcgcctccatttaccgggacctgcgcgagctgaaggccttcctgtcatcctccagcgccgccgccaccggcgaattgctctcgccattgtcagtctacgcgccattctaccttctccagctctgggcgtgggagcgattcccggcgatcaggcccgcaaaggcgaaccccatcaaggccggcgagcctagggccgctcgctggaatgatgtcagcaataagatcgacccggcggtgctccgcaaggcgctcaactccgggagcagctttgtgtggcagccgtatacaatctctgtgcagccgtgcggctgggttcgtggctgccatgtctccgggaacgacgagctcacatcgctcgcgcattgcttgcgtgcttgcgagcttgtggggatggattgcattgagcagtatctcccgcaccgtgtcgcgatgcagtttggactggatcaagatgtgcccggggatgttcaacgagccaacgacgattgcagggttgcgtgggagacctaccatttggaggggaagaatgtagctttcttcatcccccagtccgagccaggggtcactgcgcgatatgcagagtggtggaggcagcccttgccacattctcatcttgatgttggtgcagcgagcacagtggtagaatcgaaggtttccaagcgtaaggtgaagaagacactagtagccattgaggccgaggaggagaaggagcggaagctgaagaaggctcgagtcttacctagtaacaatgataaaaagcgcaagctgcaagagttgtatgatgcgaagctgtcagattgccttgcagctgcaagggatgagggtgctggcagctgcgatagggggtccttgccattatctgacatggaatcagaaaaggccttgttgtctcatgttgaaactatcaatgatgatattgtgctacttgtgcccaggaagcagacagcagctcctgatgtaaatttgatcaaggataacatgaatctggctacaggagatagagggagcctcgaagccacaccaccagttggaatggaggagaaggatgagatgccgaaagcccagcagacatgtaatgtagagcatccaacgcaccaaccatattgtcaggagacaaaagcagccccatcaacagaaatcactaagggtgaatcaagtggcattgttttggcaaatgttaatgaactggatagggggagaacacccgatgtccctaattggcatgaagaggctgtaccttcagaggctatggagaaagaagaatccagatatcatttgagtgatgttgtttgtaatgatgaaagcattaaggaagttgtaacagttgataaacctctagatgtctccagtgaacctgaaggaggtgctaccgcaatgccggaggagaaaatgcttaatgtctctgtagacatgtctcttgatgccacagataggccagaagaaggtaccaccattatgctggagttggagaacgaagccaacctttcagttgatgaatcatgtcgtgtgtcaaacagtcctgaagaagtttctgcaacggttggaggagataaagaagaaaaggttgccattgatgaagcggatgaaggaaatggaacttcagaagatgtaggaacagctgcattgggatcaatctgttctattgaagttgcgcctgggagcaaacaggaagttgatacaggtgttattaatatttctcatgatgcagtgactttacctgatgaggtgcttccagttcagcagccaaatgatggagaaaccactcgtcgtgattttgtcactgaggaacagaggaaggcctgttgcatcgaagagattggaggagaaaacagccagatggttgagaaagctagcaagcagaagccccacgaagctcaccaggttaacatggtagaatgtggagaagatattaatcccatgaaaaatgacaatgaggatgagcatgataaaattcctcaaccactggagaatgccatctcggacagcaatatgactagtgtattttcaggtgttcctgaagcagagaatgcagatacggataaaggtctgttcctagcaaagaaagactctgaagacatgcccaaggaagttgtaggagcagagggctcacagcaggatcaatttactacttcaacacatgaagttgtagatgagcacaacgaagttgctgaagtagagccagtcttggcagaaccaaatatgcatggccagtgtgatggtgagaagcccgatgaaggcaaggttttaagggagaaagacactgaggagaatgccaagaatgctcttggagtagaacagatagaaagacaagacaaggcactgacagagagctgcatacatgaagtggagcaggtggatggacaaagcgagagactcacaaggacaggtgttgaggaaaagcatgcagaaatcactcaagaacaagaaaatgaatttgataacggtgtgatggaaacttcaaaggtttcagtcaatggtgcgatgccttatagtacagctagtatacaatcagaaggagagcagaaggaagcttctgataaagatatggcggagaagcaaagcaatcaggatattgagtccattgatgagagggattcattgtctgatgcagctgctacggtttttgaaggagcagatgaccacataactttggacacgaatgaggaagcgactaggaaacatacgcatgactgtggaagcatatgtgagaacaaggggacacaaatgtttcaagaaggctgtaagctggacagcggggtgaaatcggatattgatattatggagattgaaactcaagctacagaaggaattcagaaccaagaaactatggagttggacaagcaagaaatggaggaagaacagaatccaggaacaacaattgaaaacaacaaaatgaaaataccggaagaagatgccagtacatttagctgtggtgaaattcaaactgatccacatagcacagatgttaatgaggttgagttcaccacaggaacgcagaacgacgaacatttggacatcaaggaagaactgattatggacagaaggttagattgtgaaattaaatatggaaacgaaagacccttggaagaggccaacacatttggtggttgtgatggtggggtggataacattggtgttgctttggatgttaatgaggaaaattctattaaagaaatgcaaaaccaggaaattcgcagcacagaggaggcaagtgaagtttcaggatatccatatgatcgactattatttaatctgacaaagttgttttacagttccaggctggggagacccaatttgaacaatggagctgaaaatgtggatgagaagaggattttggaagacgcaagtacacttgatattcgtgattcaactaatgcggtagttaatggggctgaatcaacagaaggaactcagatcctgtgtgcttttaacacggagaaggagctagaagttcaggagaagcaggaccagggaacagaaaatgagaacagaaaccaaaatttggtcaacacagattcgtttgaatgtggggtggaacctcatgggaccctgaaaactactcatgagactcttcctacagtgcaagttgttagcacatcaggagatacattttcttcgaagaatgagcagaacgatgtaccctgggaggaccagaacaaatcagatgctgaagtgtctgaatcaaaccaaactgcaccaaaggagtccgaaaggactattccaccagagcatgaagaccgggaagaagagaaagaagaaaatatggagaataagatagaaatatccataggtagagagaatgatgaagtatctgaacaagagacctccacagaggaatgtatcgttgctccttcaggtatggatgaccgggacgagaataacaaaggatgggctgaagaatctgtacaaacctatgggtactattctcgacatgccgttcctgaaccagtttcagtcaccagggaaatcaaagtgccgttgtatgacagtacaagggcctctggaagagatcgtggaccagagctagtggtgacaggtccaccagaagagacttctcgatggcgacaagaacaatacgcacttcaaattttagaagacgtgcaaaatgctcgcgttgcagagaaaactaggatggagatggagatcngaatactgaaggcncaggtttctagcatgcngagacnagcgatgaacttggatcgtgttggtgattttgcagtacagagaaggttccagaaaagagttcacctgaagaaatttcgtgctatacagccaagttcctcaaccatttcatatgtggaagacaatctactaggtcttaggcgcctaaacacactaccgcagatggaagactccataccagattgtattgaacaagactga

SEQ ID NO: 1495 - DNA, 4797 bp, Oryza sativa
  N_region (2883)..(2883): n = any nucleotide
  N_region (2887)..(2887): n = any nucleotide
  N_region (2915)..(2915): n = any nucleotide
  N_region (2920)..(2920): n = any nucleotide
  N_region (2930)..(2930): n = any nucleotide
  N_region (2933)..(2933): n = any nucleotide
  N_region (2969)..(2969): n = any nucleotide
atgacgaagccatcatccaagacggaggtggagccatctcatgtgataccagtcacattagatgactttgaaggagaggatcgcaaagccatggaggagtatatcaacgagctcacacgggaggcgttgatgagagcaactactaggactcgtcaaggcgtgatcatcaagcccgggccacgtcctaagctcgctcccgacgtggtaagtaataatgaggtatcacaatctatcgaccaacaaattgcaaatacaatagattcatctatggctaattttaaagatagattagatatgatgtttaaggaaaaagttgatgggtttttaaggagtaggctaggttcttttatggatgattacacattaaaggataaagcctataccactgctgatcaacctcctgtagatccaatagggtctaaaaccgacggggcggtgttcacggccggtccgaccagccagatggccggtccgaccgggtattatcccgtcggtccgaccggccagatggccggtccgaccgggtattatcccaccggtcagaccggccctcaggccggtccgacagcgcaacctgacgccggtcagaccgcgccctggaccggtcagaccggcgcaattgtcccaatacaggggattgacccaatgactaatgctagttatttgtatcactttagaacatttgattcccctgtatctacaaccaccactagtcctcaaattcccccgcatattcctaatgtttacaatgatgtctctaggggatatcctcccgatactaggcaaggccaatataatcatattgcgtcgcaaacccaacctattaggccaccaaacccaccaccaaatccacaagggcctaataacatggaaaacatgatttgtgatattatgaggactaaattcgggatcgaaactaggaatcgtgctagagcttacaaaagaccatatccggattattatgataatgtgcagtttcctagaaattatagagttcccgaatttaccaaatttagtggtgaggatggtaagcccacatgggaacatgtaggtcaatttttagcgcaatgtggtgaggctaatagtgatacttttaaattgcgcttattttctttatctttatccggtaatgcttttacatggtttacttctttgccggcaaattctattcatacttgggctcaattagaagaacaatttcatgattatttctatactggagaaactgagcttaggttatgtgatttaacatcggttaagcaaaagtataatgaatctgttgttgattacattaagaggtttagagatgttagaaaccgatgttatactttgagtataactgatagagatttggccgggcttgcttttaatggtttagttgctcctcttagagagaaattagatggccaacaatttcttgatgttagtcaactcatgcaaagggctctggctcaagaaagccaggttaaagataataaaaaatttgttagaccattagacaaaaatcctaatgttaatgtagttgattactctgatgttagtgatagtgaggaggagggtgatcatgatattatatgttgccgaatggttcaatcggccatagatgagggacgattgaaattcaccgatggctccaagatgaagcttgatcatgatccttttccagtaaatacaattaattttaatgataagaaggtgttgattcggtcggagcaagccgaatctactaaaggaaaggaagtggtcattggtaagccaaggcctaagatgatggtgccaaagaagccggaagttggtgtttggaaggaaaataaaagtggagcttcaacttccaaagcccctaggaagaccaaggtgacttttaatatgcttttggaaaagtatgagaagcaaggtgagaagagggaaggaaagcgcgtcaagatagaagagaggacttcggaggtgattaccatcaagatagggtcccatgatgtgcctataccttttggagatggagttggaaagtccccaaacaagaaatccgaagccggtaccagctcctcgcagtcggccggtctgaccaggccctctggccggtctgaccgcggccatgtagccggtctgatcgggccatcaagccggtctgaccgccgacctgacgacggtctgaccgatgcctcaggccggtccgaccgtgcgccacacgtcggtctgaccgacgcgtctggccggtctgaccggtggtctgcagccggtcagaccgggctccagcgtcggtttgatgagagggctgcaaagggcgatgtgagggcttcatcgtcttcaaacaaggttaatagaggatactatttgcctcctggaacagagccgaatcctgggtggatgcctaaggatttgacggctacacaaaagagaaggttgcaacgtcttcgagcccaaaaattaagggagaaaaaggccgaagaacaaagggataaaaggttcaatgagttgcgaccacctccggtatggaggcctaaatccatagagaaggcaaaaccgattgatgtagagaagaaggaagaacaatcggttgacgaaggtgaatcatctccaaaggaggacatggatatcaatatggtgtgtatgttgccaatggagttttgtgctatggatgaagccgaggttgcccaattctcattaggtcctaaagacgcggtttttgagaagcccgatgagtcaaaccgtcacatgaagcctctctatctcaaaggccatgttgatggaaaaccggtctctaggatgctagtggatggaggtgccgccgtgaacttgatgccgtattcgctattcaagaagttggggcgtgaggatgatgagttgaagaagaccaagatgattctcaatggcttcaatggtganccancggaggcgagaggtatcttttcggcggngctcnccgtgggaancangacgctaccaaccgctttcttcatcgtcgatgtgcnagattttgatgaagtggagaagcttggacaaggatttacatcggccgatccattggaagaagtagatataggtgatggaactaaaccaaggccgacttttttaaacaaaaacatgaaagccgattataaggttaaggatggtatggaaggccatatagccgatttgagattggcttttgagaggatgcgccggtatggtttgaagatgaacccacttaaatgtgcttttggtgtgtcggcggggaagttcttaggattcatggtgcatgagagaggagttgagattgatcctaagaagatagaaaaaattcgtgatttcaaagcgccgagatgcaagaaagaggtccaaaagttgctagataaggtgaattatttgaggaggtttatttctaacctagcgggtaaaatcgatgcttttgttcctatacttcgcttgaaaaaggaagccgattttacttgggggacaaaacaacaagatgcgtttgaagagttgaagagatatttgtctactccacccgttgtgcgagcgcctaaagccggaaagccttttcggttatatattgcctccgaagacaaagtcattggtgccgttttgacgcaagaggaagatggcaaggaatatatcattacatatttgagccgccgtcttttagatgccgaaacaagacatattgctaggcatgataattctagagcaaatgacttagcacaacaagcatctggttataatgtgaagaagggattatttctgatattagaagagccggtgcttgattttaaatctttgtgcgaaattggtaaaattggagaccaggggcggtctgaccggcgttgcacggccggtctgaccggtgaccaggggcggtctgaccggccgcatgccgccggtctgaccggtgaccccgagcggtctgaccggccctgcgtggccggtctgaccggtgttgggcagaaagctggggggcacgcttcaatcaatttggaggccgaattaattgagaattcggacatttgtgcccagaatgcagaagaggattggagaattcctttgattcaatatctaaaagatcccacacttaaggggcataggttcgtgctagtcgctacggattacttcaccaagtgggccgaagccgtgcctttgaagaatatgactcatacggagcatattattcatagattcggtattccgcaaacattaactacggaccaaggagcttcttttatgtctaagctaatggacaagccgagtccaagtaataagacattgttaaagctagtaaaaaagaagattgaggaacacccgaagaggtggcatgaggtgctttccgaagcattgtgggcacataggatatctaaacatggtgccactaaagtcactccttttgagttggtttatggtcaagaagccgttttaccggtggaggtaaatcttgattctcttcgttatatcaagcaagatgatttgtcaagtgaagattacaagacgttgatgggagacaaccttgatgaagtcattgacaagcgcttgaaggcattggacgagatagagaaagagaagaagagggtggccaaggcgtacaacaagagggtgaaagcaaaattgtttcaagttggagacttggtttggaagacaattttgccttcgggtactcgatccaaggagttcggtaagtggtctcctagttgggaaggtccttatcgaatatgtggcattgttcgagggaacgcatactttttggagacacttcagggggagcgttttcagcgagcaataaccgggaaatacttgaagaaatacttcccgagcgtttggcaagacgcttaa

SEQ ID NO: 1496 - DNA, 4536 bp, Oryza sativa
  N_region (661)..(661): n = any nucleotide
atggcgagacgcgcgcccctacgctgtctcttcctctccctcgtcgcgctcttcgctttgctgccattcccgcccgctgcggcggcgccatgccacccggaagacctcctcgcgctgcgggcatttgcggggaatctctctgcgggtgggggcggcgccggactccgcgccgcgtggtcgggtgacgcctgctgcgcctgggacggcgtcgcctgcgacgccgccgcccgagtcacggcgctgcgcctccccgggcgaggtctcgaggggcccatcccgccctccctcgccgccctcgcgcgcctccaggacctcgacctcagccacaacgcgctcaccggcggcatctccgccctcctcgccgccgtctccctccgcaccgccaacctctcctccaacctgctcaacgacacgctcctcgacctcgccgcgctgccgcacctgtccgcgttcaacgccagcaacaactcgctgtccggcgcgctcgcccccgacctctgcgccggcgcgccggcgctgcgggtgctcgacctctccgccaacctcctcgccgggacgctctcgccgtccccgtcgccgccgccctgcgccgccacgctccaggagctctacctcgcatccaattccttccatggcgccctaccgcccacgctcttcggcntcgccgcgctgcagaagctctcccttgcctccaatggcctcaccggccagcatctcaccgcgcactccaatggcttctccggcttgctgccgcgctcgctctcgtcgctctcatctctccgtgacctcaacctccggaacaactccttttccggcccaattgctcgtgtcaacttctcctccatgccgttcctcgtgtccattgaccttgccactaaccacttgaatggctctctcccgcttagcctcgccgattgcggcgacctcaagtcactcagcattgccaagaacagcctcaccggccaattgcccgaggagtacggccgcctcggctcgctctccgtgctctcgctgtccaacaacaccatgcgcaacatctcgggggcgctcaccgtgctccgcgcctgcaagaacctcaccacactgatcctcaccaagaatttcgtcggcgaggatctccccgacgacggcattgctggattcgacaatcttgaggtgttggcccttggtgattgtgctctcaggggaagggtcccggaatggctgcatcagtgcaagagactggaggtgcttgatttgtcctggaaccaattggttggcaccatccctgaatggatcggtcaacttgataacctgacctacttggatctttcaaacaattccttagtcggcgagataccgaagagtttgacgcagctcaagagccttgtcaccgcccgacgttcgccgggtatggcgttcactaacatgccgttgtatgtgaagcataacaagagcacaagtggccggcaatacaaccagctctcaaacttcccaccgtcgttgttcttgaatgataatggtctgaatgggactatctggcccgagtttgggaacttgaaagagctacatgtgctggatttgagcaacaatgccatatctgggagcattcctgatgtgctgtcccggatggagaatttggaggttcttgatctgtcatccaataatctcagtggatcgattccatcgtcgctgacggacctgaccttcttgtcaaagttcagtgtggctcacaatcacttggtggggccgatcccaaatggaggacagttcttcaccttctcaaactcaagttttgaaggtaaccctggtctgtgcaggtcaagttcttgtgaccagaatcagcctggggaaactcctaccgacaatgacatacagcggagcggcagaaacaggaaaaacaaaattcttggagtggccatctgcatcggtttggtacttgtagtactgttggctgttatcttggttaacatctcaaagagggaggtcagcattattgacgacgaagaaattaatggctcctgtcatgactcgtatgattactggaagccagtgctattctttcaggattctgccaaggagctaactgtcagcgatctcatcaagtcaacaaacaactttgatcaggccaacataataggatgtggcggttttggccttgtgtacaaggcctacctcccagatggaacaaaggcggcggtgaagaggctatctggagattgcgggcagatggagagggagttccgtgctgaggtggaagcgctgtcgcaggctcaacacaaaaatcttgtttcactgagagggtactgccgctatggaaatgataggctgctaatctactcatacatggagaacaatagcctggactactggctgcatgagagatcagatggaggctacatgctgaaatgggagtcaaggctcaaaattgcacagggttccgcaaggggactggcttatctgcacaaggactgtgagcccaacatcatccaccgagatgtgaagtccagcaacattcttctgaacgaaaatttcgaagcgcacctggctgattttgggctagcaagactgatacagccatatgacactcatgtcacaactgatctggttggtacattgggatacataccgccggagtacagccagtcggtgatcgccactccaaaaggggatgtctacagcttcggcgttgtcttgctggaacttctgacaggcagacggcccatggatgtgtccaaagccaagggatcaagggacttggtctcctatgttcttcagatgaagtccgaaaagaaggaagagcagatctttgacaccctgatatggagcaaaacacatgagaagcaactgttttcggctaggcctgacatgagaagtagacagaggcagcagcagaagcagtgtattaatccgttgttaggagagaagttcagagaagatgaggccaagtccaagaagctccgatcctcccgcggcaagcagcggcctaagcagcgccggcgaggccgctgcagcagcacctcctcccgctctgaatccccaccccgcaagcgctccaagaagctcaaggtctctgacaagaagagcaccaagaacaagggccgcagacgccaccacagtcttagccccagccccagcccttcatcgtcgtccgtgagttactcaacgcgcagcagcagcggtggcggcggcggcgcttctgagaggtcggtgagcccaccgcgtaggagccgctctagagatgttaggaagaagaagaaggagagggggagggacagcaagagggtgaggaggtcaagaagatctacaagctattcaaccagtggagagagtaattccagtagtcgcagcaggagtaggagcaataatagtaagagcaggaatcgcaagtccggtggcaataaggatcatgcaagcaggaataagattgtgcaggattatgacaatggccatgctcatcgggctgagaatgtgaaatctgttgagattgcggatagggatgagaaagccatggctgataccagcaaggggagctctattgagatatctcactcaattattgatcatgagaagaatgagtccgttgagaagatggagagcgctcctaccaaggatgctgatgaaacacaagacatcttacctgctggtagtggaagccctgatgctcaggatctggagctgattctcaggcagaaagctcttgagaacttcagaaaatttagaggagcagcgctcatggcaggcaagccgcaaaccaatggtacagggaaggaagtggtaacggatagccccaagagcagtgacacgaaaattgctgaagcgagttctgttgacaaaccttttcagaggcaaagaagtggtctttcagtgaactgctctgttggatcccctagattggaggatttcgggaaccatataactcctcgaaagcaggaaagctccgctggcaagagcgttggcgttgaatcacctggaacatttgaggccggcagcaccagcgggcgaactgagcagaaaggaagcagtctagaacctactcgatcaaattcacagattaggctacaggatggtaggagtagttccagcataatgcataggttgggaagccctccaaggagctctgccagcgtgattcgaaggttaggaagcagcgcaggggtgaattatgtgaatggaaatcccagagttagatcagttgtgagcatacccactaaggaagggcttgatagtggtacatctatcactacccctagtgcttgtgataattctccccctgttgaaaacattagtgaagtcaggcatcctcctattgatactaacaaaattgaaggaactaaaggggatgaaagaaattcaggtgaagcttcagctcctaatgtttctactttgtcaactggtgaggtcaaggatcagcctgggactgaggtcaaagatggttctcagtttgagaaaaagacattctctagaatgcatgagggagaaactgtgcaggtcagttacaaagtctacataccaaagaaaagtccagcacttgcaaggaggaagctacagcgctga

SEQ ID NO: 1497 - DNA, 4269 bp, Oryza sativa
tttagatttggtgcagctagcagtgggtttcatagaggtagttcttcgcggtcacacaaggatcatgctgaggctttaaaggcatcataccctaggaggtcttattatggtgcaccaacatacgagtgcccatactgtggtgccgtgttttggtaccaggagagagttaagggcgcttctgctatttcaaaacgaaagatagtttacaatctgtgttgcaaaagtggtaaaatacagttgcccaaactatgtaaaccccctgagcctcttgctacactgctaaaatttaatggcgatgcacgctcaaaaagattccttaggcagatacggtcctacaactctatgtttgcttttacttcaatgggtgcagctgttgataaatcaattaacactggaaattcaccttatgtcttcaaaattaacggtgttgttcatcacagaattgaaaatgagacacaaaatcgaatgaacatatatgaaaatgatggtagtaacgctgatcaagctgagcctgttgtagttgatgctctctgcactatgctagattgtcataatacacttgtgcaaaaatttcgctacgctagggagcgtctttctgagcatgggaaccatagtttgacgttgaggcttatgggatgcaatgccaaaagtgatgtgcagtacaatttaccaagtagtggcgaactagctgcgattatagtgggtgattactcagcagctgaatacacttttgatatacttgtgcatgagagcgatattgggctgcgacgtgtcttccttgcacccatgttatatggctttgcaatatccattgttttttccttatggcgagcgaggattccatcttggtatcgaagtgttgtcgatgtattctcaactattgaaagcagtaggttgaaatatatagctgatcatcagtcagacttgcgatctgaatgcgtacaaggtatagctgatgctattgatagaggtataaccaacggtgattctgtaggcaagcgagctatccttcctgctagctttacgggaggtagaagggagggtaagacatttgggcctgtgcttgcagttctctacactgttgagttccagaaatgtggtttgccgcacatacactgcttagtatggcttgctgctagcagtgctcaagtatcagtagctgttatagatggatttatcttagctgagataccagactttgaaaccgatgaattaggttatgagtcggtaagcgagttcatgatgcatggtccctgcggtgagcataacaaacaatgtccttgcatgaaaaatggcaaatgttcaaagcactttcctaaagattttcatgatgaaacatttgttgatgaatatggttttacaatctataggcgcagaaatgatgggcgatatatcacaaaaaatggtgtgcgtctagataacagatcagttgtcccatataacattggtttgcttaaaacataccaggcacatataaatgttgagtggtgtaataaatccaacatgattaaatatcgttttaagtatgtgatgaaagtccatgatcgatcaaaaatatattttgaaaccactgctgcaaatggtaatatgtcacctaaccatgaccttgcccctctagatgagatactagaatacatggatgctaggtttttatccacctgtgaggcactgcatagaatttatgaatttgacatacattatagggtttcacctgttgaaaggttggctgtgcatttgcctggtatgaactatgttcgatacgagacagggtcagacttaagagcattgcttaatagtcctgctgcgaaacgtacgatgctgactgagtggtttgaaacaaatgcaaaggatgaggatgcacgtagcctaacatactgtgattttccaacaaaatggacatgggattccacatcgagatcttggcacaaaagaacaccagctcctaaaattggtagaatgtattatgttcatccagctgctgattccttggttgcacagattaatactgatcaaaaaacaatctttgacaccattgtaggccgagttgtagcagaacagccaggctttttctttgtatgtggtcatggtggtactgggaaaacatttatgtggaatgctttgattgcgaaaataagatctagaaataaaatagttcttgctgtagcttcgtctggtgtggcttctctactgttgccaaaaggaaggactgctcattcacgcttcaaaatacctattgaaattaatgaaaccagtctttgcaatgtaaagagaggaacgatgcttgctgaactacttgaaaacactttgctcatcatctgggatgaagctccaatgacacataggcgttgctttgaagcactagatcgcacactgcgtgatatcctttctgaaacatgcccttcaaatggtgttgttccctttggcggtaaaattgttgtgctaggtggcgactttcgacaaattctaccggttgtgcctaaaggttcacggtcaacaattattgacgcatctattacaaattcaaaactatggaaacatgttgttatgcttaggttgaatgtaaacatgagattgcttaacccttcacttccaaacacacaaaaagaagagcttaagcaatttagcgaatgggttttagccgttggtgatggcactttgcctaaaaaaaaagatggtttaattccaggagatggaaaagaatacctcagttgtgatacaatctcaaagtgttctgaacaaataccagattttgacatgttatatcccactgaactcctcaactcaattgatgcgaacaattttccaacacatagacttgtacttaaagaagtgcaccgtgtgaagaatgcaaacaggagctacaagccagttgccaatgaactaatgatcactttcactaggtggacaactgttgaggagtgcattgaagttcctattgatttccctactgtggttttctccctgacacctttcgatgatgttgctaagtttgtggacaataatgatttttttattgatgttatgggtgtcattactgacatatctacacccacaatgcttcgtcctagatcaagggatgctgacagcttgaaaagaactattcagatacgcgatgcaaacaattctaccttgaatgtgtctctctgggctgaacaagcatctgcgtttgaggctgacgctatacacaaggctggtaagagtgaacctcagattattctgtttgttggaactcttgcgaagaactacccaggcataggattggcactatctggaggttctgcttgcaaatggtacattaacattgatgtacctgcgatagttgaattaaaggacaagactgggacaaacttccagccaatcaattggattgaggctccagccagagcagctgttgaggaagtcgctgagaacaagactgtgcgtgaacttctagagatcaatcctcacaagtgcaagaaggttcgatttcaagctcatgtaaccgttcgaaggatctgcaatgataagtgttggtggttgcaaaaccttatgggtccacctataaatgcactagctgttccaacatcgcagtggcagtaccaagcccagcgcattgtgcgaaggccagttgaagctcttattgaggaagcaccagctgacagtgattttatccctgatgaaataacggctttagttgggaagtcgtttgtgtggaatgtcagcttcacagaaaatacgcttaagtttggggatatctcattccaggtcaacagcattgtctccattgatgctcctggtgaacctcttatgttgatgtccccaggtgcttcccagagttcttcagccatgatttcacctggaccaagtggctcattgatgtcaccatcaaggggaagtgaacttggcatagcttcacccggttcaactgcagccagctctccactgccaaggcgtgttattaccacggacaaaagccaagttgtgcacacaccaaccagcaagtgctctgtcagcatagatcaggatgacatttctgctgctttttctccaccaatgtcccagaaagtgcaagctccagctattcctgatgatgatacactactggctcatgcatctggctcaaagagcaagtctaggaagagaggtcctccttctcaagcaccaccagcagttaagaaactatcaaggaaggtgacagcgatgagaaagaaaccactgttagcctgtcagctgacgcttgatccagtatacatgcatgcccactcaagcattttggccaccaagttgtag

SEQ ID NO: 1498 - DNA, 4179 bp, Oryza sativa
  N_region (3828)..(3828): n = any nucleotide
  N_region (3906)..(3906): n = any nucleotide
atggcagacggtgccaacaacgacgacgtttggcgccggcgtttcgaggaagtcctggaacgcctcgaagcgcttagcggccaaatcactgatctcgatcagcagcagcgcgatcagaacatggtcatcaatcgtctggagcgtggggctcgcgcacagtcccctcatttcgacgacgtaggtggcggtggcggcctcggcggaggccgtggcggcaactacttcggccgcggcgatccctttgctcgcggcggtgatggctttggcccggacggcggtcggagcggcttccacggtcgattcggtcaccgctatgatggtgatggcgagcgacccccacgctaccacaagctcgacttccccaagtacgacggccgcgacgatccacttccttttctcaaccggtgtgagcaattaatctggggacaacgcacgccggaagatgacaaggtgtggctggcctcctaccacttgctcgacggagcgcagcagtggtatacgtgtctggagcgtgaccatgggccgccctcgtggcaccgtttttcggagctcctcaacatgcgctacggccccctactccgttcagcaccgctgggcgagctcgcggcctaccggcgcacgtctacggtggacgactacaccgaccacttcctcgacctgctggctcgcgcgggctacctctccgaagatcagcaggtacaactgtttacgattggattacaagagccaatgagtttagatgtgcagatgcaaaatccgacgacattggaagcggcaatgagcctcgcccgctcgttcgaacgccgcgaacaagctgcgcgtccacctcgcccaccgcggcacgccggccgcggcctcttgccgctgccaccagcggccaacccgccggcaccggctccagagccggccgtcgctgccaaaccagcaggcacgccccccgcggttaaccgcgccatccgccgtctatcgccgttggagatggacgagcgccgccgccaaggcctgtgcttcaattgcgacgagccgtactcccgcggtcacaaccgcgtgtgccgccgcctcttcttcctggagatgggggaggacgacgccgacactgactccaccgatgacccggcggccgcacccgcaaccctccggatttctctgcatgtggcgaccggagttcgcgtgtccgacgcgatgcacatcatggtccacctcggcgacactgacctctatgccctcatcgactccggttccacgcctacgttcctgtctcaggatgcggcggcgcgtgtcggccgggatcctcaacctcgttcgggcctcaacgtcacggtggcgaacggcgacaaggtggcgtgccccggcgtcttccccgacatgccgttccagatcgccggcgaggaattcgccacggacgtgtacgtcctaactctgggcggctatgatctggtactgggaacacagtggctcgcgacactgggcccgatcctttgggacttcacggcactgacaatgtcgttctggcaccgcgaccactgcgtcaccctccacggactgccggggcaccagcggccacgcgccctagcgtgcggtccctcggcgcacttggactcgctgctagaggagttcacggacgttttcgccgagcccacgggcctttcaccgcacgtcggcattctcctcgccggtgctgctggtgaagaaagcggatgggtcgtggcacttttgcgtcgattatcaggctctcaacgagcgcacaaggacaaataccccatccctgtcgtcgacgagctcctagacgaactacacggcgccaccatcttctccaagctcgacttgcggtccggctaccaccaggtccgaatgcactccgatgatgtccacaagacggcctttctcacacatgatgggctctacgagtttctcgtcatgccgttcggcctgacgaacgcgccggcaacgtttcaatcactcatgaacgatgtgctctggccgttcctccgccgtttcgtcctcgtcttcttcgacgacatcctcatctacagcccgtcttggacgtcgcatctacagcacctgcgcaccatcttcaccgcgctccgagcggcccgactcttcgtcaagcgcgccaagtgttcgttcggggacgccagcatcgcatacctggggcatatcgtgtcgctccatggcgtcgccatggacgcgtccaagattcaggccgttgtcgagtggccgcgcctgcgatcgcccaaggatcttcgtggcttcctcggcctggcagggtactaccgcaaattcatcccggacttcttcacagttgcggcgccactcacacagctcctccgcaaggatcgattcacctggtcgccgccggccgacgacgcgttccagcggctcaagctcgccctcaccaccgtgccctgcgacgcatcgggcatggggttcgaggccgtgcttctccaaggggctgggccgatcgcctacttcagccgaccagtcgccacacgtcatcaagctcttgccgcctatgaacgtgaactgatcgggttggtgcaagcgatccgacattggcggccgtacctctgggggcggcaattcacggtgaagaccgaccactatagcctcaagttcctccttgatcaacgcttgtcgacgatcccacaacatcattggggagaactcctcgctctcacgacgccggtgttcgacctactccatgacctgcgcacggcgacgtcgtccgacccggtgttgctagctctccgtgacgagatcgccgccggtacacgtggcgcaccgtggacggtcactgatggcttcgtcacctacaagcggcgcatctacgtcccaccgggctcgccatggctctcgacgatcgtggcggccgcccacgaggaagggcacgaggggatccagaagacgctgcaccgcctccgccgcgacttccacacgcccaacgaccgccacctcgtcagcgacttcgttcagggctgcatcacatgccagcgcaacaagacggagcacctgcatccagcgggattactgcgtcctctcccgattctgatggccgtctggtccgatgtcgccatggatttcgtcgaggggttgccgcgcgttgccggcaagaccgtcatcttgacggtcgtggatcgcttctccaaatatgcccacttcatcgccctcgcacacccctacacggcggagacggtggcacgcgcgttcttcgcagacatcgttcggctacatggtgttcccgtgtcaattgtctctgatcgggatccagtgttcacttcggcgttctggacggctctcttcacggcgaccggcaccaagcttcatcacagttcggtgtttcacccccagtcagatggccatttggaggcgtggctccattggttaccgtgggcggaatatgtctacaacaccgcctttcatgcggcgctccgcacgacgcccttcaacctcgtctatggccggtatcccccgtccgtccgtgcatatgacaccagcgagactcgtgtggtggcggtggccaagtcaatggaggaccatgatgccttcctggcagatgttcgtgtatgcctggagcaagctcagcaacacgccaagcaatattatgataagaagcaccgggacatttcatttgccatcggggactgggtatggctccgcgttcgtcaccgtttgccagcctcgttgctggacgctacaaaaggaaagctgcgtcctcgctactatggaccatacaagatcatcgccgttgtcaacgaggtggcctatcacttggagttgccgcccgggacccggctgcacgacgtctttcatgtgggcttgctgaagccnttcgtcgggacgccgctcatgtcgccaccgcattgccaccagtccagcatggagcagtccttccgtctccacgccagntcttgcgcgccaggctcgcccgtggcgtccgccagctgttggtccagtgggaagggttgccatcttcggcgacctcgtgggaagaccttgaagagttccagcagcgttacccagcgttccagctcgcggacgagctgcttgtcgaggcggagagagatgttatgtggggaattccattccaccgccgacgtcgggacgaatagcgtgccggccgtgctacagtaccgcgcgaggagaataattaggcacgcagttatcaggttgttaggatag

SEQ ID NO: 1499 - DNA, 3951 bp, Oryza sativa
atggtgaggactaagtgcctcttaaattatcaccaaccaagcctcagcatcgtcgcgggatccagtcgcaggagcagggaccatggcaaacgatctgtctactcgcctcctgactggcacaaggagcatcaagccgaacatccccgctccccacgtcgcaggcgtcccgtcgatcttcgtgaaactatcaaccagtgctgcgcggcaagaggctacatcccccgccattcaccagatcgttacgacgaagacgtagatggagttgctgccttcacaagcgacctgcatcgagtagattggccagccggcttcaaaccgactggaatcgagaagtatgacggcacgacaaatcgtgagtcttggctcaccgtctacagtctcgcaatccgcgcagcaggaggagacagcaaagccatggcaaactatatgcccgtggctctagcggattctgcccggtcctggcttcacgggctaccccgtggcacaatcggatcttgggcggagctttgtgaccacttcagcgccaacttccagggcacctttgaatgctctggcacccaatttgatctctacaatgttgtccagaagtccggagaatcccttcgagattacatccggcgttttaccgagcaaagcaacaagatttccgacatcaccgacgacgtcatcatcgccgccgtcaccaagggcattcgccatgatctcttagtcggtaagtttggccgcaaaactcccaggacggtcaagcagatgtttgaaaaagccaatgagtacgcaaaagccgaagatgccgtcatcgcatccaagcagtcaggcaccacctggaagctgaagaaagatacgccgactgcagggggagcggtagtaccaatcacaaggatcgcaagctttgcagagcaatacgccaagaacgcacgcaaaccgactgacggagatcaaagcaagtccaagaagaaggatgatgaagatgccaagacccttgcaaggaactcaaccatatcttcggcggacccctggcttatgaatctaaagacagctatcaagtttgaccgctcggatcatcccgaccgagtggtccacccggggcgtgcactcaacatccatttcaccaagactctggacgacatgcagatccctcgcacagaattgaagccgagtaatgcgccctttcacggagtcatccccgggctatcttctactccactcggccagatcaccttgccggttactttcggcactcgggagaactttcgcacggagaacatttgcttcgaagttgctgattttgagacagcgaaccacgctatactcggacgcccggcgttagcaaagttcatggctgtcccgcattatacctacatgatgatgaaaatgccaggtcctcaaggagtcatatccctacgaagcgacatcaagcaagccgtcacttgtgacaaggaaagctgcgagctgtcccagacccacgagatcactctggctcgagaggaaatccgactggctgcgtccacagcaaccaaaggagaagtgcttgcaaccaagatgccaaagaacggagaaggcgacgccaagaccaagaaaattcctctagatccctctgatcccactaaaactgctgtaataggcgctgagaagacgctaaacgtattaatcaacgaccgccgtttcgaacaggatagaaaggatgcgatcaaggaggaattgaccaagctgttagcagcaggcttcatcaaggaagtcctacatcccgactggctggccaacccagtcctggttcagaagaagacggggcaatggcgtatgtgtgttgattacaccgacctcaacaagtcttgtcccaaaaatcccttcgggttacctcgcattgaccagacttcattcatcacacccttcggggcctactgctacatcaccatgccttttggattaaagaatgcaggagcaacttatcaacgcatgatccagagatgcttttcaactcagattggttgcaacgttgaagcttatgttgatgatgtagtcgtcaagaccaagcagaaggatgatttgattacggatctacaagagacctttgcgagcatccgcgctttcaagatgaaattaaaccctgaaaagtgcatcttcggagtaccgtcaaggaagctgcttggctttatgtggggacctgaagcacaaaaagcctttgaagacttcaagaaacttctcactactccaccagtcttagcttcgccacatccgcaagagccgctgttgttatacgtgtcggcaacttcccaggttgtaagcacggtcctggttatcgagcgtgaggaagaaggccatgttcaaaaagtccaacaaccaatctatttcgtcagcgaggttttggccgactccaagtcaagatatcctcaggttcaaaagttgctatgtggtgttttaattactgttaggaaattatctcactattttcaaggtcactcggttacggtggttacatcgtttccacttggggatatacttcacaatcgcgaagcaaatgggcggattgcaaagtgggccttagagttgatgtctttggatctatccttcaagccgcgaacttcgatcaagttccaagctttagctgacttcgtcgccgagtggaccgtatgccaagaagacacgtctacggagaagatggagtactggacaatgcattttgacgagtcaaagaggctatcaggcactgtagcgggggttgttctaatttccccgactggagagagactaagctacgtattgtggatacatttttctgcgtctcacaacgtggcggaatatgaggcgcttcttcatggattaaggattgcgatttctgtaggaattcggcgtcttatagttcgtggagattctcagttggttgttaatcaagtcatgaaagagtggtcctgccttgatgataacatgaccgcctatcgtcaggaggtatgcaagttagaagataaattcaatggccttgagctaacccacgtccttcgacataataatgaggcagccgacagactggctaattttggtacaaaacgaaaagcagcttcttccgacgtgtttgttgaacatctttatgagccaaccgtactaaggaaagaaataatcgagaccacggacactcaagaagtaagcacgattgaagccgactggagagagcccctcatcagatttttggctaaacaagagctccactactggagagggagaagctccctggtgctaaaaacacccggcaacaatggaaaaacacccgccaacgatgccgatgcggatctggtgcggcgaggagaggagaggcttctcatcgagcctacatggtttagagagattaatatgatggatgaaattgagttctatgataactatggaaggcacaaacaaacgaatttaatactactccctcaagataaagacgaagccgagcggatctccagacgcagcaaactttatgtcatacatgagaccgagctgtacaagaaaagtccatcagggattttgcaacgctctgttgacaaattttccaagtggatcgaagccaaaccagtcatcacaatcacggcagacaaggctagagcttttttcatcaacattgtgcaccggtttggggtacccaatcgaatcatcactgataacggcactcaattcactagcggagtatttcaagatttttgcgaggacttcggcatcaaaatttgttatgcctccgtagcgcaccccatgagcaatggacaagttgaacgtgctaatgtatatggtgcggaagcaatgttgccaagtgaggtagaattcgaatctttgcgatttcgtaatttcagcgaggagcgctatggagaagaccgagtagatgatctcaaccgactggaagaagcccgtgaagcagtgctaattcagtcggctcggtatttacaggggatgcgccgttatcacaatcgcaatgtttga

SEQ ID NO: 1500 - DNA, 3864 bp, Oryza sativa
  N_region (216)..(216): n = any nucleotide
  N_region (253)..(253): n = any nucleotide
  N_region (345)..(345): n = any nucleotide
atgtcgctgcagccgccggcggtggagccgccggagtggctgcggacgctgcccgtggcgccggagtaccacccgacgctggcggagttcgccgaccccatcgcctacatcctcaggatcgagccggaggcgtcccgctacggcatctgcaagatcgtgcccccgctcccgcggccccccgaggacgacaccttccgccgcctccaggccgccttngccgccgcggcctcctccaatggcgacccttcccgancttccccacgcggctccagcaggcccttcagcgtcgagtacggcaacgacatgcccggctccggcttcgcctcccccgacgagctccccgangccgccaatgccaccgacgtcggggagacggagtggaacatgcgggtggcgccccgcgcccgggggtcgctgctccgcgccatggcccgcgacgtggcgggcgtcaccaccccgatgctgtacgtggccatgctctacagctggttcgcctggcacgtggaggaccacgagctccacagcctcaacttcctccacttcggcaaggccaagacctggtacggcgtcccccgcgacgccatgctcgccttcgaggagacggtgcgcgtccacggctacgccgacgacctcaacgccatcagagtggcctttcaaacgttaaatgagaagacaactgtcttatctcctgaggtgcttctttctgctggtgttccctgctgcagattggttcaaaaagcgggagaatttgttatcacattccctggagcttatcattcaggctttagccatggatttaattgtggggaagcatcaaatattgcaactccccattggttacaagtggctaaagaagctgcaatccggagggcttcaactaattgtggtccgatggtgtctcattatcagctgctttatgagctagcactctcattgcgtccaagggagcctaagaatttctattctgttccaagaagctcacgtttaagggacaagaataagaatgaaggtgatataatggtcaaagaaaattttgttggaagtgtaaccgaaaacaacaatttgcttagcgcccttctggataagaattcttgtataattgttccaaacgctgatttcttcgttccatcctttcctgttgcactggaatctgaagttactgttaaacaaaggtttacagctggtccctgcagtattagccagcaaggagcagaaaatatggctgctgatcatgtggctgtagacaaggttacagagattcaggacatgagtggatccttatatccttgtgaaaccagtcttgtgggctgtagcaatagaaaactttatgaaacaaaatatggccaacgggatgctgctgctttgtgcttatctacttcagagattcagagcagaggaattgatacagcaagatcacatccagcaggcgggatcttagatcaaggacggttgccatgtgtacagtgcggaatactaagctttgcatgtgtagccatcattcaacctagagaagcagcagtacagtttatcatgtctaaagagtgcatctcatcgagtgcaaaacaaggaggaattggtgcatctgatgatacctcaaactggattgaccagagtcatgagattagtcctccaccaggtccagcatctggaacagatgataatgtaaagcatgccgtaagtttggcccatgtctctgatcggtgtagagaactatatgccagcaatacagatggatgcacctctgctcttgggcttctagcttctgcatatgactcatcagactctgatgatgaaacaactgaggatgtttcaaaacatagcaagaaaaatgattcagtaaaccaaagcacggatcctcaaatcttggaaacatcagctagctgttccagtacagttcagtgtcaaaagacaaattcacacttgcatgaagaggaatgtgaggcaagagccacatcattgatgaaacctgtaagccataatagtaggcccattagtcagtctaacagggatacagatatcgaccattttatagaactgggaaagtcaggaacacagtgttcaggttatcttgatttggttgatgatctaactacatcagttttaaaatcctcttcagatacttgtgtaagtgcagctaaagcctcaatggatccagatgttttgaccatgctcagagaaaaaaaaacatgtgtttacaactacatgagcaactacaccaagggcataaactgcaaataccctagagcagagtcagcagcaaaagtcatagcagaagaacttggtatcaagcatgattggaaagatatcactttcaaagaagcaactgaagaggacgttaaaaagattcagttggctttacaggatgaagatgctgaacccactggcagtgactgggcagtcaaaatgggtatcaacatatattacagtgccaaacagagcaaatcaccactttacagcaagcagataccatacaattccatcatttataaggcatttggccaagaaaacccagacagtttgacagattatggatgtcaaaagtcaggctcaacaaagaaaaaggtggctgggtggtggtgtgggaaagtttggatgtcaaatcaagttcatccacttctagctcgtgagcgtgaagaacagaacagtagcgtagtgtacggcaaagcaatgttcactactatttcccatggcaaagtacaagatgaagcgtcaacaagatgcaatacaagcaaccgaaccccatcaagaagaacatcaagaagaaaaaagggggtatctgctgagaaatctaaaccaaaaaacaagagatccactgcttctgatgaagctagtatgctttgcagtggccttggaatgaactctggagttatccatgaccaaactgaaaactctgatgattatgacaaacatggcaatggagatgaaattgaggaaggaacaaatcctcagaaatatcaacaacgtaaattgcaaaacgtgaccaggaaatcaagttctaagaagcggaaggatgagaaaagaacagatagttttcatgaactatatgacgaggataatggtgtggattattggcttaacatgggtagtggagatgatgccacactaggtaactctcgacaacaaagtcctgatccagtgaaagtgaaatctggaggcaaattgcaaggtaagagaaaatctagcaagtacaagtccaatgatgatttgttgaatgaagaaaataagttacaaaagatgaacaaaaaatcaagctctaagaagcaaaagaatgataagataaatagacaacttcaagaagatcaaaccgaagatgaccatatggaccacttagttgacgtagcggttgcagatgaagtcacactagacaatgaggataaaattacagaagacaaaattgatgacgtgaaagtgaaatctagaggaaaatcgcaaaatggtaagagaaaaggcagcaaacatcaggctaccgatggtttgcgcgctggaaataaagtggccaaatttccgtgtgatatagaaggatgtgacatgagcttcagtacccagcaggacttgttattgcataagcgtgacatttgtcctgtcaaaggatgcaagaagaagttcttctgccacaagtacttgcttcagcaccggaaggtgcatatagatgaaaggccacttaagtgtacatggaaggggtgtaagaaggcattcaagtggccatgggcgaggacggagcacatgagagtccatacgggggtaagaccttacgagtgccaggaacctggctgtggtcagacattccgattcgtttcagatttcagccgccacaagagaaagactggccattcctctgataagagaagaaagaacagtacataa

SEQ ID NO: 1501 - DNA, 3624 bp, Oryza sativa
atgtcaacgtgtcctgtgctgaatgaccgaccaattgatgagtggaaggttactgaattgaaggatgagctccgtaggagggatctatctattaaaggtttgaaggatgatcttgtgaagaggcttgctgaggcccttcagggggaggttattgatggcggggaagaaacagtcaatggaactccccctgtggagaatcagacacaagacggagctcttgttttagatgatgcatctggtttccaggcttcagcagaacaaaatgttgatgaaggccctgctgaggttgctgcaaagaatgaaggccttgtctctgttatagaagctagtacagagggcggaactcttgttttagatgatggatctggtttccaggcttcaacggaacaaaatgttgatgaaggtcctgctgaggttgctgcaaagaatgaaggccttgcctctgttacagaagctagtacagaggacggaactcttgttttagctgatgcatctggtatccaggcttcaacggaacaaaatgttgatgaaggtccttctgaggttgctgcaaagaatgaaggccttgtctctgttacagaagctagtaaagatagtgcaattgctactacagaagttagtcaggaagcagttgttgccgctgcagaggttagtccggaggctctagttgctgttacagaggtcagtgaggcccctctagttgatgtggccggaactaatgaaaattctctaggtgatgcagaagcaactaaagaaggtgatccagaatctgttccaagtgacagtaatgtggtgaaggaagtatgttcacatgctgaaattcattgtgaggtcattgcagagaagactccagacaatggcagcagcaagaaaatgactgttgatgacatatcatctgatgataccagtactaataccaagttggaggaatcatctgctaaaggtgaaccatgtgtcagtataggctgtgagattctagaacaggaaacgaaatcatcacatcttgatgttattttgtcacatgctgacgctgttgcaagtgcagaggaaatgattacagagagcctgattcttaagaaagattccaatgagaatgatttaatgtatgagaaggaccaaaaggattctgaccacataagcactgactgcaaacccgagcagtctggaccaaaggatcaggtatctgaagtcaaccaagatctagagtctcaaattaagtgtgtgtcaatttctcctgatgatatactagtcaataaaaacgacaatgtagaaggcaacatgaacgctgacaattttgatttaggactagagtctaagcaggatattgtcaagccatcatccagcaatccctcctccgttggtgatgatttgcagacaccagatgatgacaaagagatatctctgatcgacatgtctctgcaagatactgatatgagcttgaaaaagaaagaaggcagtcctgatagtatttatcctgaaaaactaaatttggataggagttcaggagatgaatcaatggaggaggatgcgatggaaactaagcacatggattccaaaacaatacctgattatctcgaaggaaagagtgaggtcaccttagagcatgtgagttcaggagatgaatcaatggaggaggatgtgatggaaactaagcacgtggattccaatacaaaagttgaacatgtgagttcaggagatgaatcaatggaggaggatgtgatggaaactaagcacgtggattccaatacaaaacctgattatctcgaaggaaagaatgatgtcaccttagagcatgtggtaaaagaggtgatcctccttgatactgtcactgagggttcatctgtagatcaaaaggaagctataagtcaagagaagccagtaatgccgactgaaaagaggaaagctgaagatcaagaagttgttgcaaataatgagccaatcaaacgtcagcgcctatggaatgtggatgatgtcaaacctgagcaagcaacttccaaactaagtggttctgatgcttctaaagttgtacacccgcctgctcgaagacgttcttttggcaggtctgattcaacagcacgtggaaattctccgaaggagaggatggtaccaccgcctcagaaacctgcaacaacttccttgagaatcgatcgatttgtgcgcccgttcactttgaaagctgtgcaagagcttcttggtaaaactggatctgtttgtagcttttggatggatcctatcaagactcattgctatgtcacattctcttcggtggaggaagctctggctaccaggaatgctgtttacaatctccaatggcctccaaacaatggcagttccttagttgctgaattcgttgatccacatgaggctggcggaataccacgcgaagctgcggatgatgaagaatctccgcgactccctcaacgcccgtatagccacgcgcctcgatgccaagagaagaagaaagctgagcaggcatcacgtgatctcagagagagaacggcattgttgaatttggcttttgtcacgctgaaaaagaagcgaaatgattcatcggtgatgcacaccaatgccatgaaagcagcacagatgggtcttatggcaactacctcagagcatttaaaaatgcagtcaaaagctatgaagcaactttgcagattgttcccattgcgacgagttattaaggatggcgaacagaatgatggctacaatggtccatatgatgtaatatgcaacgctcgtctacctcgtggtctcgacccacattcagttccatccgaagaattatcagcttctttggggtacatgttacagctcctcagtattgtagttcctatcctagccgcacctgtcctccacatatctggctttggggcttcgtgttcacgtgtatggcagcgtagttcctactggagcacacgacagtcccaaagcaaagtctacccactttttatacctaggaaaaataattgctctgttggtgaggataattcatggacggaaagtggttcgggtaactttggtgttcaatctgttgattcagacaacaaatcggttcttgactccaagagaagcaatagctttaacttctctattgcatcttctcactccatggagaggcaccaagatttgcaaagaggaatatcattactaaagacaagtgttactgccattactacctattactataactcattgggtatggatgtgccatccaatctttctacttttgaagcatttgcaaagttgctccatatgctatcatcattaaaggtccttcgcacaactcttcaatcgaacgttgcttcaaggtcagagaagcaaggacagcaactaaatagatctatatggaaagcgagctccgctatctcatctaacagcagcctgatggacagtgtgaacacagctataatgcctagttctctggacaacctcctgctgaactccaacacgagcttcctgtatagcggtaaaccgacgaagcatggtggagttccagacaacattttagaaggctgggatatggtagagcgcgacgtcctaccaccaccaccgtcgcgggttgaagacgttgcgcaatgggaaagagcccacaccttcaatcgcactggctccaaaaagaagtga

SEQ ID NO: 1502 - DNA, 3600 bp, Oryza sativa
  N_region (3501)..(3501): n = any nucleotide
  N_region (3517)..(3517): n = any nucleotide
  N_region (3557)..(3557): n = any nucleotide
  N_region (3571)..(3571): n = any nucleotide
atggccgccgaggagggagcagagccttcggcgcccgtggccgaagatggaggaggaccatctgcttccacatctgcgccatcactattgccttcggcccctgccacctcagtgcaggtgccgaacgcggccgacgtggcgaaggcggctgtggcggcgagggcactccagaccagggcggagatcctttcgacaagccaacaattggtgccccaagccgctccatcgcagccggcagcggccccaaccgcgctcgccgttgcgcaggctcaaaggaagttcagaaccgaccatgcgagcaaggctgtgatggctgtcgaagaggtgcaagccctccgcaaggagttcgacgcccagcaagcaagcaaccatcagcagccagtccgcaagaaggtccgaaaagacctctactgcgccttccacggccgctcttcgcacaccacggagcaatgccaaaacattaggcaatgtggcaacgtgcaagatccaaggccgcagcagggagcaacggtcgaagcacctcgtgaagcagttcaggagcaaacacccccagccgaacaaagccaagatacacagcgaagggtaatccaagtgattacaagggctgacccgccaagccagttgtccaaacggcagaagaagatgcagatccgaatggtccacagcatcacttcggcggggagttcggccgatgttatcttcgtcgaagcatacaccaagatggggttgctcacccaagcccttaccccggcaccagcatctctccgcggtttcggcggagaagcagttcaagttcttggccaagcacttttgctggtagcttttggctcgagagagaacagacgcgaagagcaagtactgttcgacgttgtcgacatcccgtacaactacaacgccatcttcggccgtgcgaccctgaacaaattcgacgccatttcccatcacaattatctcaagctcaagatgcccggcccgacaggggtgatagtagtcaaggggcttctgacttcggccggttcaaaaggcgatctagccataatcaacagagcagtgcacagtgttgaggccgaaccgcatgaccggccgaagcactcgccaaagcccacccctcacggcaagataataatggtgcagattgatgatgccgaccccgcaaagctcgtatcactggggggcgacatgggcgaagaagaagctgagagcatcctagaggtgctcaagaagaacattgatatcttcgcctggagccccgatgaggtgggaggtgtttcgacagatctcatcatgcatcacctggtagtcaaaccgaataccaagccaaaaaaacagaagctacgcaagatgtccgccgatcgccaagaagcggcaaaagccgaagtccagaaacagctcagagccggggtcattcaagagattgaccatccggagtggctggcgaatctagtgctggtgcggaagtcaaacggcaaatggcgcatgatgcctttcggcctgaggaatgtaggagcaaccttcgccaggctggtgtataaggtcctttgcaagcagttggggcgaaacgtggaagcctatgtcgatgacatcgtcgtaaaaagccgcaaggcttttgaccatgcgtccgacctacaggagaccttcgataacttgcgtgcagcgggcataaaactgaatcctgagaagtgcattttcggcgttcgcgcagttagcgctgccctcgtccaggaaacaaagttcggccaaaaaccggtctatttcatctccgaagcattgcaaggagcgaagacaagatacattgaaatggaaaagctcgcttatgccctggtgatggcttcgcgcaagcttaagcactacttccaggcccacaaagtcatagtgccaccacagtaccctttgggcgaaatactccgaggcaaggaagtcaccggccggctcagcaagtgggcggcagagttatccccgttcgacttgcattttgttgcacgcactgctatcaagtctcaagtgctagctgacttcgtagctgaatggacactggtattcgcccctgagaccgagctcgtcgaacaattatgggtgatgtcctccgacggttcgtggtcgcacaagggggcaggcattgcggcagtgctcatttcaccgaatggtgtgccgattcggtacgctgcaaggctgcagttcaacacaaccaacaacgcagcggaatacgaagctattctcctgggcctaagaagggcgaaagcactgggggtccggcgcttgctaatccgaaccgactccaagttggtggcaggccatgttgacaaatccttcgaggcaaaagaagaagggatgaagaggtatttggaggccgttcggtccacggaaaagtgcttcaccggcataacggtcgaacacttacctagaggccagaacgaggaagcagacgccttggcgaaatctgctgcttgtggtggcccacattcgcctggcatctttttcgaagtcctgcatgcaccaagtgtgcccatggatagcttggagatcatggcaatcgaccagcttccggaagacgaagcagaagcaaagcgcttgcaactcggagccacgaagtataagatggtctcgggccagctctatcgctccggggtacttcaacccttacttcgttgcatctctttcgccgaaggcaaggaaatggcaaaggagatacaccaggggctatgtggcgtgcaccaggccgcaagaacagtggcctccaaagtgtttagacaaggagtttattggcccactgtgttgaaagtctgtgttgagcaaatcaagaagtgcgaaagttgccagcgtcatggtcgaagccaaaccgcgccccagtatgatttgcagcccattgcgccagtctggctcttcgccagttggggactagacatcattgggccattcccagtggcgcgaaacgggtataagttcacaattgtggcggtggaatatttctctcgatggattgaagccgaacctctcggggcaatcacttcggcaacagtacagaagtttgtgtggaaaaacattgtctgccgtttcggagtaccaaaagagttcatcaccgacaacggcaagcagttcgactctgacaagttcagagaaatgtgcgaaggactgaacctggaaatcaggttcgcgtcggtcgcgcacccgcagtcaaatgggggcggccgaacgtacaaatgcccgttcatgcttttttatggcgacgaagcaatgaccccagcagagctaggggctaactcaccaagggtgatgttctctagacgcgaagaggggcgcgaagtgtcgctcgaactcttggagggggtaagagtcgaagcacttgagcacatgcgcaagtatgccacaagcacttcggcaacttacaacaaaaaagttcgaccgacggaactgatgcctggtcatcttgtcctaaggaataaagcgaacccgattgctgttggcaagcttgaatcaaagtgggaaggaccatacctcatcaancacaagtctaggacgngatcttttcgattggcgacactagaaggtgacgagttcgnccattcctggaacnccgcctctctcaagcgcttctatgtctaa

SEQ ID NO: 1503 - DNA, 3531 bp, Oryza sativa
  N_region (6)..(6): n = any nucleotide
  N_region (96)..(96): n = any nucleotide
atggtnaaggcgcggatgacgacggcggacgtggcgtcggaggtcaagtgcctccgccgcctcatcggcatgcgcctctccaacgtctacggcatnacccccaagacatatcttttcaagctgatgaacagcagtggaatcactgagtcaggggaaagcgagaaggttttgttgctgatggaaagtggtgttaggctgcataccacccaatatgtccgtgacaagagcaccacaccatctggtttcactctcaagctacgaaaacacattcgaagcaagagacttgaagatgtccgtatgcttggatacgataggattatcctgtttcagtttggacttggcagtaacgcgcattttgtcattttagaactatacgcacaaggaaatatacttcttacagattccgaatacacagtgctgacactactccgttcacacagagatgataacaagggattggctatcatgtcgcgtcaccgctacccagtagaagcatgccgtgtttttgaaaggactgactttacaaagttaaaagacacgctgatgatgaatgcagttgatgataaagaatcttctcaagttacacccggttcaattgatgctcaagaaccttctgtaacccccagtgatggagtgccggttactgataaatctgaagaaccatctacaacaacaggaaagaagtcagcttcaaaaaacaagcagtcaagttcaaatgcaaaagctagtaataatgctccatcaaataaatcaactctaaagacacttcttggggaagcattggcttatgggcctgcattagctgagcatatcatattggatgctggattgcttccaagtacaaaggttgggaaagacccagagagcagtattgatgatcacactattcagtccctagtagaatccatttcaaagtttgaggattggcttgtagatgtcatgtctggtcaaaggatccctgaggggtacatcctcatgcagaataaggcggctgcaaagaagaacctcacacctttggaggggtctagtgctagtcagaagatatatgatgaatattgccctgtcctgttgaatcaatttaagtcaagggaattcaatgaatttgagacatttgatgctgctctagatgagttctacagcaaaatagagagtcaaagggtgaatcaacagcaaaaatcaaaagaggactcagcggcacaaaggcttaataaaattaaattggatcaggaaaatcgtgtacatacattgagaaaggaggttgaccattccatcaaaatggcagaattaattgagtataatttagaggatgtggatgctgcaattgtagctgtccgcgtttcccttgcaaatggaatgagttgggatgcccttgctcgcatgattaaagaagagaaaaaggctggaaacccagtagcaggtctaatcgataagcttagttttgaaagaaattgcatcactctacttctaagcaataatcttgatgacatggatgaggaggagaaaactgcacctgttgaaaaggtagaggttgacctatcactttctgcgcatgcaaatgccaggcggtggtatgaactaaagaaaaaacaggaaagcaaacaagagaagactgtcacagcacatgagaaagcattcaaagcagcagagaagaagacacgtcttcagcttgctcaggaaaaaactgtcgctgcaatcactcatatgcgcaaagttcactggtttgagaagttcaattggttcatcagcagtgaaaattacctgattattagtggccgcgatgctcaacaaaatgagttgattgtcaagcggtacatgtcgaaaggagatctttccttgaggttctcacggaagttgcttgtttactttgcatctttggatagctacgtgcatgctgagttacatggagcttccagtacaatcatcaagaatcacaaacctgataatcccattccaccattgacattaaaccaagcaggatctttcactgtttgccacagcaaagcatgggattcaaaaattgttaccagtgcttggtgggtgtatccttatcaagttagcaaaacagctcccactggcgagtacctaacagtgggtagttttatgatccgtggcaagaaaaattttctcccacctcacccccttgttatgggatttggtattctattccgtttggatgagagctccttggcatctcatctaaatgaaaggagggtcaggggtgaagacgaggaggcccttcctgatgttgagtctcagaagctggaaagtaatgctgaattggatggtgaacttgacagtgatagtgagactggcaaggagaaacatgatgatgaatcaagcttggataatatcaatgttaaaaaaattgacaatcccatcccttctaatgcaccttatgttaaggataatgctgattcatctgagcagctttctgaaatccgaactgtggtaaacagcactacttccacttccaagggacaaacaagtgatcgcactgtttcatcacaacttgaggatctgcttgataagaatcttggtcttgggccaactaaggtgttaggcagaagctctttgctcagcagtaattctgcaagcgtggcagatgacattgatgatcttgatacgaagaaaacatcagtaagagataaaccatacatatctaaagcagatagaagaaaactgaagaaaggtcagaatgttggtgattctaccagtgactctccaaatggtgaagctgccaaaaagcctgttaactcacagcaagaaaaaggaaagacaatcgaaaagcctgctaatcctaaagtaagtcgtggacagaagggcaagcttaagaagattaaagagaagtatggagagcaggatgaagaagaaagagaaatccggatggctttacttgcgtcctctggaagggcctcacaaaaggataaaccttcagaagatgtagatggagccactgcagctcaatcaaaaccatcgactggtgaagatgacagatcaaaaatttgttataaatgcaaaaaatctggacatctttctcgtgattgccctgaaagtacatctgaggtggatcctgctgatgtcaatgttggtagagccaaagatggtatggatagaagcagcgcccctgctggtagcagcgttaccatggatgaagatgacatccatgagctcggtgatgaagagaaagagaagttaattgatttggactacctaactggaaatccactgccaagtgatattttgctatatgctgtaccagtttgtgccccttacaacgcattgcaggcatacaaatatcgtgtgaagattaccccgggaactgcaaagaaaggaaaagctgccaaaactgcaatgagtttgttcctgcacactgctgacgccacaaaccgtgagaaggagctaatgaaggcatgcacggaccctgaattggttgctgccattgtagggaatgccaagatcaccgcacctggcctcactcaactgaagcagaagcagaaacagaaggggaaaaaatctgcaaaagaaaactag

SEQ ID NO: 1504 - DNA, 3429 bp, Oryza sativa
atgggtttcgataatgagtgtgttctgaatattcaaactcttcctggtgaatatttctgtcctgtttgtcggacgctcatatgtcccaacgaagctctgcaaactcagtgcacacatctctactgcaaaccctgcttggcttacatagtggcaacaacacaagcctgcccttatgatggctatttggttacagaagctgattccaagggtttgcaacctcaggcgcaagcacaacacactgacagtagtatgatgcagtcatcagcaacaggaacccaggcagccgtgcaaggtccttctgcagtggcctcagcagtccctatgacgcctgttacagcagctcctacaacagtaccatccacaactacagccagagctggaacagattctgctatcgcagttgcttcagctggttcaaccactgtaagcaccgtggctgtggctccttcacttccggtggcacctactgctgctagtcaaggtcaagcacttgctcctcaaactccaacagctgagcaataccagcagcagctccagtaccagcagtactaccagcaacattaccctggatataacccctacatgcagcagtatcaacagtatggtcagtaccaacagtacacacaacctcagacgcaaattgcaccccagaatgtggctcaagctcctgcgcaatctgctccatatgctcagcctcaagttctacagcccaatcagccccaacacatggtgccattccaacctcagaatcagccccaccttacacaactccaagcaccagcagctcagtcacagtctcagcagcatccaccattgcagtctgcagctcaaactcaaattgtacaagcacaaccacaaagccaagtatctttccaacagcctcaaccccatgcacaacctacaacccatacaccagtccctacacaacttggtagccaaccatttgcaatgcctcctactcaagcaacaccatctgaacaccatcaggttatggctcagcaacaacagccacaactgcagcatttacctcagcagcaacatccaaatgcacagcagcaatcttatccacaaatgcaggcatatcatcagcctcctccaatgtctcatgcacaacctcagaatccttcagttcatgcagtaacaggtcatcaatcattttcacagcctcagccagcacatcagatgcaacaaggtgctccactgcaacgttccctacatgtatctcagcagcaaatgcctagtgctcagcatcatgcacttgcacatactccacagggccaacaaccaactatgatggctcaagggattcagcagacaccacaacatcagcatgttgggcatcatgccctgcggccagaaatatatgctagcattcctccacaggcagcaccacaaggattccctctaaacgcacctgctccctcacaaacaggtcaatcataccaacaaggaatgccctcatcacaacaactgatgcatgcacctctccaatcccaaggccaacaatttatgcaacagcaccctactcatacttctgctggtcggtctatgaattatgttgcaccacaagagcagttccaaaatcaatctggtggtccagttaaaggtttacaggcaggtgtgatgaatcaacaaccaccaatgcgtatggcctctgataatgtaggagcaacatctgaattgcatggtgctggacaatcttttgggcagggctcttcgtctttaaaaaaacctacttcggaatctgagaaatcagaaaatgcaactaatggtactggtaatacagaagtaagtgggaaaaatggaagtgctgaatcagctcttgtaaatcctatttcattggatgggtcagatggttcagacaaggggaaggggaaaggaaaagttgacttttcagcttgggaaagtaattcacatgatccagatgctcggggaggcaaagggactaggtctggtatatcaaatgatcttgtgaaaggtggatcattacagcaggcaccacaacatccttatggacctgattcaatgcttcctcaacatatgcgtcagcctgggcatatgccgtatatgcaggggctgccaaatcaaatgaggccacctaaacattcctttcctgaaaatagtcggcctccaatgcaacaaccatttgaaatggcacctagggtgcctggtccaaaccaaaatcagatgcaaatttcacagtccatcagacctgatggtgctatagttcggccaccgatgggggcaccaatgcctgggctgcatgattcaacagttcctccttttgctcctgaatatgttggaactaaaaagaacaatagtgttggcaatggaccacatggaggctcaagggctttatttgaaggtggattcaattcttcacagaaacattccaagtcatgtgcagcaaatcctggcagaaacaacgttagccacaaagattttgaagataatatgaagcagtttccagtgcctactcaccttgacggtgaaggtcatcaaaggggtcctagaccttttgaaggaggtttaggtagacctgatggttttgctgatatattacctggaaggcctccattgacaaatcatcctggtccatttcctataggcttcggagaagattacccaaggaaacccaattcgactgttagttatcctgactttatttcgcctggtgcagaatttggtcatcgtggtattgatggaatacctactcttagaaatgcagggatgacaggcgggcctggaggtttgcataaagatcagctaggctctagtaactttcctgggagtggacaccatgattttgacaactcagagttccctcgtactcgattccatcctggtgatgcttttgtgccaagaaatctgcacggtggtggttggggtggtggccaattgcatggcattgagccttctgactatggctacagaggtcacatgcatgcagatgatccaaatattccaattgattattctcggcatggttttccaaaagaatctgcccactttggttcgggtggacacttgagagatggagatgtcagttggtgccgtatatgcaatattagctgtggtacagtagagaacctgaatatacatgtagagaccagggaacaccatcaacatgcaatggacattgttctgaaaatgaagcaagatgttgcaaaggggagaaagaagttgctggtaatgcttctggaactatctgagaccattgaaattgggtcttgtccatacattttggttaaggaacagagagaccaaatgtcaagccgtcgaggtgcagatggcggcggtcgcagccgtctgccggtgccggagcgggcctcatgggcgacgacgtggctggctgtggctctgttcttgcacggcacaaccgcctgggccgttggtgctgcccgtgggcaggcccaacccgatgtgtag

SEQ ID NO: 1505 - DNA, 3405 bp, Oryza sativa
atgtcctttaatggaactgtcatgtcacagattgcagcaaaattgagttatttccctgatgtcaagcttggtgtcaacatccctacacggagagaaagccatgatttgcttgacgttgatggtgacaaaaatgattatgagtggttgttgactcctccagagaccccacttttccgttcattggatgatgaagaagaacagtctgctggtcaggattctaggggcagaactaagagtaagcccatacgaatttcggggtcatccacagtggacaatactcaaaggtctagtagaagcagtgcaagccctattaggcttagtccatcaccacgctccatgtcaaggacaagaccctctagtgcagcttctcgctctagtccaccatttgcattgcaaccaccaacaccatcatggagaccttcaactcctccatctgcaaaaacattaacacctccacggagatctccaagtcctgcctcaacattaacacctccacggaggtctcctagtcctgcctcaaggaggatgagtactggttcaaccccagcgttaaataggacaaggggtccttctccagttaaaactaaccgcatatcttcttcaccaaaacttcaaggatggcattcaaatgttcctggattttctcatgatgcacctgcaaatcttcgaacttctctgccagatcatccattatcccattcaaggggtggatccccttctcctcctatcagtggaagggacatgggttccagaggcagacgccaatcactatcgcctactccatctagaagagcaagttcatctcatagtattgaacgagatcgtttaagctcgtatagcaaagcttctgcaacatcttctggtgaagatgatctggattccatgcagtctctaccagttgcctattccaccagcccagctgtaaaaaagagcttgtctatgatgaagaccagaactattgcttcatcaaagaagccgtccacaactttttccactagttctgtcccaaagcggtcatttgattctgcagtttggttgatggatcatcgcaaagctcccaataatatgttccggccactgctatcaagtgtccctactacgacatttaatgctggcaaaggaaatgttgtgcagcggcctatgttttctcataattcttatatgacaactagcagcaatgcaagctctgagcatagtgccagtttcggcccatatgtggataacgaccaagagcagcatgatcagattagtgaatgggatgataaccatcaagttcatggtgatatatttatgtttgataaattggatgaattgaatgaagaaaccagtcatgaggagactacaaaatttgtggaaagtgatagacaggacattgacatggaaaagggttgggcagctagtcagacttctggtacaaacagttctcatgttggatatggtgaaatggctacttgcaccaggtgcgggaacgttttcaaggttatggatgtggatagacaaggtgactattgtgaagaatgtggtttattgcttagcatatgttctgcaggccctgtgacacaaactttacaagaagcacaccaacaggacgaaataactgcaaattgtaaatcatatgctgaatctggaacttctatagcctcggattgtgtagagtatagggaagaagcatctcttggtcatcaatttaatgatgaacctccagctgattgtataaaagcatgttccccacttcagtcaatggtggacacaaatgaggaaatgctgctggctcatgaggtaatgaatcataccaaaaatataaagccatatcatgttgatgactctctaagaaataacaatgatatttcatttcatccatttaaggtaagtgataaccaacaagcatctgcagaacacgagcatttcagggaccaaattaacagccacagtgaaagcttgccacaatgccttcctgagctaaaccgccagcataatgattccatctctcaaactgcctctggtgataattatcaactgggatcaacagcatattcaagtcctaaggtagaaaacactgatgccactgggatatcggtactcttactccagaagtcaagtagcaataaatggcctgttgtggaaggaaggactctgtctgcaacaaatattctttgttcagaaccctattatacaagggatagtatcagtgctatgaggcgtagctttggacgggatagctcttcagcaacttcttccattgatctagggtcatcaaggcaatcagatgtacgttttgagcgtctcaggagtggcaagaggggtgatttcgagaaggctcgaatgagcagtaccatgagccatcaaagtgttgcttcagtgtcagatatgtcaattagtggttcatcagcttcactttgccctcagagtgatgttattggtgacacttgtttcccaattgacacgctggaaaggagtgcatcgagaacaacagtctctattgaagaacatgacagctcttgtatggatgctttatcaagtggtatggagtgttcatctgctgtgcagccgataatcaatgatgaaatccttgttgacttgaacacctcaggttttcataggttaagtgaaacagaagatatacttattaagaaccataatatggaaatggtggctgacaatgatcatttgagcactaacttgtgtttatcagatattgaaatgccaagtgatgccctagaatcttcagctgctgaggaaagttatataccaaaaactgaggaagatacttccaccaaagcacactgctatacaatcagcaccctagagcatccaagcgatgagaacaactttgatgatcttcaaatgcagtctgaagcagttcagtcttcaaatgaggaaaataaatccaatggctgttgcacgcttgctgtctctgaggatgacgtgttggtttctggaacagatactaacataaaggaacttcctaatgatgcagaatcacccgaggcagttgaaggatcgaggaaagaaattcagagatgcttcactttggaagaagctaccgatacaattctcctctgcagttctattgttcatgaccttgcatacaaggcagcgacaattgcactggaccatgagcaggaacgagtacacgcagagcctactcgcccatctgttaccatcgttggaaagtctattccaaaggaggatggtttacttaagctgactcacagacgaacgcctaaccgtaaggttaaaaggaaaagattggaaggtgaaacaaccataaccgaaaatgctgaaaagaaagatgatatctctacagaccactcacccgtgcgttcctcttctggaattacaaggacatctgagagcatgaagcctccaaaactggaatccaagtgcaactgtataattatgtaa

SEQ ID NO: 1506 - DNA, 3309 bp, Oryza sativa
atgtcgcggcgcgcggcgccgatgatgctagcgctgccggcgccgccgcggctggggtggggagggaggacggtggtggtggtcggtgtacgggacgacgcggaggggagggagctgctcacctgggcgctcgccatggtcgcctccgccggcgaccgcgtcgtcgcgctgcacgtcgccacaccccctgccgccgccgatcaagaaggcgccatgagaatggcggcgaggaggatcagagccacggaatcgctcgccgcattgctccgcgcgtaccatgacttctgcgatctcaaccaggttccagctcatcgcccacacatcagcctggagctcagaatctgccatggatcatccatcaagaaggctctcgtgaacgaggcgagctcctatggcgcggcgcacctcatccttggcgtcacaaacaactcccgtagccatctccggccatcgtcgtcgtcctccgccaccatcgcgaagtactgcgcgaagagagtgcctccgagctgctcggtcctcgccgtcggcaatggcagggtcgtgtacaggcgagacgccgcgcagcagcaactcaaccagtgcatcagcccactggtggagacgccgaggaggatttaccggaagatttaccggaagctcgtcagagcggcgacgacgatcacccgcgagaaatcccaggacgacgcggcgatcgccggcggcggccggcaccttcgccggaacatctcgacgccgacgagcgcccccgtctcgccggtcgtagcgttcacgccacgtcaggcggaggtcgccgccggctggccgctcctctcgccggacctgaagtccgccttgccagagtggacggagatgtcggtggcgcggtgggcaatgcagctgccgagccggtgtccggcgccatcgccgctaaatccacgcaataactccggcgaccaagcgacctcaccggccatcaccgcatcggaaactccatctccggcgaccgatgaagcggcggagcaagttgcacaagagcttgcctcgctgagaaacaagtactcatccaaagctgctcggttcgtgggatttctcgtcattgaggtcttgggaaggcagcagtgcaaggtggaagaagaattgggcaagggaggtgttcaagaatctagcgcacacaacctgttcgacagaatgacaagccaacataaggtgtttaaggatgatgaaaggatagcagagcccgttcccatcaagtccaccatgaacaaggagggaatatccatggatgaagctttagatcggattcttgagaagtttgagttgatggaggccaaccgtagacaagaggagaagttcaatcaaatactacagaagttggaggaggtagaagctcgtaggagcaaggctgccgaggagacaattgcatccatcagggcaaccactgctattctcaaggctacatcacctacagcacccatggcaccacctactctagcgcctaccaagtgtttgacagaatgccccaacaacaacctcacttgggcgacggctagttcaagtcacattagtgaggatactgctacaacagttccctgggagctaggagacaacaaggacaagggccacgccccctgcgtcatcaccaaggactcacccgaggtcacgcccaccatgtgttcgacgaaatgctccggtcctaccgtcgagcctgatctcactgtggctgcagtggttacgtccgccaccactgccgcggcctctatggagttggtagctgctgggaacacaatcggtgccacttacatcaacaatcttgaccaccccaaggtgacgcacgccaagtgtttgatgttggaccttagctccaatagtggcgccgaccaaactgtggtcacgttcgagaccttagtggacatgactaaaggcgtttttgcacctgatgcaacaattgaaggcagctcaccaaggaagatcgttgaaatagacttggtcatagtgatgcctacagggtgttcaatgctattctttgacaaaggtgccagtgagttgttgcctgtaaggggacacgttatgtggcaattgttattggagcagtgcaagcgaaacccttggtcgcctcctaactcagtttatcaagttaatggaatatgggagttgtggcatgtgccctggctggacttcaactattttaggacaagattatctttgatgccaccttggccaccatcgactcaaattggaaccataatgctttggctggtggcaaactcatggctgagggtggtagagctgaaaccgtggcctgacccacaatcaagtcaatgtagcacaggcgggaggtggactgaactgaaagtcccatggtcagcaccagattgtgaatgttctatgggagatgatttttgcagtgccaattgcataagaaacgaagcactttctgttgcattatcttgtgcacctaaaggagatttaaatcatgaaaaaattgatggatcacagaaggataccttggtggcattacttatcttggaacatttccattatgtgggtgatgaagaaaaagttacacagggaatgctaaatggtctaattgcagtgggctgcaactacttgatcctgatcatgtgtgctgctataatcacaacaacatttcatcttgctatgattacaactcagggcaacaacgtatatgggccaaatcaattgcatgagaagctcattcccagattgattcctttgaccatgagaggattgcccctgccaattcatgcttttgaggtggttcttcacaagggtcaggtcggccatgtgtatcatatcggtactgcgaaggaaagaagggtgattgatgaggctacggacatatcggtacgggattctatcctttggccaaaactgaagcatgttgatgtactggaggatggaaacaacaggtggactagagatttttcaagtagaagcattgtattgaaagggcgacaagattgtggactttgttggtgtgcactggatgttatcagggatgtgaaagttgatctggtcctgcaacttttgaagcaatatggttcagcaaaattggtgatcattaattccttgagtataccatgggatccaggcggctctcgtgtgacactggctgggcattcttcttgtcacattggctacattacaagagaagcattaacagaggaaatcaagtataaatcattgcatcaaacatatccgttggtgaagtttccacatttaaggtcatcggcttggggacaaaccaaatttcaagaaatggggattgttaggaaatcttgtgggctgcaatgtgggccagttcagtga

SEQ ID NO: 1507 - DNA, 2826 bp, Oryza sativa
  N_region (908)..(908): n = any nucleotide
atggccggcggggagcatcgactgcagatagcggccaagtccgacgggcaaggcagggcagccgcgccggagaagtgggtgaattgcttcgttcgcgtggtggcgctgatggagaggacgggcaacgcgctcggcacgctggccttcacctgggccaccgtcgtcctcctcggcggataccccacggtgctccgctcgcaggacgatttttggtacgccacagccatattcttcctagaagccgccaggatgttcagtggcagcaacaacaggcacgattaccaattgttcttccgaaccagaggtgctttcagacctcttggctggaatggtctaatcgccatcgtctgcattttagatgtttgggtgttgttggttctccagaagaaaatagttatggcagctgtagtggtttacgctatgataattctgcttgcacttggccagaatatatctcctgagtttcaaccactatgcaatccattccgccgtgccatatctctatggagccccttagctgcaatactgttgctaactccaaccatgcagcatcactcaagggaacttgtttggaataccacaggaggcagattaacaccgaaaataacggctgaaattaacttcatcccaagtaggttcacagttgccaaatggacagcgtttttcatattgctcgtagttgtgctcatggtaacaatcagcaggttgcggttcccaatagtcatcaaactagtagatagtgctctgtgcagaaaactattagtttggggtcaaactatccagaacatgtgcatgcttgctgcgctagtgatgttggtactgactagtgatgggtcctttcggtttgtaacaatcttgtcactagtcagcattacattgatggtgtcatctggcaacttccagatacnagcagcagccatgcgtgctgaaatcgcaaacttcgcactgcaccgccttatcatgccacataacggctacagagaacatggagaggatccagacagcaagactaacctggtaccatctctcattatcttctatgggatggtgatggcccaaggaatactctacattgtggcatgcttcctcgatatcttttcattcatcccccggagattcctcatccggcgtgctggattgagaggtcagctgggagtggaatatgtcaatctatattatgcatatgccttcgagaaatgcatgggaggggctgtgtttgttccaaagaaaatcagcctgagtaactttgccataaattccctgaactcagattctcctaagaatcatttctatgggattcaactgatgcatagccttctggagaatgaaatgacaagggttcggatccttgacaaactcatcacttctacaaagaccatcgatagaataatcagtatgttgggctggactagtccaaataatacgacggtcagattatatgcagctaaggtgactgctgagcttgcaaaggacctccaaatcatcactgttcctacggcactgcagcttgtatctgcacttctggacaccaatgccaaacttaaaaagggaaatccacttctgcaggtagatgatgaacaagaggagaggcaagaccccattctcaacacagcaaatagccaagaggaaagaccggatgcaattaggaatccagatgatgacccaaagcaaagacaagagccagttgaaggcactgataacctgccggagacacaaacttgttcagcccacatccatgaacagaactgcatactcagacgaagatggcagcagatttcagagtactggaaagttcccaaagagcattcattgacatactatgatcatcttcctgcacttggcatgttgattattgacaagcttgctagctgtggtcaaaataactgtgtggaaatcgatagagtagctgacctcattccgaagatcataggatttacaagcttcagaggtgacatgacgaacagcgaggcacaacaaatggtcctggtaaagtcatcgctgaaggtgttgcagaggctcacaagcattggaggagagatcggcataacactgcggcagaagattgggcacatgcaggtgctcataaccaggctgacgaaggcattcctcaatttagatagaacctcaagcacaaatgttgattgcttgctaacaaaggtagccgggcaagaactggcaatgctggcaacagataatgtgcacaactgcttggttatgttgaaagaaccagagtttatcaataaactcaaacatatgatcctgatccatgatgaaaagtatatatatgtggcggcaaccctattgtgtcgtatgtgccagcacgccctagccaagctcacagaatcagacctgaaggaactatgtgagaccttacatgaggtcttggagagaataatgaatgcagaaggggcagaactagagatcctcattggcctaagttcacagatatgcaaagtcattcctgaagaattttcccaagaactagatgacgaacagattaagcaaagattcataaagaggctagttgacgtactgaatgcaaatatgaacccaggtgctcactgtcctgggattaggagggtgatacttgagcaatctatatacatgatggagggcaattctcactataccagttgtttcaatgaattccgaatgatagaagcactgtggatggtagaagagatgccctcaggggttgagaactacaggattttcttgggtgacgcaggttttatggaatacagcacacctctctttgctcttgtggacagagcaaaagaactgatgggccgtcagtgcctgcaaggagacagtagagttaactga

SEQ ID NO: 1508 - DNA, 2607 bp, Oryza sativa
  N_region (2142)..(2142): n = any nucleotide
atggctccccgcaaaccgaatccagcctccgcgacgggcctcgatcccggccaaattgacgacgacaccaccgcctttttaggggtttcgcttgtggacagggaggagctggcgaagttggtcagctctggcgcggtggtggaggggcaggctttcgccccggggaaggccgttgtgccgaagcctggcgacaaccggacggttgtgttcaccgtcttctgcgaggcagggcttcttcgatttccgtgcaacatactgttgccggagatccttctcatcttctgggtggagcttccccagctgagcccgtcggcgctcgtccacatcgccatctttgactgggcgtgtcggaccgccaggttcaaaccgagcgccgagctcttcggcgcggtattcttcaccactatgaactcaaagacggtggtcaccccagccgggacgaagaagactgtattcggcagcgtgaacttcaatgttcgtcccgagcgctccgatctctggccagtgaacgccgccatgtcgaagctagatcgccattggatggcgaagtggttctaccactccattcccttcgaggatggatctgatgctgtaaatgccctcaggtggcggcgtgggacaatctcgccgaacaggaagcccaaggttgccattgatggcgccatggaggcctggttcactctgctacgcaatatatgctctcgcctcagttaccgcgacctggtggaggagttctgcatgcttggcatcttccccctttccaagtcgtggcaagtcgaaatcgaccaaggcagggaggtcgacggcctgccaaagctcgtcatgcctgcggaggcgagcgttttgactcttgcacaggccgagaccaaagctcgaaagatgatcggcgacgtgtcggtcactgagttcagccagctgctcacacggcaggcggccggccgggcgaaccgggttcatgatggcgaactgcctccccgtgcgacctccctcaagggcgatgacgatgcggggccttcgcgcaggcggatgcgcgggcaggtgaaaaaggccccttgtaagcgaagggaacccgactccgacgccgatgacgaggagactgcggaagaaaacaacgacgaagatgagggggaggatgtgaaggaaacggaggctgtgggcgaaaaggccacgggcgatgccgccaacaatcgcgccgagacgcccggctacaccccaacctcgagccccgaacccgtcgagaccggggtggagtcgaactgctcccccctccgcccaaaggatgtggagggggcgatggcgctggtcgtgatcacggcggccaaagtggggtcgattaaaaagacttccaggaaggggctcgtcgatgtcggtcgcgtctttagtgacgacaagtcctcgaacgagacccctactttgcctgccggccggagcttggatctttcgacgggcgtgcatggctggcgggagtgttgccggtacttcggcttcaaccgatcagagtgcgaagaccgcagccagggtcttcggcagcccggtccgccggccggttgtttctccgctcacccttgggaaggggaagaaaacggcgctcgaaacatccgtttcggattattcccttgcggcgccacacttcgcccatggcgatttcgaaacccggcggaacatatcccctttgtcgagggggtgagcaaactcgtttctccggctgggagttcgagtctgttcacagagcagaacgagttcgacgagggctgctctgccgtcaagagcttggcggtccggatcctcgctgcccactgttcaaccgagcgaaccatgcgggctcgtcttgacggtttgaagaactgtcttcgagccaaagatgacgaactgggccgcaagaggctggaaatggaaggcctcacccacgccctcaaagagacgaaggccgagaacaagcggctccaggctgaattggagaaggggagcgaggcgaaggcggagattgagcgcctcaaggccgagctcaaaaaagagcagggtcattccgccgttctgaccgactactacaaccttaccgagccaaagatggaggctcttcgccaagaggtcgtcaaagcggagacgaacgccaggaaggaggcacagcggttcgcgtggganatggcgaaagcgactgagtccgcgaagaccgcttgccaaacgcttcgccttgcccattctgatatgggggcgagagtgcatggagtccctggcgaaggtgcttccgcattcgacttctccgagtggactcaacaagccggcggtgtagtctcagactgtgccactgcgtatggcgacagctgtgcgcgcgtgtcagcgtctttcgccctgggtcttctgcaacagttcggctgcgagcacgtcgccgagttccccaactttgcgaaaggggactgggagattagtgtgcaggacatttcgcctgctctgcgagcttggcgtaagcagttctggcagaaggatggccgctccgttgctaaggcgcgcctgcttgagcagctggcgaaggcggaggcggcggatcggggcgaggagccggcggccggcgggggcggaggcgatgccgaggatcacccagaggtgtga

SEQ ID NO: 1509 - DNA, 2556 bp, Oryza sativa
atggagaatagcgagcaagagaggacggactcaccattggagtatgatttgaggaagtacctccttctgttggccacccttgtggccacggtgacatatggtgcaggattcagcccgccggggggtgtctggcaggacaccgaggccgggcacctcgctggtgactccatcatccgggatagccagtatcgccgataccttatgttcttctactgcaacgcgactgcattcgcgctgtccatcgtggtcatcatcctcatcttcatccttgctatcctgcatgagaaggggaagttacagatccccatgcttccactgcgagcagccatggtgctggacctgctaagcctcattggggcctatgctgcagggaccagtcggggtgttctcacagccggcaacgtctctgcacttgtggctactttcatctatatggtggcacagatggtggtaactttatggcttgacaagaaacagactcaggatataagctcaggtgatgagaagaaaaaacggcaccgcaaggtactgatgcttctcgcaacatttgtggcaagcatcacatacatggctgggctgagcgcaccgggtggctactgggataacaaccaggagggccaccatccaggcgatcccgtcctgtgggaacaccactctcgccgtctgagggcgttctttgtctgcaacacaattgcatttgtcgcatccctgctcatcatcatgctgcttctggacaagaagcagcggatcttcttacccctcgacaagataaagatcaccatcaccgtacggacttatgtgctctacgcgtacatcaccattgctcttttaggccttgtgggggcctatgtggctggcagctgcagaaagcctgacactaccatctatgtactcagtctggttggtgctgttcttttatgcataggcgccctccaggcagtcctattttttctgccacaactttcaaacatatcctgcttgccaataattgcaaagttatcatgttcaccgggagggccatcagatagcagttccagaaagaatacaagcagtaagacagatattctggagaaggcccaatctcttgttgtactgcttgccactcttgtggcaactgttacttaccaagcagggctagtcccaccaggtggtgtctggcagaaaaaccaagatgggcacatggctggcgaaccaatactcttatccacacaagccaaacgttacaaggtgttcttttactgtaactcgacagcctttgcagcatcattggttgtcatagttttggtccggtataaacctttgctcaggcgccgcattctagagataactatgattttggatctgtttggtctcatgggtgcatatgctgctggaagctgccgggacataaccacatcagtttacatcattgccttggcaggcggtgttctagtctatgtggtgattcatgttgtgttcttcacgcttgaagacaatgacaaggagaaggaagttgggaacacgaattctgtacgaaatggttcagttgtgcgcacccaaaataattcagctgagggcaatcttgctgagaaagattcatgtattgacaaaaggcgcaagaggctgctccttttcgctgttttgggcgcgaccctcacttatcaagctgggttgaccccaccgggtgggttcagagttgtggatgatggttttgggcgccatgctggtgatccaatactcttttacaactttccacgccgttacaaggcatttctctattgtaactcggtaagcttcatgtcatctctttccctcatcatactcctcgtgaacccaaatctgtataggccagctatacaaagctatgctctttcggtttgcactgtagcaggcttgtttgctcttctgggagcctatgctgccggaagcactcaacatctgaaaacatccatttatgtctttgtgttggtagctgtggtgcttttcattatgatcatactcctggtgtgtttctatcaaagtgagagcaaagagaagcgagatgacatatccaaggagcccgttgagaaagacaaggacagagccaaataccatgccaagcgcaagtacttgatgttgctaggggtcctggctgcaagtgttacttactcccaggctggtctgaacccacctggcggtgtgtggcagggtaatagtgacgggcatggtgtgggtcactcggttatgcatgacaataagaggtatcgctacctcaccttcttctacagcaactcaacttcttttgtggcatctattgttgttatcatcctattgctaccgacggaactgctaaagaagaacaggtggctaagggtgatgaatattacaattgtgctggacttgctcggcctactgctagcctacgtggctgggtcgagcatgagatgggaaccttctggatatgtcattgcatttgttattggtgcactaggctgtgctgcaatccacaagtttttgtcatttgtcagaaggtctcagcaacaggggcaaggaaatgatcagccttctcggttaccagaaggcggcagtcaagcttag

SEQ ID NO: 1510 - DNA, 2436 bp, Oryza sativa
atggcagccgcggcgggtgcggcggcgtttgggatccgacgagatgcgcccaaggcatactgcttctacggcattgagtggacgggagtgccttacttgccgggcaccgccgccgccatttatatcggcaacaccaactcctgcatcgccggctaccactcgccgccggacacggccacctcctaccggttctgcatcccctcctgggtggccttcaccgccaacgccaccaccctctgcggccaacccgccgtcgaccactccgccgccatctccggcttcaagcgactcatcggcctacagccgggagatcctcacgccaagagggtggcgcagattgcgccctacaagctgggggaaaagatcgggagatgcagcatccaggtccaactggacgatggcgccaagtgccgtgtggaggatttccttcccgaggatgtcgccggcatcctcatcgcccacctcaagagcacggcggaggcgcacctgggccaccgcatcgacaacgccgtcgtcaccgtccccggccacttcaatggaaaccaaaggcaagagtacggcggcttccgctacgtctccgtcgtcgacgagcaggtcgccgcggccgccgcgcacggcctccacgaggacccgggcaacggcaaggtcatcctcgtcttccacctcggcggccgaaccgcccacgccaccaagttcgtcatccgggacggcacacccagcctcatcgcgctgcgccatgaccccttcctcggcggggacgacttcaccgccagggtggtggatcacatggccgacctcatcaaggacaagcacggcggcagggacgtccgcgccgacgccgccgcgctccgcaggctgacggcggagtgcgagcgcgccaagaaggcgttgagctaccagcaagagacggtggtgaccatgcgcttggacgacgacgacgacttgttctcggagcctctcacgcgcagcaagctggaggagctgatcggcgacctggtgggcagagcggtggacctggtggagagctgcgacgctagtggcggcgacgttgtgggcgtcgacgagatcctgctggtgggtggaagcacgaggatccccatggtccgcgacctcgtcaaggactacttccatggcaaggaggccagcaacgagaagggcgtggagcctgacgaggcggtcattcgcggcgcccttcttctttcccacccacaccaggctagcaagagggcgaggccatttctataccctgatgcagatgacgagaaaaaacctcctacctccacagccagtagcatccatctcagatgttcatccagccgccttgaacaggaggattcttggaggcaaataaattcatccaggatgctggccactgaaatagcctgtactctgtacaagagcagagcgtttcaaaacagctacttcatcatgctggaaaaggaacataaaaccgttttgcgctggcgtggacgcggccggggcgtgacacgtcagcgggcgctggaaggaggagagatttcgcgagcgctcctgcctccgcatcgtcgctgccacccgaaggtgtgggctggtttagcacgaggtttggagtgtgagccgcaactggagacgatggagttgaaggaggcggcgttgctaccaacgccgacgttctttttggcgggtgagagcagtaggagtacttcgacggcgtcgcctcacgcagcggctatggaggagtcgccggagggagagccagagtggaggcgatggagctggaggcggcggcggtggcgttctttccagcggcggacggcagtagcagcagccaggcaagaaaccgtcaccctctttccttcattttggtgcctgcaattttacaagaggctcatcgatccagagccggtggggaagttggatgtgaaagatccaggatctccggatctgttgagcttggtggcggcagtgacaacggcaacgtctcagacacgccatccttcccgagcatgcaccggcgatgtgcaggagactgaggtcaaagcggatcttccccggctccatttgaccttactgattaaaacagtgatggtgtggatgtgcaaattgatgaacatgtgggatggaggggtagcaaccggcaatagtagtgccaccaggaggggtagcaagtcgctatcaacactcagttgccttatagttgcttgccatggcagtagcaccaggtattttgtcgggcctctgtttcccatgggcaaaagaaccaacagcagccacggacactttggttacactggtcaggtgagcaagaagcaaatcgtcaactccgtcacacgttgggcaacaataatcgtgcattaccgtccatcagctgccacccgtacccgtgcgtgtggccccaatggaaaaacgtggcacaatacatgccctctggccggcttaattaattatcaaccatag

SEQ ID NO: 1511 - DNA, 2409 bp, Oryza sativa
atggcggcgcagccttcttcgtcggcgtcgacgggcgataccaagtttgatgcgtcgcagtatgctttctttggcaacaacgcggtggaagaagttgagctaggtggattggaggatgatgatggtatcgatgctggttttgttggtcctggtgatgaagaatacccttctgcttatggaagggatatgtttgagaattacaagaaaacagatgcaatacggcagcggcatgggactggaacaatacacacagatacagcaggcccaaatacccagagaccagaggtactgctgctgttctcaacacctatcgccaccactgcacctttcccctgccatcagctcatggtttgctggctggcttacagcatgcaggaagcagtggggccttatgtgcatgatgaaggtggaggttcatttactggcgttgatgatcttgctggagcattctcaaagttgaccagaagcatcaatgaaccaacacaatcgggaataattagtcgtgggggttcaatttctagacaaagttctactctggactgggcacaagattcatattggcctacacagcctatatttggagctgaaccagggctgaataatgaaagccggtggtctcaaccacctcatttagcccgctttgctgattctagactgcacagaacatcctcatcgccgcagcaagatgctcaatacaatcctaatgaacatattcttggagcaatgccatctctgttgcatagaacttcatcatacccacaacaagagcctcaatacagtcacacagaaccaattccggtttggtgcagcacaatctgcagcgtccaaatggattggtcccacctcaaatgctgtcacgccatccacaacatggaaatggccccaattcaacactctccgccacaattctcacagttccatgctcagatgcttggtcctcggcatcctccaccaaaaggttgtcagatgtacaatcctcagcgtccatcacaaatgatgagtggatttgatgcaaatttggcaatgcctgacttgagtgatccgagagcaagagcaatgctgcaccatggagtgcatggccagcattatctcccccaaggttttgagcttgctggtatgaggatggataatgggtggccgcggttcagatccaagtacatgtccacgcctgaaattgagaacattgcaaggatgcagcaagctgctactcagatcaatgatccgtacattgatgattactatcatcaagcctgtttagctaaaaagtcagcaggaggtcaactcaagcaccacttctgtccgaccttgattagagatccatcatcccgtgcacggagtaaagatgagccacatgcgtatctccaggttgatgctcttggaaggttaccattttcttccatccgcaggcctcgtccgctcctcgatgttgaacaaacctctgaatcaagtgatgacgttactgaaaaatctgcttcaaaaacacttgaccaagaaccaatgctggctgctagaatcacaattgaagatggcctctgcctactgcttgatgtagatgatattgatcgcttgctgcaatttagccagcagcaagatggtggcttgcaactgagaaacaggagacaggccctccttgagcagctggcagaatccctgcaactagttgatccacttacacctagtaacaatgcacctctctcaccaaatgatgatctggtgtttctccgaatagtctctcttccgaagggccgcaagctactttctcgttaccttgaacttgtgagttctggcagtgagcttgctagaattgcttgcatggcagtcttccggcatctaagatttatatttggaaatttgccatctgatagtagtgctgttgagacaacgacaaaacttgctactgctgtatcaacctgtgttgttcggttggagttgagtggactaagtgcttgccttgcagctattgtgtgttcttcgctgcaaccccctctgcgaccccttggacatgctgcaggtgatggggcttctttcatcataaagtctgtactggacacagcaacagagcttctcactgatcagcatgtggcctctacctacagcatgcaaaacagagctctatggcaagcatcatttgatgccttctttgggctgcttacagagtactgcatgagtaaattcgatagtgtgattcatgcattgcaaacacaacctgctgtggcagcagttataggcagggaaatgccagttgaattgttgcgtgctagccttccccacacaaatgagtatcagcggaagcagttgctcggttttgctcagcgcacggtgcctgttaacaaccatagttctcatgggtccagtaatggacccatgacatcagaatctatcccaagttcagaaagctggaaaatatga

SEQ ID NO: 1512 - DNA, 2397 bp, Oryza sativa
  N_region (39)..(39): n = any nucleotide
  N_region (2226)..(2226): n = any nucleotide
  N_region (2228)..(2228): n = any nucleotide
atggcggggtgctcggaggggggaggaggagacggggangtggcctgctgcggcgttggggatacctcgccggggaccattgtgtgggtgcggcggaggaacgggtcatggtggcccggcaggattctggggcccgacgagctgccgccgtcgcagatcatgtcgccaaggtccggcacgccggtcaagcttctcggccgtgaggatgccagtgtcgactggtacaacattgaaaaatcaaagcgcgtcaaagcatttaggtgtggggagtttgatgcatgtattgagaaggcagaggctactgaagggacttctgttaagaaaagagagaagtatgcacgtagagaagatgctattcttcatgctcttgaattggagaagaagctgcttgcatcaaagcatcagactcaaggttccagacctgctaacgtttctgtttgctctaaacataacaaagatcttggaagtacccgctacaagagcaaaaagagtaagaaacggaagggcataactgcttcttctgatataaaaaaggaagctgagcaatatgtcctccatgctggctcaaagagaaactttcaagattctcctactcggggcatttctgataatctttttggcaatcacttgggagacatctcgcatgtgaggcatatacaggccggagaaaatttggatagcaaggagaaaatcacaactgcggaaaagattagatcagatggaagtgattttgatgaatctattgaaaaatgtgacagacgccaacctctggttcagattttgcacagcagtccaaaattgcctcatcagtcacagcacaatgatggctatggggatgtcctaactcagggagaaatggatcgatcacctgccaattaccgagctaaaagaagtagatatgtattcctacctactgattctggtgaaactcatagtcatagtgatttaccttccgtacaagtggcttctacaggaggtgattttgagactgaaagttatcttcatcatcctgctttttctgaggagcagacatcttctgatcttgttgagaagcacatatatgagtcttcagagagggaatgctctgagagtgagacagaagatgacgctaaacttttacaatgttcggatttgattctgcatccagcatcacatgcccatgatccttatttcttaccagcttctgacaagttcaggcatgcgaatattgatgctgatgctgatgagctgacctattcttcttatatgtgtcaagtgaatgaatcagaagaggatggctcttctgagttgggcgtctcccaatggcatatgaaaggtaaacgtaatagccgtaatgcacctaagagatcggatatggcagatggaaatccctggttagacaaatcagatggtttcatggaaggatctccgtataaaataaatggtagaaatcccagagaagggagtatgcaaatccaatcagcattgctggggcaaaatttttaccaaaacgaagaggctacaagagattttagccgaagctacagctattttaacgactatggaaatgattcttccaaggtttctcccctaaacagggattcagataagatatttcattttgatcggaatgcatattggagcggaccctcattctaccaaaagtacagttcacgtcttcgtggcaggggcccaatgttgtttgatgttgacttgaaggtccaggctagctaccagggagagcatgttcctcttgtttccttaatgagcagactgaatggcaaagcaattgttgggcatcctgttcaaattgaaatacttgaagatggttccactgaccacctggttttttgtggtgatgttagtttggaagggagaactggagggcaacctgcttggtgtacaggcaggaggactgccatgcaaagaattccccgatctaacccctcaggggcattggattgtgatgatgaaggtacccttgcatatccagactgggagatgaaaccagattttagaaagtactcaaattcagattttagaaagtactcaaattcaaatcatcaggttaaggttgataagaaaagcatctcaaatgttaggaggccgtcagcctctaaatctcaaaagaagcaatccaaaaaagcaagcctgtcaagccagaaggtccgaaccctctcttccatttccactggaaaaaagcatcatggagtaggtggtcaagcaaaagcacataagcagagtggnanttttggcggcttgatcaaaccagggggaattccacttgtcacatgtgtcctgcgaaggttgcctttactaggatactggaagctgttggcaggccgcccctggctgttgctcaccgtgttagaatggctagtcctgccttgcgagatccttcataggcgtcaactgtga

SEQ ID NO: 1513 - DNA, 2376 bp, Oryza sativa
atggggaagacgcagaagttctccaaggggcacccgctcggcttcgtgccggattaccggcacggcgtggagacggtgggggagtcgaagggctgtatcgggagcccggagcggatcgtatcggggagctcgtgtgctgtgccgaagaggaaatgcggaatcctgaagacagaggatggaggggagcttccggggttcaatgtgccgcgggacgtcttcatgctgccgaggatgtcgccttcggataaaaaggacctcgagatgaggctccgcaaggagcttgagcaggttaaggccctacagagtaggctgtttttgaggccggctgcggtgagcatgaatggcggggcggcgtcagcttctggagacgtagttgcaaagagaaacgatgcgaagcttaaacggagcaattcagtgcagtctggcagaggagtgccaccatcagcagccacacctgtggtcaggtctgcaaactacgcagaagcttttaaacaatgtggcaaccttctgaagaacctcttcaagcatcagtgggctggtccgttccttgcgccggttgatgttgtacagttgaacattcctgattattttgacataatcaagaagccaatggatttgggtaccatcgagaaaaagttgaatgcaggcatgtactctacaccttgggattttgctgcagatgtgaggcttacttttgacaatgccgtgacttataacccagtcggtaatgacgtgaatttaatgggcaaaactttgaaatgtatttttgaaactagatggaagtttatcgaaaagaagcttccttcactagatgataaattctctgtgagaagagagccatcacaaaagggtgcagttaagaaagataccattgagaaagattacccttctgagaaaaagcactcgacaaaaggtgtacacaagaaagatatgtttaaaaaagaggatgcttcaactaagccagctttgcaaccaaagaagagaaaagcttctcccttggttcagggttctcttgaaatacctgtagtagaagctgataaggtcattgatgatgctcaagtggtacagccttctaaggtgattgatgatgcccaagtggtgcaggcttttaaggtgattgatgatgctcaagtggtacaggcttctaaggagattatgacggacagacaaaagtatgagctaagcgtaagacttcaatcatatggtgggttgattccaaatcatgtagttgatttcataaggagccaccttcctgatgataatgagggtgatgaagatgagttagagcttgacatgaatgtcctaagtgatagtacattgtttgaacttcagaagcttcttgatgactatgatagggtaaatcagtcaggaaaccctacaaaagatgagcatcgtgaggttgagtttgaaagtgaatatgggcttagcaactcatcgatgcatcatgaagaaggtaatgagctcgttgaagaagatgttgatattggtgggaatgatcttccacctttgacgtatcctcctgcagtatttgaaagtgaaactgcagaaagaagcagcaagcatagcacttctagcagttctagtagtgattcagaatcatcctccagtgattcagattcaagtagctcttctggaagcgatctggatgtcaatgttcctccatcaacaagtggggccaaggacaacacgcaatctgcggttaggttggatcaggaaaacgatccactgagctcgaccaatctaccacaacaaagtagtgatcctgtacctatttctgccgaagatgagggggagaatgtgtctgagaaacaggtcccccctgcaaagcaataccgagctgctgttttgttaaaccgctttgctgatacaatttttaaggctcgtgagaaaactcttgatcaggtcgcgaaaaaggatcctgagaaacttcaacacgacatggaggagcttgaaaggttacgaagagaagagagagctcggatacaagctgaggcaaaagcagctgaagatgctcgcaagagagctgaggcagcagcagctgctgaggctgctgcagaagctaaacgccaaagagaacgtgagagggaagcggctcgtaaagccttgcaacagatggagaaaactgtagacatcaatgaagggaacctctttttgaaagatcttgaaatgcttggaactgttacatcaggtgaacagtttcccagctcggttggtgagacgagtccaactcatacgcctgaaggccttggatttcagctaggtagcaaccctttagaacagcttggtttgtatatgaaaaatgatgatgaagaggatgaggaaggtgagtctgcagatgaaccaacgattgatgttgaggagggcgaaatagattga

SEQ ID NO: 1514 - DNA, 2334 bp, Oryza sativa
  N_region (115)..(115): n = any nucleotide
atggcctcctccatcgccatgtccctccgctccctcgccgccaccgacgccttcctccccaagccctccccctcctccgccccattcctcctcctcctctccccgtccaccccgngcctccgcctccacctccacctccgctccacccgccgcctcccgctcgcgccgctcgccgcgtccgactccttcgaatccgcttcgtcctcctccgccgccgcgctcgacttcgctgagccaggtgccgccgaggagtccgacgtgccggaggagtctgaccaggaagaggaggggtacgcgccggaggccgaggaggaggcggaggcggatgaggaggtggaggaggaagccgtcgaggcctccgcggaagttgcggaggaggccgaggacgtagaggaggtcggcgagtacgtggagccgcccgaggaggccaaggtctacgtcgggaacctaccctacgacatcgacagcgagcgcctcgcccagctcttcgaacaggccggcatcgtcgaggtctccgaggtcatctacaacagagaaacagatcggagtcgtggatttggatttgtcaccatgagcaccgttgaggaggctgagaaggctgtggagatgttccatcgctacgatgttgatgggaggcttctgactgtaaacaaggcagctcctagaggcgctcgggtggaaagacctccccgtcagtttgggccttctttcaggatttatgtgggcaatctcccttggcaagtggatgactctaggttggtacagctgttcagcgagcatggcaaagtagtcgacgccagagttgtgtatgacagagaaactgggcgttcacgaggatttggttttgtaacaatggcgacacaggaagaattggacgacgctattgcagccctcgatggacaggtttcatcaggctatgctgtattatctgaggaaacgatcatatcatacgttggtttccgttgcatgctcgtcgaccccctcaccggagccaccgtccgccggctccctcgcctccctcgcaccagcaacaatgaccacgtctgctacatcgacggcgtcgtctgcggcgacggcaccatcgtggcgtacgccacttcagatgggttcaagcacacctcccagatcgaggcagccatcctccgccccggcgacacggcatggacgacggtagagtcgaaggggatgaattactccgccttggggtacggctgctgcaccacgtatcaccaaggcggcgtcgtgttcgccgacctgtaccagacgttcgtcgccagggtgctcgtcgacgacgccggcggcggcggccgagtagtggaatccaggacaagaagatggccgcctgattatggcttcctgtacaagcggctgctatcgacgtacaccttcgagtttcggggcaagctgatgtccgcctgcgtcgagattccatggcagagcagcgcctaccagatcgacgccgccgcgctgtcggtgtccctgtacacgctggggacggcggcggcggccggcgacggcgacgagctggcgcatctgtgggtgagggcggcggacggcgggaggctgctgggtgagcacgcgctgttcctggggtgcccgaccagcttcgccgtcgacgccgccaggttcggcgccggcggcgaggtgagcggcggatgcgcctactttgtcatttggacaatgccggatgtgtgccacgtgtacaagtactccttccacgacgatgcggcgacgccaatggcagagctgccattcgaatggaccttcatgatcaagagaacactgtggttcctgccccagtattccagcgtagccccaactccaacccaagcgagctatgaaattagttttttttcattcgtgtccgaaaatgtcttccgacatccggatcgagtggagattcttggttgcgaggggaatttccgcgatcatggctacgtgatcgatgctaacgttcactaccgcaacggcgcaatcttcggggtggtaacaatgaccaccgtccagaaaccggctgatattgtcgctgccttcgacaaaagagggttcctggacttgcatcccctgttagcagtggaatttgcagagcagcagccgcgacaagagtggatcctgacagaggcggctctagctatagctccaacgactgttcatagtttttcaccgaaagatttcagtatctacgtgggaaatcttcgatgggatgttgattcgccttcgtctgctaaagtttttcggagagcatggccgagttttggtagctcaagtcgtatcatggatggccgtcccatgagagtgagctttgcaaagtggcaaccacggcttggttactaa

SEQ ID NO: 1515 - DNA, 2316 bp, Oryza sativa
atggcagacatagtggaagggaggtggtggaggcattatgcaggagaatgtaggcaactttggcatcaaatgtgtctcctacacaataggtggcaacagggaaagagtctcaccggtacctggagtagcttcgatgttggtgagagagttccgaagtactttgatgatccaatacaggaaatttttctcgaagaaattatagaggatgtctactacatgacaaaagaacaatacgctaacaatgttgtgcagcacattttgcagcatgggaaagcccttgtgcgatctttaattataaagagatttattgggaaagttgtgaccatgagcaagcaaaagtacgcttctaatgtctttgaaaagtgcttggtcttcagtagctatgatgaaacccagaagattattaatgaggtcctaaccatagccaaggttatcttcttcgtcgagaattacttcaagggtggaataactaggcttaagaggcacttggctggagttagagggcagagtgtttattgcacacaagttcctgatgatgttaaggagaaggttaaagcaatgctggatgcacatggtgaaaagaagagtgcaaaattggatagccagcttcgattgaggcaacaggttaatatcaatggaaatgatgatgaggaaatggaagaagtaggagaagttgaagttcaagaagctccatcagctgcaggaagcacactagtccgtaagaagccccgaaacaagggaccattggacagctattgcatgcgccctgaggaacctcgtgctaagggaaagcatatacaaactacaatgagtaaacactgtaagtttgttgcaggaatatttggaagtgcaaaaggagtcatggtcttctactggatgttctattatcgcaaatgcttggaccagattcggcgtggaagaagcttaatgaatttggttgctcactgtgctagaggtatgtgtttcattgatgccattgatgcttccttggaggttcacgatgggaagtacatctacagcttggtggtcactgacaatgcttcaaataatatgtctgcatcaaagatgcttcaagtgaaacatcctcacatattctggacctcatgtgctgcccactatattgatctcatgctagaggatattggtaagataactatggtacataacattattcgagatggaaagtctatcacaaatttactctatgcacaagttagattgctggccattatgcgtcaatttacgaaaggtgacttagttcgagctggtactactcgatttgccactagttacttgaacttgaaaagtctttatgataaaagaaatgaattgaagcaattgtttgcatcacaagattgggctaaaagttcctgggctaaaaagattaaaggacagaatgcacacaacttggtcatgaacaacaagttctggtcacaaatgctagaggttataaattattttgagccacttgcatatgtacttaggagggtggatggtgatgttccagcaatgggatacatttatggtgatcttatcaaagcaaagaaggacgttgcagcatgcctaaatggaaatgagaagaaatatagtcatatttggaaaatcatagatgcaagatgggacagcaagctcaagactacattgcacaaagctgggtatttcttgaatccgtgcttcttctatgagaataagagagaaatcaaggaagatttcctgatgcaagcagttgtagaatgtgcaacctgcatgtatcgtgatgatattacagtgcaagatatttgtgtagctcagcttagcctgtacactgaagccatggattcttttggaacaacaatggctattagacaaagaaatagtccaacaatcaccccagtttcatttgcatgcgaaagaaattggagtgcatttgagagagtccattctaagaaaagaactagattaggccaccgaaaattgaatgctctggtctttgtcatgttcaacaagaggctgaaatcaaaatattctcaaaaggatagggatccattagttgctaaatttatagatgatgatccaccaaatgaatggattatagatgatgatgcacctgcacaacaaccagaagttgatgctcagagtgcagctgtcagtcgaaagagaagattaatacataaaaaatcatcaagtaaagcaaagaaagcatgcgttgtggtcgaagaggaggaggaagaatttcaatcttctaacagtgaacatgaagaggaggaaaatattccttatgcagatggttcaagtgaccatgagcttgatgacgttggtgagaatgacaacgaatga

SEQ ID NO: 1516 - DNA, 2247 bp, Oryza sativa
  N_region (296)..(296): n = any nucleotide
  N_region (396)..(396): n = any nucleotide
atgactactcgccgttgtttgtgcggtgccctgcaggaaatgagcctcctttcccatttctgcctctgcctccagcggaaggcgggaagctgctgccgttgcatccgcttcttacatgtgttcgtcttcgtgctccacatccatggcggccactcccagatgtgcgaccccgccgacctggcgtcgcttctggccttctccgatggcttggacaggatgggcgccgggctggtcggatggggtcccaacgacacctcctgctgctcgtggacgggcatttcatgcgatctcggganggtggtggagctggatctctccaaccggagcctctcccggaactcttttcggggcctggccgtggcgcagctcggccgcctgccgtgcctgcggcgcctngacctcagcacgaacggcctcgttggcgcgttcccggcgagcggcttcccggcgatcgaggtggtgaacgtctcctccaacggattcaccgggccgcaccccgcgttccccggtgcgccgaacctgacggttcttgatatcaccggcaacgccttctccggcggcatcaacgtcaccgcgctctgcgcttcgccggtcaaggtcctgcggttctcggcgaatgccttctctggtgatgtgccggccggctttggtcagtgcaagctgctcaacgacctcttccttgatggcaatggccttactgggagcctccccaaggacttgtacacgattccagagttgaggtggctaagcttacaggaaaatcagctctctggcagcctcgataaggccctcggtaacctctccaagcttaccctgattgacttgtcatataacatgttcaatggcaatatccctgatgtgtttgggaaattgaggagcttggagtccttaaacttggcttccaaccaattgaatggcacattgcctctatccctgtcgagctgcccgatgcttagagtggtcagcctgaggaacaattcgctgtccggtgagattaccattgactgcagattgctcacgaggctgaacaactttgatgctgggaccaacacgctgcgtggtgctataccgcctcgccttgcctcgtgcactgagttgaggacgctgaaccttgcaaggaacaagcttcagggggagctaccggagagcttcaagaatttgacatcactgtcatacctttctcttacggggaatggttttaccaacttgtcatcagcattgcaagtcttgcagcacctgcccaacttaactagcttggtgctcaccaataacttccgtggtggtgaaaccatgccaatggacggcatcgaagggttcaagagaatgcaggttcttgtcctggcgaactgtgcactcttgggcacggttccaccttggctgcagagcttgaagagcctcagtgtgctggatatttcatggaacaatttgcatggggagatcccgccatggttaggcaacctcgacagtcttttctacatcgatctgtccaacaactcattcagtggggagcttcctgcaacctttacacagatgaagagtttaatttcaagtaatggctcaagtgggcaggcgtcaacaggagacctcccattatccttcgtcaagaagaattcgacttccactggtaaaggcttgcagtacaaccaactcagtagcttcccgtcatcactgatcctctcaaataacaagcttgttgggtcaatattgccatcctttggccgtctagtgaagcttcatgtgctggacttgggctttaacaatttttctgggccaattcctgatgagttatcaaatatgtcgagcttggaagtactggatttagctcacaatgatctcagtgggagcataccatcatctctaacgaagctgaactttctgtccaagtttgatgtttcgtacaacaatttgtctggagatgtcccggcaggaggccaattctccacgttcacagaagaggagttcgcgggcaatcctgcgctgtgtcgtagtcagagccagtcatgctacaagcgggcggtcacgactgaaatgagttctgagacacgttttacttttgggctttttttgaccgtggaagctggatttgcctttggactgttaaccgtctggaacgtactgttctttgcaagttcttggagggccgcgtattttcagatggttgataatttctttgataggttttatgtgataacaatggtgaacttgaacagactcagaaggaaatgggaacataaagatcatccttaa

SEQ ID NO: 1517 - DNA, 2175 bp, Oryza sativa
atggtcgagcatatggattggcagccggtgaccaccctcggccccaatttctcgccggagctgcatagcctgctcctctccgaccaccgcgcgtccttgctctccctcctccgccgccaggacgacgagctccggaccaagatcaagaaccacctcctcgcgctcggatggaccatcgcctccaagcccaagccccctggccttgcgcccaggctccgctacgtctcccccgccggaaccaagtcctactactccctccgccgcctcatccagaccatccacctccaccaccatcctacccaatcccaatcccaatctcaatctgattcttgcggttgcggagatacccctcttcttcttgaggaatctgatgacgaccaataccaagaacaaccagaagattatgccatcgcggggtacgttgccctcatggaggagcagaatgccaggcgcgaccgcgggcagggaaatgatgaggagcagaggtccatggccaaggagcttcggatcaaggctaaggatcagctcaggtcgtcgggatggacattctccatgaaggtcaagtacaacggccgcgaggagctgcgctacacagagcctcgtggccgctcccacatctccctcatcaccgcctgcaaggcctaccttcttcaccacacgccgtcgacgacaatggcttcatgcagcaacaacaacaacaagagaccagcgccacccgctgcctgcaagactgccacttctagcaagaagaacaagaagaagaaggaaggcgagcctgcagcaggcgcgcgttctgcgtccacagccaagaaacgaggaggggaatgcgctgacgacggcgcgcgcgaggacgctgctgtcattgctgatcgacaagaagatcctggcgccgagggaccagctcatctacaccacgaagcgagggctcatcaccggagacggcatggtgaaatgcatgtgcggcggctgcatcaacaacaacaacaagaggagggtagcagaccttgggcgcgcatgtttgtgggtgacggcaggtcactgtcgcagtgcctggtgcagctgatgatggcggacgacgaggcgggctccggcaggaagaagaagaagaagaagtatttgccgtatgtgtggcgtggtgcaagggtgaagcggaaatgggaggaggacgacgactacgtgtgctccgtgtgccacgactgcggcgagctgctcatgtgcgaccgctgtccgtccatgttccaccatgcctgcgtgggtttggagtccactccgcagggcgactggttctgcccggcctgcacctgcgccatctgcggctccagcgacttggacgatccaccagctaccaccaccacccaaggattcagcagcgacaggatggtcatctcctgcgagcagtgccgacgagagtatcatgttgggtgcatgcgagagagagacaatgggttgtggtatccagaggcggatggagaggggccatggttgtgcagtgaggcctgctcaaagatatacctgcgcctcgaggagctcgctgtcgtccaagccccttgtcgttcagttgcttcgggcttgtcattggtggtgttgagacgcggtgcagcgagagacggagaggaggaggagcacgccaagctgtgcatggccttggatgtgctccgcgagtgtttcgtcaccctcatcgagcctcgcacgcagaccgacctcactgccgacatcgtcttcaacacagaatcggagctgagacggctagatttccgggggttttacgtggtaggactggagaaagccggcgagcttatagccgtggctacactgagagtgtatggagaggaagttgcagaagtgccgctggtagggactagattcgcgcgtcgtcggcaagggatgtgccgccttctcatggatgagatacaaaagttgcttggtgagatgggggtggagaggcttgtgctgccggcggtgccggagatggtggcgacatggacgggaccatcatttgggttcagagagatggggcaggctgacaggcaggatgtagcacaccatgccatcctccgcttccagggaaccatcatgtgccacaagcagctacctcctcaacctcaacctcaacctcaacttgggcacacaacgacgaccccagcaggaagaattccaagtccaataccattgtaa

SEQ ID NO: 1518 - DNA, 2115 bp, Oryza sativa
atggggccctccatattaactgttgccaccgcagagggacacgcgtccgtctgccccgccctcaatccccgcttcgagttcgacgccggtgagcattcggtgattgttgattcttactaccaggttggtgaattcaaagaagaaatcctgcaacttgctgcgcttgcaagtcaaggagaggaaaattcacgggcagagctactggagaagttcaacaaatgtaacaaagatacactcgttgaactgatccgttcatttgatatgactggttcaaaagctaataggaaggaggaacttgtgacaaaattgatggagttcttcaaagtacactgtcctgatactaacagcgcataccttgataaggccttacagtttggtgaccttcattatcagataaatgacttcaaagaacaaaccctccaacttgctaggcttgcatttcatgaagaagaggaaaaatcacaggcagagcttctggagaagctcaacaaatctaacaaagatactatagttgaactttgccgttcatttgatatcattggctcaaaagctaacaggaaggaggaattagtaataattatgatggagttcttgaaggaacactgttctgggactgatgccacagaccctgataagaaaactaagaaaagaaggcgtaagaatgaagttacacatctatctggcagtaaacctttgaagaaaatgaaacttgatggaacttcactggaaattcatggtgaagaggaagatagtggggctaagtatgaggagaatataacaaaatactcggagtgtgacttggacgacaacaacaatgaatgtgctaataatgagaaaggacgatttccaaagaataaggccagccttgagccttctgaaagggtaaatgatgtgccaaagaattttgttggagcagctcccactgaagttcaaatactttcaaatgaacaagcactatctaagacaccgtttgcaaaggtggttagcaccgttgaaggagatagaactgacatgaagacttctggaaagaaaaatgcttctatcaccaagaaaaaaatgacctctaagacagatcgcaaggaaaaattttgtggtaaacagatgtacaaaggagatgggaaacctcggaaactggcagcaataccaaacagggatgagctgaggcaagctgtcttcttgatcttagattctgcagattttgcgacgatgacttttggagatgttgtgaaagaagtcgacaaatactttggcaaggatctctttgagaaaaagccacttataagatccctgatagaagaagagctctttaggctaggggaggaagctgagaagaaagaactggaagaagaagcggcagaagtaaaagctagagctgaacaagctgcgaaggaagggacaaatgctggagttaattcaggtatagacacggcggaagcacttcaagttaaggatggcaaatctgaagatgctgcaaagaacaaacgtgacaatagtgctgaaaatggtccgaaaggtggggtatctgtagaagttgctgagaacataaacagaagtgcggctgctgaaagttcgcaggatggacggtgtgaacatgacagagagaatgcaaacaatggtggtgactttatcagggatgataatgctgtgcaggatactatcagtggtgatcatgtggaatattccagagatggtgaagctgaaagggcaaagatgaacagtaatggtgaagccgtagaagccgtagatggcggaactgaagcatcaaaaggtggagaaagtgctgaccccaaagatgataacaaccgaaatggcgataaaagtgcactagatattgatgatcgtggagctgaagattctcactgcaacaaaaacggtgaaaatgtagcttgtgtggaaaatggcaaaactaatgaagctggcaacactgagaacggtgaaaatgtggtatcccacgatgctgaaaaggatgataaaagaaaggatcccattcaaaatgcaaaccccgaacagaccctaacagatgctggtgatgatggtaaaactgaagatgccgagcacaacgccaacaccgaagctgatgttgattcttgtgccgatggtactgctgagaattag

SEQ ID NO: 1519 - DNA, 2106 bp, Oryza sativa
atgggattcgtctccggcatcgacgaccctctcgggacggtttcaacggaagaattggatggctacctcagctctcctggtgtcgactcacggccaacagagatcctcgactacgacgacttcggctacaactatgacctccgcaacctcgacgattctgatgaagcctatgaagacaactacgcgcctctctttttcggcgttttcatggccgataatgagatagcagaacaacgtcaaccccgcgaagtagaagaacaacgcacacgacaagaagctgagcgtcgccgactggaagaggagcgacaagcgcaagagcgagaccggttgcaacatgttgaagggacggcggtttttcgtaccccacagcagaacgcagtcgcggcaatcactcttctggatactttgcttcaggaagatgtgcataaccacgtcctcagtatcatcaaccaaacgaagaccatgatcgccacctcggtcccagttaactcggcaagcgtctgcacgccgactggcagccgggttccccctcttcgatctcaagattaccaccaaccaagcctcagcgttgccgcatcaggatctaatcgcaggagcaggggtcatgttgaacgttctgttcactcacctgccgacagacacagagagcgccatgcagaacagcctcgctctccacgtcgcaggcagcccgttgatcttcgtgaaacactcaaccgacaccgcgcagaaagaggttatgtcccactagatcgctacaatgacgatgaagtgaccggcatcgagtggattggccggctggtttcaagccgactggaatcgagaaattacatccgacgtttttctaagcaacgtaacaagatctctggcatcaccaacgacgtcatcatagccgctttcactaagggtgttcgtcacgaactcttagtcggcaaatttggacgcaagcctcccaggacggtcaagcagatgttcaaaaaagccaacgactatgccaaagctgatgatgccgtcaacgcttacaagcagtcgagcggtaattggaagtccaagaaagatacaccagccgccggggggagtggaagtaacaaccataaggatcgcaagcgtaagcctgaagacctagtggctcttacatcaccatcttcccgacagcgttcacgtgtcaacacttccgacaagatcatgaacgcccaatgctcgcatcatccaaactctaaccatgcagccaaagattgtttcatctacaagcagtttgcgaagcaatatgccaatcaagcaatgaaggctacagccggagatcagggcacatcaaagaagaaggatgacgaagacgacgcttatgagtcaaagcggaaacaaaagctgcctgatagggagatcaacgccgtccagcccgatacacctcaatatcttcggtggtcagaaacagcaatcaagttcgaccacttggatcatcctgaccgagtggtccacccgggacggtaccccctggtattagacccattggttcgaaatgtcaagcttcggcgatcccacattgatggtggcagcgcactaaatattctttttgccaagactttggacgatatgcagatccctcgtactgagctgaagccgagtattgcgccctttcatggagtcatcccagggctgtcttctactccactcggccatatcactctgccggtcaccttcggcactcgggagaactttcgcacaaagaatatttgcttcaaagttgctgattttgagatggcgtatgacgctatactcggacgcccggcattagccaaattcatggcagtcccacactacacctacatgatgattaagatgccaggacctcaaggagtcatatctttgcgaagcgacatcaagcaaggcatcacctgcgacaaagaaagctgtgagatggcccaaactcatgagatcgcacttgctcgggatgagatctggctggctgcatcaaccgcaacagaaggagaagtgcctgcaaccaagttatcgaaggctggagaaggcgacgccaagaccaagaagattccccttgatctatctgatccctccaaaactgctgtaataggtgctgagttagattgtaaatag

SEQ ID NO: 1520 - DNA, 2100 bp, Oryza sativa
  N_region (1360)..(1360): n = any nucleotide
  N_region (1404)..(1404): n = any nucleotide
  N_region (1455)..(1455): n = any nucleotide
  N_region (1467)..(1467): n = any nucleotide
  N_region (1471)..(1471): n = any nucleotide
atggcatggcacgtctggtccaaatgttcgatacacaaggagagggaggcagatagggagagggggtcagagaagatgctggcatgcatcgcgtgctcctccaaggaaggcggggaggacgggtcccgtggcgcggccacgcctcacggcagagatgccgtcaagtccctcacctcacagctcaaggacatggtgctcaagttctccggctccaacaagcatcagcactacaaggcggcgacggccggtagcccttcgttcaggagcaggagctaccgccgtccgtacccgggcttcatcgatgactccgcgttcatgacgacgaccaggcctggaggtgaggcctacatgtacacgagagcggcgccgccgccgcccgtccgggccgcgtcgacgtcgatggcgacatgggacatgaccaggagcaagagcaaccgagggtggcagcaggatgccggcaggagccccggcggcacgacgtggatacagagcatcgaggaggaggccggcgccgacgacgtcaccgtcgtggaggatgccgtgccgagggagtggacggcgcaggtggagcccggcgtccagatcaccttcgtcacgctccccggcggtggcaacgacctcaagcgcatccggttcagccgagagatttttaacaagtgggaggcgcagcgttggtggggcgagaactacgaccgcatcgtcgagctgtacaacgtgcagacgttcagcggccggcagcaaggcgtgtccactcccacgtcctccgtcgacgactctattctgagagaatcatcgttctgctccaggggcggatcgacccgggagagtccggtcgtgacgccggcgacgtcgtcgtcgctggccaaagagccgatcgcaaggagcatgtcgtgcaaggcgatggcggcttcggcgtctaattacgccgcggcggcggcttccacaagagcggcgtgctacccatcggtggcagtgcccgacccgtccgaccacgtgtgggcgcaccacttcaacatgctcaactccgctgcggccggcccgtccgcggcgggcggcggcgtcccatcgttgtacgacccgtcgcgggggaccacctcgtcccgcgacgaggcctccgtgtccatcagcaacgcgagcgacatggaggcgaccgagtggatcgagcaggacgagccgggcgtctgcctcactatccgcgagctcggcgacggcacccgcgagctccgccgcatccggttcagccgcgagaggtttggtgaggacagggcgaagtgcaaggaagagcccgcgccacaggtcgccgcggccgaaggggcggagccgagacggcggcggccgggggccgcgttccgcggcgccntcgggttggccgcccctttcgcggcgtcattcctcttctccttncgtcgtcgggctcgcgggtctcgtccttggtggtctctccttcaacgcgtncggtctccatgncttncaccttgccggatcctttccaccggtgttgatcttaggtcatcaaaagtttgtgagctcggactgttgaactatagagctaagcatgtattttacccctcgagtaatagaaaatttcgatgccatgatgactactattgggcttcagtctttgaggttgaatacacagaatatttttctggtcagacatcttatgcggtggcagaggccccaaaggaggctcttccgctgaattgccggcctgactttggtgttgcatggtcaacaacattgaagttcaaggtaaatgaatcgtatagttgcagatacacattgggaagtagcaaggctgatatttattcagataggctgttcaattgcaccagcgaagaaccttcaacaattgagatgctcaagaggatatttgtattgttatcgaagtcctatatgttggaggatttcaattccattggaatgcttggatacgtaatggcaggggttgtggctggtattttgagtgccttactcatcactatcttactcagaagtctccgaggactagtccttgcagttgttgggtccagttacagcaaaatgattggattgaaagaacttctgttagattatgaaatcatggagagattcttgtaa

SEQ ID NO: 1521 - DNA, 2016 bp, Oryza sativa
atgaggcaggttcacgcggtcaaaccagccgtcgccgacgaaggaagccccagtgtgcctgtgccccctcctcgtctttcgtctcttctctccttccttcctccccttctcttcctctcctcccaccgagtcgccgccctctcgctttcaacccccacacggaagcaagaattgttcatcaaaacccgatctttggcgtggccccgtggatttcttgcgatctgtttggtgctatggatttctgatccggggtttcttggatcttggggagtaggaggtggggggcggcgatctggccgggagatggccggcgggaaggagccgatcgaggtcaagttccggctttttgatggtacggacatcggcccgagcaagtacgacccctccaccaccgtctccgcgctcaaggagttcatcctcgctcggtggccgcaagataaggaaataactccaaaaactgtcaatgacctgaagctcattaatgccggacggatattggagaataaccggacacttgctgagtcccgtgttccagtaggagaggttccaggaggtgtaattacaatgcatgtggtagtacgccctccacaacccgacaaaaacagtgagaagcagcttgcgaattcccccaagcagaacagatgtgggccgtccgattctggccgctcgcccatctctaccgttggtttccgccgcaaggctcgcgcggctcccgggctccgcctccgcgccgcttctccgcttgcgcgaacccaaccccggcgaccccgccgccgcaaaacccttccaccctctgctctctctctctccggctcggcgtcgcgcgcgccgtggaagaggccaccagtcgcgggggcgcggcctcccgtcggtgatccgacggcgctgtataagcgtgatcgcttggagcgtccggacccgtcgctggctcgtgtgcgtgtcaggggtttctccggctgtccgtgcgggtgcccgtccgccttaaagacggcttacgccagatttgatctcttccaagcaacacgaatccctcaacgagtcatctgtgcatcgaattcatatagttcaaattatcgaagtactagcacaagcagtcccatgaattcaaatgaaatgctgggagctcaggaaacggtatctactgaggggaacaacagctgttctagtgttcagtccactcctgacatagagaagaagtatgtgcatcgtgtatatgatgccatagccccacatttcagctcaacacgctttgcaaaatggcctaaggttgcaggattcttgaattcgttgaggccagggtcagttatactggatgctggctgtggtaatggcaaatatctgggcttcaatcctgactgtttattcataggatgtgatataagcccaccactgattgatatatgtgctgggagagggcatgaagtgttggttgctgatgctgtcaaccttccatacagggataattttggtgatgcggcaatttcaatagcagtactgcatcatttaagtactgatgccaggcggaggaaggccattgaagagttgatccgtgttgttcggaaaggtggtctggtgctcatcactgtctgggctgtggagcaggaggacaagtcacttctcaacaagtggactcccctctgtgagaagtataatgaagagtgggttgatccgagcagccctccagtgcgtaatcaatccaatactgtgcttgaaagcatatcagagactgatgaagacacaggtgcagtgaagcaaaggaatgatgatctgaaaataagtaatgatggtttggatgataacgccgatgtaacttgcagcaattccaacattgatgagtatcacaaaacccagcaggagtactttgttccttggcatcttccatttcaccgagctgaaattggtggtgcatctgctgctgctcttgaaaatggatttgcaaaaagagatgacaagaagggtactgtggtctacaaccgctattaccatgtttttgttgaaggagaacttcaaaggtga

SEQ ID NO: 1522 - DNA, 1959 bp, Oryza sativa
atggcgcctccacctccacgaacacctctcctcgtcgccgccgtcctcctcctcctcctcccgcaggcgacgccgatcgccacggcgagcccggtggccttctctttcccgtccttctccctccgcaacctcaccctcctcggcggggcctccctccgcgccatctccgtctccctcccgccgccctcctcccgggccctcttcccgctccctctccccttcccccgcaacgcctccttctccacctccttcgtcttcgcctcccccgccgccgcgcgccccgcctcgagcctctccttcctcctcctccccgacctgctcgccgagggcctcgccgccaagaaccgctcgctcccgctcgagctcaccttcgacgcgtccaggaacctcgtctcggcctcctccgccggcgttgacgtcgacgggaactccaccgccgcggtggacctgcggaacggcaacgaggttggttcttgggtcgtctacgacgcgtccctggcgcgcctggaggtgttcgtcagccacgcgagtctgcggccgcccacgcccgcgttggccgccgacgccgacagcatcgccgcccgcttcgccgagttcatgttcgtcggctttgaggtcacgtcttcgtcaggaaacgggagcagcgatggtggcttcctcatccagagctggaccttccagacgtccgggatgccggccgtcgacccggcgtctcggtcatcgcacaacgtgtccgacagcgtcgacagcgctccggcgttggacggcctcgccggccacaaggatgggcgtcgcagaaggttggcactggggcttggcatccccttgcccattgtgtttcttggtgcagtcacggtgtttgtggtaatgtcgctgaagaagtgggggtcagggtttaagaagggtttgggtgcaaaggccgcagtgggtaagccaaggcagtatacctatcaacatctcttctcagcgacaaaggggtttgatccttctctggtggttggcagtggtggtttcggtactgtgtacaaggcagtctgcccgtgttccggggtcacatatgcggtcaagcggtcgaagcaatccagggacagctacaatgagttcaatgctgagcttaccataattgctgacctgaagcaccccaatctggttcatctccaagggtggtgtgctgagaaggacgaactgctgcttgtgtatgagttcatgtcaaatggtagcctggatatggctctccatccttgttctgaggctgaatgtcatgtccctctcagctgggctcagcggtataatgtggctgtcggcattgcctgcgcagttgcatacctacatgaagaacatgacaagcaggtgatccacagggacatcaagtgcagcaacatacttcttgactcacatttcaacccaaggttgggggatttcgggcttgcaaggttgaaagatcctaacacaagccctcggtcgaccttggcagcggggactgtcggttaccttgcacctgagtacctccagatggggaaagccacagaaaagagtgatgtctacagctatggggttgtactgctagagatctgcacagggagacggccaattgagagtgcagcacctgacagtatgaacatggtgaatgttgttgattgggtttggaatttgcactcgaaaggcaaggttttggatgctgtggatccaacgctgaatggggaatatgatgcagggcaaatgatgaggtttctccttgtcggtttgagctgtgtgaacccattttcagaagagaggcctgtcatgaggaccgttctggatatgctggagggcaatagtgggctgctgtctgttccaagaaagaagccactgctggtatttgttccaaatgcccctattgatcttgagggaatagtctcggagtgcaaccagagtacagtttcaagtggtctctatgaattaaaaattgatctaaactag

SEQ ID NO: 1523 - DNA, 1950 bp, Oryza sativa
atggaggtggaggcgatggagaagaagggacacagagcctttgctaaggcaattaagtctttcggttcttcagaaaggcacaagcgttctaagagtgatcttgaggatatgtgtgctaaagatgcgctgtatgcttcagataaaacatgcgttcagcctaagccagatgctgtaaaagttaaggtaaaaagtgatatcaacgctgaagtgcaacctgggagaggagcgcagagcttcttgagaaaagagattctccagctagaaaagcacctcaaggatcagcaggtcatgcgtggcgccctggagaaagctctgggaccgaacgctactgctgctccagtcaacgtatcaaacgagaatccaatgccaaaggatgccaaagaacttatcagggagattgctacactagagcttgaggtgaagaacatggagcagtatctccttaccctgtacaggaaggcctttgagcagcaagtgcccacattttcccctcctgaccaccggggagctccgaagccgccggtaccggcgatggcggcagtgagctcgcagcctgtgcagctgcagaaatcacccagtgtcaaggcatctcgcaagaacaacagagctgacgcaatgctgcgatccagctacccgccaccgtcccgtaggacgttgaacgatccagtgatgacggattgctctacgtcgggttgctctagcaggctaggtgaatctgatgttctccggtgccagtctgcggtgtcgtaccgcggcatttgttcgtccaggatttcaccatcggaggacagtcttgcgagagctcttcggtcatgccactctcaacctttctcatttctggaggaaggagagagtactgcagcaggagtgataagcttagcagagtatctaggcactaatgtagctgaccacattcctgaaactcccaacaacctatcggaggagatggtgagatgcatggcaggggtgtactgcaaacttgcagatccccctttggttcaccacggctcgtcgtcttcgccaacgtcatcgttctcctcgacgagtgcgatatccccgcagtatctgggggatatctggagtcccaattacaagagagaatctactctggactctcgtttgataaaccctttccatgttgaggggttgaaggagttcagtggaccatacaatacaatggttgaggttccactgatttgccgcgatagtcggaggctaaaagaagttgaggatctgctccagacttacaagttgattttgtaccggttggaaaccgtcgatctcaggagaatgacgaacgaagaaaagattgcattctgggtcaacatacacaacgcccagctgatgcatgcttatctaaagtatggcgtcccacagaacaatctgaagaagacatcacttcttgttaaggctgcctgcaaaattgctggacggagcatcaatgtagctgttatccagagcatggttcttggatgcaacacatactgtcctggacagtggttacgtactttgcttcacccaaggatcaaaagcaaagtgggcaaagtagggcatgtgtggcaagcctttgccgttgcacaatcagagcctcttttacgctttgcgctttgttcaggaagccattctgatcccgcggtgagagtgtacactccaaagaggctgttccatcaactggaggctgccaaggaggagttcatccgggcaacggtgggcatctggaaggagcagaaaatactgcttccaaagctcgtcgaggcgtatgcgaaagacgtcaagctctcgtcgcagggccttgtcgacatggtgcagcgctacctcccggagagcttgaggatggcaatgcagaagtgccagcagagcagatccagcaagatcatagaatgggtgcctcataacctgaatttccggtatctgctgtccagggacctggcatttcctcacctgaactga

SEQ ID NO: 1524 - DNA, 1860 bp, Oryza sativa
  N_region (1035)..(1035): n = any nucleotide
atgggcaatccttctattctcacggaggatttaggcgatacgtctgactttgaggttgatggcgtcgagaacctcacggagaatgatgtcagtgatgaggagattgatgccgaggagctggcccgacggatgtggaaagacaagatcaagctgaagaggatcaaggagaggcagcagaagcttgctctgcagcaggcagcactagaggagtccaaaacaaagaagatgtctgagcaggctctccgcaagaagacggcgagagtccaggatgggatcttgaggtacatgctcaagctgatggaggtgtgcaatgctcgtgggtttgtttatgggatcattcctcataaagggaagcctgtcagtggtgcatcggataacattagagcttggtggaaggagaaggttcggttcgatgtgaatgggccggttgccattgcaaagtatgaggttaagaactcaatgctggttgatgctaagcgcagaggggtcttgaaccagcatagcttgatggatctccaggatgctaccctgggatcattgctctcatcgttgatgcagcattgcagcccgcagcagcgcaagtacccactggataagggtgtccctcccccatggtggccatcaggaaatgaggattggtggatttctttaggccttccaatgggaatatcaccaccatacagaaaaccgcatgatcttaagaaggtttggaaggttggcgtgctgacgggtgtgatcaaacacatggccccaaactttgataagatcaggaattgtgtaaggaaatcgaagtgcttgcaagacaaaatgactgctaaagagagcttgatttggctgggagttcttcgaagagaggaaatatattttcgcagttctgacaatgttggatcacagattacacaccgtagttctcgtgagggaaaaagtgatgatatatatagcagcagtgatgagtatgatgtcgaccatttggaggaacctcctcgctcttcatcatccaaagataatgtggggcgtcgtcagccaactgcgcanatcagagaggagcatacctctagtcgacacaacagaggacgccatgatcagcaacccaatcaagtacttcctagcaatgaagggaccaatgaatcaaggaagagaaagagacctagtggtcatttacttactgctgaatctgaggttgaggtaacacaaaaagatgacaatcaactagccattgtgagcaatgcattgcccaatatgagcagaataaaccaaacggagatgatgggcatggctaaccagatgacaagcctcagccatgtcaatacaactgaaactctacagcatcaatatgttcaagggaacttcgtatcttctcctgctgctgtggttaataactataacagcaaccagattacaaatgttaatccttcaaggatttatatgggatatcagcctttagcatgccaaaataatggtcacacaaatccatggtctgaagacacttttcaggttgatgttggtccaccacctattggttttactactaattcttcgtcaggtggtaatcattcttttcccatgaaacaatcactaccaaaatctatagatgatcatgtgcctattacggagacaggggtgttggctgatagcagttcatatggttatcatatcacagccacaggtagtaggaattcaacctctgttgctggccatggaaatcagctcatgggagatcctttcgacagtggtactgctgataagttcaatgggaattcgtttgatggattgccttttgacttcattggtagtagtccaatccctgacatcggtgtattgctagatgatgatgatataatgccatatctgggaacataa

SEQ ID NO: 1525 - DNA, 1860 bp, Oryza sativa
  N_region (975)..(975): n = any nucleotide
  N_region (1064)..(1064): n = any nucleotide
  N_region (1070)..(1070): n = any nucleotide
  N_region (1083)..(1083): n = any nucleotide
  N_region (1089)..(1089): n = any nucleotide
atgggatggatgtccggatggaagctctgctgggcttgctctaatttcgatcagcggagggcaggtgagcccggaattgtgtcatgtacatgggctactgtgatgtccttccaggaggctagacaagtgggctggctttgggcccattcggctagggagaaggagactagaaaagaggcaaagcagccagcagccaggagatttggtgtgattgtgttggttcgtgacaatatggtatcagagcagtcaattcgtggggtttctggtgtggagatgaagtgggagagcgctggtggtcagaggaactgccaacaacttggtggtggtgtctttggaggagatgcccaccacctgttcgatgaaatgtcgacctgtccaagaggcgattcagctgctgtccttcgcgtcaccgtgagccagatcatatatccagtgacatctgaggtgttgcatcaagtgtacaatacctatggagcagtggcggtgcaggttcttgcagtgagcacatggcaagtcaaggctcttgtgtcatttatgtccagccatgacgcggagagggctcggtccgccacccacggtcgcgacatctacgacgggggctgcttaatggatgtgcagcacgtccagatgttccctggagatggcgccaccaccacgcacaccacctgtttgacaatggtaccaagtagcgccaccgccaggccagcggccaagagtactgctgctacaccagaacgcgtgttccctgctacaacagcttcatctataccctcaattacatcagcagccatggtgacatcggttcctttcaacgagaccaagaaggctgagactgacatggacaaggcggtagagaacttagacaagaccattcaagacctgtgcaccaagatcgatcggatgctggaggcatttcgccacaccaaggtggatttatccttgagcaaggattccactagagatgtggcagcgttnagcgccaacactgatccaacttccatcgcattggagaaccagttggctgatgatgatggtggcaaagacatggccaaggaggaattgantgagcncatgggagttgantcccangttcaccactatgtatttatgcttcagagatccattgttaatcatcaatgcaattcctcccaggaactggagttggtgcttgagccctcagaatacacagctagccctccaccagtaccaccttggagagcagcaattccacggaacaaagctgagatgacctcaggttctcggccgttaccatggcttgatccacagctttgtcaaggcagcggaggcgtggtgatatgtctctctggtgcctttaggaaggcctatcagcacacacatcattcaacctatgtggagctaatgttgatggtaattgcacttgcaagtcacatgagagacgtacccatcgccatgctcgtatatgctgatagtagtggtgaagaaggcgtgaaggcttggtggttgaggcagcaaaagcatggtagagagtgtggttgtaatgctcaggttttatgtatgttggataagtggattcaacagtgggcagggtctacatcagatggttcgaaggtcatcaaacaattgttctgggattctgcccaacaaggcatttccctgcaggtaccttgggatcttgggggcattaatctggcgagtcagttgcatcggcttggggacaagccgattcttaacgggggaagaatgtcatgtacatggcctgctgtgatgtctttccaggaggctagacaagtgggctggctttgggcccattcggctagggagaaggagactagaaaagaggcaaagcagccagcagccagcagccagggtcatcgatga

SEQ ID NO: 1526 - DNA, 1824 bp, Oryza sativa
atgccttttggtctgaggaatgcaggggctacattcgccaggctagtgtacaaagtcttggggtcgcagttggggcgaaatgtcgaagcctatgttgatgtcattgtcatgaaaagcagcaagggcttcgaccacacatcagatttgcaagagacattcaacaacctccgcgcagctggcatgaaactaaatctagagaaatgtgtgttcggtgttcgtgctggtaagttgttgggattccttgtgtccgaacgggggatcgaagcgatccccgagaaaatcgatgccattcagcaaatgaagccaccatcgagcgtacgacaagtacaaaagctcgcggggcgaattgtggcacttagtcgattcctgtcaaaagcggctgaaaggggcttaccttttttcaagacccttcgaggggcaggaaagttctgttggacgcccgagtgccaaatagctttcgatgagcttaagcggtatctccaaagccctccaactctagttagcccagtggcagggaacgaactctggctctatctaccggcttcgcccattgctgtcagcgcagctttggtacaagaaaccgaagcaggccagaagccagtgtactttgtctccgaagctctccaggaggcgaagtgggccgctaagctgtcacctttcgacctacactttgtcgcccgcaccacgatcaagtcccaagtcctcgctgacttcatgcccgaatggacactcgcgtccgtcccagagcccgaaccggtcaaacaaccatgggtcatgcactccgatggttcgtggtctcacaaggaggcgggcatcactgcaatcctgacttcgcctgggggcattccaattcgttacgcagtaagactagagttcggcacaaccaacaacacaatagaatatgaagcaatgttaatgggcctaaggaaagcgaaagctttggttgttcggcgttcgctagtccggacggactcaaagcttgtcgccagccaagttgacaaatcttttgacgcgaaagaagggatgagaaagtacctggaggccgttcggtctatggacaaaagtttcgccggcataatggtcgaacacttgccccgaggccagaacgaaccaaacatcatggtaattgaccaagctttttcgccaggagtccttttcgaagccttgtatacaccaagtgtgccagaagacagcccagacatcatggtaattgaccaagctgaactggcgaagacccagacgactggtgaacgtcttttgtcaagcacctcaaagagggatggctaccggatgaagaagcaacgtcgaggagaagagatggtaaaagaaatacaccaagggatgtgcggagcacaccaagtagcaagaaccgtcacatcagaagtatttcgccaggacatatattggccaaccatactaaaaccaatcgcaccaatttggccattcgcaagatggggcttagacatcattggcccattcccggtggcgcgaaatggttacaagttcgccattgtagccatcgaatgtttctctcgctggattgaggccgaaccacttggcacaataactgcagcagccattcagaagtttgtttggaaaaatatcatggtactgaaggagttcattaccgacaacggcaagcagttcgactctgaaaaattcaaagaaatgtgcgaggagctaaatttgcaaatcaagttcgcctccgtcgcacatctgcaattgaagcatggggcgatgacgccggcagaactagggactaactcaccatgggtgatgttttctggtggcgaaatgggcgtgaagtgtcgctcgaactcgtga

SEQ ID NO: 1527 - DNA, 1818 bp, Oryza sativa
  N_region (85)..(85): n = any nucleotide
  N_region (778)..(778): n = any nucleotide
  N_region (1014)..(1014): n = any nucleotide
atgaagtggcgaaggcggctgcagcggcaagggcgcttcagaccagggcggagatcctttcggcaggacagctgctggtgccccntgccgctccgtcgcagccaacagtggcccaagccgcactccctgccgtgcaagttcaagtcaactccgaccctgaaacacaagccgaagccgatatggaaactattaggcagaacatggcacgactccaagacatgcttcgccaaatgcaagaacagcaacaagcgtacgaggcggcgaggcggtccagggtcccttcggcaccaatcctccaatattcggcagggtatgtcccgcctcaagtctgtccacaagtgcagtcccagcccgttccgccgcaagtctcacaggcatcggtgcacttcgccgggcagccggcagccgcagcagtgcaccaggccccctatggacaagctcagcagatcgcggcccaagtgtagcctcaaccacttggccaggggtgaagaggattccaagcgacggcaagccatacaagctgagtacgataaagcttctattgccgccgcccaagctcaagcacaagttcaagttgccgaaccacctcccctcgcggttcgtcagcctcaaacggcgatccaagggcagccgccaagacaaggtcaagctcccataacctggaaaaagttcaggaccgaccgcgcgggcaaggctgtgatggccgtcgaagaagtgcaagccctccgcaaggagttcgacgcccagcaagcaagcaaccatcagccggtccgtaagnagagcaatgccgaaacatcaggcaacgtggcaacacgcaagatactagaccacagcaaggagcaaccgtcgaagcacctcgtgaagcagcccaagaacaacccccggtcgaacaacgtcaagatgcacagcgaagtaatccaagtgattacgagggccgacccgctcggccatttgtccaaaaggcagaaaaagatgcagatccgagcggtccacagcatcacttcgacggggganggggcgccgcagtatatgaaccagccaatttctttcgggccagaagacgccgaaggagtcatgttcccacatcaagatccactggtaatatcagctgagatagccggctttgaagtccggcgaatcctgttcgacggagggagttcggctgatgtcatcttcgccgaggcgtatgctaagatggggttgcccacccaggctcttacaccagcaccaacgtcactccgggggttcggcggagaggcagttcaagttctcggccaggcacttctgctgatagctttcggctcgggagaaaacagacgcgaagagcaagtactgttcgatgtcgtcgacatcccgtacaactacaatgccatcctcggccgtgcgaccctgaacaagttcgaagccatttcccaccacaactatctcaaactcaagatgcccggcccagcgggagtgatagtggtcaaggggcttcagccttcgcctgcgtcgaaaggcgatcaagccgtagtcaacagggccatgcacaatgtcgaagccgaactccacagccggccaaaacacgcgccaaaacccacacctcacggcaagatagtaaaagtgcaggttgacgatgccgaccccacaaagctcgtatcgctgggagacggcatgggcaaacaagaagctgagagcatcctagcggtgctaaagaagaacattgaaattttcgcctggggcccttacgaaattgggggggggggtttcggcagacctcatcatgtatcacctagcagtcaagccggatgccaagccaagagagcagaaactgcgtaa

SEQ ID NO: 1528 - DNA, 1728 bp, Oryza sativa
atgggcggaggagcaaagcacgatgtgagcgagcgagcggggcccaggagattctgccggaaggacgccgatctagcagccacggtgctcagccatgagcgatcaaacgccgcccccgaaaaatccccaaaatacggggcaaaaatagaacaagaacatgaattacttgaagaactcgcgctccgtcctctccaggctcctccgccacaagcccaccggctgcccgcggctgcaccgtcgccgccgttgccgcaggcgcctcccgctgggtactacttcacctccccgagtcgcccggaggccgtccgcttcggccgagtgctcctccgaagcccgccgccgccgccgcggcctgcgcaggcgccgccgtctcggtacttctacacctccccgcagcggcagaaggtagtccacttcaaccgccggcgcgggtcccggtggtaccacgacccgcggaagctcaccacggtggtcgtcgtctcgggcggcgccgcggcggccgtctacttcggcaacctcgagaccgtgccttacaccaatcgcacccacctcatcctcctctcgcccccgctcgagcgccagctcggggagtcccagttcaacaatctcaagaaggagctgggccccaagatcctccccccgctacaccccgacagcatccgcgttcgcctcatcgcctcggaggtcgtccgcgccgtccaccgcggcctcgctggaaggcaccacgacgccttcgccgcggatgacgcctcctacggcgacatctccaccgacgtcgtcatcaagaaccacgaggccggcgcggaagacgtgatgctcggccggtcccgtggcaacaagaacgcgagcgtggctgccgcggcccagcgagacgaggaggttctggatgacagatgggtcaccgagagccgcgaccgtgggaaggcacggggagcacagccggagacgaggcatcttgatgggctcaattgggaggtgatcgttgtcagagatgacctcatcaatgcaatgtgcttgcccggtggcaagattgtagtctttactggactgctcaaccatttcaagactgatgctgagattgctactgtgcttgggcacgaggtggacttgggatttccgggttcatgtgtgattttggttgggcatgctattgcaaggcacgctgctgagatgattacgaagaacttgtggttttggatcctgcagattgtgatcatgcagttcatttacatgccagacatgattaatgcaatgtcgacgctactcctgaagcttcccttctcacggagggtttacgtgctaacaaggaaacggtgggggtcatggcctagccagccgaacaaagctgttcccagacgttaccaagaagccacggagcatggcaatctcacaatagcacgacattttttggccataattgtgtatccggaacaattatggttgtttgatcttgtcattgtttttgtgcataattggaagatggagatagaggcagatcatattgggctgctggtacttggtgctgctggttacgatccacgcgtagctccctcagtctacgagaaactaggaaagatcgcaggagattcaacgttgagtaattacctctccactcatccttcgagtaagaaaagagcacagcttttgaggcaagccaaggtcatggatgaagcactgagattatacagagaagttagctctggccaaggcactgaaggtttcctgtag

SEQ ID NO: 1529 - DNA, 1704 bp, Oryza sativa
  N_region (1285)..(1285): n = any nucleotide
atgggagcggcggttgccggcgaacaacggcacaaaaaaatgcaaacggagggcaccgggagcgacggaagatggccgacaacgagcttcgaagggcggcgaggtactgtccatggcggcgacgactttccggcgacgagcagcgataacggaggggtggacggccatcacctcgcagctgccaacccaaaggaggcgacggcgaccgaaggcgacgacgggatgagcagcagggcctcgccggagatcaaaacatggcaacggttcggccttcacggggacggcgacttctggcgggaacgggtggccggggtagagctcttcactgcgaaaccgagggaagtggcggcactgaccggcgacggccgggtcgacggcgcacggcggctggagcggctgccagaggtggagagagagggagagcgcggggagagcgattccggcgacgacggcggacgggacttgaggggatgggttttcgtctttccgatgtcgttcgacgcggtctcccggcgggagacatcgccggcggcggcgttggaggaggagatggcgactgtgactcaggcgccgccgccgtcgacgccgtccatggtcggcaatccagatggtggagctccggcggcggccgcggaccagagcgcgccgtgcgccaccggcggcgagacgttggtgggcgagggccggctgcggaaggggaagatggtcgccgaggaccagagcccgccgagcgtcagcggcggcgcaccggctgacctgcctcccggcggtgacactgacaccctcctcctgggtgttcgacggcaagaagacgccattgcaatgatgacgccgagcatgaaagagaatgtccggaagtgcaagctggccggcctgagggccgccgctccggccgcgcgccggcgtccccgtcccgtcgagaagaagctcatcggcggcgccgccatcctgggagccggccgaccaccgcacgtcgccgcggatgaggcgacgccgccgccgggagccaagaagcccaagcctgaccaccgcgcgttcttctggaccgcactagggcacgacatggcgtcgacgacctcggcggggtccgacacgggcgcgacgctcgacaacatcgccgtcgtcgacgacaacctccgcgcgaacctttggtacctcgtcgcctcgccgtggcggccgccggcgcgcgtctacggcaagaagatgacgttcacggaccggagcgtcgcccagcaccggctgctcatgtcgtgcaagggctggcacaacacgcaccgcggcggcnacgagccgttcccgttcgaggagctcctgacgccggcggagaaggccgccgccgacggcgacgagggcctgcgagtgcaggcctacgaccgcaccggccgggactacgacctcaagtgcaagttcctcaactgcaacgacgcctaccggctcatcctggaatggtccgaattccttaaagaaaaccaccttgacgtcaaggacaagaacgccgccatggccaacgaagccatgatcgatctgtgggcgttccgttcccggtggctgagccatggcgtggatggccatgaggacggccggctcgggctggtcatggtgcactacttcagaggcgacgccccgcacgccgacgccgccatgaacgtccacgacgccctaatgcattcagaggcgacgccccgcacgccgacgctgccatga

SEQ ID NO: 1530 - DNA, 1677 bp, Oryza sativa
atggcgagcgacggcgaggacgacgctcagagctacgaaagctactataccgacgatggcgacgattacaccgacgaggtggacagcaacgtcgacgacgacggcgagagttgggatctggaggaagaggaggtagatgacgacgacgacgacgaggccaagaaaaagaaggcggccgccgccgtcaacctcaccaagatcgacaggaggtaccggaatctgtccgaggagcaagtccgcgcgcggcaggacgcggacacggccaacgtcggcgagctcttcgcgatcccgccggggttcgccgccgtcctcctccggcactacaagtggagcctcgtcgagctccaggacaggctgttctgcgacggcgaccgagccggcgccgccaccggcgtggcgctcggcggcgcccccgtgtcgcgcaacgcccacccgctcgtctgcgccatctgcttcgacgagcaccccgccggcgagatgagatcggccgggtgctcccacttctactgcgtcggctgctggcgcggagcccggtacgcgacgttcttgctccggtcgtacgtggaggagggcacgaggatcaagtggtgcccggggcccgggtgcaccctggccatcgagttcgtcggcggcggcggcggcgaggagaagcaggacgacgtggagtgcaggcacgggcacgggttctgcttccggtgcggcgaggaggcgcaccggccggtgtcgtgcgagacggtgtacgcgtggtcggagaagaacgccatgaagtccgagacggcgagctgggtgctggcgaacacgaagcactgccccaagtgccggctgccgatcgagaagaaccgggggtgcatgcacatgacgtgccggccgccatgcctgcacgagttctgctggctctgcctcagcccgtggagcgatcaccggagcagcgagtactacaactgcaacgtctacgacgcggccaaggccaacggcgaggccagcgacgacaagcggcggcgggagcagggcatggcgtcgctggacaggtacatgcacttctacgagcggtgggcggcgcacgggaaggcgcggcagagcgcggtggacgacatggccggcctcgacgcctgcgccgagaagctgtccgccgcggtggccatgccggtgacggagctctgcttcctggcggaggcgtaccagcagatcgccgagtgccggcggctgctccggtggacgtacgcgtacgggtactaccacctgggcacggggctcgacggcgacgaggagcggcgcaccatggtggagtgcgcgcagggggaggccgagcggcagctggagaagctgcacgactgcgccgagcacgagagggaggagctcctcgccgaggtggaacgaaccatcaagttgaacgctatcctcaaggacaacgacggcgaggagtcgaagaagaagatggaggataaggccggcgagatggtcgacatggtcgtggcttaccggcagaagctctccgggctcaccggcgtctgcaagatcttcttccgtaacctcgtcaagacgttccaggacggcctgttggaggtgggacctgctgttgccgccgccgccgcagccgccgtagctacaggtccggccgagagctccgacgatcctgttgatcctcttcagcctcttcatcaagacgacagctcgtag

SEQ ID NO: 1531 - DNA, 1653 bp, Oryza sativa
  N_region (560)..(560): n = any nucleotide
  N_region (577)..(577): n = any nucleotide
  N_region (690)..(691): n = any nucleotide
  N_region (716)..(716): n = any nucleotide
  N_region (718)..(718): n = any nucleotide
  N_region (721)..(721): n = any nucleotide
atggcggccgcaacggcggcgatggcggccgcaacgccgccgcgggggcggcagcagcgacggggggaagaaggggaagggggaggatgcggtggtggagctgacaccgaggaggacgcggcttcccgcgggcgtgcaacagccgggccaagtgcggaaattgaaatgtacaaggcacttgagccagcaacacgattagtgatccttaaagcaatatgtgatatacgtgttgagcaagaggatattcggaacttcatagatagttctttaaagcgtggttatgagcttcctgtgttccgtaaagaacgtattggaggagattcatatggaatctcatactggagcatctctaatcaattgatgtgctacaggtatgacgaggatcccgtccttggacatcggttatatcgtgagattaggcaagtggagtatgagaaggacccaaccaaaaaagctaaagggaagggaatctcaaatgccccagttgtatcctatcaatgggagactgttgcatgcaactttattgaatttgaattagcagcagaaaaactcttttcaantaggaacaggactgagntctcgcttggcaagaagttgaagaacaattatcttccagagatggaaaagattcacaagaagaaggagaggctgctcaaaaagcaacaaagagaagcactcctccttgacaanngcttgacagtgaatgggttcacctntntcngctctcgtcgtgaaagaaagcgtgtcacctatacttttgatgattatgagcgttcaataaatgaagccataaaaccaacaaagaaaagtgagaactcttctgagttcattactacttctaacagaagagtacacccaaaacgagagacagcgaccaatggtaggttagctggtccttcgccattatgcaatggattctatggagaatatccactaaggtcacatggctaccaaggaagtgagtgggagaaaaaacctgagactctcgatcgcaggcaaagaaaaagatctcgaaggtacacgcaagattttgttgaggctatctcggacgtcgacccaaacttcgacagtgatgatgatatcattggtgaagcagtctatgatgaggaatatcttagaagtcgaaagcaatataaggccagacttttagaactcgataaagagttccaattggaacaagttgccgatgatggtaatgatgaagtggaatatccttcgagtaccagtgaagatgaaaaggagccccaacggtacaaaagattggctacttgcaatcctcgagggaccaacttgagaactatcgatggattccaaacatgcatcacacgaagtaagcgttccacccgcccacacatgaagtatcatcagtatgatctttctggcacagatacagaattgggaaagccaggtaaaataaaggtaccagatccagatgctggttctgatgcactaaatgacatggagctctcgacaactagtcaagaccaggaggaagaaggtgctgaagtaaataaagagcggccacccctgctttctcctagcaggaataatggaagcgatgggagaagatttcttgacttaaacgaggttgcgcctgtaggcggttttgatgaaacacagagtcgcaacggcgaaaggcgaccacctggataa

SEQ ID NO: 1532 - DNA, 1653 bp, Oryza sativa
atggcggacctcgatgtctccacctccgatctggcaacactggcaaagctctccaccgacggggcccttcctccagaacaagacatggccagagaaggaggaggactagcctgttcgacaagactgctggacttccaaactcccttgactccttccctggaagcctttgcgaacgttatcggggagttgcgagaacaggggctaaccgggtatgaagtcgttcaagacttcgtcgcccgacgcatccagccgttgcaagctcatgcccatcccgcgtttgattatgagggggcctctgacaagacacggatatcgtcgcgggctcttcgcacggatatcgtgacgcagcgggtcaaggatgtacttatcagtcctgcttccatagccgaggaggtgccgaccccgctctgcgacaagccagcggccgccatcaattcttctgcctccctcaaggagaaaatcgcagaagagatcgccgttgcttcctctgtccctaccgtcgaggggagcagcggaaccaagaggaaaacctgggccagggcaggcggcgttaccggatctcggcagaagtccagcggctccgagagcggctatgaggtggcaactagcgggactgccgttgtcgcctctcctcgcgggaagtccgcacctgctgccgcagagttctccgagcccgcggcggcgaccacgattgcggtgccttcgtcggggccacaagactggtccgagatgatggccgagtgccgccgcctttttgagaacacttctcgggatgtcggggcccagatggaccgcctaacgacccgcgcgatgtcattggatgggagggtggcgcagctggagacggagctcgaagtcgcttgggacgacctccagaagatgaaggagatcgtggctggcaatgagatgcaacgcctgggagtggagaataagatgaacgaccttcaagaccacatcttctccatccgcgaccagctccggaagagcttcaccagcttgcaccagctagccccggagtgtggcgtgaagtcttccgtctctgcgcaccctaacgtgacctctctgacatcggtgcttggcgaattggcaacaaagatggaggccatcccgtcgaagcatgtcgccagggtcttggaggagatctgcaacgggatccacactggggtttgtcatgtcctctcttgtgtgaagctagctctccccaacgtcgatcttaaagagatcttatcgaagggggctgctgatgccacgcgcgaggacgtgatggccgatgtggtggatctccaggagaccgtcctcccccttttcgagaaagatgttgatttcgaggatgtccagcagggcggacgtcccgatgtcgatgcgatgaaccaaccctcgttaaatctcaagggtgaactcgccgagcgagatcgacaagttctatactggaggacgaagtttgagggggcagagctcgagcggtccatggtggtcgtgaagaaagatcatgctgttgaaatgctccgagggtgcgaggtctggttgaactcgtatctaaagagctgttgcagcgccatgtcggagatctgccgacaactcaaggttgaatgcgcagagcccgaggagacaaaggccgtgtatttgtcctggatgaggggtgcgtgtgcctag

SEQ ID NO: 1533 - DNA, 1638 bp, Oryza sativa
  N_region (1596)..(1596): n = any nucleotide
atggcacccactgggtttgagatcgccagcaccaccactttccccgccaccacccaaatctccttcggcgcatttgacttcctcgtcgacagcgccggcaaactccgtcagaacaacatgatcgccgccaaggccctcctcgacaacatgccggtcccagtcgacccggccgtgaacaccaccatcgcccaagtgaaggctatggtggaagccaccgctgttcaacacgctgatgcactgccaacgacttcaactgccggcggttcctccggcaagagacagtcccgacaaccagcctttgagttgaagcgcgtcaaggcgtcccaagcggggagttcacaccccagtctacgcaccagcgacctaagagacaagatcgaagccgggcgccggctaaacgccgacctccgtaacgtcatgaacgagcattgccgacttcgtgacgctgaaaggttgcggattcacgaggacgacttcgacgctagccgtcgtcacacagacgtccagccggacggccgcatcgtcgtccatcgaccttaccaatactaccacgaccactcaccagaccacatcccacaccgcgacgacggcgctgagggcataccggccttcaccgacaacctatgccgagtccgctggctagccaacttcaaacccataggcatcgacaaatacgatggcaagaccgaccccaacgcatggctcgccgtctactccatcgccattcaagctaccgggggcgaccaggtggtcatagcgaaactacctgccgggctaccaaggtacaccatcaacagctgggccgagctgaagggacagttcatcgccaactttcaaggcactttccctcacccgggcacccagtgggacctctaccgaattgtccaaggccacaacgaatgcttctccgactacattcgctgcttcacggaacggtgcaacaccatcccacacgtcaccgacacagaggtgatggccgccttccaacaaggctgcaagaacgaagacttcatcaagtggtgggcctgcaagacgtcactcggagggtgcgccgctctcaccgtccgacagatgttcgaccacgccaacaaggacgccaactccgagctagcagtctacgcccaaatcaagaggaggccttcgtaccagccgcgtcgagaaagcaactcctcccgtagtaggccacccaagtgcaagagtgatgataaagtcaacaccatcgggcgcagcaacgcccagcgcaagttccgccaacccaagaaagacgacttcgacaggatgatggacggtccatgcctataccaccccgagctcaagcactccgctaagcaatgctggctactcaaacagtatgcccagcaattggccgacaagagtggctcaggaggaagaacacacgatccctctcaagacggcgacaagaccaagtcacaagctttctcgagccctcacgccgagctcaaccatatctacggctgccccgatgcatacgagtcccgacgcaagcataagttaacgcaatctctgacacaccgcaatatctacggtggtctaagacctcgatcacattcgatcgatccgaccacctcgaccacntcccccacccaggtcgctatccactcgtcctcgatccgatag

SEQ ID NO: 1534 - DNA, 1611 bp, Oryza sativa
  N_region (51)..(51): n = any nucleotide
  N_region (107)..(107): n = any nucleotide
  N_region (171)..(171): n = any nucleotide
  N_region (904)..(904): n = any nucleotide
  N_region (915)..(915): n = any nucleotide
  N_region (957)..(957): n = any nucleotide
  N_region (977)..(977): n = any nucleotide
  N_region (988)..(988): n = any nucleotide
  N_region (1039)..(1039): n = any nucleotide
atgcacttttaccgcggtagcttatgcttcttcgcactgagctccctccantccactcactggaactggaagcttacgagtgttcgtccaatgccacggcgtgccgntttcgccatgatgaacgtggtggccatcgggctcgtgctctccaccctggccgcggccggcgtntggtcgccggcgccgacgccaccgccgtccacggccggcgagcacgtcgtccgggagggacgccgcgtggtcatcgtcgagtacgagcgggagcacccgctgtaccccggcgacgccgtgaaggagacgcacgtcctgccccctgactccctcgacggcggcgagggcaggctcacggacaaggccaggggcgcagtctccgacgcggccgacagggtggccgacgcggcggagggcggcaaggagaagatgtccgacgccaaggagagcgcgacggggaaggtgttcggcgcggtgaagcggtgcaaggacaggctctgcggcgcggccagggaggcggaggagggcgcgaaggacaaggcgtcggcaggcgagcacggcgcggaggaggcggcgagaggtgcagaggaggcgctctcgcatgctaaggagatagctgaggacaaggtgttcgacgctgcgtccaaagtgaaggagaccgccgtgggagccaaggacaaggtctccgaagcggcgggcaaagccaaggagagggcgtctcacgtccagcacggagcagcagagaccgtgaggaatgccaaggacaaggtctctcacgccgcgagacatgcccgggagagcgctagggagcgcgccatggacgccaaggacagggtctccgacgtcgccgagagagccgagcagtgcacggaggacgccgcggggcgcgcggcgcaaaaggcggcgcgggccnaggaggccgtnaaggcaaaggccggcaaggcggccagcaacctctccgacatngcgcggagggcgcgcgaacntggcgtccgangccgccgcgcacctcctcggcggcgggcccagggaggcggcgcgcaccgcnacggcggtgatgcacctgctgggcagctcgccatggtgcagagcaagctgttcccgatgtacttccgcgccgtggcgtacggcgtcggcctcgcgctcgcggcgcacctgctcggccgcgagcgcagctccctcgccgcgcgcgcccagagcgtcaacctcctcgccgcgctcgccctggtcctcgccaacatgctgctcctggagccaaaagccaccaaagtgatgttcgagaggatgaaggtggagaaggaggaaggcagggggagggacatggccgacatcgtcgacccgccaacggtcaccgtcgcggcgggcaacacggccaccaccaccaccgttcccacggcggcggcgcgcaagccggcaggcaacaacaatatggcggcgaagtcggcggcggcggcggcgccggtggacgagcagacgtccaagagccgggtggcgacgctgaaccagcggctcaagaagctgaacggctactcgtctctgtgcaacgtgctgtgcctgatggcgctgacgtggcacctcgtgcacctggcacgtcgcctccagatagccagcgtctgctag

SEQ ID NO: 1535 - DNA, 1593 bp, Oryza sativa
atgacaagattacccctcgccccttccaccttctcgcagccacacctcctcctctttcccctctcctccctctccactccacacgccgtactcgcctccgtcttcccccccgatctgcgggcgcgcgagctcggagcgtccttccccgcgcgcgccgcggccaccgccgagagagtggcctcctcctcctcctcccttccttcccgcgtggcctgggcctgcggttaccccgcgcgcacggccgacgacgactgcgacggcgacgaaggcgagctggtttcggagcgcgacgcggccgacctgctcccccatctggttcgaatcgaaaggtctagtggctctaaggagtctcaaaattatgatagcaacaaccagaaggttcatcctcaaccaattgacgaaaacatgaatcagaacatgggctcaatggacaccatgattggaaggatattcaacaatatatcctctttaaagtctgcatacattcagctgcaggaagctcacaccccatatgacccagacaagatccaggctgcagatcagcttgtcatagaggagctcacgaagctctcagagctcaagcatgcttacagagaaaagaatcctaagcctgtagcggcaacacctcaagatgcacggctgctttctgaaatacaagagcaacagaacttgctgaagacatatgaggtcatggtaaagaagttccagtcccaaatccagactagagatactgagataacacatttacagcagcaaatcgatgaggctaaacttcggaaatcaaagcttgagaagaaactgaaacaaaggggcttactcaacaaggaatctgaggaatctgatgatgaagacaactacttttccatcgagttgacaccaagtttatttacatctgctgttgataatgcataccaatctatacatgatttttcaaagcctttgatcaacatgatgaaagctgcagggtgggatcttgatgctgctgctaatgcaattgaacctgctgtggtttacacaaggagggctcacaaaaagtatgctttcgagtcatatatttgccaaagaatgtttggtggtttccaagaagagagcttttctgttaaggctgctaacattactgtttccaatgaggctttcttccatcagttccttgcagtacgagccatggatcctttggatgtcttgagccaaaatcctgattcggtttttgggaagttttgcagaagcaagtacctattacttgtgcacccaaaaatggaaggctctttctttggtaacatggatcagagaaactatgtaatgagcggtggccatccgaggacacctttctatcaagcatttctgaagttagcgaagtcgatatggttactgcacaggctggcatactcctttgatccaaaagtcaaggtctttcaagtgaagaaggggagtgacttctccgaaattcacatggaaagtgttgtcaagaacatcatcctagatgaaggtgcagagaggcctaaagttggcctaatggtgatgcctgggttcttgattgggactagtgtcatacaatctcgggtgtatctttcaggtgtcaagtctgctgattga

SEQ ID NO: 1536 - DNA, 1566 bp, Oryza sativa
atggcatgggcagggatggttcaaagggcggcggccatggagcacacagctggtgttcatgtgcccggcggcatgcagcctgtcaggagcggtgaggttggaaacaatggcattgtcgcaacgtcccctggatggaggacggagggagtagcacgatgtggttttgacagcaatctcgagcggaaaatcgagggaacgatgcatggagacgttaatgcacggcagacggcagatgcatcggcgcatcagcgatggacggtgctggttgattgtgatatatgccgatcgatgccgccgtccccttttctctcgtggcggaaaagcaaattaaacagccggccggtgcacacatacaacgcacgcggcaacggcggcgaggcgagacgcgcggacgcttgccgactggcgactgatgacgactcgattggcggccgaggtcgtgtgcccaccgcggcggtcttgctctgggccgaattggacggagagagaaatatgtctaacatgcaaagcccagtcatcacgtcagccaaagctggacgctatactgcttgggatctcaagctgagccctgtgcgttgtattgtactgggccggtcgctggtctgtgctgttggcaaagctgcatgggctgcccctggttcgccgagtggtctcactgaccatgcaggctctgagccggaatggcctcgcagaaggaataaggtgtgcaccttagtcatctgcacgggaagagcgattggcaagccaataaatggaggaagaagggaagccgagggcgaagatccaccacctgcgccacctacaaagacgactccaacgacctgcgttaacaactccgatgacctgcgagagaacgaatggatctggcatgatctgtttagctcgtggccagtaccagaagggaagggtggaaagagaaaaaaaaggtgttatgccaatgacaaatggggcacaggtctaaaagggcacactttggccatacgagtctactgtactaaataccctaaggccattcacaggcacctaggtgtcattctcccttatacagccagctcaaagattctcctccacctaggcatagctcggagcctcgccaagaacagggagccaatttttgctccctattattcgccagaatcgcagcttttgggccacaagagaatagatgaagaagggaggggaggggagaagcgccgatgccatcgtcctccccgatctgcgccggacggggagaggaagccgcggtgcgccagacggggagctccgcccggtgtggtcgaagcttgggccgtgccgccgcctctggccccgacgaggagagatggaggcgtggagttcggtgccgctggcgctcggacgatgacgtcgctgccttcggccccgatgaggagagatggaggcatggagctcggcgtcgctgccgctttgcttcgtctgcccgagagagtgagtggtggggaaagtgtgagaggagagagagggagagataaaacccagttagaagcccaagcgcggcattttccaggacacactgtgagtagtttgcaagatatgaacatgacaaag

SEQ ID NO: 1537 - DNA, 1563 bp, Oryza sativa
  N_region (354)..(354): n = any nucleotide
  N_region (776)..(776): n = any nucleotide
atgcgctcccgatctctcctcctcgtcgccctcgccacccttcttctccacgcctccgcctccgcctccgacgacgacctcgactacctcatcgacaacgccgacgacatccccgccaacgaccccgacggctggctccaggagggctcccccgacgacgacgacgacgacgacctcttccaccatggccaggcccaggaccatcccatagatgagacccacgtcttcctcctctccgccgccaacttctccgacttcctcgcctcccaccgccatgtcatggtcgagttctacgccccctggtgcgcccattgccaggcgctcgccccagactacgccgccgccgccgccganctctcccctcttgcccatcaagtcgccctcgccaaggtcgacgccaccgaggacactgatctcgcccagaagtacgacgtccagggcttccccaccatcctcttcttcatcgacggcgttcccaaggactacaacggcgcaagaaccaaggaagccatcgtgtcgtgggtcaacaagaagctagctcccggggtgcaaaacatcaccaccgtcgacgaggcggagaagatactcaccggggaggacaaggccattcttgccgtcctcgactccctatcgggtgctcacagtgatgagattgctgctgcttcgaggctggaagatgctatcaacttttaccagacttccaatcctgatgttgccaagctttttcaccttgacccagcggccaagcgcccgtccttagtcctgctcaagaaacnagaaggaggagaaattttactatttgttgttgcaaacgaatcgtcgaaatttctgcccatctttaaggaagcatcaaaatcattcaaggggaagcttttgtttgtctttgtggagcgtgacaatgaggaagtaggtgaaccagttgccaactactttggtattactggacaagagaccacagttcttgcttacactgggaatgaagatgctaggaattttttccttgatggtgaaatatcgagatttgctgaggatttcttagaggaaaagctcacaccgttctacaagtctgaacctgtacctgaatctaatgaaggagatgtcaaaattgttgttggaaaaaacctagatcagattgttttggatgaatcaaaagatgcccttttggaggtatgttcttcctggaagatatatgcaccatggtgtgggcattgtcaggaactggagcctacctacaacaagctaggaaagcatctccgtggcattgactcccttgtaatagctaaaatggatggcactgccaatgagcatccacgtgcaaagcctgatggattcccaacgatcctcttttatccagcaggaaagaaaagttttgagcctattacttttgagggggaccgtacggtggtggagatgtacaagtttatcaagaagcacgctagcatccctttcaaactgaagcggccggattcgtcagcaacgaaaacagagaaggatcagagcacagcttcaactaatttgaggggggagaggagttccggtacaaatttcaaggatgagttgtag

SEQ ID NO: 1538 - DNA, 1551 bp, Oryza sativa
  N_region (79)..(79): n = any nucleotide
atggagaccggaaaacgcgcgcgtcttggtgtccacccacagctacggcgcatactcgttcgacacggcgagcgccgcntggagaaggccggcgactgggcgctgccctttcgcggccgcgccgagtacgtccccgagcacggcctctggttcggcctctccgcggcggacgacggcgtgctcggcgcgtgggacctgtccgcttccaccgtcgcacagccgcagccgccgccggcggcgcaacccgggtgcggggtcttcgaggtgccggagccggaggcgccgtacggcacgaacgtcgtgcacctcggcggcggcaagctgtgcgtcgccaagctgtacatggtcgcgcgcccggggacctgcagctgtccttgctgcgtcggcgaggaggacatgatgaaatttgccatgctcaccggcgtcgaggtggcgcgcggcggccgtggcggggagctcagcatcgtcaagcacaagtcgtgccgttacagcttcggagcaaacggggtcaacgttcacgtactgcgcacggacggactcgtcttccttccctccgcgtctctctcggttttcgccctgtcctgccccaccgccgccgccgccgccgcctgcctccggacgagctccaccgacggcaacccggccggctttgcgacgacgacgacgatgatccggcggttcctctacatggtcgacctctgcggcgacaactcgctcacccagaggctacgccgcatcgacacgtcacgtctcttctaccccaaggatcaactgccccgagcgtcgccgtcgtcgtcggcggcggcggcggcggtggaggacgctcgcctgcctccagccgccatgggcttcagcgcgtcgatgaacttcatgcgcacgagcgacgacaagatcgtcaccgtcgacgacaccggccgccgcgccatcctctacgaccccgccgcgcacaccgtccgctcgttgccccccatggcatcgcccaagttcttgaccgtgtcgctcgccgtcgccggcgacctgtacgtcatggtgacgccacctcatcctgacaaggtcggcggcggcgagggacggcggccggagtattcgttcgaggcgctcgtccaccgtgaacgccgttccgggctgccgttccgcggccgcgccgagcatgtccccgagcacggcctgtgcgtcggcttcctggagatggacgacaccgtcctcgccgcgtgggacgtgtccgcgtccccacagccgcgggcgccggcggcgagcgtgcagtcgaaggggttctcggtggcgagccccggcgagtggaagggcttggcggcgccgcgggaggtcgcgtcgcacgtcgtgcacctcggcggcggcaagctgtgcgtcgccaaggtgttctgggtcgttcgccgcgggacgtgcagctacccttgctgcgtcggcgagcacgacaagatgaaattctccatgctcaccggcgtcgaggtggcgcccggcggcggccatggcgggaagccccgcatcgtcaagcacaagtcgtgccgttatagattcggtgaaccaatctag

SEQ ID NO: 1539 - DNA, 1530 bp, Oryza sativa
atggggcctacaagtcagtcgaacaaaagtaaaaatagtggtacccacatcctttccatccacggcgccttcttctctctccctcccggccatccttcctcgccggccggcgagcgcgcacggagaaggaaaaaggcgccggccggtgagcacgcacggagaaggaaagaggcgccggccggcgaggggggcggagaggagttgcgggaggccgtgatgctcgtggcgtgcgccgggaaccccgccatcgtgaggctccgcgagatgatttgccacccggagaccagcaagctccacctcgtcatggactacgtcggcgtgaagcagatgctcgccggcggggtcatccacggcgacatcaagccgggcaacgtcctcgtcggcggcgtcgatggctgcgttaggatctgcgacttgggcctcagcaagtcggccgcggcgccgccgccgcggacgcagctggtcggcacgctctgctcaccaatcgaggagcaccatcgcctcatcgagctgtggcgagacgatggccagcttggcctcgtgggcttggtgctgctctggccggatctcgacaagaatgttagacggagctgtaacgccgcgaggagggtgggcccgacgtcccgcggggacgcgactcctcgtttcccgcgcaactccctcccacgattttgccttgccttcgccttttcctccaaatccctagcgatgccgctgccgccggcggagcgccgcctcaccgtcgccgacctcctccgcatacgccgccccaccaccggcgccgcctccctcgtctcctcctccccctccacctcgaccgccccgcctccccgcaagaagcccaggctccccgccgccgcactgaccccgacccctcgtagcacggcgcccttcgcgcccatcccccaccgcgtcctcctcgccggcgtgctctcgctccccgcgtccggctcccccgtcgcgtgccgcagccactgcctctcgctctccgactcccctcctcccgcctcctccgcctccgtctgctgctacctcctcgacttcgaccccgacgccgtcgaccgcgagatccacgtcctcgcctggaactacctcccgtccctccaccacggcggcgccggcgtgctcgaggtggtccgctggcgcctggcggaggagggcacgcccgcacctggctctggcttcctgaagacgattccgctcgattgcgtcgatgcggagcctgattcgggcacccatggccatgtgtttggggtggtgaggtcggtgagcgtggtgttcagcgtgccgcgtgctgggcagaagagtaatgcaggtggaggtgacaattcggtcgggtttatcgcggagatgatgtgctgcgcgtgccgtcgatgcagggtgttacctccagaatctgaccaggatcacaagtttgagctcgagaagtttgtgtactttgtggattccgcaagctggtggcggccggtgctggcgcggatggtcgggaggcctgtgtctgtctcggggttgaagaaaagatttctgtga

SEQ ID NO: 1540 - DNA, 1488 bp, Oryza sativa
  N_region (334)..(334): n = any nucleotide
  N_region (361)..(361): n = any nucleotide
  N_region (575)..(575): n = any nucleotide
  N_region (578)..(578): n = any nucleotide
  N_region (669)..(669): n = any nucleotide
  N_region (726)..(726): n = any nucleotide
  N_region (768)..(768): n = any nucleotide
  N_region (1426)..(1426): n = any nucleotide
atgagcggcaatccatcgttctcgcagctcggtgcggtggacgccgccatgaacggcggctacttcatggcggcgagcggcaatggcgccgacgtgccgctgttccatccggccatggcgccgccgcatgatcacggcgggagcttcggctacggcgacgcggcggcggcggcgatggacgtcggcgcgcacttcgcggcggcgaacaacctcgtgctcgcgtccctggcgacccagctgttcggcgccgcgccggcggcggcggcgcacgggcatggcgactacctcggcgcgacgacgccgccggaggaggagatgggggccgggtacgacntcgccgtcggcgacagctccggcggcncgttgagcctcgcgtgcctcggccacggccagccgggcgacatggcggcgggttgttgctcgacttcggcgaggaagccgagctgcaactggagcagcagtaacgccggtgtgcacggtggttcgtattacctcgccggggtgccggaggctgccggcttcgtgtccgcggcggcggcggcgagcgagctgtcgctgagcctgtgctccaatgntcntcggcggcgagccgttccgggtgacgcagatgagcagggtggtggtggtggagcccgagccgccgtcgtaccgtactacccggcggcgaanttcgccgtggtggtggcgcggtcccgatacgccgcggtggcgcagcaggtgctcaangacgccgtcggctgcgtgctgggcggcgtcgcggacgccgcngccgactcggccagcggcgtcgacagcggcagctcgaggccgtcgagctgctcggtggccggcggcgcgccgtcgtccgccgtgagctccaacaaccagctcatcgcctcctccggcgagcacacgcacggcggcggcgacgcttcggctcagcggctcaggagcgagctcctcaccatgctccagctggtgagctcgcccttctccacacgactcccgaggcatcagttcaagcaaatttcgtactaccatttcgaatcaaatttgaaaccatcttttgacgacgatacgaattcaaatgcgcagatggatcagaagtacaaccaatgcctcgacgagatccagagcacgacggcgaggttcaacaccctgacgcacgccacggcgcgcgccgccgggatgagcagcagcagcatctgcgcgccgttcgcgcaccgcgccgtgtcggcaatgtaccacggcctgaggcgccgcattgccggcgagatcatgtccgccgccgccgcggccggcaggccttgccgcggcggcgagtcgtcgtcggcggtgaccggcggcgagagggagcggagctgggagtcggcgttcatccagaagcactgggcggtgcagcagctgcggcgcggcgagcagcagtgctggcggccgcagcgcggcntcccggagaagtccgtcgccgtcctcaaggcctggatgttcgagaacttcctccgcccgtaa

SEQ ID NO: 1541 - DNA, 1479 bp, Oryza sativa
atggtaatactcaatgaagacctactagctgcacccacccattatttgttaagtaccgctgccgacatgtccaccgttgacgcctcccccagtcaacatgttgatgaagatgaagtagacattgatgaatatctcaccttagtccttgtaggttctacggtcctcggcaaaaggggcgtagaaatctgcaagatttatatcttaagagaacaagctaaggagcatcgagacgtacaaatcttggaatattccttcaccaacgacatcttcgagaaactcatccgaggattgccaaacttgccgggaagttgggcgtgctccatagccagctgtgaggcagatcatgggggatccccaactagtctgaagttgaaaggacgtggacaagacaccagcgctgagtcacctaggactagtgacgccttggacacgcgtcacacatgcctcgcaccacttgatttatccaagcaagtggagaagcaacggtggcactgtttcgggcaagtcgggtctcgtcaggcccaccacgcaccacgtggcgagcacactggatgttgtaaaaaaatgttcttaatggtgagaaggctaaatcgcaggagatttaatcttgtttataaggatgcacagaagaataatgattgtttacacccaaatttggcacctaggattaaaataggaaagattgccaaaatttgtaagtctaccggtttcctccgagtgggccggtctgaccgccgtgtgttgagcggatcaccgcaaggcttaaggtgctgcgatcgtgcttgtcaacttgtcaaaaaagttgccaacacgatttttggcaactccgctggggaggagatccgttcatcgtcaactcaatttcgacttcgtcatgacgaagccgccatccaagacggaggtggagccatcaatatgataccggtcacattggatgacttcgaaggagaagaccgcaaagctatggaggagtacatcaacgagctcacacgggaggcgttgatgagggcaagcactaggactcgtcaaggcgtgatcatcaagcccgggccacgtcctaagctcgctcctgatttgatcaaacgggtagtagaaccaatggagcgacgcacacggccggtcagaccgcaacatagccgtcggtccgaccggccagacagccggtcagaacgggtactaccccggcggtcagaccgggactcaggctggtccgaccacgcctctggatgccggtcagaccgggccctgggccgaacatttgatcctcctatatctactactgcaaataatccccaagttcccccacatgttcctaatgcttataatgacgttactagggggtatcctcctgatactagacaaagccaatataatcatattgcgccacaaacacaacctattaggccaccaaatccaccgccaaatcaacaagggcctaataatatggaggatataattagtgagattattaggaattga

SEQ ID NO: 1542 - DNA, 1362 bp, Oryza sativa
atggcgctgaattactcgtcgtgctcgctcaccagctcgttcctgatgaacgaggactgcgctggcatgatgtgtgggtgcgggtgctggtcggaggaggcctcgccgctgtcatccggtggggtgaactccctgtggtgggatgagctggagtttgagctggagctggaagaggaagaggagttcgaccctgtggacctcttgcctaccgaccccttcggcatgaacctggagaccacgttcaccgcggcgatcgccagttgcattgaggacctcacagtcatgtccagtgctgggcgttttggagacagccgcgatgatgctgtttttgccgacctgagttattacttgaataaggcttttgttctatcaccggagtttcagtttggtggctatcggggtgtttttgaaggccccttggggtttggaggcctttctgctggtgaaggtgattcttttgggttcatgaagaacccttcttcctcaggaaatgctgatgattcttttgggttcgtggagacccctcctacctctggaaatgctgcattggagtgcggcgatgcagttgaagttgttcctgtccaggagggaggagttccacatgagggaatgctgtttgcccttgactaccttggccttcgtgacatcctctctgttgagagagtgtgtaagacattgcattcggctgtcagaaatgagcccttactgtggaagtccatccacattgaaggggatttgcgccagagaatttctgatgctggtcttctacacctgacacagaagtgcccagatactttgcagtgtctaagtattgcgtgctgcgtaaatatcacagaccaggggctgaaggctgttttagaaagtaatccaagattaacaaagctgagcattttgggctgcccacggttaactttggatggccttatttccaatctcaagtcatttaatacgaaggcggtgtttggaattaagcacctcagagttggaacactcttcagtttacgaaaggagcagtacgaagagttattatccttgttgaataccgacaagacacaggaggtgcataaccgggggccaagattccttcatgctaatcggtttttatcagattgcaatgatggatatgctcttgatattgagatgtgccctatttgtcagaactacaaacttgtttatgattgcccagatgaaggatgtgatgacagaagatctggtaattgcaaaggttgtactgtttgcatactgagatgttatgagtgtggaaggtgtgtagacaagttggcattcaaggagtcattttctctggactgggtttgccctaattgtcaagagaagaaggatctgtctcccccaatgaaatag

SEQ ID NO: 1543 - DNA, 1346 bp, Oryza sativa
  N_region (623)..(623): n = any nucleotide
  N_region (654)..(654): n = any nucleotide
  N_region (1136)..(1136): n = any nucleotide
gagataatagaaggttgttagggttcgttggaggacgttcgatctctttaaattcgggtgctctgcctcgccatcgattcggttgggacttgggagagatcgatcggagatgtcgtcgtcgagctcgccgtgcgcggcgtgcaagctgctgcggcggaagtgcacgcaggggtgctgtgttcgcgccctacttcccgccggaccagccggccaagttcgccaacgtgcacaaggtgttcggcgcgagcaacgtgacgaagctgctcaacgacctgcagccggagcagcgggaggacgccgtgaactcgctggcgtacgaggccgaggcgcgcctccgcgaccccgtctacggctgcgtcgcctacatctccatcctccagctcaggatcaagcaggtgcgcgaccagatcgtcgacgcgcgcaaggagctcgccgcctacatcggccccaccgccttcgcccccgtcgtcgccgccgccgcgccgcacacgcactacctcccccccgccgactaccaccaccagcagctccaagcccaaggtggtggtggtggtgctgggatgggcgccgccggctacgcgcaccaggtggtgcagcaccagatggccggcctccagtgcagngaacccgcaccgcaccgcaccgcacaccacnatcaccatcagcagatggtgaacgcgcagcacatggcctcgtcgaggtcgcgcgggaccaggacatgctgcgagcgcgccaggccggccacgcaaaagccggcgccaccgtcgcggtcgaggcgccagggtcgtcgtcgctcaacgccgacaccttcgacggcggcccgttcctccttcgccagcagccgccctcgtcggtgcagaccgagccggcaatggccctcccgtaccacatggagccgtcccgccgcagccgtcatcgggccactcgcacgacgaggtctcgcagcagcagcaccaccaccaccacaccggcaccaccacacggacggcagcgacgaggggagcgcggcgccgccccgccgggctgaccgccgcgcgcccggccccgtctccgtctccgtcgccgtgcgtgcgtgtgtgtgttccatgattccatcaaccttcctctcgatccatctagttcgtttcggtttctcngcagctgttaattccttcatcgatcggtcacaagtcttttcgtcttccctcatctcatatgatatcgagcaaactgacacccatgcctccctgaaagcatccatgacttctcaaggcgagcgaggtggtgatctttctcaaggggccggtttgaagctgcagcaatgcgcatctgactcactgctgcatatatcagagattttgacatag

SEQ ID NO: 1544 - DNA, 1344 bp, Oryza sativa
  N_region (114)..(114): n = any nucleotide
  N_region (384)..(384): n = any nucleotide
  N_region (903)..(903): n = any nucleotide
atgggcagggcgggtaggtggctgcgaagcttcttgccggggaagaaggacagggcgagggcgccggcgccggagaaggagcaggcggtggcggtggtgacgacgccgggggcnaaggagaagaggcggtggagcttccggaggccggcggtgaaggatggtggtggtggtttcttggagccgcgggtggaccccgaccagcacgccgtcgcggtggccatagccacggcggcggcggcggaggcggcggtggcggccaagcaggcggcggcggccgtagtccggctcgccgggtcgtcgaggcggggcgtcgtcgtcgtcggcattgaggaggcggcggcgatcaagatccagtgcgtcttcaggtcctacctggcgaggaangcgctgtgcgcgctgagggggctcgtgaagctgcaggcgctggtgcgcggccacctcgtgcggcggcaggcgagcaacacgctccgctgcatgcaggcgctcgtcgccgcccagcaccgggcgcgcgccgcgcgcctccgcctcctcgacgacgacaaggagaagcctctcctccacaccccgaggatgatgcccacccgccgctcgccgcaccacccccgcttccgtcatcagcagcagcaacaggaggcggaggagaacgtgaagatcgtggaggtggacaccggatttggcggcggcggcggcagcggcgaggcgcactgcacgccgaggacgtcgtcccggcggagcagctgctacgcgacgccgctgtgccgcacgccgtccaaggtggagctgtaccagaaggtgtcgccgacgccgtcggcgctgacggacgccagcgcgcggacgtacagcggccggtacgacgacttctccttctccacggcgcggaacagcccgtggcaccaccaccangcctccgacgcgccgtgcaagccgcatcacccgcaccacggcaacggcgaccacccgctcttcttccccaactacatggcgaacacggagtcgtcgcgcgccaaggcgcggtcgcagagcgcgccgcggcagcgcgcgtcggtgtcgtcgtccgccagcgaggcgtcgtcggtgcggtgggagaggcaggcgagcgcccggcgcagggcgtcgctggaggcgcaggcggcgtcggcgccacccaacaagtgcggcgccgccatgatggcgcgcgtgcagcggtgcccgtcgcaggcgagcgcgccggcgtcgtgcccgtgggggtcgaggctgccggaccacgacagcgagtgcgggtcgacgagcaccgtgctcaccgccgccaccaccacctactgctggtcgctcgccaccgacaacgccgccgccgccatggcatga

SEQ ID NO: 1545 - DNA, 1284 bp, Oryza sativa
atgcggcatcatcgcgtccaacaaccgcgggttcaaactctgtgtgttgccaaggaacaggatgcagcgacaacatcagatcggttcgtaggatatgttggaactaatccaaacgagtcgtccgtgctacacctcttggaagactacgaatcctcttcggagtcaccacgagatgtaaacatggtcggcaacactgagacgagtacgtccgcagcagcgagaacgcccgctcagcagttacgaaccctgcatgcgatattgagtgaaagtccttttgatccggtgataaacccagacgtcgaccaatgggcggcgcgactgcgggagaccgtgaccaacctcaatgcctgtgggatacacggtacccagatacagagaaagacatacactgaacatagggtattacctcatcttgagggcctgaaccaggataaacacctgcgtcaccatctctccttgatcttgcacaccccaaatcgggagaccgtgaccaacctcaatgccgtatttgtagacgcagcagttgagccatcgccaggtgatccgcccgaggagacggtgaaccatccgtcgacaacgcggagggagaaaaccccaccggaggacgaccttccggaaaccgatcacctcggccgaggcgagatcctactccaccacgtcacgagaaatgcgatcttcgcgaacacttggacaaccgctggagagacagaagagatcgcgacaataacgatcgtcatcgacatcgttctccttctctcagcagggataacactactcactgacgacaccgtcaccgctctccttcgcgacgaggaaggaacgatggtcgaggaggcgcccctaacgaagatcgagaccggtgggcccctagtgaccgccgcaacgacatcaataacgacaaccaacgagatcagggggctaatcgccgagatcgaaattcccaatctcccgaccccggtcgagatcgaggacacaatcgtcgttcgagaagccgggcccctgagccaagcgactcctcatcctcatcttcgtcatcttcttcgtcggatcggcctccccgacgacgtcatgaccgcgggctgccttccatcccagggagtcagtgcagagcattcacacccgcactccgggatgtgcgatggcccgagaagttccaaccaggcgcaatcgagaaatacgatggaagcacagacccagaagaatttccgcaagtctactccacaatcctctatactgcggatgcagacgataacgcgctggcaaactatctgccggctgcgttaa

SEQ ID NO: 1546 - DNA, 1263 bp, Oryza sativa
  N_region (293)..(293): n = any nucleotide
atggagttcccccgccgcggccaatcctcccatcccgccgacgccgacgacgacgaccgccgccgcctccgcttccctgactccaccccgccgagcggacgcgaagctaggccggctccggcgcagggggacgcggtgacggcggcgctggggcggcggagggaggagctgctgtgggagctccacaagacgaagatccaccgggagatgctcctgtgccagctggtcgagacggagcgcgccatggcggcgcgcctcgccgcggcccgcggccaccccggcaaggcaacggntcccgagatcaccccgtggtggcgccggagcccgtcggcagtgacacccccggtgtacccgcacgtggagcgctctccgtcgccgccgattgcgcggggatggccggccgacgatgacgagcggcaggaacgtggggagccatccgggtcgccggcgatggctcctccggtgcggcatgcacctcatgtcgaacagtccacaccagtgccgatcaagtcgcctgcggcggaggccgtttgtatgccatctgggtcaccggcgatggctcctccagtgcagcctgctcctcatgtcgagcagtccacaccattgccggccaaggagcctgcggcggtggcgaaggtggaggcagatgccattgtccagactgcggccaatgctgatgccgaccaggcgttgctcggcaagggggcgacaccaggagggcaaggttgcactggtcagaagggtgaggaaggtgatttcgccatcgacggccatggcaggcagctgttgggtgagatgaatgtaagcaagagcaccgagcagccaaaacctacagaatccatctctggaggccacaccgatgaacttgtccagaagcgttatcaagataataagccggcagatcaggagattgcaacattggacaagcagaagcgacttacaccagaaaggagatcctctggtgtgaagaggcagctggcttcaggaacctcactggcaaagaagccgaggtcccaggggagctccatcacttgctccctctgcaaggtcaccatgacttctcccagggcgctggttgagcaccgggcatccctcctgcaccggtctaacctcgcgccattgcgatcggggaacaaggccaccactgaagctgcgcagcccgcggagaagaagaccgagaagccagaggcatctgaatggaacagcagtgcacaccaccaccagaatcggatgtactactgcgatatatgcgaaactatgtag

SEQ ID NO: 1547 - DNA, 1245 bp, Oryza sativa
atggatccatttgcgcgaaccaactcattgaggcggatccatgaacgctatctccttcccccttcggagagtaacactgacgctggtttttacgtctatattctggagtcaagttacagaggtggagaagtgaggagggtcttttgtccttatgcaaggcaagctgatccagctggaccatgcaaggccaggaataacttgtgtaaacttgagagagagggattcattgaatcatctccggcacaggattgtgacctctgctgcaaaatgcctgatttctgccgagagtgctgctgtgttttctgccgcagggttgttgactattcctttggaggttatagctacattaagtgtgaggcagtcctagaagagaacaaaatatgtgggcatattgggcaccttgattgtgctctccgtacttttatggctggaacagttggaggatgtattgacttggacatgcagtattgttgcagacgttgtgataacaaaacgaacttgatgctgcacgtagaaaaattcttggaaatatgccaatctcttcaatcaagggatgacattgaacctatcctgaatactggcttatgcctagtgcgtggttcaagacaaacaagagcaaaaagcttggagagcattatgagatcagcaatggcaaagctaaagtgtggggttgatcttgctgaagtttggaaaatggaagataatggtatcaactcaactccaagtgcagaagtttcccctgctaccggtggtgtaacagtgcttgggatccagcaagctccagaagaggatgctcctccagggtttccatattatgttgatttggctgacaatgatttgcagagggctgttgaaaatcttccagcttacattaccgaggatcaacacacactgtctgtcaggttcgaagattcgatagatcatgctcttaaagaactgaagagatctcaggaagcagagtacaagctggcagagcagaagctttattcccagaaggatcatgtcctgagtctttatcgtcagcttgattctgaaagatccgtccttgcagaccctatgcccttagctgatgatgatggttcactatatagtacactaatcaccaatgttatgaagcgtgtggatcaagtgaagagtgaagaggagaagctcaaggtcatgctgggaatcgctgatggatttgggaaaacgccatcaggagtcattcaggagcatttcgggctacctgctgatactgccaactga

SEQ ID NO: 1548 - DNA, 1218 bp, Oryza sativa
atggcggcggctgcggctggcgcggatgggctcctcccgggtcccaagcttgatcctagcgacgacgagctcgtcggcggctacctgctccggcgcctccagggccagcccctcccgctcgaggcggatcccctgagcgcgcggccgcggaatcttgccgcggatcacggccgcggcgacgaggccttcttcttggcggaggcgcaggccaagaacgcgaagggaaagcggcagaggagcaccgtcgaggggcagagcatgtgcgtggacggcgggaggctccgcgtccctgatgacggtcgcggcggcggcggattggctttctcgcacttcttgccgctgtcgccgtcgatcgttccctcgccagcaccgtctccccgctgctccacctccacgccgctgtccccgccgaagcttctcgcggatcacggccggggcgacgaggccgccttcttcgcggacgcgtgggccaagaacggcaagcggcagaagcagaggagcaccgtcgagggcggagggctctggcaggggcaggggatgctcgtggacggcgagaggctccgcgtcgctgatgacggcggcggcggttcggctttcttgccgccgtcgatccttccgtcgctgctgccggctccccgctgctccacgccgctctccccgtcctcgccgccgttccggccgtccagggtgatcgttcggtgggcgcggccgccgcctgggtggtgcaaactgaactttgacggctcggtgttcaacgacggctccccgcgagcgagcatcggcggcgtcatccgcgacagcgacgccggcgtggtgctcgccttcgcggagacaacggagcactggaccgtcggcgtggtggaggcccgtgctatgatcagaggcctgaggttcgcgctggcgtgcttcatcgagcggctcgtggtggagggcgacgacctggtgctggtccagctcatccgcggcgaggagacgcagacgaggatcccggcggcgatgcaggaggagatcctcaaccttctgcgatgcttcgccgaggtggatgtgcggcacatctaccgggagggaaactcggtggcccacacactgtgccggcaggcgtacgtgtgtccgggcatatggtcgcagaggggaggagggatgccggcggccgtctgggacaaggtggatgatgataggcgaggggtggtgcacgagcgcatccgcaagaacaagtag

SEQ ID NO: 1549 - DNA, 1191 bp, Oryza sativa
atgaggaagaagagagatgtatgggtggggaaaaatgtggtggaagagaaggaagaagaagccggcgaggcggcgagccggagaaggatgaatccgccggagctgatggacgacctcgtcgacgagatcctcctccgcctcccccccgacgagcccgcctgcctcgcccgcgcctccgccgtctgcaagcgctggcgccgcctcctctccgaccgggccttcctcctccgccgccgacgccgcgcgccgcctcccctgctgggtttcctccacaacctcgacaacgccgaccaccccgaccgcttcgtccccaccaccgccctcccgatccccccgccgccacccgagctccactgcgggatggccctcgactgccgccatggctgcgccctcctcgacgcctacccctccaggatcgacctcgtcgtgtggcaccccatgacgggccacctgctgcggcggcttccccgccccgacgtcccgtacctcttgtactacaacgccgcggtgctctgcgccgccgccgccgccggctgcgaccacctcgactgccacgagggccccttccgcgtcgtcgtggtgggcaccgaggaggacaacgaggcgtgggcgaccgtgtactcgtcggagtccgacgagtggagcccaccgacctccgctcgcctcgcccgaggacccgagttctgcgtcgagggcaagcccgccaccctcatcggagattcgctctacttcgccctcgtgtttggtatcggagtcgtcaagttcgacatgaagcgccatcgcctctccctcatcgatccgccggctgagctcgacgatggcttcgtgctcatgccgctggacaacgatggcgtgcttgggctcgcggccgtggaggatcacagcctcctctctgtgtggtcaatggatgtgagcctggatcatggacatgtgctaccaattggatttgtggagggtgccaatatcatcttcctgagaacagatgcgggtgtcttcacacttgagctcagatcaatgcgtgtcaccaaggtgtgcaagaatgggttcttctacgctgtcgtgccgtacacgagcttctacattcctggtgtccatctccagcagcagcacagcggacctcagatcagtaatggccgggcatggggatcgcaggctgctaacatgaggcgtggcagcagcttctcaaggtaa

SEQ ID NO: 1550 - DNA, 1188 bp, Oryza sativa
atggcctcttctcccttacccgcttttccgccgccgccgccgccgctaaatccgccggccacttcgccgtcgaggagtacctcgtggccacctgccacctcacccccgaccaggctaccaaggcctccaagtccatctcccacctcaagtccccgtccaggcccgacgccgtcgtccgccttcctcgccggcctcggcctctccgccgccgacatcgccgccgccgtcgcctacgacccgcgcctcctctgcgcggaggtcgacaggacgctcgccccgcgcctcgcggagctcgcgggcctcggcctctccccctcgcagatcgcgcgcctcgtcctcgtcgaccccgcccgcttccgccgccccaccgtcatctccaagctccagtactacgtcccgctgttcggatccttcgagaccctcctccaggcgctcaagaacaactcctacctcctcagctccgacctcgagaaggttgtcaagcccaacgtcgcgctcctgcgggagtgcgggctaggtgcttgtgatattgctaagctgtgcatcccgttgccgaggctgctcaccaccagcccagagcgtgtccgagatatggtggctcaagcagaaaacgtcggcgtgcgccgtggctccaagatgttcaggcacgctattctggccgtcgcgtacatcagcgaggaaaagatcgccgccaaaatgcagttcttgatgaagacattaaagtggtcagacgcagaggcgaggattgcggtgtccaagcttcctgtggtgctgaggagctcggaggacaagctgagccgtgtgtcggaattcttgatctctgaggtcgggttggagccggcatacattgcttacaggccggcaatgctcacttatagcctggaacgccggctcatgccccggcactgcgttctgaagtatcttaaggacaatggattgatagaatccgacaagagctactatagcgcggtccaggtgaccgaggaggtctttgtggagaaatacataagtccatacgaggacactgcgccgcaccttgctgaagactatgctgctgtatcccagcgtaaagatacccaccagattcagattgaaaggaccaaaaacaggccatgcaagtgcgcaaactgcctaattcttgccacgagtagtgagctggtaagtcctcttgcagtgttctttgcctga

SEQ ID NO: 1551 - DNA, 1155 bp, Oryza sativa
atgtcgtgctcgcgtgggtggtggaacgacctcccgtcggatctcctcgcgctcgtcgccggctgcctcacgttccaggcctacacccgcgcccgcgccgcctgcgccgccaggcgcgccgccctccccgcgatctcctcgccgtcgctcctcgtcctccacgacgaccaccgcgaacgctccagcttctccgcatggttcttgtcccccaggatctccatcgctagcttggccaccaacctgatctctacggggagggcgcagcgctgcgtcggctccggccatggctgggtcgccttcggcgacttcaatgcctccctcgtgaacgcgttcaccggcgacgagatccccttccattcgttcccggagaagcacggcgtggtgatgtcgaaggtcgtcttcgcgccgaacccgacgccggcggagttcacggcggcggcgatcaccggccacctccgcgtcacctacaccactcgcgggaacagcggatggaccgacgtcgagctcccgcgtctcggcgctatcggcggcggggactacatcgccgacgtggtgtaccacgagaaagaattcggcggcggcaagaagaagaaggtggtgtactgcctcaccggaggcggcgacgtgctcgtcctccgcctccccgccggccgccgccgccgccagcgaaggccggcgtcgttcgagccactgttcgacaaggcgagcgccgtgttctacccggcggccgcgttcgcgccaccgcacagcacgggcgacaagtacctggtggtctgcgatgacggccatctctaccagatctggatggacgaaaagatctcctatggcagtggcgccatagcatccgttctcaggtactaccctcgccgccggccgtgctggctgccggcgaaggatctcggcgggcgctcgttcttcgtcggggtgaacaacgcggtggcgctgcgcgtggatggtggcggcggcggcgcgtcggggctgagaggcaactgcgtgtactggagtgccaggtgtagtagccgggccaaggtgttcgacgtggagtccggcaagtcggcgacatgctttccggtggtcgacttggagacgggcaagtcggcgccgggctttcccggcggcgcggaagctcatagagccctctgctgctcagtgtag

SEQ ID NO: 1552 - DNA, 1131 bp, Oryza sativa
atgtttgatagcagagtggacgtacatgctcatctgatacaacgaggattcatggagggctacacatgttgggtgaagcatggagagcaagaatcacttgacgatgttgcagctgcagacagaagcggtgaaatggttgatgtggatcacgatctgatgcaagacatattacatgacgttgaggacacagcttacaacgagagagattccataaaattcagcaggaagacatcacgggttaacaggaagaaagcaagacaaaacatgcttttgagttctccccattcaccatgtgtcttcctaactgtgcgagaaggagtgctcccgaaccatggctacaaagctaggacggagttcaaagccagatgggttttgaaaggtagtggcttagagaactcgccttttgaagcggaaagcacccggtccaaatcggcagccagcaaaggtgcccgcgactcgagttatggtgacgtgaccgcaacgtcatggatgacgtgtacatccccttcattcttgaggaggcggcgacatcgtgggccaagatgtgggagagctgctggcctcgacgcggtccaagtcggtcatggtcatcgaggacgtcgacttctccctcagattgttagaccggacgcgcgcgccggcatcctaggacgacgacgactagggccatgggatactgcgacactcgctcaattttatgccaccagtgcgtttcgtggaggctactgtggacgtgccgctcgccgtggtggtgccattcagaccatccccggaggtgaagcggctatacccgagcatcgacggcgcccctgtgaaggaggagctgcaggtgcaggtgtatggtgcttggcttcgtgtctcaccatcacatcgccaacgagcagggccactgcgagcttcctggtggcatgggggctcaccacatggcagctgcccgtgggtgtggtagcgctgcccccatccgcgaccatgccgcatctcaagtcccggaccttgtcggggctcccgccgtcgcagcactggcggggatacaccaccttccagggtttgcaatttcgaaatcatgttttttgctgcaggggagcgatagaaccgaaatttccgaaaattatttcgtacgaaattttttga

SEQ ID NO: 1553 - DNA, 1128 bp, Oryza sativa
atgccggcgacagcggggcgcgtgcgcatgcccgccaacaaccgcgtccacagcagcgcggcgttgcagacccacggcatctggcagagcgccatcggctacgacccctacgccccggagaacaacaagcaccagcctccctcctcctccgtctccgccaacgccgccgccgccaacgccgccgccgcatccgccccatccgcctccgctccttcctcctcctccgccgccgcctcctccgacaacgcctataccagcttccagggcctcctcgcgctcgcccgcatcaccggctccaactccgacgagacccgcggcgcctgcaggaagtgcggccgcgtcggccacctcaccttccagtgccgcaacttcctctccgtcaaggaggacctcgacatggaggacgatattgatgccgggattcgggccgcctcgcaggccaacgcccaggccaagaagcattcaagggatgaagagaagaagacaagccgccataggagcagcagcaggggaaggtccaagcacaggaggagcaccaagaggagtgataccgaggacgacttagaggaagagaggagcaaggacaagaagaagaagagtaggcgcaagaggcatgaaagatcagatgaggacagcgagagtgattctgacaagaagaggcataggaagagcaggaaggacaggaagaggcgtaggagccatcgcaggagtgatgacacatcggatgaggatgagtctggaggcggagaaggcaccgtaagtcagaaagtagtggatcagatggtgatgaacgacatggtcagggggcaaagcggagcaaggaaaagaggggcaaagaagagtgctgaagtgggtgaggagaggaacggctcgcactgcgtgttggagaggcgtagccccgtgcgaaccggcgacgatgagctgattcgaggtgtcgacgatcatcccgagttgctccacgcgtggtcgccgctggcaaggccactacccggagctacttggttgcctccaaagcggtggcgcaagccagatccggtcgctggatccatgccaaatccgttcgtcctcgacgccttcgatggctacgttcctcgtcctcgctcgatccaccaccgccaccgaagatag

SEQ ID NO: 1554 - DNA, 1110 bp, Oryza sativa
  N_region (298)..(298): n = any nucleotide
  N_region (320)..(320): n = any nucleotide
  N_region (323)..(323): n = any nucleotide
atggcgagcaagcaccagctggggcagcaggaggcgatgcaggaggaggactacatcgacatggacctgacgagcgccgccgcggcgacggcgccgggtgagttcgagttcgacttccacatgtcggggccgctgggcggcggcggcgcccggtgggagcaggagccgctggcgtcgccggcggacgagctgttctacaaggggaagctgctgccgctgcacctgccgccgcggatacagatggtggaggagctgctcgacgggcgcgtcgtcgtcggcggcgccgggcggcggcagntcgccataagcacggcgccggngangccgtacgactcgtgcaccgcgtcgccggcgaactcgtgctacgccagcggggagctcaacgtggaggagtacttccaggagtacgcggccaggctcgccgaagccgccgcggcggcgtgcgagaagaagccgtggtcgcggaagctcaggttcatgaggcagctcaacctcggcctcaagctcaaggcctccaaggcctacatcaagacgatcttcgccgccaaaccggcgagctccggcgacgacgacgacaaggacgccattcttggcgcgacgagagaaaccaaagaactctcccatggtggccaccaccaccacagagcatggaggaggaacccgttcggccagatgagaagcaacaggtgcatcgcctcctcacagagcggcggcggccgtggttcggtcggaggagggaagcacaaagagcgcgaccacggcggccacaggaggtccttctccagcgtcatcgtccggtactcgacgtcgaacaagacgtcccctgcgccgcagtcgtcgtcgtgctcctcctcctcgtcggtgcggacgtcgagcgagtccgacggcggcgcggcggcgccggcgctgcggaggagcagcagcgcgagctcggaggtggagaacccgatccaggggctgatcgcctactgcaagaggtcgcagcagctggcgtcggtgaggaagagcgccagcgacgccggcttccggttcctctcgtcggcggcgtccaagatcgccgccgcggaatccgacggcccggaagagctcgtcgagatttgcagaggttga

SEQ ID NO: 1555 - DNA, 1103 bp, Oryza sativa
  N_region (518)..(518): n = any nucleotide
gggtggtggagatattgctgataaggacggcgccggatctgatcgacatcacggactcggccggcagcacggcgctgcactacgccgcgcagaagaacgacacgcgcatggtgagtatgctgctcgacctcaagcctgaactggccagccggcccaacgaccggcagcagtcggcgctgcacgtcgccgccgtaaacggctcgatcgcggcggcgacggagatactgcagcacagccccgatgcggcggagagtaaggacaaggacgggaggaacgcggtccatgtcgccgtgtccaatgtggacacgctcaggggcctcctcaaggtgatcggcccggcggaggtgatcaaccagggggacagcgccggcaacacgccgctgcacctcgccgccaagatggcgcacgtccagtcaacgctgacgctgctcaaggacccccgcgtcaacccctgcctcctcaaccgggacggccacaccgcgcgcagcctcgtcgaggagcgtctcgccgtcggcganatggacgcctacgtcgtctacctctgggagaagctcaagaagcaagaggagtcccggtgcaagaacctgcagcacctcccgccggtggcgacgtaccagtcgctgcgcaggcgcagccacaggtcagctggctccggcaacggtgactacttcgagctcggcgtcggcacctacaccctcgtggccactctcatcgccaccgtcaccttcgccgccaccttcaccatgcccggcggctacaaccagacctccggcctcgccatccacgccgaccgcgcggcgttcgacatcttccttgtctccaacaccgtcgccatgtgcagctccatcaccgtcgtcttctgcttcatctgggcgtggcgcgaccccgtcaagttcaacctcgaacacctgaggtgggtacacatgctcaccgtcatagcctgccttgccatgatcgtctccctcatgacctccgtctaccaagaggtggccggcgtacctggtgatcaccatcggcgcctgcactccggtcgtcgtgatactcatattagggaaggaggctttctacataccgtttgttcagaagacactgctaccggttga

SEQ ID NO: 1556 - DNA, 1095 bp, Oryza sativa
  N_region (163)..(163): n = any nucleotide
  N_region (166)..(166): n = any nucleotide
  N_region (194)..(194): n = any nucleotide
atgtggcgcgcggccgcctaccacctcctcctcctccgccgcgccgcgcatcctcctccctctccggcaaccgccacaggggcggcctgcgcgctccgccacgtgcgcctcttctccccgcctccgcatccgccgtcgtcgcggcccacggaggccaaggcgnagnttacggcggcgaaggctccgaaggcttnttccggctggtgggccttgaggcgctctaagcggcggctgagggacgggcgggaggaggtggtcgggtacggggagctcctggacgcctgcgtcgaggccggcgcggcgcgcacgcggcgtgacgcggaaggcgctggcccggggccatggacgaggccggcgtcgtgctgctgttccgcgacaaggcctacctccaccccgagaagcccattggagattcaaatgctcctatataagcacccattttctctgacctgcaatgttagtagtgttcctgaaatggataatcgaaatggacatgcacaattcaagttgatcgaattggataccaacaaaataacaacaaatgaagttttgttcaaagtggttgagcttgttagaagagctgttccgcttgcactctcaccggagaacgattcaagaaaagaagagctgaagaagctccaggagaagaaggaagagatcgacaagctggcgcacaagcaagtccggcgcatcctgtggtctggactaggtttcttcatgtgccaagttgggctcttcttccgccttactttctgggaattttcatgggatgtgatggagccaattgccttcttcacaactgcatctggcctgctcgttggttacgcatatttcctcattacctcaagggatccaacatatgaggacttcatggaaaggttgtatttgtcaagacacagaaagctttgtgccaagaatagttttgatatggcaaagtacctcgagttgcagaagcattgcaagtgtcctctggaaggacataaagatgccattttgatgccaaagagcaaaacaaacatcgtttttctgcctataaagatgtcaacgcaccgaaaaatagccaggcttgccattggtaaagaattggatgaataa

SEQ ID NO: 1557 - DNA, 1038 bp, Oryza sativa
atggagaacgccgccatcaacctcacgcaggcggcgcggcgcgtgcaaaatttggtcacgtcgtgtacgatcgccgtgggcggatacgactggctgatcgaggtcttcccggccgcttactaccacggcaccagctcccgcaactccggcccctacataaagctgcgcttcaccttgtcgagcgacggcgagcgcaccgtgtcggcgacgttcagatgccgccttgtcgatgatcatcagatcaatcaaaccgccgcgtccgcatccagctctttcaaggaggtgatagtgacatccatcttctccaatggccaaccaaaggacatgttcttggtgtcgaggagctatgcgtctgaatacagatacgtccaaccagacgactccttgctgatcgagtgcgcgatcaccgttctgctcgaagcaccagtgaacgcggcggcaagcgttccggcgcctctctccgacctgcagaagcacctcggcgagatgctgacgagcaagaatggcgccgacatcacgttcctcgtctccggcgagcctgtcgcggcgcacaggtgcgtgctcgccgcgaggtcgccggtgttcatggccgagctgttcggcgacatgaaggagaaagactcgcagagcatcgagatcaaggacatggaggcagaggtcttcaggaccctgctccacttcatctacaccgacactttgccggagcaagatgacgacgacgtcgaggctgaaacaatggcgtatggtcttctcgaagccgcggatcggtacggcgtggagaggctgatgctgatctgcgcggagaaggtgcacgctggcattagcgtggacaccgccgcgatggcgttggctctggcggagcgccatggatgtaccaagctcaaggctaggtgcatcgagttcatcttggcttctcaggagaatttccacgcagtcgctgcaacggagggttacaagcttctcatggatagctgcccctctgctctgaatgaccttctagtggctgtttttctgaggtacaaattaactgttctgtaa

SEQ ID NO: 1558 - DNA, 1029 bp, Oryza sativa
atggatgatgacgacaggaaggagaagatgcagaagctgatgccgctcccaatgcgcatcgggcagcaatctctattcggaaaggaggaaactgcccccaagccccatgagcccaacaaggtggtgtactgcaccgcctacgccggcggcgacttggttccgcccttctccgagttctacctgcagatgttcgtcgggctcctgcctttggtggatctcttctgtcgtaccttcgtggtgcgacatgccccgaaaagcaagatgagcagcctgctggagctcataggatgcgtcaccttcaccgcacgccctattcaagaattccttcacatccccatgaaggacaagtgggacgagtggcaccagaagtgggtctacatcagcgtagaatccccacgaatgcctcatcctccctgttgcctccacgatgggcctgctgtcatagaccaacgcaacaccacccgattggcgcttgagcccagttttttagtagatcatggaattggtgaaggccagggtcaccgcgtacatgatgtccgacgattttccatcgctagaagattggcacccctgaacccagaggagcccgtgcttggtggccctgaccagggaacaaggaatatggataacaatttcaagaatggctcacaaacaagtttagtcttcgggctgagcggcgtgcatggcggcgaagccaaggccggtggtgggcttctaggggttcctaggaggtgctaccgagagctaattaacctgggcaagatgtggctggaaggggcggcgaaagtgggagctcgaggcggagcgaggtcgtcgtcggccttctacccgggggcgacggtgcatgcaaaacaccggcgacagggcaaaatcggcgacgcgcaggctggggacgactatggggctcctagaggcatcttccggcgagaggacgacgcactaaaccgctcaaaggcagtggaggggcttgtgcagctcggtccggagcctatcagatcatggcatgctctggcgctggtgcgggcatga

SEQ ID NO: 1559 - DNA, 1002 bp, Oryza sativa
atggacgactcgagcctcttcttgcattgggcggtgagcacgctgcagcaccagcacccggcggccgtcgcagtcgtggccgacgacgacgccacgttcttctcgttccaggagctctgcgacaccgaggaggtggttgttgtcccggtccaggaagaagtgatcacggaagcgcatggtggtggagccagcagaatcggcctcgccgtggccgtggatgagcacggaggctggtcaaggtccccgaatccgggggccaggccgccgtctggtggatgcggcagcaataatctgcccctgatgagctgggacttcagcgccgcctcggtggcggtgcaggtgcagccgaacggcggcggcggtggcggcgcgccggagatggcgtacgggtcaccgccggcggcccggggatccaccaccaggaagacctcggcgcccacggtggggcggcggcggcgtacgcgcagctggagcacgtcgtcgcggagcggaagcggcgggagaagatcaaccagcggtttcatggagctctccgccgtcatccccaagctcaagaagatggacaaggcgacgatcctctccgacgcggcgagctacatcagggagctgcaagagaagctcaaggcgctagaggagcaggctgctgccagggtcaccgaggcagcaatggcgacaccgtcgccggcgagggcgatgaaccaccttccagttccgccggagatcgaggtgcggtgctcgccgacgaacaacgttgtgatggtgaggatccattgcgagaacggcgagggggtgatcgtgaggatcctcgccgaggtcgaggagatccacctcagaatcatcaacgccaatgtcatgccatttctggatcagggcgccacgatgatcataacgatcgctgcaaaggcaagcttcacagtcaaggcagaggagattgtaggcaggcttaactcagctttatacaaacaagacgtcagcactgctattgaggaaaacagaaactaa

SEQ ID NO: 1560 - DNA, 966 bp, Oryza sativa
atggggacaattttgggaccacctgtcagtgacccgtcgaagcctcgaaggctactagtagtactatttgtaaacagcgggtacacgcgctaccacacgccaggcaaacccacacgccgccttcccgccgcctccgctcttcttcccccaaccgcgtcgcaagcccacggcgagcgccgccgccgtcccaccgtcgccgatgacccgcggcgtcgctatggcgcacgcgaggctcctcctggcgcgctactacgtatgccaaacgcggggacgaagaactcaccgcccagccccccaccaacgccgtgtaagcataccgtcgaacacctcccgcgatggcggcccccagttggcctaccgtatccaagaaccttccgctgctgggccatggacgccgaggagcttgacgaggtaggcggaaccggcggacaacggcgctgtgagttgcgccgcggcggaggagtcgagcccgagccctcgagcggtggcaccgcaccaggcagagaaagatcgtctgagccgcgccgtcgtcgggatgtcgtcgtctacggctgcgatcggcgatccagatctgcttctcctattatttcagagctggcaaagaagatttgtgttccatgcaattctaaggatatacatgccatgccagaagattctgctaagaagatgctagaacaggtgggtggttgggaattagcaaccgaaggtgacattctgaaattgcacagagcatggaaggtgaagaattttgtaaaagggcttgaattccttcagcttgttgctgctgttgctgaggaagaaggccaccaccctgatcttcatcttgtcggttggaacaatgtgaaaattgatgtttggactcactctgtcagaggcttaactgacaatgatttcatccttgctgcgaagatcaataacctcaacttagaaggcctcttaagcaagaaagctacagtccaaaagtag

SEQ ID NO: 1561 - DNA, 945 bp, Oryza sativa
atggggtgtgccagattgttgcgacatccaatagccttagtcaacaagttcggcgagcattgcgcagccgcagagagctttttttcgcttttttcgctcttgatgtacagaagggcttcggcttcccctacccaggttctcgtggcgcacctgagcgcgaagcggtctgccttggagcggctggacgtgtaccgtcttcgccttcggaaggccgaagaggaccttcaccataaagaggacaaacgccgagtcgtgccggacgccctgaagaaggcgagcgcagagaacaagtcccttgtgggggaaaataaatctctctgcaccgacttggagggggtgaacaatagggccgccgaaagggagaggcagcttgctatggccgaagaaaaagtcaagtctcttgaggcccggcttggcccagccgaagctgctgctgaagctttggcgccgacgacagagtctgccaaacaggcttgctatactcttcggctggctctcaactaccttggggcgcatgtagaaggcgctctgggtgaagatggatcagcgttcgacttctctgagtggacgcaggatgcggccggctcagttgtcgaagcggctggcgcatacggcgactgctgcgcacgagttgccgtgggcttcatgctcagcattcttcacgaacatggttgttaccatgttgaggactttccccaaaccgtgaagaaggattggcccgaaagttcccaatccgtcacgtttgctttgaaggcctttcggaagaacttctgggaaagcggcggtaaggatggggcgaagacccggcttcgcgagcagctggagaaaatagcaagggccgaagatgccactgccgccaacactggcgaagaccccgagccgtcggggccggctgttggccgtgagggcgaaggcatggaaagccgagaccaccctgaggtgtga

SEQ ID NO: 1562 - DNA, 930 bp, Oryza sativa
  N_region (255)..(255): n = any nucleotide
atggagggcggccgcggggggaagcgatggcgcttcgcgaccccgaatctggccgtggccgcggccggggaacgcagcatccagcggtacctccttcagctgcacgcgtgcctggacgagaacgggccacggcccgtcatcccgctcagccacggcgacccttcctcctccgcctgcttccgcaccgcgcccgaggcagaggaagccgtcgccgccgccgtccgctccggcgactacaacggctactcctccccngccaccagcctccctgctcgccgagctattgcagagtacctatcctgtgatcttccttacaagctttgcacagatgatattttcctcacatctggaggtacccaagcaatcgagattgttatgtctgtttttggccaaccaggtgccaatatattgcttccaaagcccgggtacccaaaacatgaagcacatgcggtgttccacaggatggaagtgcggctctatgatcttgttccagagagaggatgggagattaatgttgaagctgttgaagctttagcagatgagaatactgttgcaatagtgattactaaccccaataacccttgtggtaatgtgtacacttatgagcatctgtccaagattgcagatacagcaagcaagttcggtctgttagtcattgctgatgaagtatatggtcaccttgtttatggaagcactccttttgtgccaatgggtgtgtttggagagactgttccagtactcacattgggagctatatcaaagagatgggttgtccctggctggagatttggatggatagcaatttgtgatcctaaaggcattctgaaagaaacaaagctctcaggatttgtcccaaaatataacgacttctccaccaacattctcttcccaaccaatcacaaccctccacaattcacttttcccacctag

SEQ ID NO: 1563 - DNA, 921 bp, Oryza sativa
atggcggcgcctccgcttccccgcgcccccgtctcctcctccgccgccgccgcgtcgccggggggccgcgctctcctcctcctccgcgtcggcggaggaggttccggaagatgcgctggcgtggcggcggcggcggcaccgggttggcggcggccgttcccggctgcctccgtcgcggcgcgctcggctggtaccacgccgggagaggtcgccgtcgatcctaaggtcgaagcaatactagacagtgtgaagtgggacagtaaaggcttggctgttgctattgcccaaaatgtggatactggagccattctcatgcagggttttgccaacaaagaagcccttgcaacaactatatcaaccaggaaagctacattctatagccgttcacggtcttcattgtggacaaaaggggagacatcaatgaatttcatcaatgtgcatgacattttcttggactgtgaccgtgattctataatataccttgggaagccagatgggcctacttgccatacaggggcagagacttgttactatacttcagtctatgatgctctacaaggttcgaagcccaatcaagataggcaggttgtctcaactctgtactcacttgaagatacaattagtagacggaaggaagagatagttactgaaggaagtggcaagccatcatggacaaaaaaactaatacttgataaccggctgctttgctcaaaaataagcgaagaagctggagagctaaaccaaacactgcttgagaacgaggacgagagccgcacaatcagtgagatgggtgatttgctataccacgcgatggtgctgcttagggtcaagggcgtgaggatggaacaggtcttggaggtcctcaggaagcgattctcgcagtctggtattgaggagaaggccagtcgcaacaaatcttag

SEQ ID NO: 1564 - DNA, 915 bp, Oryza sativa
atgctgagcgcgatgatggccgccgtcggcggcgacaagccgcagccggacacgtcggagcagatcaacgtgtcccccctcgccctcctcaagatgctcaagcacgggcgagccggcgtgccgatggaggtgatggggctgatgctgggcgagttcgtcgacgagtacacggtgacggtcgccgacgtgttcgccatgccgcagagcggcaccggcgtgagcgtggaggcggtggaccacgcgttccagagcgagatgctggagatgctccggcagacggggcggccggagatggtggtggggtggtaccactcccaccccggcttcggctgctggctctccggcaccgacatggccacgcagcagagcttcgagcagctgcacccgcgcgccgtcgccgtggtgatcgacccggtgcagagcgtcaaggggaaggtggtcatggacgcgttccgcctcgtcgaccacatggcgatggtgctcggcggcgccgcgggcggcgaggcgcggcagaccacgtcgaacgtcggcgccgtcgcgcggccgtcggcggtggcgctcgtccacggcctcgggcggcactactactcgctcgccatcagctaccggatgaaggagggggaggagcggatgctggcgtgcctcagccggagcgggtggtccgacggtttcgcgctgcggcggttcggcgcgcacgacgccggcaacgaggcggcggtgcgcgggatgcgggacctcgccgtgggctacggggcgcaggtgagggaggaggacgagacgccgccggagaggctcgccgtggtgagggcgggcaaggtggacgccaaggggaagctggaggagaaggccatggacgccatgtccgccaacatcgtgcagacgctcggcatgatgctcgacaccgtcaccttctag

SEQ ID NO: 1565 - DNA, 906 bp, Oryza sativa
atggtaggccactcccaatgcagggaacaacggaaaagtggagaacggtgtggcgaagctcgagatccggcattggaaagtacctttacccagtctttttacagcacagctctagcaagcaatggcgtgtatgtcaaccatggaccaaaagtccctgaagtagtcggggatttcgaagccgttggtagagaagagcgcaacggcgagcccgccactgctgtgaaacaacaacttcggagacgtcgggacaagaatcaggcagcagtgcagcaccagggcatcgactggcttggtgttcaggcgatcaaaccgtcgagcacctggcgtgcgtcggtgcgtggcgaaacaacgcctctctccgcggccgctccggcgccatctcgagcgcgcacaaagagtacagctcaggaggcggtaagatccaggttaggagacgcagtgacgtgtatagcaacagctcaggaggcaggcgggagatcgggagcacggaatatagttgaacgacggcgcagagagcgcgcgcaagcgcgaagggccgtgcgatggatttgcattgcacgtgaaccacaaccctgttctggcccaactatattaggcctgcttgttagccacaataccgatccggcccatcgagccgagcagacacagaagttgaatttctacaccgatgcaatagagatgaacgaactcctcacaagttcacaacgaggtaacatcctgcataccaaagctaaagctgacaacaacatcactgagatcaggcatagtttcaagccaacaacacacatcaatcccggaagaaaatcaggtaacggatcggatcgacacagctgcaactcctgcacggatggtgttcgacagttcgaggatcgagacggccagccgtcccggccggcgaggtgctag

SEQ ID NO: 1566 - DNA, 843 bp, Oryza sativa
atgaaaaagggatacgaggatgaactgggttcggaaatgattagcaaccgttccccggcaacgacgccagaaatgcttgttggtatttcttacgatcacagacaaaatccgcaagcgcacagatatatcgatgtagcacttcccctacggagtattccaagggtattgaatccaagggaactgctcgccgcccagcctccaaggcacgttgtcgccggtcctcagcctccttcgcagcccgttcgtgctcctgttgctcacgctgcagccggtctcgctcttgtgcttatcgctcatcttccagtcggcgacgctcggcttcctgtcgtgtacgttgttcttctgcttcccgggcttgacgctgcttcgctgtctcgcttcgtcaaagtcatcgaggttgctgaagtcgtagttgtagccaaagtcatcgtagtcgaggatctccgttggtctatgaccccaacttccctgaagctagattggatcggggccgaggccagatcccgtctagacctacggggagaggacatccttgtggtgaagaccgcagccagatcgtcggggagcttcatcaggatcgataggccccatcatcttgatcagatctcggccgagttcgggagaccgaacggggcggagacctcgtctcttcctgactggtttgaatccaagtcagggagagagatcttaacgaagttgtcggtgatgaagtcgaggccgccgaaccggaacgcctgttgcacttcccctacagagtattccaagggtatcgaatccaagggaacgtatgtggtcagatcttcctccggttcatccaaggacaccaagcaaatgataggctag

SEQ ID NO: 1567 - DNA, 837 bp, Oryza sativa
atggacggcggccacagcccggacaggcatgcggcggcggcggcgggggagccggtgaggtcgcggtggacgccgaagccggagcagatactcatcctggagtccatcttcaacagcggcatggtgaacccgcccaaggacgagaccgtccgcatccgcaagctgctcgagcgcttcggcgccgtcggcgacgccaacgtcttctactggttccagaaccgccgctcgcgctcccgccgccgccagcgccagctgcaggcgcaggcgcaggcggccgcggccgccgcctcgtcgggatctcctccgactgcttcgtccggtggcctcgcgcctggccacgccggctcgccggcttcgtcgctcgggatgttcgcgcacggcgccgccgggtacagctcctcgtcgtcctcatcgtggccgtcctcgccgccgtcggtggggatgatgatgggggacgtggactacgggggcggcggcgacgacctgttcgccatctcgaggcagatggggtacatggacggcggcggcggctcgtcgtcgtcggcggccgccggtcagcatcagcagcagcagctctactactcgtgtcaacctgcgacgatgacggtgttcatcaacggagtggcgacggaggtgccaaggggaccgatcgatctgagatcaatgtttgggcaggacgtgatgctggtgcattcaacgggtgctcttcttccagccaacgagtacggcatcctcctccattctctccagatgggcgagagctacttcctggttaggatgcatacctgctgcctgcctaacatcggcttgcgactgcagccaccaagaaaacagtga

SEQ ID NO: 1568 - DNA, 831 bp, Oryza sativa
atggcaacaactaccgtcaccacaccaattctctgcaacctcagcgccaagccacgcgacaccctgcgcctgccgacgacgcgttcgccgaacgacggcacgaggcgaacgacgctccacctgagctcgtcaagagcccgcggcgacttgatccgcgccgccgccgccgtctacacggtgaagctcatcgggccggaggggcaggagagcgtgatcaaggtgccggaggacacctacatcctggacgcggccgaggaagccggcgtcgacctgccctactcgtgccgcgccggcgcgtgctccacctgcgccggcaaggtcgtcgagggcggcgtcgaccagtcggaccagtcgttcctcgacgacgcccaggtcggcgccggctacgtgctcacctgcgtcgcgtacccgaccgccaacagcgtcatccagacgcacaaggaggcagacctgtattatagtcccggggcccaggatccacgtgccgccgactcggaacggcgtcaccacgcggccacaccgggccgcgtcgatcgccaccgccccatcaccgcgcaccgacgcctctgccccgccacgccccgcgtggcggccgccgcgccacggcggaaaccaatcggaattcgggaacctcgcggccgggccggcgcgcgccgtattttcgtcgtccgtccgattttcgctgaaatgcgcggggaggtttcgtgccgcgggcggaagtttcgatcgcagcagccgcccggcgcgcgcgtcaccgtccgcaaccgccacccggaaagggcatcccagggccggggtgcacggaactgcttctgcgagctgagctggtag

SEQ ID NO: 1569 - DNA, 825 bp, Oryza sativa
  N_region (486)..(486): n = any nucleotide
  N_region (737)..(737): n = any nucleotide
  N_region (802)..(803): n = any nucleotide
atggccagaaagcagaaggaaggggggaagaacggtggccaacctgcagctcaccgccatcagcttcggatcgagaagccggagaggggcgcagaggtggagcttgcccgcggcagttgggtgcggcagcaattgggtgcagaggtggagaagcggtggtgccccgaccctgacggcggtgcccatgtcagcccacacctcctgatccatgccgtcgagctcccgcttccctcgctcctgcgccgccgacctccgctgcttccggggagcaaagaagtggtggtgtgccatgctggaactggccacccagctacccctccagccgacactgtctacgcttggcacttcgctttctttgtccgatgccttggcttcctctgccgccggcaagagggcggaatagtagcggtggcccggcctctccacgctggtcggcatcctcgtctcctccctctgcaatgcaatgaaaagctcgacggcgaggcnctgtgggtggggctcgacggtggggcgccgtgggtggggctcgacggcgacgcggtgacgaaggaggagaaggcgtgggtggggaaggcggcgaggggcagcggggtcggtggttgggggagaggggctcggttgcggttgagggggggagatggcggcattgatgtcgagaacaggcgagcgaggcggggcggcaagccgccgctcctcttccgctctcccgccgccgtggcgctgtcgctccacccacngcccgccacgatcgagtcacgtaggcgccgcgtcatccaaaaccaagcacaatactgcccgaggnnccttttctgcccggttttgtaa

SEQ ID NO: 1570 - DNA, 818 bp, Oryza sativa
agaaagaggtgcgtatagagagggatgaggaggatgaggatgtgcgcgtacgggagctcaccgcggcgagggtgcggcagaggaccgccggcaccgctgccgctcgcgggatggggatcgtcgcaggcggcggccggcgggcgaggagacgggaggggaaggcgaggggactagggcgcgaggaggaggaattagaggcgccacctgctgctgcgatgtttgggcggtacgcgcttcttgtaccctcggacctcgttggggcaatggcccgcctgcgaaaatccaataaaaaaaccaaaaaaatcacctcgtcgccgtccatgcgcatgcctcgccgccaccgccctcccccggcctcctccggctggatctggaggggaggggatgggagccgccgccgctgcaacgggagccaccgaccacacgcgcgcctcgccgccgctgccgcaccgggagccatcatcgacgtcgccgaccacgcgcgcgcctcgccgccgccacccttccccagcctccctccgtccggatcggggaagggaaaggaagggaagggagccacccacgtcgccgtccacgccgccgctgccctcccccggcctccctccggccggatctgggaggggaggggaggggagctactgccgccgcaccgggagccaccgatgtcgccgtccacgccaccaccgcgtccgcgcactccgccgctgcgcgctctaccgccgccgcgtccgtgccgccggtggagggagggaggggaggggaggggagaagccggtggagggagagagagagttgagaagataagtttggggaaatga

SEQ ID NO: 1571 - DNA, 810 bp, Oryza sativa
atggagaccgcctccgcctccgcctccgatccgccgcctctccgccgccgccgccagcgccagcgccgcctcgtcttcgaccgccgctacggatggatgttctgcgtgctgccgatggcgcggtcgctggtggacgtcgccgtgtcctcggacaggtcccttcaactcctttataacatggacaccagccaatctcctgttgacttcccttgctccatgaagaagttctctaaaattgaaccacattttcctgggcaattctctgccggtgctagtggtaatctgaaaaagctactctcacgcgacggcgggatcggcggccggtgcccatctcttcccatccggagccgcggcgggcgagcgggcgagcggcgacctcgctgtcgccagccacgccgcctccacggtgccgtgcacctcctcagcgcgacaccggcggaggatgcggaggagcggcccacccgccgcccgccgcaggccgagcgcagggagtccgccaagctgcgcatcaaccgcgccctcaaccagagcggctctgtcggccgcgccttcggcagccggttcggcatcgttgtgatgctcttcaccaggaccgagagcttcattcgcgaccagtgcgacgtcgccgacgactgggtcaacaccgtcgccgcgggggccagcgccggggcgctctaccgcatcgcgtccggcccaaggtcgatgatcgtcgccgacatcctcggcggagtcctgtccggcgccgccgtcgcggggaagccgatgcttcagagattcgcaccgaagctatccgccagattggactattaa

SEQ ID NO: 1572 - DNA, 795 bp, Oryza sativa
  N_region (2)..(2): n = any nucleotide
anggtccaccccccccccctccccctgaagctaaccgtttgcttgtgccaaaaatttctgctgcctttagggtgtcgtgtagtaactgcccttgccccctttgccaaaacaattacggcatgttcttggaatgaatatgtgatctgcagtgatatacctgtgcttattgagttttgggcctcatggtgtggaccctgcagaatggtccaccgaattgttgatgagattgcacaagaatatgctggaaggataaaatgctataagcttgacactgatgattacccacaagtcgcaacatcttacagcatcgagaggattccaactgttttactctttaaggatggagagaaaacgcatagcattactgggactcttccgaaggctgtttatatatctggtattattttagattccacaattcttacagttatatttatgcatgcagatgcagctaatcagctgaaggtttttcttctcatatggtatgtcacttctctttcaagtagctttacaaggttatatttgttagccttttttgcaccaggatttgtgcttctgaaatactaccttcgggtcagctcaggaacccatgcgatctggggggatcctagtattgcatatgagtatatcaggatgatagtggcaacccgcaagcatgtactagcactcaggcagcaagcgctgatactcagtagaagagaacaaaagatataccttgttactgaagctcgcaatttggtcagagctggtatttgggatctgctcatcagtgctcctaccgtcctgcgctgctag

SEQ ID NO: 1573 - DNA, 783 bp, Oryza sativa
atggccgggtacaccgaaattttggacaccaaccatcacgagcacaaggtgtgcttggttcgcaaggacgaacctttcatttgctctggctgcaaagagctcggcttcgagctccggtacgcttgccacactgcgggctgcaaccatcagtaccacaggtcctgtacactgcagcctctcaacactcgcgtgccagctcccttctacaagcacgacttcttcttcttcaagtcggtcagtacagctggaagctcgcaggtgcgaggttacgtgtactactgcccggacaagaaggtcagcctgcacccttgctgcgcagatctcccccgcgtgataaccaccgagacggtgcagctgaaactggagaggaagatcaccaagaaatgcggcatgtgccacgagcggaatcaggggagcttcagcaacccatgggcctacgcctccagcgagaagatgatccagctgcacgtcgcctgcgtccggaaagctctcgtttcgcagttcgagtcgaggctttacggcgtgcaaaagccgaagatgctgctgccgccgccgcctgctgctggagcaagcgctgcttcttcaactagtagttcgactgccattgtggaatgcaacagcttccccgtgctcgaggtggataagtaccggaggaaatcggccgggttcctcgatacgttcaggcggatcgtcagggcagtcatggccatggtctcggcggtgatcaccgggaaccatttggagatatacatggctttcatagaattcttcaaaccgaactga

SEQ ID NO: 1574 - DNA, 762 bp, Oryza sativa
  N_region (229)..(229): n = any nucleotide
atgttgcgtgttgtccctaagaagaacaagccggtggcaatttcactcaagcaactcctcgatatcaagaccatggccttggaggagctcgtcgggcagttgtccacgattgattcgtacagtgacgatgattggctagtgccagtggcaaactatacctcggagcagtgggagcaatgtcgcaagccacgacgccaacgccgaggggaagcaaatttggctcaggggnagggggagccaactctgctcatggctcatgttatggggttgtctctcactggcgaggcgacatttggccaaacacctggcgtctacgaggtgcatatgacaaagaagaaagtggtcttggatcacgacgatgtaggtgaggaggacactgcagaatggttcctagacacaggagccaccaatcacatgattggggcgtgctccgcgttcgccgacctcgatgccggcgtcgtggggacagtcaagttcggagatggctctgtggtagaaatccagggacgtggcgccgtggtgttcaagtgtaagaacggcgaccaccgctcgttggaggcggtgtattacatcccaaactgcgcaagaatattatcagtgtcgggcgccttgatgcacgcggttacgatgcacatgtctggggtggcgttttcacgctgcgtaacccggcggactcctgcttgcaaaggtaaaactgtctcccagctatctttatatattgagattggacatggcaaggcccgtttgtttggcggcgagtag

SEQ ID NO: 1575 - DNA, 747 bp, Oryza sativa
atggtgtcccagtcactaaagcatctctgtgtcaccaaatgtaacttcgagatgagcacacgtatttctgtcccaggtctcatttcactacgattgggtgataattacggctcgattcctttgcttgaaagcatgccattgctagtaacagcatctgtgaagtttgggactttgtcttggggttgtcggaaatgcagatatgatcctggtacatgtgtttgttgtgatggtgatcctgacggtgatggcagtgtcaagtataagtttttcagaggtctgtcaaatgctgcaaatttggaattagtagctgaagctgggatgcaagacttgacatggtgccccacattcagcaagttaaagactttgcttcttgatggatgggtcgttgggcataatttctgcgctcttggttgctttctccaacaaacatcaattctggagaagctcactcttcaactttataagggccatgaagatatggtggaaattgaagaaagtagcagttcaattggacaattggtccagtttcagaaccttgaaagagtcaaagtaagatgtttaaggaatgaagaatgggttcacaaagttttcaagatcttgaatgcctgtggcgtttctcctgacaaaatcactatccagcattacatttacattataaatatgaagcaagcattacggttcagcaatagttcagcagcagaggtcagcaacagttcagaagtggagagtcaagcattacagttgtag

SEQ ID NO: 1576 - DNA, 681 bp, Oryza sativa
atggctaccagccccagtgccctgcacatgcaggcggttgccttaggcgccgccgtgtttctcctctcctgccttgcgtcggctcagcagccgccggcgccgggctgcctcgacaagtgcggggacatcaacatcacctatcccttcggcgtcggcggcgcccattgcttccgcgataaaagcttccagctcgagtgcaacgtcgtcgtcaacaattcccatccacgcctcatcatgcctgcctataatcagcagctgctcagcctgtcccccgacggcgaggcgctcgccgccctcgacatccaacatgaggcctactactacaactgcaacgcgagccatcccaccgccagcgccagcagccagccgaacaacatgacgtttgcgaccctcaacaaaagcactgtctaccgcttccccgtgtccacgtaccgcttcaacgccaccaccaacagctacgtcgtgcccgtcgcgctggactgggccatccgggacgtccacaactgcagcgccgccaagctcaacgccaccaactacgcgtgccggagcgccaacagcaaatgctccgacaccaccgatggcgccgggtaccggtgcagatgttccgggggctacgagggcaacccctacctccatgccggatgccaaggtataggtcacctcccaaaatcagttatttaa

SEQ ID NO: 1577 - DNA, 645 bp, Oryza sativa
atgttccttacaagctgcgcgaggaagaagaatgcgaggaatgcgaatggccgccgtggacatatattgatcctacctgtgttttcatccaagactggttcttgggaggagaggaaatttgctctggaaggggaggctgcagggatgttaccaggccccaacttcaggtttggtttcctgaatgaacggtgtggtcagaccgagtgggtgttgaagcatgacatggacatttcccacatcctactgaatctgaactatgatgaacaacaacacgagccaatagtggaagagaaatttgagaaattcgggtgggactctgacagtgataatgttcttgaacctggaaatactcaacctggagggctcttgaggaatgcacattcttccgatgcccattatgtaccacatgctgtggctcttccagctttcatgatcagattgtcttttcacttgggcattgatttgtacagctcagatgtagtttgctctgttcttgctagttcacgtatccatgtagctgaatctcagcgcttagttcatctgagtgacgattttggtgccgcggttaatcagaaatttagcatggctgctgttgaaacatttcggccgaatgtgcgagcagggaataagctggcaagtgcttag

SEQ ID NO: 1578 - DNA, 635 bp, Oryza sativa
atggcaagtgtcaactgtggcgagaggccgagagcgcggaggaggaggaggcgtggggcgaggtgcgttggcggcggcggcggtggtggcgaggtggacggaggggacccgaagaagcggcggctgagcgacgagcaggtggagatgctggagctgagcttccgggaggagcggaagctggagaccgggcggaaggtgcaccttgcctccgagctcgggctcgaccccaagcaggtggccgtctggttccagaaccgccgcgcccgccacaagagcaagctgctcgaggaggagttctccaagctcaagcacgcccacgacgccgccatcctccacaaatgccacctcgagaacgaggtgctgaggctgaaggagaggctggtggtcgccgaggaggaagtgaggcggctcagatcagcggcggggagccacacggcctccggagaaggcggagacatcatgggcttaggcggcagcggcgcctgcgtcgccgggagcccgagctcgtcgttctcgacgggtacctgccagccgccgagcttcggcggcggagatcacctcggagacgatgacctggtgtatgtcccggagtacggcggctacgctgataacagtgtggttgagtggttcagcct

SEQ ID NO: 1579 - DNA, 633 bp, Oryza sativa
  N_region (127)..(127): n = any nucleotide
atgtggttggaggtagaggagatgatggaacgtgaagtggacgctgctgtggctgtgcggcctgtggtttttgcagaatttgatgggcgccgctggggtggctgcagttatagaaatggaggggggnaggggcagcagaagaggtcaggaattgcgggaatgccactggccgctaataattgggcggaattccagccagggccagggccggaggccagcagagcttctgcaggatggcacagctggcaatgcgctgccagttcagttgccggtcgggtctggcctcgcgcccgcctcggtgtcccaagattgatgcgtgatacgtgctgcccatccccacgcgctgacaggtgggccccacaaacgagcgcggtccccacctcacggccaccgatgccgtgcggcgctggagcgtggcgagggggaggaggcaacggtcgtgttggtggactggcgggggaagggtgggtggggcccggcgctgggacggaggagaccgccgaccacgtggcctcgctggctacgctgccgcttgccaccgtggctgccgttgctcctctcccccgaaatctcgtttcaatccgcggctccgtttccggcgccgccttggtcagattcagagtgaccgggtga

SEQ ID NO: 1580 - DNA, 621 bp, Oryza sativa
  N_region (208)..(208): n = any nucleotide
atgattgccacgaagcagcagccgccggcgctgccgccgccgccgccgccgaagctgatcctgcagccgaggcagcggacgtcgccggcgatgtggtgcgcggcgatcgtgtgcttcgccttcagcctcctcctgatcgccgccggcgcggtgatcctcgtcgtgttcctggcggtgaggccccgggcgccgtcgttcgacgccgcgngcgccaccctgaacgccgtctacgtcggctcgacctcgccggcgccgtacgtgaacggcgacatgacgaagatggacgtggtgttccggtcggccgccgtggagctcttcttcggcggccggcggatggcggcgcaagcgctgccggcgccgttcgtgcagcggcgggggcagtcgcagatcatcagcgtgcacatggtgtccagccaggtggcgctgccgccggagctcgccgtggcgatggtgaaccaggtgaggagcaacagggtggtgtacaccatcaggggcacgttcaaggtccaggccaagctctggttctggcactacacctactcgatgtcggcgctctgtgacctggagctcactgctcctccctgtggtgttcttgttgctaggagatgcatcacaaggtga

SEQ ID NO: 1581 - DNA, 612 bp, Oryza sativa
atggccagctacgttgatcagcccccactggccattcaaagctcgttccttgtaaattattctctgcataagttcttggtgaaactaatgcaagtggtcatgagctcaaaggaggacagcccggtgacaccaccactggggaaggaacggttacctcgttcgttccatagaccattgtcaggtggtggtgcagtgggttcatcttcatcagattctcttgagcatcattcaaaccactactgtaatggtggccaccaccaccatggacaccagtgctatgattcagtggggctggtctcaacaccgaagctgtcaagtataagtggagccaagacagaaacctcgtcaatggacgcatcaatgaggacgagctcatctcctgaagaggtcgacagatctggtgagctctcggtgtccatcagcaatgcaagtgaccaagagcgggagtgggtcgaggaagacgagcctggtgtatatattaccatccgggctttgcctggtggtatcagagaactccggcgtgttcgattcagccgagagaggttcagcgagatgcatgccaggctatggtgggaagaaaaccgagcgaggatacatgaacagtatctctga

SEQ ID NO: 1582 - DNA, 603 bp, Oryza sativa
  N_region (244)..(244): n = any nucleotide
  N_region (284)..(284): n = any nucleotide
atgggagagagggacaaggtagaagaggaaaagcctgcgaacagagaggatgggatcatgggacaaagggagaggatagaagaggaagaagttgatgccaatgatatgtcgggccgggccgacccaaggccaaaaagccgtgccgtgggccgggccttcgggcctcgggccttatggccatctataggagcctgcatgatccgtgaaccaacctctctcccatcacccacatacatatcgctcntacccgccggaggagagcgtgcggagttcccatcgccgcntcggcccccacggagtttgcctgccgagaccgtccaagatggcggcccttggtatcccgtcgaggacagcggcgggaagagcttgccatggagacgccgcttgaggagcccccgtgctcggtctcctcccacccttccgctcgtcttcatcgtaggggctaccatggccaagaaggccatggcgcaaccatccccatcgatctgctctgctctgccccttctatcaagttgggctcctagtgacaaaacaaaacgggaggaggaagatagcaactcaactcatgaactgatggtgttaccagaggcaaggcaagcgtaa

SEQ ID NO: 1583 - DNA, 582 bp, Oryza sativa
atggcgttcgtccctccgtcaagccgatcgcgtttcgtcaagtgtgctgcagcctcttcgtcgtcttcgtcctcggctccgtgtcgtcaagccttgtgcaggcctcgtctcgccttcgtccaaggatcaccaccgaagtcattccatcaccgttcgcctccgttgtccccgagccgtctccgccgcgcccgttcgtcatcgtcgttccgcgcctcgtcttgtggtggtaaggatccctcttctcgctaccccgttctcgtccttttggtgtcgccccgtgcccgtcgtgcggttgtcgacccaggtacccgtgtaccgcccgcatggtgtctagtggagtccgtttgtcggccactcaccttggttgacaaacagggtccgcttccgtcgacccgtggaccgtctctgtgtactcggtctaccgtgggcctttgggttgacatgtggggtctgcatgtcgacaagcgcagccttcctgcttgtagctttgcttgtgtgcttcgcgtagcttatgtcattccggaggttcccgaagcgtggttcgctgtcgtcgccgatggttcggaaggccgttctctctga

SEQ ID NO: 1584 - DNA, 576 bp, Oryza sativa
atggaggagcaaagaggcgaggaggagtgggtgatgtggggatcggcagggagaagacgaatcatcaggcaatcggcgtcgtgggaggagcaggcgttcgcgcgcgatgcggcggccaacgccaacctcggcggctgcgtgtggccgccgcgcttctacacgtgcagcttctgccagcgcgagttccggtcggcgcaggcgctcggcggccacatgaacgtgcaccgccgcgaccgggctcgtctccgacagaggcagacctcctcctcctcctcccccagccaccaagaagaagaagctgaagcaccccaagatcagcaagctggcccttactatacctctttctctaaacctagcaccacctccaccgataatactacttgcagtaacgacatactactgctagcaagagatcaagaaaccatcaagaagagggtaccgagacagcaagtacaagtagttgcagatcaggacgaggacgaaccggccgggagaaggtacaagaggaggaggcttggtttggtggatcagctgccgtcgtcatgtgaaggaggagatcatcatcatcaggaatag

SEQ ID NO: 1585 - DNA, 567 bp, Oryza sativa
atgcaggagtccaccactaccgttgcacagggaaggttcttggtgcaaggagaggtcaacgccaaaacgatgcctaatggcgccgtcgtcgtcatgccggcccatggcgtggcaaggctttcgccagcgattccaatcctagctccacacaaccatcctgcacaacgaccagtaccggaccatcgcaccatccctttagcacccaagcccagttcacgaccatcgccgaacaccaccacggctacacaccccccgcagttctgctaccgtctcgttgtcgagagccggccttccttgccggagaggccaaatccagtgggagggatggagggagggggcgcaggatccggcaagaggagccagattcggcggcccccggcttggcgccccatcaatcgccggagaagggagctccaccgccttgccgagctagagctccacctctcgccggcgcacgaggagatgacctcccaagagggtgccagatccgccagtagccgccgcgacgaccccgccaacgtgctctccctgccgccttttctcctccagttccgccgccaccgctag

SEQ ID NO: 1586 - DNA, 552 bp, Oryza sativa
atggggcacatcgtgctcacgccgcattccgtcagcgcgctcggcgggttccggccacaggggaagacggtcgagagcgccgtcaaggtcgtggaggcggcgctcgcgttgcaggaggccggctgcttcgccgtcgtgctggagtgcgtgccggctccggtggcggcggcggcgacttcggcactgacaatcccgaccattggcatcggcgccgggccattctgcagcgggcaggtcttagtctaccacgacttgttagggacgttccaaacaagtcatgccaaggtctcgccaaaattctgtaaacagtatggtaacattggggacgtgattaacagagctctatcaaagtacaagcaagaggtggaaacccagtcttttccgggtcctagtcacacgccctacaaactagctgccacagatgttgatgcctttctgaatgcgctgaagatgaagggcctgaatgtggctgctgatgctgcagccgatgctgttgaatatacagatgagaaagagataaatggaacgccgcagctcaaggtctatgcttga

SEQ ID NO: 1587 - DNA, 534 bp, Oryza sativa
atggcgagttattgcagtgaccggtcgtcggggtcgtcgcatcccagcagtcgtgctcccatcccggcgcgagttgggccctatgattatcagccggcggtgatgtgccgatgtggtgcgaaggcggcacggtggatttccgggagcgtggacaaccctggtcgatggtactaccgatgccgcaatcggggcgccggctgcgatttttttgactggtatgagcctgcaacaagtagttttttgagggagctgttgaacgatcttcatgaagccgtgttatcgctaagaagggagaagaatgagctgcaacattgtgttgaagaactgaggccaaaggtagaagagcagtgcctagaattaggggtagcaatgaatgaagtggcacaattgaggattgtggcagctgagaatgaagctaacatggctgctatgagagcaagtaacagtaggctagagaaacagagagtttggcttgtactgatgtcgttgggatgcatgcttgtgttgtttgctatgattttagttcagctgtga

SEQ ID NO: 1588 - DNA, 507 bp, Oryza sativa
atggacgcacctcgccggcggagcaacggcgcgtgggagatcaacctggtgcggcggagcccggccacggcgcggaccgaccgctgctcgaggctgctgctgctgtggagcgggttcgtcggcgtcgtcgtcgtgctctacctgttcgtcggccacgtctgggcgtccgtcgccacggcggtgctcctcgccgccgcgggctggttcacctgccggcggcgcccgttggaggcccgcgggctcagccaggaggacatcgaggccatcccggcgttcgagtacaggaggggatcatcgggcagcggggttgcgcagtgcgcggtgtgcatcgccgccgtgaaggacggggacacggtgcggcggctgccggcgtgcggccacgcgttccacgcgccgtgcgtggacgggtggctgcgcgaccacgcgacgtgccccatgtgccgcgccgacgtcgtcaaggtcgccggagagacgacgccggcgacggaggaggagccgcccgtgtag

SEQ ID NO: 1589 - DNA, 504 bp, Oryza sativa
atggcgggcagggcgccctgcgcgtgtgcctacagctgccagggaacatggcctgcgccgcctcgtctaatcaccattaatgaggggctttttgcctctcgtctgaacccagaccaaatctctttatacggtccgttcgagaaatcaccgccaagcggtgggaacggatgggcgaaagtcgaggtccatgccccagtgaaaaaggggatgaatcccaaaaagccgaaagcacttgtattcttccaccgagatcaatcacacacaggagtagggtgttacgctcccatagcggcccgaacctatctaaactctttccatctccaaccgcttgtgaggggcccgaccccctctcattccctcaccgattctcaatccttcaccgcgtccccggtccgaaccgaaggggggtctcatggtgttaacgaccaaatttggcatcggctggagtatgcatcggctgagttggaatcggtcagaggatggacaatgcagccgatagagccg

SEQ ID NO: 1590 - DNA, 500 bp, Oryza sativa
gcaaggaggaggaggaggaggacggcggcggcggtgcaccggcggcggcggccaacaactacgggagctcgacgacgagcagtactacggaggaggagggatccggggagagcaggcggcgcacgtcgtcgtcgtcgtcggtgcgcccctacgtccgctccaagaaccctcgcctccgttggacgccggagctccacctctccttcgtccgcgccgtcgacaggctcggtggccaagatcgcgcaactcctaagctcgttcttcagctgatgaatgttagagggcttagcataggccatgtcaagagccatctccagatgtataggagcaagaagatcgatgagtccggccagggtttggcaattcatggtccccatggagatgtcatggatcatactggctccctgcaggccatcacctgcttgttggatcaaaaccctattacccaccagcagctgaagctgaagctcctttccgcagatcaagtgctaggtatgtag

SEQ ID NO: 1591 - DNA, 483 bp, Oryza sativa
atggaggcgacggcggagagcgtgtggcggctgtgcgcagggaaggttgggaagagcgccgggaggagggtgaggaggatgcaggacgggcgaagggtttttgggtctttgatcctcggttcttggtctgtctccgtctccgactgcaagggctcctcctcatccaccgtcaacatggccaaggttttcaggtttctgaagcttgtcggagttggcttcaaagcaaggacagagcgtgaaggccgtgagttgtttctgaaacttggttacagccatgaggtgcagttcactgctccacctgctgttcgtgtcttctgcttcaaacccaacttaatttgctgtactggtatcgacaagaatcgggtgcacaactttgcgggcgctgttcggaactgtaagcctccagaggtatacaaagggaaaggcatattgtacattgatgaagttatcaagctgaagccagggaagaagcaaaagaagtaa

SEQ ID NO: 1592 - DNA, 423 bp, Oryza sativa
atggaagccggcggcaggcgtgaccccgttcttctctccgccatccacgcggaccacgccacctccgtcgggcccatcttcatcgtcgactcctcctcgtcgagtcagaggtggctggagagaggaggggcggcggcggtggcagccggttttggggggtggaagggacgccagtggtgggagccggatttgggggagagagcggcggcgggagcagcggcggtggccggagctagggagggaggggcgctggggcggcagtggtcgtcgtcggcgttggcccacaagtccataaaggcccaataccaatctccacacgctccaattccctcgtccgcgccgtcgctgccacggctccctgcagtccaccgcccgtcgccggtgacgagggggcccgcggcgctgcctaccaaccgcggctag

SEQ ID NO: 1593 - DNA, 423 bp, Oryza sativa
  N_region (330)..(330): n = any nucleotide
  N_region (344)..(344): n = any nucleotide
atggccttcacgcggcagctggaccaagacggtggacaacagcgccggcgacggaagcctcaaccgggggagaggaggtgccgcggtggccggagccggggtggtaggcgcggcggcgggtgtggtggtggtaggcgcggggtggtgggtgccgcagcgggggccggtgtggcgggggtggtcagctggcagcaggcgtcctccttctccatggacaccggcaagcagcacttgctcatcgtcggcagcaatgcgacggcctcgatgcgctcatgctcgaggtcgaacgacatgatctacttgccctcggtcacccagtacgtggcgccnttgacgctgaaaangccccaggcgacgcacaggctccacggcgacgcccccaccccgcgccgccggcggcggtggtgtcgtctcccagcgtga

SEQ ID NO: 1594 - DNA, 404 bp, Oryza sativa
gcagcaaggtcgaagtcaccagtaatgatgatggttttcatggagcttggttccaggggactgctctaaaatatgttaacaacaagattttagtggaatatgacgcattgaaggctgatgatgaaatcactcctttgacagaagccatagaagtgcagcacgtcagaccctgtcctccagatatccctgtaaccagtggattcaatttacttgatgaagttgatgcttgttggaatgatggatggtgggttggtgtgatatccaaggttaacagtggtgacaggtacatggtatacttcaggtcttctacagaagagactgagttcgggcatgaacagttaaggcttcactgcgattgggtgggtggaaggtggatgcgggcttcgctgggattggaggcataa

SEQ ID NO: 1595 - DNA, 357 bp, Oryza sativa
atgtctgctcctcgctggcgtgcgctgcgacagcggccagatgctgagcgacgggagcagcacctccgcggccttggcgactggtgccgcgggagcggcgggccgacggcggagcctccctccgcggccgacgcatgctggcttccctcggcggcggcggcggctctgggggcgtcctccgccatggctgcggaccgagagggagaaaagaagctccgccgccccttcctcttccgcccacagccgccgggccgtgcctccgctgtcgcgccgctccctcctctcccgccggccgccatgcgccactgcctctccgttgcgcctggagagaggatcccaatccgagagagagattaa

SEQ ID NO: 1596 - DNA, 355 bp, Oryza sativa
atggtttgcacggtctcggccgaagctccaatctcaccccttgcccgtgaggggcttgttggcggatggcatgaggcccttcgaccaaatctgccgaaacccgtggcgaaggctatggagcaagaacggcatgaggcgaagagtcgcacgagtgccttgccaggccaggggcgtctcgggcgaagggtgcaaggcgaagactatctgccgaaggaagacaacttcgctatggcaagttcgcccccgcaagggccgaggaagcttttccgacccatcaagcctaagggctatagggccggcgatcgccagacagcccatcagggacccatgagctcctataacattatgtacccct

SEQ ID NO: 1597 - DNA, 351 bp, Oryza sativa
atggcgagacccgccatcgtggcggcgcccgcgctgctgctgctggcgctgctcatcgcgctggccaccgggggagccgacgcggcgccgggcgaggtgccgctgagctgggagctcggggttgtcggcgccgacgacgcgttcggcttcccgggtgaggaggcggcggacagcgccaccgcggtggtgcggcgggtgctgcagcaggggagctacatcagctacggcgcgctgcggcgcgacacgacgccgtgctccgtgcgcggcgcgtcctactacaactgccagcccggcgcggaggccaacccctactcccgcggctgctccgccatcacccagtgcaggggatga

SEQ ID NO: 1598 - DNA, 2000 bp, Oryza sativa
ggcaggcgtgcgcgcctcctcctccccggttactcccacgacgccgactacctcaccgcccttcccaatccctatctcatcgccgatgccgtccgccgggccccgccaccttcctccgccctgcagcctcgccaccctcactctgcccgacgcggtggagctggtctgcgtgctgaagcaggtggaggagaggcggctgcccgacacggtggagctggtctccctgagctcccatctgaacctgacaccgaaatggcatcaaagctgttggaattgtgaaggtgatcgacaggccgtcaggcccacgcatgtttcttctcgctgtaaacctcatcccaggaggtttgtttgtcaccaatctatcctgtaaaagagatcaccacaaaaacagaggaaagtcagatcctacatccattgttcagttccataatctcacccttatcaagcaaaaatgaaacaatatgattcaggttcagcaagagaaattctgatcccaaacagttcagcacaaaaaattcttatctcaaacaaaaaatatcacacagcaacacaaaaaaattgatacagtacgattcaagttcagcaagagaaattctgatctcgaacagttcagcatggcaattgctgatctaaaaaaaaacatgatacagcaacaaaaacttcccaaatgatcaatcacaaaaatgtaagctccctttcccctatatttctttagcaatcttctttgcatgccaaaagccttctttcttatccatcaccaaaacgaaacaaagcaatgcaatgatgatgcactgaaaagaaaaagctctcaacaacccggagcaggtgctgcgcaggatggagcaggagaggcggctcgtgcggatgggcaccgccgggagcgtgtccatccgcgtcctcaccagcggcggtggcggcgaggccgtctccttcctcttcaacggtgcctcgatggcctcctcgggagccgccgtcgccggccgcaccaccctccgggcgtgcgcgccgccgtgggggaagccgacgaatgcggcggcggaaggaggatgaggacgggagctattgtcactccttgctacgatgaggacggcctcgagtccgccgagagcggcggcaaggctcgagagtccacctctgcgcccggcccgccgccgcctcgtcgccataccaccctgccgctcgtcgccggctgcccagctcctctcccgcctcccgcgcgctgctcctcccctgtcgcccgccgccgcattcccaccttccgtcgtcatcttcaccaccggcggtgaagcaccatcagacgccgccacatctccggcgcccgtcgcctcctccatccctcccaactcgcttgagcggacacgagcagccgcaggagctcctccagctccggccaccggcgtggtgctcgtgctccgccgcggcactctcgccggaaaaagaacgaagagaagagagagagaggaggaaccgaggaagaggagagggaggggagagatgacatggcatatatgtgggggtcccacgctgactcaactgtcacataggacaaaaccaagatcaaaaccatagaggatctattgtgaacgggttttgattagttaagagaccccaaatattttttcagttgaggtacgattttgtaactcgatgacaagttgagggacctttggtgtactttttcctagccaaaaggcctcggcccatgtattaaggtgacggcccacttgtgccgtcctcgaagacggccgacagaccaacattcatttacagcccaaaaattacgaaaacctagctgcatcgcatcttcttctcctttccccaggcggagcaccgtccgatgagcatccaacggctacggtcagcaccctcggaaccttcgagaacaccctccccgctataaattcccgcctttccggtagcatctagtcttcctctcccactcttcctcctccccaaaccctagccgccgccgccggcgtactcgagagaaacatcagcat

SEQ ID NO: 1599 - DNA, 2000 bp, Oryza sativa
  N_region (920)..(920): n = any nucleotide
cgcggcgagttcggcgtcggcgatgctctcccagacggaccatagccaatgaccacgcgaaatctgcacgcacagacccatccttgagtggaacacgagtgggagcagatggtgatggtggtcgtcgcagtggcagtccccatagagaaaggcctcgcgacacgtggtgcagaataggtccagcagctgctcaggctgagctgagcagccaacttccaagagagacagaacccacgggtgcgccgccgcagcagcagcgtggtcagcatgcgcccagcaagatatcgtacagagcgtggccagcctgctgtagagaccatcgagcgaggcaatgtcggagcagaccctgcagcgggtgcccggtgatggctgaagcaagtacggccggccaagaaacggagacgggagccggtcactctgcacccatcaccattggcattgcaaacaacacatgagcaaaattttcaattcctccacaagcacaagcacaactgcacaagaagaagcaacaagtcaagcatttcaattacctcgattcctaggaagatgggcgccatcctctcggcccctgtcaaccatgcgcaccagtcacctcggaacatgccgaggacgagcacctcgtgatcgtggacgccgccacggccgaacgcgtcgcaggacgggcagtagtagagcatgcccactcctgcggtcgcgtcggcgacggcgctcatgtcgtcgacgcagaccaccgatgatagcatcctcctcctcaggcatactgagcagacgcctccctcaccctcatcggccacctgccgccgacgacagacgacgcacctcgccacgagcgcctcctcctgaacgccatccgcgccatcaccatccgggcccacctcgccaccgccgccatgaccgcgcgccgccgccgcgccggcttngcccgcttcgccgtggtcgcctgcagcgccgccgtcatgcgtgccctccgtgccatccaatccggtctccttggccgcggatgaggaacgtctgcaaaaaaccatttccaatcaagaaccattcttttggtcaagaaatctggcaagaatcgatttcttaatgaaaccatggaattcagttctcttcttacctcggggagctgtcggccaacaagaaatccgccacctcgccaccgccaccggtcgccgcgtcgccggcgccgctgctcttgccgagctgggccacgggtacccccatcctgaaagaacgcaggagagatcgaaacaggcgcgcgtcgggaggcgaactcgaggcgccggtgcggaggaggaagaagaggagagccaagaaaggggagacgaagggcgcgcgtcgggaggcgagttcgtctgagacgaagacgaagcggagacaaggaagatgggcgcttgtcagtcagtatacatggccatatgggccgcccggccgtgcctgggccgaggcttgtcgggtctgcacggcccgacggacgcaccgggccgtgccgtgccagcccacgtgccgcactcacggcccaggcacggcccaacacgcctcgggccgtgctgggccggccccaaggcactacggcccatcgcgctttacctcagcataagtctaatttttctccctcctattgggctgtgacatatatagctaaaaaaagtctattttacctccctcttctttgggctgtgatatataaggaaaaagtacaccgaaggtccctcaacttgtcatcgagatacaaaatcgtcccctaattacaaaaccagatacgtggcatcctcaacttacaaaccattcactcagtggttttaaccccggttttgtccgacgtggacgctgagtcagcgggacccacatgggccccacatgtcagacagaccacgccggccaagtcccggccgcgccgctcgccctcaccggcgccggtccatgaggctgagggtgcacccagcgtcgcggaagcgcaccatcgcctgcagcggtggtgcggggtctccgcagtggcggcgggg

SEQ ID NO: 1600 - DNA, 2000 bp, Oryza sativa
  N_region (688)..(688): n = any nucleotide
  N_region (702)..(702): n = any nucleotide
aaaggcgcgtagggcagggagagtgcggccgtgacctatgggctgcttatcttccatcggtgactttagattttatggactctactttagggcacacaccagtgtaaaacttgtgttcaatttcgatcttaggcttacctggcatgtgaggttcggcaaatgagattctcgcactgctatcgccctaaggataagtaaaccaggagacggttaccgaagtatcaaatatatcaaataactctcttttggcaaggtcgcatatagatttattttcagaaaataggacttacattttgaaatctacaactagcacccggtaggtaataatgaaggtttagtttgtaaagtatactccctccgtccccgtaaaaactaacatacagtagaatatgatattttctattactataataaatctggatatatctatgttcagattcatcgtaaacgttacttctcgttataaattgatttttttttatgggagcgaggaggagataaaaaaaggtactacctccatcccaaaatataataatttttgggtagatgaaacatatcatagcttgttcagtactatatatcccatccaatcaaaattgttatgttttgagagagagtgaggccatgtttagattccaaattttttcttcaaacttttaacttttccgtcacatcgaatttttctacncaaaaactttcaanttttccgtcacatcattccaatctcttcaattttcaattttagcatggaactaaacacagcagtagtaggagttttaaaaccggaaaagaaaaaaaaatccgaggcgtctttctccgtttctcgaagccgcctcctcctccggcgccgctagcttctgggaaattgcgtggtggagacgagcacgctacggaccccccttcgacccaacggaacgaaccgtcaagccgcgggattccttccccaaccttccaaggctccagctataaataccgccccctccttcctcctctcctccccacgcacaccccgctgcttccgatcaaatcgatccccaaattccccgatccccgcagccgctcctgcgactcgtaggtctcgtcaagtcggcggcgacgactttgatctctattcaaggtatgtatatacggtgccgccgcctcctcctgttctggttttgatctgtatataggcgattgattggtttggtggttgggaaggtgaaatcgatctcgggctagatctgatcgattgtgtagctggatggttgatcggatcgtttgttttggtcctggatgctcgatcggatagttccgtggtaatttttgtgtagatctgtttgttaaatcatgatttatttggcttgcccggttgtcccgtgcaaatcgtgcgctaattttacctgtgagtataagttgtggctctgtgtgtatttgttcctgatgctcgtgtggtcttgataaaagcttgggcatatctgctgatccatgatgtactcttaatttttgccctagcaaacttgatgctgttcgtgtattcattgaattcctgatgctcgtgtcctgtggcctccgtaacctttcacttgtctgctgatccattatgtactgacttaagccctacagccctagcatacttgatacttttataggtgcgcattgtttgagttcacaagattcaatttagtcaagttgcagtaacatgattggaattagaattcttcatgatcctgtgaagcacccaatctagctttgtcagatttgcatgtggcacttccctgagttagatcaaagatatgctctgctgtatatcttttttatgctttgtaatctaatatagagaagtacagaacaaccattgctacgtttgacattaactacaaccttctgttatctgttaattttttgtagtttggtgcttagaagaatctttttttttgttaacatttgtttgcttgatcctggttcccttataatcttgtatatactggagacttaccatggttgatatacattcttgc

SEQ ID NO: 1601 - DNA, 2000 bp, Oryza sativa
aaggcatgtcatgcccgaaaattcactagtaatttccaaacttatttatgcattaaattctcgtctaggaatcagccgagatacacaaactgacaatttaatatacagattcatcataataataacgtaaatacttacaaaagaaaagaaaaatagcagcggaattatggtctagcgaagctccggctccactcccacagacagctcaactggggtataagccaaacgtcttctccttcgcaacttgacttcaactgaggtttgattgattattgcaaggtgagtacatggaatactccgcaagccacacagcaaatatgcaagtgaacaaggataccaaaggatggcataatataggactcatttgcaaaagcagcatttagcaaacatttgataattgtaaaacagtagagtaattaatcatcaatattaatcaacactgaacagcacacccatgctgcacaggcccaaccatcctgaacaaccatacccggctgtacagatctatctccaaaccaggaatgtaccattccaaactaggagctaaattaattaacatcaattaccacattattattaataagtagtgtgagactaatcacgaaagacattgttcgacccgcccataaccatgggcacggctattcgaatagttttactctggccagaggtgtaccactgtacccacaagacacaactccacaatatgtcaccatatcatcatgtgcccatgctgaacatatcaccatttgtgtagttgtgacaagacccctcgcataggtcaactcaaagcagtgcaccgttcctggatcgtagtcaccccctcaaaaaccagaggcatggactccccagcaacccccgtgggcttatctccgccacttctcagtctggcactccgcaatgagccttgctatacaaagtgtccagccgttgcccattctggcttgtggttggcacggttaatgtttcacaaccgaaactcgtgaaccggtccttaattgtcatgagcacgaccatcaaaaacatgtgctcacaacccacaattatcaaattttagttggcaaattaattaattaaccaatcacaattaaccaccgtgagctatcattaaatatccatcattaagtaatagtgaaacattagttatcccaattgtgtgctaatatttctaagcatggctaagcaattatgtctaacatctagttgaaccaatatataaagctcaactagtcaaattataataacccaaggtaatcaagaaatagggtaatcaatgcaaactggccttaacaaaggaataggttcaaaccacccgatgacattcaaaaataaatgcacagttaaaataaatagagaatttaaatataggatcaacatgctcaaaggaattgtgtttgggatctgtgtgacttgccttgcaataacgggtcttcaattaatcttcttgatcacatcgactcactcacgaacctttgaaacgacggaaacgacaagctaacacgcaaaacaaagaaaaagactaagaaactccaaataaacaatacatataaagtaaacaaacatgtagatcataattttagatgaattatgagacttgaacggcctcattctgacttcatatgaattaattacgaattttacaagatttaatctaattaaagcccatttaaaaagaattaagtaaatttaattcaatttatggataattttaatatatagatctttattttatacaacttttgcaacttgaaccacattaaaccgagttacaatgaattagttatgaatttttaaagattaaactggattaaagcatttatatggatttttattgaattatgacgcaataaagaattatttttgaaaggaaaaagggatttattgcgtcatcaaagacggtccacggtagaccgggtgcacagaggcggtctacgaaaccaacggccaaaatctaatctaaacaaaacggacggccgagatcgatctaaaccaccaggggt

SEQ ID NO: 1602 - DNA, 2000 bp, Oryza sativa
gacccgatccattgccatccctaccctcttcctcctatctcgccggtgcggtgacggggaggggaccttgccggttcccctcggccactcccttccccttcctcacggcaacgggacactgtcgattcccctcgcccgctccctccccattactccacggcaacggggaggggatccaccggcagcgccgcttcccctcggccactccctcacccatcctccaccagctccaccggcggcgctctccctctcggcacagagtcggcggccctccgccccttctcgccttcttcccgcgccagatcaggcgggtggaggagtcggtggcggtggcttcctccgccccctctcgccttccttccgccacagatcgggcggcggtggcggccgcggctggattcggtggcggagaacggattcggcggcagtggcggcggctccttccaccctcgcctccctccctcggcagaaacgacagcggtggcgagcggcggcggcgtagctcggcaagccacgactggcggccactccatgccccctcctcgtcagatctggccatgggagacggtggcggctgcggcaaactccgctcgatttttggtcaatttgttttttttaatctccgtttgctgttcttctattcttgtatttgggatcaaacttgattaaaactttgtgtgttatttgctgcggactctggatgatttgttgtgtgttcggacttatgatgttgtggacaaaaataggtgaagacggacgaaacacctcacggaatccttgtgttatttgatgcggaccctggatgatttttttatgaacattatggactgtttttaatcggacagattcggttttttttcgccctttctttttaccatgtcgcatataatcggattccatttttttgcccgattcttttgtcgcctattttttcacggacggatgacggaaacactcgtaattttgtaagtggtagagattttttccttttttacataagacggaaactcttttttcgcactcctttttaatcgaccagaattttttttgcactttttttggatcttggttttttttggcacagacgacggatttttttaatcggacagaaataatttttcgcgttattttttccttttttacggaagacagaaaccctttttttgcctttttttaatcggacagaaatttttcgcactttcttttgtcgcttgttttttcgtacaaaaatcttttttttggcactcttttttgaagtcggaaaccgtttttcgcacctttttttttctgggaatcggacagaaaatatttttcgcacttttttttggaaatttttcttaactttttaagtagcagagatagagatatatgcacgtgttctcctggtgatgctaaccgaataggacccggattttctagatcggacagttttggtttttcttttctttttccgcacttctttttcgcccggttttttatcggacaaacctgatttttttcgttcggtttttttgatgaacgatggaagcacctcttttttaagtagtagaggtagagattcatgatcctttaacactgaatgatggcgaaagcggacaagtccaaacgattccgtgccgcccccgctgacctcccttcggccgccacaaacgcatctgagccgtccgcctccgaatatccgtccccaatatcccgatcggacggcaggcaatcaaccacgtactcctcccggcttctcccccactcaaaagcccaaaccggcacaaatcggagatctgggccgtccatcggtaatattcccacggcatcagccagatcggacggccagaatcgcggcccagatatttcggcccgcttataaataccggctggtcgcctccacctcaaaccctctctctccgtccgtccgcgccgctactcccccctcgccgagagagctctagggtttccgctgccgaattttttttttaattcggggggagagatttgaagaggcggca

SEQ ID NO: 1603 - DNA, 1365 bp, Oryza sativa
  N_region (99)..(99): n = any nucleotide
  N_region (112)..(113): n = any nucleotide
  N_region (118)..(118): n = any nucleotide
  N_region (272)..(272): n = any nucleotide
  N_region (305)..(305): n = any nucleotide
  N_region (972)..(972): n = any nucleotide
  N_region (1173)..(1173): n = any nucleotide
  N_region (1175)..(1175): n = any nucleotide
agttctttggaaaagaatctgcaataatgtcactactctagtcatgagttatagaatatatatggatggatatgaatatatattcttctacaaattttngatatgaatttcnnggaanccttgcgtgcaatgatagatggtgatacaaaattccactttgtttaatctaaaaggaggttccactttattttctataaaagcccctaacaaagaaaacaacaatgattatcttgactgaaatgatatggattaccatgtttaaagtggatccnttttctatacaaagtattattgatatctaaacnagaacatatatacttaaaaactcaaaagctaggctatccacaaatatttttatgagtagagtctatccacatatttttttcgctaaaaggaaatggaaaatgccataacagattttaagaaaactagcaataaaatgtgaatttttcccattaaatagtaaatacaacataaattccatcgctagccaaaacgatacaataagatttgctcatttacttggaaaaaatcctctccaccaaagtgaaaggtgaataaaacctttcaagtatgtggttgtggttagcattgctaaagaaagaaacacatagtcatcaaaattgatcccccatccacataaaaagtgcacaagaaagggatgctcatgagctaaagtgaaaatacacacgagtgcgtgctttacaaagaatatgaacattgcgtgcaagaaacgttacaaatgaaatggtgagacaaaatgtgctccgtgcatacgtggtggtgactcacattcgtatgaatacggacaaacaaattcatgcttcgtgtatatatactagttgcaaacgtatcggcatgtaagtaaattaagtgtacgtgcttagcctaacttagtaagttaaccacactaaaaaaaaatgtatacgctataagcgtgcgtgacacattgctacgcacgcaaaaccaaangaaaaggaaaaaaaacactactccacgtcatgtagcaaaagggcggaattctttccattatctttagaaaaggaaaatatcatgtacagtatactactagtggtgtagatacttggcgtgagcgtagcaaaaacacaaagacaacttgaccccccgtatattccaaaggcacccacctcatatccttatcctgcgcccctnancccccaccgtcggatgcgatctggacggccacggattcccctgagccggctataaatcccacctgaggtgcagccttcttccccgtggtctctcagaggtgggttggcttctcctccccctcccggttcggttcggttcgggtccggttcgatttcgtttttttttcttcttcgtggggttggtgggaaa

SEQ ID NO: 1604 - DNA, 2000 bp, Oryza sativa
  N_region (12)..(12): n = any nucleotide
tcatcgcccctncccctatccttttccccatttcaccgagctcacccatggcctctaccgccctagcgccgtgcacccgccgccgctgccgccttagccatcttcggccgccgctagccatcgctagctactgcaccgagccacgccgtcaacgccgtcgcgttcgcgagcccgagggccacgccgtccgcttctgtcacgcccagaaattcccgaatagaattccaagcagaatgtgcattaaaatccccgtccaggaccggccggggtacacaaacgacaatgttgacattcagacccacatcttacaaacatcataaaagtcttacataaatgcagcggaaaagcgaaagacaacaggagctaagccttgactagaactgcagcgggaacaccactccacaggcatcctcgatggcacggacgaagcctactccttggagaaacctccatctgacacacactcgtactctggggttgggaaaaaaagagcaagactgagtactacccactgtactcagcaagtcataccggaataggggtatgatgcagggaattatcaaaggagagctagagtggttcatttgcataaagcgagcatttataaacagaagttggaagatttaaacagttgtaataattaatcaatattaatcatccactgtccaacgctatgccacgttgcgacaggcccaaccatccacctatactatccaaattctaaagattacactagggtgagactaatcacggtgaatctggttgaccgcccataaccgcgggcacggctattcgaatagttttactctaatcagaggtgtacaactgtacccacaagacacagccccacgacacgtttccgtgcgtcgacatgccaccacgacataccggaaagaggccgtgataggacccttcgcataaccctctctaaccaagcacaccacacctcaggtttcaccgccactcctcgcaaggcagcgggcagtcccctctcgtgcctaggtgaatccggaagcgacagaggccgtcgcagggcccgccccgctccatcacgcccacccttgcctggatgcgtcagctagaggtaagctacactacaagcccagccgttgcccacgctggcttgtggtaagtacgataagttcttccagggcatcccgcgaaccggtccttaactgtcatgggtgcgaccagcaaaaccatgcacccacagcccaccatgtgatttattttaattaaccaacaccaaagcggtggcgctaatccaacaataccattagaaccaacagtctaaacattaatagaattttccccattgtgcactagttgaactaagcatggctaagcaatccctagtccaatctctagtcatgttataaccccaagctgacaaagggacatggtacaacaatagcatggctatgacaataggtaaacaccccatagtaacattataaaacaatgcaatatttgaagaaaaacaatagagcatttgcaatataggatcaacatgttcaagtgacaagcatgacttgccttgctctgctgctagaggaacctcggcgactatttcgaagtacaccggagcgtcggaggaaccggaatctagcgacatacaaggcaaacattgcaaacaggctataagactactgaaacagggaacaaaaccatttttaatggattctacgcatttttcttgacttactgagacttgaatgggcttaaacggagctcggatgaattagttatgaattttagaagattcactgtgtttattactataacaaaaagtcattaaatcatttattgcgcaataattcccagggctgacgtcatcaaggggggcgcggcgccgacatgcggggcccaccggtcagcggctcgggagagagggaaaaggggcgccggcaaacgggccccactcggcagcggctcaaagggggggtggtccaccgtggaccgggaccacgcgggtggtccaccgccggtccacaggatcg

SEQ ID NO: 1605 - DNA, 2000 bp, Oryza sativa
tggcattttggcccaagtttgagaatttgttgggcctgataatgtttctttcctgggccacgtggcctgaggcctaagtccgtccctgtgtgggacgaagggagtactccataggaagcatgtgcattaaggccctgttcgagataaaagttttagtttttcatggcacgtattttaaactgctaaacggtgtgtttcgtgcaaaaattttctatatgaaaattattctaaaatatcagattaatccatttttttttaattttgtaataattaaaattcagttaatcacaagttattatcacatcatttcaaacatagcctaattctccaacattctattccttgtaaaaggaagcggtttgcactagaccacctgatgtgaaccatcctttgcctaggaataaggtcacgttttttttttcttatgggttatcgtagatatgcttcccaggctcttaaacattatattttgttgacctcatcggttcgtcatgcttggttaaccctgtttaaatctgatgaaaatagatattaagtgatgccacacaaacgagaaaaccattagcacagggttagttaagttttattttttttaacttaaaaatatgttcatttgatattttaaagcaatttatatgtagaaagtttttacacggaatacaacgttagcatttcgaaagtcatgctaacgaaaaccaagttaaaatccatatcttaatcaagttagaatatttaaactacatatgcaaagtctgtatcttagtgcatcagcacgtaccaactggactagcctcgcatttataatttttattttttaaaaaatcaacgtactttataatttgtgctatttaatccctgcattttccatacatgaaataccatacaaaaatataattaccgctatctccgactatagtcgtttgagaagggtcctaaccatttgctcccatgtataatttagccgctataacttcatttaacccgctatagttgtttgggaaggtcaactactaaatatcttatctcgttatttaaaacaccgattataagtaggagtgacaatgatacacctagggcctgttcattttgatgctattttaaaccttatcaaattttggtaaagttgccaaaaaagttgctacatttattttgtagctaatttttgacaactatataagaaatcatactaaaattttgacatagtgtagatgtcgggcatgaaagtgaacaggcccctagcgtagatgtcgggtgggatggtttcaggaaaagaaacatgatgagtagagctacgctcatttggcatatgcaaattattctttcgtgccgtccttttacaattttatacgtgtcttattacctgtaaccttttgtcagagaagagaacacgattgtttacagtcacaaatgcattgtgaagcttttgcaagtcttcagaaatttaatttggttgacttacatagttaaataggagtacctaacatggccagcttaattcatctcacaaataattttggctcaaagccttttacgccttcaaactacagaaacgtattttactaacctcatggcacccaactatgggcccacttgtcataggatagaaacccatccgaaattttctagaccgcgcgcagacccgccacccaaaaaacccggggcccacctgccatccacccaacacggagcccactccccgctcgaattcccgcacccccgccacatcctcacaaaagaaacacacctcccgctcaccaccacgccacgtcaccgatccgcgcaacccccacctcccccactccccgccgtccatctcccatccaacggcggaaaaccagcagcacgcggatcgtgccccccatcgcttcccctaaacccacgcctctataaagccccgcccccacacgcctcctcctccccacctcatcaccaccgccgccaaccactcctcaccaagtcaaagtttcttcctcgcgaccggcggcgagcggcggcggcgg

SEQ ID NO: 1606 - DNA, 2000 bp, Oryza sativa
ctacggtctgggttggggggcaattgaactcgatccacttccaggatgaattcaccgttttcgctgcgcaaaacggtataggtctgaacgctatgaatccctgagtggtcccagttaagttaggttggtctgattatctactgctactatgtcaaaattttcaattttgttattggtaaattttggtaaaataagtatcatttggtgcatgcacatctcctactttactgtaagttcgtaactggtgagtttagtccacatcagtattaaaagttgagggcagtccacatccatcaattagcatgtggtagagatggcccatggttgatgagctagattgcgcgctccaactgtaacttctataataaagaaatttaaaatgtttgtaatgctacctagcactaaaatctgttggtgaattaactataggtacatatattatattactatacctctccatggagtgagttccaaaattaatctcataattaagtaagagcaaaacgaggaattcctttatattttgtcctcaatgttttttcttcaattgttaagaggataatatcttatcctcttaataattaaagaaaaccgttcagaaaaagataagataaaactcatcgtgttagcttattatgtaccttttattaatctctactattataaaaattaaagatgtttttaccgatactttggtatgccatcgtgtatgagtcggtttttaagttcgttcactttaataaatacatatctgtatttgagacgggttttaagttcgttcgtttttagaaacacagaaggagtcatataagaaatctcttaaaaaactcgcttgctaacttgagatgatcggactcctaattatagctaatgattttctatatatatatccaagctgatttccacagtgaattttaccttaactaaactatataacaataataatattattagaatagctttcacccgttgcaatgcatgggcattttttatctattatctcttaatgttcagaaaaatctttgcattttcacctgcatatatttgttctaattagttcaaccgaattaaaaaatttatcctcaaatagtagggacatatatacctttccaacaaggagaggaaacctattcaatcaaataaaagaattgtttgaaccacttttccccgaaactgactttcaaactactagaaacttatgacaaagaggtttccagaaatggtcgtttttttttcttatatcaagattattgtaccaatgtgagatgaattctttggtgttatcaatatttttgtaacgttggaagtattccttccgtaaaagcaacttgatttttatctatgcaactttacaacttatcatttgggatgaaggaagtaggatattggtgaggtatttactctattaccgtataaacattttggataaacccatgttgctctcccttcctatcgtcttattcaactctacattttgttaagaagtgtgtggacgtatgagcatgagtatgtactacctcatgacgagtggtttcaatttcacccttttgttgagaagtgtatgaacatgctagcctaaatactccgtaaaattcctaaccaaagctaaatactccctaccatttattttaaaattttaaaaaacccacccttttgtttgtatatagtcagtgagtatgttcgatcggccacttggttgtaatactgcttgtataacgttacatactcggcaatacaccccggctgtgttaatttggcagcgtgtgctgttcacttgtacattactcatcaagtggcggacaagttgtagaaatgtagaggccaaaccatcaaaaagccaaactactccacacaagacaccgtatgcacaaacgatcaacattcccatcatgcccatccagcgtgacatcaaaagcggcgtcctaggaagccagccaccattccatgccttcccctgccgattccaccccctgctactaccagtctctctgccttccaag

SEQ ID NO: 1607 - DNA, 2000 bp, Oryza sativa
  N_region (16)..(16): n = any nucleotide
  N_region (19)..(19): n = any nucleotide
  N_region (23)..(23): n = any nucleotide
  N_region (118)..(118): n = any nucleotide
  N_region (157)..(157): n = any nucleotide
  N_region (168)..(168): n = any nucleotide
atgctgctgtcacctntcntccngccggatctgacgaatgggagggcaccccccgctgcttccctcctgccaccgcacgccgctgttgtcgcctaccctcccgctagatctggcggangggaggccaccgccgcccgagggggggggagagagagtncggtggagganaggataaggaaggaagagaaaggattaggattagggggaggccatcggttcggctcggttcgattttagggtacatcgtttttctttttaaaaaaaccgacacctataatataaggaaccatctatagtagaggtgttggtttttctttagaattggtacctatagttgattaaagatgttggttttttgtgttttcagcccgaggtggtgggaaaatgtctatagtgttggttttagcacattcagtacctatagtatcgatttctatgtgttttttttctagtagtgtactttgctttcttagtttcatgtgatgctaccaaaaagctcctctccatatttcatgggtttttctatctgcatgtctgaggggcccagagccaataaatgatacaactcttactataagatggtgtttagatctagggacttaactttagtctctgtatttagacactaatttagagtattaaatatatactaattacaaactaattacataaatgaaagctaattcgcgagacaaattttttaagtctaattaatccataattagataatgtttactatagcatcacatagtctaatcatggattaattaagctcaatagattcgtcttgcgaattagtccaagattatggatgaattttattaatagtctatgtttaatatttataattagtgtctaaatatccgatgtgataggcacttaaaagtttttagtcacatctaataaacatggtctaactctcatgaacaccagtattaactatgaagtgtgaatctgtcataaggcccggactaattgtttacccgtggaagagccagcattttctcaagcctacggctatattagtgtaattttcataggtttgccgtttatcttctaaaatttaaaatttgaagtgttgtttcaatgggtatttaggctcagaataaggctctagccctaactaggccactcctggttccaccatgcagttgctcattatcagcttgatatttactaagatattagaattattaaaccatgaagataatataaatgatattctaaactaattaaggacaatatgaagtatattaattttgaaatattaaatcaaagaggcatctgacaaagcacaactcaatattactacatgattactagttaatattccaaataaatttattataattgagaatctggtcgggtatgacttggtatttgttaattttaaaattttaaattgttaaataatgaaaggaaaactatactgaggctgaatgacttgggtagtgtttggttgctgggatgggatgggatgggatgggatgggatgaacccatttttaggggtgtttggttcaggggtgagtgggatgggttggtccctatagaggaatattcctctcagatccgggaccaatcggtccggccaaaactggcggacgaactcgtcccacctgggacgagcgacggcgtgaaaccgccgctttgctcgtgcgctcttcctcgggagacggcggcgggctcggcgacggcggcggtgggctcggcaacggcggcggtggggggctcggcgacggcggcggtagatggcttgggcgacggtggcggcggtgggctcgacgacggcggcggcggcgggctcgacgacagtggcggcggggggctcggtggtggcggatccattggtggggagggcggcggcggcgattccggcggtgtggagggcggcggcggcggatccggcgatggggaaggttgtggcgacggatccggagacggggaactcggcggcgggccgaccgtgtgtcgtcgagcttctccgcccgcccgaccacg

SEQ ID NO: 1608 - DNA, 2000 bp, Oryza sativa
  N_region (1853)..(1853): n = any nucleotide
cgcgtacgcgccggcccacacggcccaataaacggcaagacacggttagtttttttttccgaatttttttctatatatgtgtaaacttttaactcatatttgaaaactttcaactccgatttgaaaactttcaacttcgacttgaaaactttcaactcatatttgaaatctttcaactcagatttaaaaattttctactcgagattcaaaaacattcaattcagattcgaaaactttcaactcgagattcgaaaactttcgactcgagatttgaaaactttcaacttgagatttgaatactttcaaatcagatttaaaaattttcaagttaagatttaaaaactttcaactcaaaacattttttaaaaaataagtgtgctaaagattaaaaaaagtaatcagaaaaaaacgaaaaaaaaaccgaaaaaaatcgcaaaagaaaaggaaaaaacaaatcgcaaaaaaagactgatgggccttgggtcgggagcagccaactagcaaccctcctcatcatcaccggcatcctgctcggctaggccagccccatctagtagctcagacgcaacaagttgtagtagcaaggacaaggccgcggcgagcgtgatcatgccagtagcaccgaccaccgattggtagaacaatgtgtcgtgggccccacatgttttttttcttatcacacaaaaccagccctccatagtccatactgccatgggacctgatttagatggttctctcaagatcaggggtgaagatttctggtattacggtttagagatgttaattgaacggaggctgagggaattaccgatcgggcgtccgatccatacatgcaaaaatcgcgccacgcgcgtgcaaaaccactttaaactgattttttctcttaaattatttatccaaatcataatccgattgcaccattaaattcgttgcaattaaatctttaaaacaagaccacacatggatatattccgacgaaaaaaatttagcttattattgaatttttttaaaaaatgtttcacgatgttccaccaagtatatcggaattgtttcactaagtagatcgaaaatgtttcaatcgtttaaatcggacgttgtttcacctatataaaaacaatgtttcagcaaataacgaaagaatgtttcagttcactacaacattagatctatacatagtgaaaaattgtgagtacactaggtgaaacatttttggtggaaaaaaaataaaacgaattcccttaatagagggtttctaaaatatgtgggtgatttgttgcaaaagaatgtttcgttcaatgcaacattagatctacatatagtgaaacattgtgagtacactaggtgaaaaaaaaataaaacgaattctcttaatacaggatttccaaaatatgtggatgatttgttgcaatggagtatgtggtggagacacgtggcaggtgggccagagaacgtggtggggcccaggcacctgcatgcatgcgcgtggggccggggccgtggggggagcctccgatctgctccacccccgctggtcgcccgagagcgagcattttcgtaattgaactcaatacaaatatgagggatggaaagtggacttatccctgaacagaaattagtcgtggaacttggtagtacccaacaaatcaggcttaaggaaaccaagcccaacgggccagagcacccaccacacctccgacacggactcgggggcccataattccgctacgacatattgcgcgactcgacccaaccccgacccagcccgacgcacggacgagccagaccgatccccatccgtttcgggccgcctcatccccgacctcgcggagcagcggccgcgacgcgcatggccncgcttgcgccgcgacgcccgccgcggcggcggcggcacgggaggagagaggaggagggcgtgagctgcggcatctgcctgacggacgcgcggcgggcggtgcgcggggagctcgactgctgcgcccaccacttctgcttcgtctgca

SEQ ID NO: 1609 - DNA, 2000 bp, Oryza sativa
gacttgtttttcctacttgccaatgattcggatgaatttaacaggttgctctctgtttcctgttttaagtcatcttctcttttattggagatttttaatctgagaattcttgcattccttaggtgggaagctggtcaggtgctgtcacgtaaactgatgctcagtcttgtagctgacttccagcaacagaaaacactggccctgaaccctaaatttgttgatggacttagatcaatcctgcggaacacaagcttggataaagtattttttttttctgatgctactatgattttatcatacggaattcaactgtaaaatgtctaacatgtgttcttttaggaattcattgcgaaagcgataactttgccgggtcaaggggagattatggatatgatgccagttgcagatcctgatgcagttcatgctgtccgtacctttattaagaaggagcttgcccttcaactcaaagatgaccttctttcaacagtaagtggcaccaagctattgtctgtagatgtggttactgtctaatgtgctttggtgtagtaattgtttttcaaggtgatataagttccactcttgtgcctagtaaacatgctgaaaacgtaaccagggcggttgtacctttttcgctttttgtttgcttattattgaatactcaaaagggtgggatttttgtgtgtgagagagcttgtcttttacttacatttatgtctatttcatcaggtgacaaataacagaagttctgaagcttatacatttaaccatgatagcatggcccgccgtgcattgaaaaacacatgccttggtatgtctttccatctagcattttaacatggaaattttgttccatacactgtggtttcaaatatattttcctggttttgtttttcagcttatcttgcatctctgaatgaaccggacaccactgaacttgcatttgttgaatacaagtctgctactaacatgacggagcagtttgctgcactagcagcattgtctcaaaatccaggccaagttcgtgatgacacccttctggacttctataacaaatggcagcatgattatttggtaagatgcttgctgcttatatgtgtcattcttatacataagtgctattcatctatgccagagtagcacagtaattttctttttacatcggagcccatacttgtctttcttctcaaataggttgtaagcaagtggtttgctcttcaagctacatcagacatccctggaaatgttgctaacgttcaaaagttacttggtcaccctgcttttgacatgaggaatccgaacaaggtatgtgattcttttccttcaaattttttgagtacatagttcaggaccttacagaaaacatactaaaaatgcaggtgtattcgctaattggaggattttgtgggtcccctgtgaatttccatgcaaaagatggctctggttacaagttcttgggtgaagttgttttacagctagacaagataaatccaggttctgtttcacgtgctaaatgaatgaacaaacactagtttgcctatcaccgtctgattgtggttttttgctggactgaaaatgtaggtggcctcccgcatggtgtcagctttctctcggtggaggcgatatgatgagagcagacaagctcttgctaaggtatgtatgttgttgtaacaccggatgatcacattgctttggtctaaacatgttgatgttcctttgttgtacaacaggctcagctggagatgatcgtgtcagccaatgggctatcagagaatgtgtacgagatagcttcaaagagcctggcagcttgaataatcccgtgagtgaacaagtcagtcggtcctgcctctcatcacatgacatccacacagggtgctaaaagtgtagttaaactgaatatgtttatgtggcaagagtaaaagaaggctgcttttagactggtacaaaactctgttgcttatagtatcgcagaccccaaaagtaatgcaattctttcttacgcg

SEQ ID NO: 1610 - DNA, 2000 bp, Oryza sativa
  N_region (1157)..(1157): n = any nucleotide
  N_region (1199)..(1199): n = any nucleotide
  N_region (1243)..(1243): n = any nucleotide
  N_region (1370)..(1370): n = any nucleotide
  N_region (1375)..(1375): n = any nucleotide
  N_region (1401)..(1401): n = any nucleotide
  N_region (1407)..(1407): n = any nucleotide
agcaattgctgctgccatggccgcgtcttgatcagtgaaaattgtgcttggatgccttcctgacattgatgttagaaaagtttcaaagagctaaacaaatgattcaatagtttgattaaataacaacgcagcaccaaaaattacagtctgcttgtgatggttggttccaaggagtggagcaaaaggcatttcaaacttattagtatcaaatgtggtgtcgaatgacacagcatcaccaaaacaggagtaatccatgatagattgaccatctgcccaaaagaaattagctatccgaccatcttccttgtctatttggatggcgtaaaaaaatgtaggatcctctaattgcttattcttcaactattccaacaatgtttgtgtgtcattggattctaagtacttcttgcgttcgcgaccgatctcattattgcaatccatctttgagaatggtactttgtcagctcctccataccactccttcatgaactcatacacttgcgctggtttcatcccggcttcccttatttggccaattagctgcctatctgcttctataacacgccgttgggacctcaccttgtgcgacttatttggactaacaagacaatggttgtgttcaagtacaactttttgcactgtccaaattccctttcgacaaatactaaactgaacacaagcatcacaactcgtcctagtagtgtctagtgatgacttagtctgtcgttgtccttggttactacaaactatatatttctggtatatagttccatcgactcggtgctttgcttggctctttctaatactgaacccaatcttcccggcataggtgttgtacatatcatacactttctgctctgaatcaaaagccattccaacttgaggcaagatcaaagtttgtgcaactttatcattggcctgttgtacgataaatgagttatattaccacagtatgaaatattctgttttccatcgaatttgctattaaattatcgttacctgatttggtgctttatctgccatctcttcaagtactatgcgacatagtgtgttgtcatcaccattagcgttggcatcgatagcgccggcaacatcttcttccatggtcataaactcggagatctgtgcaagatgatcatgcacgatatgatcacacatcngtacgtattagccacacatcagtatttgcgatgagggcatgnaagacgatcactcacgatcatgcatgcatgtactgatgaaaaancatgagtcaattagctaggcaatgtacctgcgttctctgcttgccatcggctccatgatccccaacgattacatcgtgttcatgtgaagattgtcctgccatgtcgtgcgctacggcaggcaaaggntgcancagatgagacgacggcaccagaagcncggcgncgcctgtgctcttctgctggactcctcgtcctgccatgtagcgaatctgttttgctctaatcgtccgcctctaatcacgccctacccaatctaatcctgagccgcgcaagccgagctgagggagaacgacctgagtcgagccgtgcaggatgcggacccgcttgtgtgggccggccgtcggatgagcgcctcatccacgcgtcatgcatccgcgtcggggcgcacggactgctgttttgcatccggtctgcaccagatttttttccgccatcccctcccagacggttctcccccatctctctcctgtacccctcggccttctcccggctcctccccgcacctccctcccgctccaccaccacgcggcggcgcggtgacgacgagcgaacgcggcggcggtggtggcagctggggaggtgacgagcggacgcggcatcggcggtggcggaggcgatgagcgaacgcggcatcggcgacgggcgaggcgatgagcggacgccggggttcttgtcggcgatgagcggtcggatgctgcctcgtcggcggcgacgagcggacgcggcatcgtcggcggcagcggtggcgacgagcgg

SEQ ID NO: 1611 - DNA, 2000 bp, Oryza sativa
tcccgttcgccgccgccgggccgtcgccttccctccaccaccgcccgccgccccccggggccgtcgccttccctctaccaccgcccgccgcccccgcctcccctcctgccgggccgccactcccggctagatctggcggaggggaggcgccgccgccgcccccgcctcccctcctgcggagggagccgccgccgggatgtcgccttccctcccgccgccgccaccaccgcctccaccgccaggccgccgccgacgcgtgagaaaggcgaggggagggtgcgagagagccgaggggagaagaagagaagaaagagaggagacgacgagcccctgcctgcgctgtcgctagggttgcgctcgcctagcggtggaggagaaggagggagcgccgagagaaggggagcagcggtggagatggagagcgagaagagaaggaagagataaggagagagagagcggacacgtgtggctcttatccatccataccgactgaattgacgcgagacgcaatcatggtagggaaaaaaaaatcaaaactcggtatccacgaaataaattggccccaccacttctctatgaattgctaaaatgacacttcttttgacagctctgggggcagtggaacatgcagttttatggacggaggaattaattaggggtgtttggatccagggactaaactttagtccatatcatatcggatgaatttggagtattaaatatagactaattataaaactaattacataaatgagagctaatttacgtgacaatttttttaaacctaattaatctataattagcgtatgtttactgtagcatcacatagcctaattatagattaattagcctcaatagattcgttttgcgaattaattcaggattatagaatgagttttattaatagtttatgtttaatatctataattagtgtccaaacatccaatctgatagggaagttttagtaccatctatttaataggtcttagataccaataggcgatggcctcagtagcgtgcgttcaacactctcctttctcaaaacttatgctctttagtttttctgcgcacgttctccgatcaattaaacgctgtatttttaaagaaaatctatagaatattttttaaacaaaaaatcgtaataatgcattttattaaatgatgtttttataaaaaaaatcataataatccatttttcaggtttttaagataatactttattaatcatgtgctaatgagctacatcgttttttgtgcatgaggaattagttacgaacctagggttcgatgtttgagattcattgttcataactttatctctctcatttttcggccacacgctcaaacagctaaacggtacttttttaataaaatatgtagggaaattgttttaacaaaataatattaatttattttaaaaaaattttaaaactaatacttaattaattatgcgctaatttatgtttcgttttgtgtgccggagaggagggcccctcctcccgaacataaccttagttgctttgcattcacacctccgctcgccgtgcaactcggtgtgtagctctgtagagaggactaaagatagatgaggtaaaaaaaattgaccgtgtggagaggatagggatatgagtttgtatttgaccctacttttaataaatgtgtatatctttggtctctaccaatacgctcacaaccaaaacgtatacattttagagtagataaattttagagtagataaagaaaaagagaaacaaatgtcatattcaactatttatccaccacagtccatatataattgaaattgcttttaactcgttgcaacgcacgggcattttttctagtttttctaaaaaagaaaagaaaagaaattctactgcgggctgcctgggccgattggaagcccacttcccacgggctaggcctttaattatacaaacccacgaaggccccttcgtcgccgactctactagccggtggttacttctcgaaaccgccgctac

SEQ ID NO: 1612 - DNA, 2000 bp, Oryza sativa
  N_region (1676)..(1676): n = any nucleotide
tcagaattttaaaagttggactaaaatttactgcaagtgttaaatatttataaccggatctagtagtaggttgtctctatggcaaagaagaaaaaaaaataaaataaaacgcatatgaacttgatcttgtttcacgtcatttgtttaaacgagtaagcgcatggatagatggtgtgtagacatgacaaaaaagatgatgccggaacgagtacgcactacgtaaactagatgatgcgtaggaaaaacgataatgccaatcgcaccactcaaaaaccacgtgcaattttagagtaccaatattatttggatgaaattagttatagaggaataatcgtatttgtatttatagaaaatttcaaagatattagcagtacactcaaataaccctatttaatgttgtttgtaatgatagaaattcactcttaatccatcacttcatgcacaaatttaatgtggatgatttgctatttcatagtatattcaataaacatcatgtatggaataaaaggaaggttgaatcatatggcgatggtaagatgggagggtagaattggatgagcccactttattataaaacaatccttttttataagatttgaatgatagaaataaaattattttgggacagaggtattagttaaaatcaaggggaaaaaactttcacatatttacccaattctccgtttgatttgtaggaattacatggcacttttggaagattccaaacctataagaaaattttctatgaagacatgtgaaataaaagatttaatcttatctctcaattttttatggaatgaacaatcctatggagattttagatgaaagttagcaagagctccaacctcttcaaaatttccttacaaatctatctcccatctggattcatgtgtttttcatgcggtccaatcaaaccatcttttcttgtattgcattcccctatcaaaattatgtgtttgtttctaaatgatcatccatgtattacaatcctctatttttcacttatatttctattaaaattttatgtttttctattcctatgttcaatcctatgtattcctatttgtatttgtcctatagtggcggcaacggcaccaagggtcttaggaggcgctggcagtgatggtggtggtaacggtggtgtcaggtggccagctcggtgatggcattggctggtcagctcgatggtgcactaggagcgacgccgggtacagcagccacgccaacgacagttgtggaggtcgacatggtggcggtggctcttgagtgagataagctataacggcttggtggaggtcacgatttgcgcaatgacaacttggtggcaatggtctttcggggagataacctttggcagctcgacggaggtgggcatttgcggcaacaacgacggtgggacaacagcagcctggtttgcgttgcaggaagatggccggccgttgtgctttgtagcgatgaaaatgtagcagcgatgacttttggcgatataagctacggcagctcaacagagacagtgctctatgacgttgacgctatgatgccatggttcgggcaacgtaagaccaatgtttagcgatgataggcggatgaaaggattagttccggtcccttcctccacttatgattgagagcataagctttcggggtggctgcaacgacaatgacagagtgaggcngtgaaagtgcgggctctagtttcgcattgctctgaagtttgaagtgttggggaaaagctgaaagctcagccttctagtattttctttttagttgtttgttttttttttatatctcagttatgagatttggagtgtatacgcttgtataactttgattttgtatatctgctagtggatatagatactggatttctatacattataaggttttttattgtccttgaggttgtgcagtatcaaatcctgatcgttgatctggcatcatccaacggtcagaaatcgtccgcacctcatggtaccgcacctcctcattgaagtggtacc

SEQ ID NO: 1613 - DNA, 2000 bp, Oryza sativa
  N_region (352)..(352): n = any nucleotide
  N_region (360)..(360): n = any nucleotide
  N_region (439)..(439): n = any nucleotide
gtatatttataatacattgctaaatttgtagtttttgcaatactgtgacttgcagctttttgaaaaatctagtgttataagcttggatttgttgttgtatgatttttgttttgtcctaatacttgcagtttcatgtaaagtacactaaatcaaatcttttatttttaaaaaaaaaactagtttttactgggaaactgggctttgggttatccattattttggtctggttaaccaaacagaccagcaattttccaagaccctactagacctgggttctctacaaaattcataacccaaacaacctaaatctttcctaccgatttcatatgtgttgttgctatgcatgatatcnaaggcaangcctctttttaggctggttgcccgattgtaatggtttgataatcttgtatactagacgtttctttttctttatactttngtattctttaacagagcacaaaatataattggaacatcatttactatttttaccaccacccaccttctcaggttgtcatggagcacaaaatatctaacttttgctgtccatatcatacttcatcattttggttcttttagaaagaactttgctcaagttgtcccgtgtttattacagcatcatatagcataataaagcatatgtatcatcagatgtttgaggtatgagttatgaattatgtatctgcactgggaatcaaatcaatagttgatcatcattaatcttttaacaacattgatcattacgatgattaaagtgcaaaaatatttcatactctgcaggcaattattggatttcatttttggattaaagacatgtacgaagattatcgttatctggcaagtgttctgatgccatcagaaacaattagaagctatcacgtcaagatattcaacaactgcacatggccctttattgatttgtttgtcttttcctctcacttgtagccagtatataacttcagtgtaacagaatgttatttttttagttgtaaactgtgatgtgagaaatagttggaaagatatctaaaaaagatagcaaattgcaaatttttggtgttgaatgagcactaatattggtttgattgtaccaatatatcagtatgtaattggatgattcattggccacaatttaggtttttttattagatgtttttttcattggaggcattataaaaaatgccacaaagcaaagatgaaggcattttgaataatgccacagatacctaaaatggcattctggaaactgccctagtaagctctaacggcattcttgaaaacgccaggctagacactttttaaggcgtttgtaaaaattgccctggattgcttttcccgtcgggagtaaatgtggcatttttcaaactgcctctaaagaccattcaaggcgtttttttgactattcaaggcattccaaatcgcctcctaaagtgtgtcatcctgtagtgggagggggaaggcgtgggacccacgattggataggcgatcctggctggccaaagttggccagcgtgaggccgagtttagccagccaagccatccggctggccagtctgttggagtacatttttggcctaaaattactaaaatttagcttggagagtgagataagtagactgttggagatgctcttagcaggttggctgacaaattagtgacagtggtttcactatagcttggtacgcctttaatggtgcggccacgtgacaatgtcctcgtcagctggcccgtacatacataaattgtgatccactgcatcatcatcgatcgcctctgtatttggaccgacgcaacgtcagactagcgtgataaaacaacactgttatatgaggttagcaccgttgtttttatctcgcgtggcaaagaccgggcttaatttgtcacatactcctattaggttgacatacacggctagaaaaagcatttttcctaacgtaggggtctcatttttgcagacggacataccccttagaaccaaacgaccgcctaaaaaatatatatcg

SEQ ID NO: 1614 - DNA, 230 bp, Oryza sativa
gaaagtcggaagcatttggtatacgaaaaaagatctcatgattaatccatgtctatccaatatagctcaaatccgtcggcatgttttaatggagcagatttgattacgatttagtttccatatatgtggatttacttcttttttggtaaacagttcatagtttattatccattggttaagcgaaactcatggcactatgttatctatgtaatcaatgtttggtaatgccg

SEQ ID NO: 1615 - DNA, 2000 bp, Oryza sativa
  N_region (1339)..(1339): n = any nucleotide
gataattgtgtgattgttcaattgctaatccaatggttaggtgcaccggctgctggcgtcacttggaaggacatggtggacttgcacgtgcgtttcccacgtgcattggcttgaggttaagccaattttcaaggaagggaggatgttggggaggctatggtgacgatgactacaacatgtgctccctcgaagatgaagtcaaataaggtgttggcaatcaagatgacgaggaacagagcggtacagcaagaaggtgccttcactgaagagaagcaaccacacaagaacaatctaaatatcacgggccgatgtggactatgtaacgattgttctatcttgggccagtcgtggcgtgcctacggaggagagaaggtaggtgaagtataactgtacaccgtccactgttagcaaactgaactagaacctggcggcattggtggcggcaactccgtcttgttgggcgagagataattccaaaatctattccagatatttcatgtgttcctgtggtgttctagtattcttcctcctgttttgcgagatgcgctaacattctttagaatatatttattaatatggatatgaaattgggctatgaaagcttctaatcagtctatatgtatggtaacaatctgaaagaaaatgaacatatacaaattgtcaaaaaaagggattgctgcttcttgctttcgctaggtacattattgtactatctattcttgcagacgaagaaggcaaaggtgttgagattcagaatcagtacattgaataagacgggctatttttcttacagaaaatttgaaaaccttcatgccacgcttgtcatggttaattaattgtagagtggtatgtagcataaactattgttttaatcgatggaatttgctatgcatttcatgaagaagttctaatgggtgaacatggaggcttgaagttctaattgcctagaaaacttaaaatctgaagatattttagtgtttttttttcgggagcgtatcctatgcacacaggccctcgcgtgtacacaccgtgtacaccaactaaaaattatcacaaaaaattctaggaaaattcatacatgtactttcaatagtatacatctacatgcaaagtcgcatcttcaaattcattctacatagagaataacaaaaaaagataaaattatgacaaaattgcaaccttaaaactgtcagatttttttttgttacggctaaaatataatgaatttgatgttaagattttaaccctaggtgtaatacaattgaaagtatgtgtatgattttttctagattttttggtgacattttttagttggtgtgcacgtgtgtacacgtgaggncctgtgtgcataggatatgttggcttttttttcagcatgtcttgttaaattttatctcgtagaggtattcttttggtattataaactctgcatggtatgtataggcattttcttgagacattttaagctttgcataggcactttcaaaactagatattagtaacgcaaggtacaaacgtaccaaattaaattatttttgttaactaaaacatcaaaagttttctggccacttacaagaagataatgagaaccaaaatattgcacactcaagtaactcatcaaccgttggttcaaacagggtccgagagcagcaaccacgtgtttcatgaaatatatcgcgcgatgtcaggcgcccgacggcatagtcgcatagttgcctcctgccgtaatctgctcaccgttctgattgatcctaggtgctgcatgcccaaatgacttatcgtcttggctaaaaatactagcatatgcgataaatagacacatatggatgcatgcacaatggcacactccctcgtctttctgctggccaccaccctccccgtcttccttggagataggtggcaggtggctagagagggatcaagggtaggagggagaggaacggatcgcgcgcgcgcgacacgtacaccacacacatccactcacggcacggtacggccgg

SEQ ID NO: 1616 - DNA, 2000 bp, Oryza sativa
agtttcaatagaaagggattggttaccactcaaacctgtctttatgacttgaaccgtttgcacagggggtcaaattgttccctttttactaggattcttccccttctatagatttttaatccctacataaaggtataaatctaacatatttggagagattattccaggatagccaggtgaaaaaagaaaatttagcccggcgaaaaagagattattccaggataaagaacttacaatatattaaattgataagcctattggtttctagcgtgcagcttaaaagatctttactgaaacatgtcctatggtcctttagaagtatcagattttttaagtgtaaattttgatacctcccaaccatgagcatgatggaattgtacaatgggacataggggtggaattgtatccccaaagtttttggcaaacaatatgcaatcaagtaggcataatatgtatatagaccattagataaaaagaattattaagcccaaaatcaccatttccaatatattatagtttattttgagtatataattttatctttttgttctatgcaaataatttttatttgcactagtaacaaaaactagcacctcattttctgaagttctgttgctcctatttcagtcaaaaagtggtatggtgctcttctagcactgatgtaacaagaatttgcgacatatcgaataacaaaatgtgggcattgcatttgttctgtgaaatttgcagggtgtagtggcgtctggctttgggtacctgatgctcacatattgtgtggagaagagaggccctgttttcaccgctgccttcagccctctctcccagatcttcgtggccggcatcgatctcttcatcctccacgagccgctctatcttggcaggtactaattcttaattaatttctagcacaaacgaattgattgattcattcatgattccataagttactgattgttggtatggcactaaaagaatagttaattttttgcagtgtgttagggtcagtcctggtgattgtggggctctaccttgttctgtggggcaaaagggaggagaccgccgccgtcagcaaagatgccattgcttcgccggagaagccagtgcaagacgtagaacagcagcaagagaaagtgtgattgatattgattcctcttagctaggctgcatgctatctgcaaatgtgttgcaattaacttaacttgagtgtttatgcattcgtgatgatggagtatatatgtactaatcagaaatctgacaaggcaacgtacaattaatccagctgtaatagctattggtgtactagtagagtattagtagactcacaggactgtacacatgaaggaacatatgtgctgaaatactgtaccattatgcttgagctagatgtgcaaaagaagtggttttttcatctctcaccttttcccttcaacctattgtgcttgtggtcatcgaccaattgtggcaaaacactgttattctagctagttggatgtgatatatcctaaaattatgaacatagcctaaaatatgtcatattcacctaaaattccttatgttttgggacggatgaagtatctcagaagtattggagtactgcaattactgaacagggagggaacaccattacaccaagcaataagataacagggaaggaacaaaatgtgcatgccattttggtttgctacgtacgtacgggtacagtgagttcgtcgtcgtcgtcgtggtggcggcggcggaaggaaggaaggcggcgaccaagaagatcgcgatccagcacggaggcccggatacttactatgggcttaattccacttactaggcctggatccttaaaccttgggctgtcaagtgggcccggcccagataaatttcattctcggaactaaaagttaacccatctccctccaaaaaagaaagaaagaaaagcgcaaccagctgtgtctcctcggcccaaaaccctagctagcaccctcctcctcctcctctgccgccgccgccgg

SEQ ID NO: 1617 - DNA, 2000 bp, Oryza sativa
ttctgctagcttccatgcaaaatatttgcaaatggatagtgcagtgcagaagagcagaaacctaacaaggactgtcactttgtgcaacatcctgccgtttgttcaggctcgtaggacaagcaggaaaagcagcgtttgctcgtagttgccatgacaaaatcgagataaaaaaaataacccaaaagaactgtacctaacattatactagcatgctgcatatatacaagagaagatatacataattacatatatcatttgattaaccgggaatggatcgaagacggcctaccaaacgtgtacaagtgcattgcatctggtcagtcagccgcgtgcagaaatgggcgaagaaactgtacaaagtgcatggctagctaacatttactgtcacttcatcgatcgcactgagtacgaaagacgagtagacgacgaccatcattagtgacgtccacgctaattaccctctcgagtcaaacacaggtgcaggacattagtgcggttaatatcttggagtagttaattaaggcgttaaatcatgtgcaaccgcacgatctctcgttccgtccatttgtggtgctgaccacaggatggttgaaggacaattgagcagtactgctcacttacatgtgagcccgagaggctatggggttcacatgtcagtgagcaatattgcatgtacaatattgcagatgacctgcatggctgcatctggttgaagggtagaaacaccacttttccactttttactcccttgtttttcatgcatatttcttcaacaactaaacattgtgtttttcttaaaaaaatttactatagaaaagttgaatttttaaaatcatattaatctatttttattcttttactaatatttaatcatgtgctaatgaactatattgttttctgtacagaaagaagaagagccccatcggttgccttaataagccaaagcaaaagataaaatttgaatttttaaacttaattttgaagttgatttaaagatttttttcaacatagtttttttttcagcatcgacttttaaatcgttaagaacacatgtataaaaagttttaccaataaattagttttttattatctaatgaaccaaaatggcttattagaaaatatgagtaaccgatgaggccggaagtatccaactaatactcttgaacacatagggcctgttcattttgatgccattttcaaccataccattttttttgtcaaagttgccaaaaaatatatacgtttagtttgttaccaaatttggtcaatacataagaaatcctgccaaaatgttggcaatattgccatcttgttaaaattttggtattgccaaaacttggtaaggtttattttggctacaatctgaacatgcctataatagtagaaggggtttatttgcaaatatccatctccaacttcacgtgggactatctgagtggattaaagtggtttagaatctaataatcgaaacccattttgaaaagggttaaattatcaaatctctcctcttgaccctccctttctttccatgggcttcgccggcgactggaccctctactgtcttgaatgcgcttcatagcttgttttcatagacttcattggcgacttgatcctagtttgttttcatgggctttacgggccactggaccctcgcttgtcttcatgggctttatgggcctcattttcttcagaattttatggccttctatacgcccactacacctaatcacgcgcaaaatctcactgccggtccggcctggcccacccgcaacgactagtcaacacgcgctgcggcctcgccggcttctaggcccacgtagaaggttcgagaacaacgaggaccgcataaaagcatctcccacccccacgatctcgccctctcaaaaccctctcctaaccctagccgccgccgcagccgcagccgcagccgcgcgtcgtctcctccgcccgcgagctcctcttcccgccggcgagagatcaggagcacgcaaggcgcgcgg

SEQ ID NO: 1618 - DNA, 2000 bp, Oryza sativa
  N_region (433)..(433): n = any nucleotide
  N_region (436)..(436): n = any nucleotide
  N_region (807)..(807): n = any nucleotide
  N_region (811)..(811): n = any nucleotide
attattcgtatcaaaccaatagcgattcatacaagttaaatcttctaatcaatggtgggccaataatgaatttttttgcatatgtattaagacgcttggcctgatttcgaaattgtccagagttttttatgtagttttcattgcaaaatgatggatctccttccgtaactttccaattacgagtacgagaattgaaagacatgaaaattctcaattctctacggcgtctaggagatagatagaatattttcaggaacaagaaaaccagaagaatctttctctctattcactaccattccgcgtcttcgacttctattagtttcttttcttctttaatgcaatagctatagtttgatatagaatccatttctcaaagtaatggaaacctttctcttataggaaatggttcgaaaatcgctattccaccttttangtntcgtgaaaagtgatacctgtgaagatcgtgcatttcagtcacattcagatccgttttttgagtccatgatataaccaaattggatggatcttccacccgtttagctaagaaagaatagatgcagaggtggataatagatcgatatgaagatcatgagctgccccataatgaaaccaccaggagtcgcgaatatctccttcttccctaatccaagattggagaaagaagatctaagagggacccatggagaatgtggtcagaaacccataatagagtccgaccgcaacgaccgaattaattatcctcatcgagaaacttagactactaagtagaaaagatttgaaaatcatggcatgggtctccttttttcnttcnttagagttttctatatgcacaatttctcgatgtttcgatgagaatttcttgactttccatatatagaaagagatagactataaatgacatctcttatgtcaattagaccaaagggatggatattaaatgataggaagtgctaggaagtgaaatagaatgaaatagagccactctgggcttacctatgaaatgaggcatggaacggagccactacgaagaaattccgggagttacgaaagaagcttcggactcatattgttcatgggttgagagcgggagttgaactctaggaggtcgaatcccccttattcctcagtagctcagtggtagagcggtcggctgttaattgactggtcgtaggttcgaatcctacttggggagatttgattcattctttaatgtaagaataaagaattgaatcaaagggcttgctttgacccttaggagtaggtaacccgttcgctatccttgtttctattgcattttatctcatcgtatcacattctgttctacgattccacttcgacaaaaggatagaatccaaaaaatgcattgatcattacatggaattctattaagatattatatgaaagtcgaatttcttccactctcatttatcacaaaaaaaatgtgatactacagataaaccttccttttagttctgaaacatgaaagaaaaagacatgaatccaaatgcagatcaccctgaaaactaaataactcgacaggttacaggagagcagcacaaacacatgcagtttcgtgagaaaaatcccaggaatcttcaccaagactcctgttcttattcaaacccaaaaacacacaccaaaaaaaaagtaaccccaccatctcatctttattcccccataattccgaatccatcgaaactggcgcgatcactcgatctcactcaccaaccttttccattttacacttgaccttagtaagccgtactcttgtgggctcactgatagcttcaagcttctgcaaagattttgcttagaaacagcaaagacaaaaaaccattgcgtggtggctcgtcgtactagctgatggcgccacctttgcatggcttcccttgccggtgacgggaaaagccgaccggtgaaccgccctgacggcgagccggagacgacggtgagccgggtcatggcgtgtccgtacgtgttccgtgcacaggcgccgccgg

SEQ ID NO: 1619 - DNA, 2000 bp, Oryza sativa
agctccaattcatttatagccaatctaatagttcattcatacaatagttatatactacattattaatatctggtcccacctatcatacacacactgcgtcttggagtccgtgctacagctgactacaaatctatagcccgctgctcttctctctcctcatttatcttcttaaaatatgtttgcagctggcttatagcctgctattatacttgctctaatggcgtagtatatttttatagttaactattatatgaatgggctattagattggctatagatattttggagccagtaattgactatactattgaccttgctcttaggcgcagacaaaacatgcgcgaggcaaagctgcgtgtcagtataacagcgattttattctctgtaaacaacaacggtcactatatgttggttgctgctcctgtcaatattgtcaccgtggtttagtatgtcacagcacgtgtagcaggggtagaatattatgctacattgatatttaggatagtctacgatgagatgggatgggatgaacttaggggtgtttagttgacgggtgagtgtgggttggtcctaggagaggaatatttttctcagatccgggaccaatcgatccgggaaaaatagtcggacgaactcgtcccacctgggacgagtgcacggtgtcagctcgtccgcgactgccgccgctcatccacgcctcgccttacctccgcgtccgcctccgcatctgggaccggccgtcgctcgtccgcgtctcgcctcgcctccgcggccggtctcggagatccgcaaccgccgccgcctctgggaccagccgccaccgcgtctgcaaccgcctccgctgccgccgctcgtccgctgggaaccagacggccctaacggtccatctcatctcaactcaatttcttctatcaaacaaaaaaaactataaccatcccattttttttaaaaaactagaataggtctaactcattccattttgtccccaaaccaaacacacgctgggattccttttgaggaaaaagaaatcagcggcatgtcagctttgatggtattgtttacaacactgttgtggataatttaaaattttggcttgacgtgtcaggaggctcctggcatccaaatacatgcgtcgtctgaaatatcaaaattcagcccccagcagctcgtagtggagtgaacgagtgatgtggaacaggtagggcacgcgaagaagatgtttggttgatgccaatgcttgatacaactaattttaggtaagttattttcactttgagctggagattttttttacttttgtggtcttttgaactaacctcaacaaattttatctatctacgtctaaattgtcatacgacgaagaaataatcttacatataacgacgagagttcgttgacgagtaaaaaccgacgtaatcgagatcgttgatatatttgagaaaagagtcaggtgttctaaagtaaaaacaaaagaagtaagtttacctgatcgaaagtaaaaatattgattaaagggtggtttaaaataaaacatcgataataaaagataatctaaaataaaaagttttaattaaaaacccctaaacattgagataagaattgattttgagaggccgctggtgatattcttagtgagagaaccttttcgatttcgatctccatcgatcatttcggttcaggttttcgttctactgtgccgagttgccgacccctccccaggaggagaaaattgagtcccgaatttcttttcaatcacaaaccatttttttttccgtttccttggatacatgctcatgtcggggtgcgtgcagcgtccacatgatgtgtataaataatcacccgcacatatgcccactccctcccaccttccccaccctcattggctcccccgcctgcctccccttctccatccaccaactcgccgcacactcaaccccgcctcgccgccgcacaccacccaccggcgaagagaagaagtcgtggtttttcttggctgcaag

SEQ ID NO: 1620 - DNA, 199 bp, Oryza sativa
  N_region (2)..(2): n = any nucleotide
  N_region (10)..(10): n = any nucleotide
tnagttcccnaccccccacacgaaggcgccctaaaatatccccaaaccttccaaatctccgccccccaacttcccttccccgacgccgaaatcccccaaattccacccccgcctcctcctcctcctcgcgtcgcgagagaatccgaggcgcgcgagcgagaggaaggagagaaggtgagagcagcggcggagggaggag

SEQ ID NO: 1621 - DNA, 2000 bp, Oryza sativa
  N_region (846)..(846): n = any nucleotide
  N_region (859)..(859): n = any nucleotide
tacctaggaagacatgtcatgatttcttttgcttatccaaagtgtcaaacattttattttattagatcctatgctaaactatgtaactgctgctgatatcattttgtaattaatactctgcattttgtctacatgattttgaatcgaggcagcaggagcaaaacagctttgttcgaaggactcaatgctaggaatagcatggggttaaggcattgaatattcctctcccatgctctggaccgtttttctgttggcggtctaagtcaggcattgctccagtattagcttttggatggctttaattttattttgtgaaatttgaatctgataaaagtacatgaataaaaacttatgttatttcttatttcatcattgtaaactatgagatcaatctagccccaggaggtgtttgacaatatttgaatgtttattgaatcaactacctcttggatatgggatcgtctgagaaaaatgtgtgttcaatgatctatatagattctctccacttctggggctacagtattgagcttgttatgaaaatcaaagcttgaatttccataaagaatcataaaaaaagccacttaaagcatgttgtataatatccaaggtactttagttattcactggaagggatcaaggtaatataaagccacggttttgtatactatacctggcacttctgatatagggaatagttttcacttttagggaactaccgataaatatgtttatttttccaaattatcacacctttttttcctggaccatttatctttcctatgctaatataattatttggaaagtctcgcaatcgtattatcttttctctgataatatttcttttanatatttcacaagnttgcatagctgaaaatttgcagcccaaacatttcttctttaaatggcatcccataattaaatgttaaactgtttcttgctaacttatgtatttttcgagcttgcatggtgaaccatcaattctgaattatttgtacttgtctgttttgtcaattgacattcaagcaaccaacaagcacctgaagctatcctgatatacaaaccctgtgtggtctatctataaatgccgatattctttttatttgtttgaatctttagatagataatacgcctaccacaacgttttcttgaatgtgtatacattgggaactagcatgtatacttaaaatcaacaacaagaatgtatgttaatccatacataaatatatctatctggattggatgtagccaatctgtacatgtactaaatttaaaatagcgacggataataatgattcttccataggagtgtccatgacattaaaaatgccattgaagaggcaaatgaacacacaaaatattaggcaaataaaaagggatttgcaacaccaattggcactcctaatgcttaacatgacttttgtgcacgatctacataacaaaaacttttatatatgtctatccgtgacgtgccttgcacgtgcacgctcactagtaataaaaatggaccagctgtggaggaaaactaaggtgaaattttttatctttttagatcaaagaacatggtatatgtggacaacataacactacctgatgtcaaagaaaaaacataaccctgtgtatgttaatctgtatagctgaggcatccaccagagcatgcatgtgcagtatattattggttgaatttggaaaactagaatacgcaccatataacatatatcggtcaacattatcataatccccaaataaaaaagataactttaacaacaaaaaagatgcatctggcatgcagctactaaatccaaatgaacaaaattcatatctcccaaacaattttggtcaaaatggattaaaaactcaagacgatgtcaagaaatgaaaaaaaaatcgacatgctgcatctgcctatttaaagctcaagaacattcagaagaatggcggcgaaaccaaacacaacaatcgcatgatcagctagagatcgaaacagagaaagaccgtgaccc

SEQ ID NO: 1622 - DNA, 2000 bp, Oryza sativa
cagcactgtacacctcagaccgaggcctaccgtttaccaaagttttggcctttctcatgtcctcatcactagtctttaccctggatttctctttggaatgcatcatgtcctgttcatttgacgctattctttctctgaattttgctcctaacgtttcagctagccgcatacatggacgtaaattaaagtatcgcattcaattcagatgaaaatgaataacaacttaacaagagtctgattattcactaaaaacagtgtgctgaaggcctaaaacatcgccttaatcaagcgttacagatgacaagccgccatcatccgtatcgaataattataattatattccataaactgccccgtgataatgaaatgatctatagtttgggtcagatcagacagatctggagtcggtagaggagattataatctatcagttcagttcacctagagcaagaaaacaatgagcacactgtatcagaaaaaagaagaaacaacaaacaaatgcttagtcttttacttgccacatgcaaaccttccttaattccaagtccaactgtacttgtaaacaattggagggatgagctgcataattaacaagtgtggtcaaagatgccctgctggtcattagaggtcgcctaggcaaatttctcgtttatatctgcctagtaattcacctagacaaatcttacgtctccaacaagaggtgcaggccaaaacattgagaaatccactgtaaattaagcaaattaagtaatagaggagcagcggcctcctaggcgttggagacctcacgtcactggccatttttctctcgataatccaattgttttatctcacctcgtcaactcttttctgcttcatctcactcgcttcacctctagcatcgcgcgcgcacgaactgaaacaaacttatcttataatttggtgcaagctagtttttttttaatttaaaagggtatcatgcaatgctcgtggcctattatgtgcagtactataatcttgatattattcacgaatggagatcttcatctcatttactacaaaagcactatctgcttaggcaaatcacttggatcgaagataatgtttgattttttttcttgttttctgaagattttatttacaaaatcaaccaacaaaatatttttcaagttactataaatatttttgacaatgatatgataactccaatatatgtctatggcaatacgatacttcgttatggcatggctagtcaacaacagtggcctggacaaaggatttattagtattgaaaatgaggcatgaggagtgttttttttttacaaaaacaagaaaaagattctgaaaataaaaaaaaatcagttagtgctattactccctccggtttcattttaattgacgctttggacaatgacacgttctacaagatatacatttgagcttattttttattataatatatacaataaataaatgcatgtttatttttattatagtgttttgaaagacaaatctatatatgtttttctagtttctttaaactaaatatttttaaagttattgatggttaaagttataaaagtttaacctcaatcttatccaaaacgataattagtatagaaccagagggagggagtaaagaaaaagtttggggcggtgacaagagagaatcaagttgtaagattaatcaactgaggcgtcaccttcatggaaggctagcaacaaccaaagagctagctagctaccttgaccgaccgaattctttaatattcgggcagctcatgctcgtgctctcgctcatgcgtgtggactttgaatccatccacctcatcctcctcccgcgtactccataaaactactcggattcgatctcttcctccagtactccccatctcccatccaccattgctgccatctccaccacatacaatacaacaactactactcagctcaccatcaccggagcaagagccaagaagacgacgacgacgacgagctagcagcagcattgcaaccgacgg

SEQ ID NO: 1623 - DNA, 2000 bp, Oryza sativa
atcccaccatttatcattgcaaaatatgacatatagaaagagaaatgaaaaagaaaaatactcttagagaataagacgaaccatttttaataattcgaggtgtaaaatgagtcaagaaattgtttagactccagcgaaaagggttaacccggaagtgatatggttggagtcgcttcgtgtataagtgttaacccggaagtgatacggttgaagtcgcttagtgtataagggttaacctgagagtgcactttcgttctcgcttcgtgtacatacagtgaatagtgatatatgattggagggacaagcggacgttgtaagttggttgcaaccacacaactcaggcaggctcacagcccaaccagggaaacctacatctctggcccacgaggcccgtttaggcccaggagcgagtccacaaaggcatcatcgcatacgtgggttgccgaatattcgctccgcttcccccctcacgcgagatatttcctctcccccggtgggccgagccgccacgccacaccgccccctgtatcgctcactcgcttactatatagccagaggggagggagcgggtagggttttacctcctcccccccgcagcgccgccgccgccacacactcccccacatctccccttcccttccactcctcctcctcctcggatcgggaggcggagcgagcaatcccccaaggtgatttcctgctgctcttctctcatctccccccatcctctccgttgcgtgaatctgttgtgtggttcgtcgtcgattatcttagctaggctagattcctcgcggtggtggtgatttgagtgcgtccatctggtcaaaggttcgaggtaggagtagtagtatgtgtgggtgctctcagttcgttgcatgtttgggttctgtatctggtttggattatcatgtttagtggttggcgcggtagttgtaaatctgtggggttttgtcacgctggttaattttttggtttcgtcccggttccgatcgacgtttctttgggtcgtcaggtgtagcgaatggatgggattggttcgatccgtctggtagggattcgttctgctcgtagatctgctgtggattgctttcgcggtcgcctgctggagctaatttggcaggattaggatggttacccatttctccagggcagatctatgctatgttcgttgattggcgtgtgctggctacagacttgttcatgttgttcactagattgttaaacatgtgacgtcagccggtgattgcttgtctgccacggttttgtttgttgtcctagtgaaatatgcacagatacttaagggccgtgtttttgttttcacaataatggcagtagatgagttgaattcagtttgtcatatcgtttttgtatcaaaacaagtttttttcttactggttaagtgcttctcgcggtcccgccagaatttttatgtactgggtatctctgttatgagtactcccatatcctgcatgtacagtactgcagtggtgaattggtgatgtgctgatggtaatgaatatggcggaagtgtatcagtttgctgcttttgttacatttgatgtgtgttttcaagtttcatcttttttttcttattaatgctgcatctatcaagctgtgcagtttttttctttgatcgtcttaaacctaacagtgtaactgcatcagtgtggtatttggaggtagtattagtaaaactggacatgttaaaaattcgcatttagtaaaactggacatgttaaaaaatcgtatttagtattttgtatcatgtatgatgcttaatttttgtttgcgatatcaattatatttttatttgttgcattgctatgtttttacttgagtcatgccgtgatatatttgtagttagaattttgattttaggttttgtgttttgcatggttctaactgggtttctttttttggtacaggaatttgtatttgtagcgtgatttgcaaagctagtcaagatggtgaagttcacagtagaagagctccgccggatc

SEQ ID NO: 1624 - DNA, 2000 bp, Oryza sativa
  N_region (1176)..(1176): n = any nucleotide
  N_region (1256)..(1256): n = any nucleotide
attaccgtgttattgttttgattacatatctgccacatgaccatcctttgctagccctggtacaaaattggtattccatcgatgaattatccaactactcataacaattaaggaaaacatttagttacagttccaacctttacgagtagaacatgtccgatcaatacgctgactactctagttatttaaaatatattatccgctaggagacattaatatcttctttgtacgtacttgatgctgaccttcgggtatatgttaccgaatccactaaaagcctagtgaacgacaaatcacatccgttaccatattattgtttggatcatataattgtcgcacgattatcctttttggctctagtgcaaatttggtattatatagaccgtttcacctatctaacggcttacaatatttaagggacacatttagttacaatcgaaacccctacgagttatttaaagtatattatctgctcaagagcattaatgtcttgtttgttcgtactcgacgctaacctttgggggtacgttacagaatcgactaaaagccaagtaaacgacaaagccgcagccattaccgtattattgtttggatcacataaccgtcacacgattatccttgactggctctggtactaaattggcattatatggactgtttcacctatctaactaatcataatatcaagaaacatatttagtggcaattctaacctatacgagttgtttaaagtatattatccactcaagggcattaatgtctttgtttgtacgtattcaacgctgaccttcagggctacattacaaaatcgattgaaagcctatgaaacgacaaagccacgacagttaccgtattattgtttagatcacgtaaccgtcgtacgattatccttggctagatccggcacaaaattggcattaatatcgaccgtttcacttatccaaatagaaaagaaaacatttaagaaacacatgcagatatttttccaacctttccaactacaaccaatatgatcaacgagcggtgacactctctccaaacaaaaaccagcgacacttttgctcaaccggttagccctaaccaaagcgcataagtggtcccggtcctcgcgctagttttacccgtacaatcttgactatacaaatcttctttgatcttcaaactaagattcatggncacatagagatgctaacaacaagatgaggaggagtgatggatggagttggaatgatgatagatgcaatgtggtctagtgnggtcacaatgaggaaaatgttgggtgtgaggatggtgtggggggtgcacatagggacaagggagttctggtgggtttgtcaaggctgcaagggacagagttccacccctgatagtggttgggttggagtcccaaacccacacgagcggcctttgaaacccaaaaaaaaaaaaagattcataaaaacaccccaagagaagaacagagatagaaatgaaaagaacacaagacaggaacaacaccatctctcttttccaacccttttgccatcgtcctcaaagtaagtgaaacccctccccacacaaaaaccaaatcctctcacatgaagataaaaaagaagaaccaccctaaccaaaccaaaacaattcagttcagagagagagagataagcacaatacagatagacataaatagagatatacacaaagattgttttttctttcaacaataaaaaaaactctacttttcttttaaggaggcctgtggcatttatgcatttctgttttgtttttgttggttgggagagtcgaagccaaagcccccctctcctctcttattcctatattagccccccctaccccattttgccgttcgctgcagaagcaacaacaccaacaaagctatagctgtctctttccttgcatctcctctcctcttctcttctcttatataggccaccgcgaggtcggtctccatccatccatccattccagcatttcttgaagcttgctgtggatcagagagg

SEQ ID NO: 1625 - DNA, 2000 bp, Oryza sativa
  N_region (1304)..(1304): n = any nucleotide
  N_region (1308)..(1308): n = any nucleotide
  N_region (1333)..(1333): n = any nucleotide
  N_region (1347)..(1347): n = any nucleotide
  N_region (1422)..(1422): n = any nucleotide
  N_region (1807)..(1807): n = any nucleotide
  N_region (1818)..(1818): n = any nucleotide
  N_region (1851)..(1851): n = any nucleotide
  N_region (1853)..(1853): n = any nucleotide
tcggcgtcagattaagcaaactgcactttcatcttctctgcattttaagcaaacggagtattaattaattaatttcggaaacaaaatggtaccaatgggcacggcggtagccatcagctgccggagatcgaaaagaggtgggagaccgaagatacagctccgatacaggtcacgggtatcgtcgggcttctcgagaaagcggacggccgccgcccgccggacgcgtgcctcgcgagatgatcgagctggccgttgtcatcagactgacgaggaggtagtagtgtgccacgtatgtatagcttcgcggcaccccattccaatcaaatgatccttgcgacgtgaaccatccaaagaggatcggtggaatttcgacttgcacagccagcccattcctgcaaaggcttttatcaacttctctccgttcgaaaaagggtttatcacgagtgcacattcaacgtgtacacgtatactacatggttcgacactcgaacagttctttttcttttaaagatgttcgaacgtcagttcgggcaaacaacgttatctgttttttggagtgcacattttacaatcccgaggttgcgatatgtggcccaataatgtgcactctgctgcattcccctttggagaaggttggatcagatgtagtatagggtgtgtttatttcacgctaaaattgaaagtttggttgaaattgaaacgatgtgatagaaaagttgaaagtttatgtgtgtaggaaagttttgatatgatgaaaaaattaaaagtttaaaaaaaaatttgtaactaaacaagaccataatgtattaatcacttgcgttgacaacaattggcacactcaaactccacaagccatctcatacactcctattatattattattagtagtattttttgctgggaacattaggtacagtctactattttaaggaggccaaaacgaaaagcacatcctcttttctttttctttttaacgcattgacatgacagtgtagcaccaacaacttcaacaccagcacgatcaagcatattctaccatagaaacttcaacagttcaaccaacatcagcatcaactcctgttccgttcaaaagaacgtccaaactctacctaattgacaaatgatttcaccacgtccctttccattttcccttgttttttttcctcctcgaagaggtcgctttctgtaccgtctggaagacgtcatgtgttcttactatagaatgtccacagaaaatcctgcattccacggcggccgaaatccaatcttgccgatggtttggtttcctcttcctcactttttcnttcnttcttcctctccaagaagacaagtnaccctttcccaagnccctctctctcctgacgagtggggcccaagtcgtgcggtcatagactttttactactacaaccaacgttcgcganccaccgaaagttccagaaatccaccgctctccgggccccacctgtcgccctgggcccgcatgtcatacgcgtgcccgccaccgcgctgcgggcgccgcctctcccggtgggtttagaaactgtgaggccgatccgcataccgcggcggccgtggtgggcccaccgtctagcgaaaaccacccccgccgccgcgcgtgccacgtttactcccgtgggccccgcaacgaggcacaaaccctaggccgcttatataaacccgacccgccccgctccggtgatcggatccccacagctttgcgtttgcactcctctcgatctccattcgtttttgagttcctcgtttgctccgcctctctttcactcatgggtaaatccgccaatcttngattttatttnattttgagtttgattttgggtttgattttgtangngtttttggctgattggtttgggatttttttttttttggtttctctggaatgagcaggcaagattaagatcggaatcaatggtgagtgttcgagcatacgattggatctggttattttatggtatggggtttattcggtgcggatttg

SEQ ID NO: 1626 - DNA, 2000 bp, Oryza sativa
ggtgatgaattttatagatatataggatttggctggggcaattctgcagccaccccattgaaaagagataaaattttcgccctagagtctaagttagcaaccttaacagtatattttaaattatctagatttgtttaatgaatattgtataattacatttttcattacatatgctttagtaatattgcaaatttactatgatgtcttaatgtaaagctatgaaaagcaattatcaaaatcactcattagagcaataaaaaggttagaaataccaagtaaaaaaagaaaagagtactgcacttagatacttacaagttaggaaaaagtgcaaataccctcctaaactttagatagaagtccgtctagcaccctgaactttaaaaccggatatcaaacctcctaaacttcacaaaaccgttcatatattaccctctatggtgttttttacagtggtttttatctaattagtatataaattggatgaatttgatcacgtgacatacacatcgaacatatatattaaaatctccacctaaatctttctttttatcaacataataatagtacggtatcactgtataagtataaattgatggcttacagttgatgatatgcaaatatattatattagttatttaaagttgttcgtttaagcttttaaaacatgcaaaaccaccattcaaaaccactttagggggggtaatatgaacgtttttgcaaagtttaaggggttgaatatccggttttaaagtttaaggtgctagatggacttccatccaaagtttaggggggtatttgaactttttcctacaagttacaatgcttcaaggtgtgtgcaacatgtaaaaaaacaaactttggtgcataactggtctctcagaattataatgattttacagatggatgaatagaagactaacaatgcaaaatccaactagttaatgtggagggaataggagttgactgcttatgtatggagttgctgtacaaatccaaggcagcattaaccaatgagataggaaggggatgatgcgtttgattcagcttattgcctgagtcgcctcatttgttaatgctgcctctccgccgcctgcctcgcccgcctctccgccgccgaccgcgccatccgccgtcgtcccggcacagccgtacgtgcgcatgccgagagagagagaggaagaacgagagagagaagagagagaggaaaaggggaagaggagtatgataggtgggtcccatattttttaataaataaaatgctgactggattgccacgcgtacgccacgtatgataaaaccgctctggattgggtcgaggggggtaatttgtccagtattgaaagtttacgggggtaatttagttgaccacgatagttcgagggggagtaattcgtactttttccttataaaaacgattttgatgtttcacttgcgacaaatttttgaacctctatctttcagtttttcggttgtaaaatcttacattaagattcatatttatgtatatccaacctacatctacactaagtaacattagattttacaacaactttttatctctcttttaaaaaaaaattaagacgggctatatctattggttaaaatttctgcaagatttaaaactataaatatgttgaaagatgaataggtgcagtcccttgtaataaaaatgatgtaaaaaaagcttgtttccattttgttgggtaatggaacccaggtacaatgggaaaaaaataatgagaaaataataaaaaaaatctctcaccatcatcctcttcctctgttttattagcagtagccagtagctagctgagctgagcctgagcttattatatttccctccacttcgtcctcttcttcctcctccatccccatcctccatcggatgcactagtagctggccttgtaccctacctagcttagctacccacccatgtcctcctcctcgtctcctctcgctgtctgcctttgacttggagacctagctcgtcgatcgccgg

SEQ ID NO: 1627 - DNA, 1121 bp, Oryza sativa
  N_region (44)..(44): n = any nucleotide
  N_region (70)..(70): n = any nucleotide
  N_region (72)..(72): n = any nucleotide
  N_region (74)..(75): n = any nucleotide
  N_region (77)..(77): n = any nucleotide
  N_region (80)..(80): n = any nucleotide
  N_region (84)..(84): n = any nucleotide
  N_region (162)..(162): n = any nucleotide
aaaactccgaatggctaagccgttcgggatttggaacgggaggntaacgcccgaagccgaaggcttggcngnanntnttnggtngctaacggagcttcgaagcggcgaacggcggcgagcacacggcgagcgacggcaacggtcggggcggcgccggctaantacggggagtctacttgagctactaccgagcctctctccgacgaggagctcgccaattgttccgcgtcatatcgccagctctacggcatcgcaaagttcattgatcgcaagatgaacgattatgagcagctcctcatcgaccagtacgtcaaacagggctacgccgaggaggagaccgaggccaccgacgacgacgacgacgacgagtagccttgcaattaattgttgctcgttattggaacagtactagtagtattcttgcgcaaatgattgattacttaatttttccataatctgctttgttttatgttcggtttctgtcgattctcaattcccggtctgtgttcgtctccacagaaatccagcatctgctgcatattatgtctgtttttgctcatctattagtacgtaagagttgtcaagttgcagttatggtgatatatctcttctttttacatcaaaatcttcctcttttcattggttaccacctctcatgtctcctatgtcgatctaaacatttctctgttggctttcaacatgaatttgttttcctttgcacggcacccaaagccacgggcttcgttattttctccactcactacttgttcgtttagcaatttgttgttgattcgtggtaacaaggagagtttgtgaattgttgcatgcgctggactaaattatggacagtgctcaattcagtattcagcgctaacaaggaaccaacctgatggaccgaccttcctcttattttcttggataattcaactgtgacgatgacctctctgtagattcttttaattttcatcattggataattcaaccgtggtgatagattttcatcggagaattaaactgtggtggtgatcttcagctgtaaatttcaaagtcaaacaggcagaattttcagacacatttgttggaatggagtatatatttgttggagctgagcagaggcagca

SEQ ID NO: 1628 - DNA, 2000 bp, Oryza sativa
tttccgttggtcgtgtagacgctgcagcttcagaagatccgctctacgtggagattgaagccgacgtttgggaaagcgagcaaggcaagtcacatcatccttgaacatattgaatcccagtttataaaattattttgatttaaattaatgcattatcgctttatttaaattcccacgttatcactgttttatttagccatgcctatttacctttgttatgaccttattattattgttattgttattattaccttgttcaccctagaataaacaaaaccccaactagtggatactctattcatggtaccactagtatgaatttaggtagatgcttcgctatttaattaggcaacattaggtggttttacaactctagactttgggaatattcatattgcttggacattatggaatggttggattattgtggaactggattcacacctccccctctattcaaaaccctcaaaatggttttaggctgggctcggggtgcatggttttgatagtagcacctcggccacataaggaccggtcttcgggcctctgttgcaaagcactaccgtacttccacatgtctagtgggtaaggcttagtttgtggctcagtctggttataaacaaaagtacacggatggagatggacaaagtcagggggtcgatggacatctctagggcaaatgaaggctacacgagctgcggcccggtagtcgagatgtcatggcacagggctggtgtcctgctgctaggggctcagtcctgcctacctgtcccagaggttccggccgtaggtggggttgggtcggtactcttgtctatggctaggatgggttgggaactacgtcacgtctttcgtccgtataccgtggtggtatgtggcacgtagttacacgtgaagaagatgtgtcttgtgggtaaagatgtacacctctgatcagagtataatctattcgaatagccgcgccctcggttatgggcaagcctagcaatgtacccaagttagtgttttaaattcttaaaacctggttaacaactaaaatgtggaatggttggcctgggttggcttgggacgagctgggacccagggtcgggttgccagttcggtctgaatcatcgtaggccttgggttaaggcaggttcgtgtgggttcacggccttgtttaataatattgtatagctctaggatcgtgtttttaaaagtagctttgagcaactaagtgtcttttaatgctgtttactgcaaaccctaaccccctatattataactcccttgtacccccttgcatttattctgcacttgtgggtgtgtcttgttgagtacggtggttgtactcagtcttgctcaattttttcccaaacccagaagaggagttcatggaagatgaaggctttggtgtctagctcgtgcctgtcgtcaagcgcctgtggtcgtcgccctagtcttccgctgtttttttttcgtttgtcttcatgtgtgctgggctttcgccgcccatgtaataaattaactatttacgcttccgcttgttaaactttgtattgtatcaacttttggtgtaccttgcctcctgggacaaggaataatacacgcacgtaaggaacgcccgttgggttatttccggtcgtgacatccagctccctgggccatcggtgtactcgccctctccttcggtggtgccgccctctcctgttgcggtgtgtcacaccccgaagttttcctcccaagccaaaattgtaatttataaatgaccctaagaaaataccggtgcaaatcaggagaaaaccctaagaaagtaatgcaaataataatcggatttgacatgtggaattttttcttgagttctacatgtcgaaattcattaacaagatttttagtggaattttcagagctctagaaataattttaaccagttaaaattgagccagcaatattgtaattccagggaaaatcctttttcctttttctttttcttttccctccctttttcctccttttttttc

SEQ ID NO: 1629 - DNA, 235 bp, Oryza sativa
  N_region (13)..(13): n = any nucleotide
  N_region (16)..(16): n = any nucleotide
  N_region (38)..(38): n = any nucleotide
  N_region (87)..(87): n = any nucleotide
  N_region (96)..(96): n = any nucleotide
  N_region (112)..(112): n = any nucleotide
  N_region (117)..(117): n = any nucleotide
  N_region (142)..(142): n = any nucleotide
  N_region (163)..(163): n = any nucleotide
  N_region (166)..(166): n = any nucleotide
  N_region (226)..(226): n = any nucleotide
ttccatggcccanggnacttgatgggccttgaaacaantcaaataggttacatattgggccgaagaggcccagcccaattggcccgncggatcctnacctcaaaaccctagntgcgntaaccttcccgtataaatacccttntccaatctcgttctcccaatnttngggccgccgcagcagccgcctccaatccccaacccccagagaaccctaatccacaccctntcaagccag

SEQ ID NO: 1630 - DNA, 2000 bp, Oryza sativa
  N_region (679)..(679): n = any nucleotide
aagagcctagagtctatatagaaaaacaatttacaaaaaattcggaattaaaaaatatattaaaagacgagtctagtgtccatataggaatatatataatttacaaataactaaaatttggtattaaaaataattagtaactaacacgtatataaaatacgctatgcatattacatatttgtagtttcgtaaagttattgcaaaatttaaaattataatgtcattttaatatatctgaataatataatgagaaaacatatatgctattatatgagagaaaatataatgatgctagccgcgcaatctgtgcgggccaccatgttagtatctataaaataaatatattttaaataaaaataattgcatattatgatagcttgtttaataataaatctagtaacatcaatcaattttacttgattgattttttttatttttcttgcaagtaatagccgaagtaaaaaagtgtaacttaacactatgctaaaaatatttatattttgggatggagggagtacaactcatccagccatgtttcccctgagcccctgatggtcgtctgactatttttttgtgacaaaggaatcatgtgcagcagagcttaagacgtgtactcacatacagtaccgagcacaaacaatacgcgcgcacaaacaatgcaagtcgaggttaagccggnggcgtggcgactggcgagggaagagtagacgaggtcgatcgacgagagtaggtggtggactggtggcgcaatgattacggcggccgtcccgcgggccgacaggccggctcgcctacccccgaaccgggggacctgccggcaatcctcctgcacccgcccatgcgccccgacgcgtggcgtgcccaccgtcacccctccgcccgcgagcgcggcccgtccatccatccccacccaccagtccaccatcgcccggctcgccgtgaccggctgcggcggctgcgcgagcgcgaccgaacgagtgcggcgaggcgactggcccggcccggcccgggaaaagcctgcctccgacgtgacgggttaggtcaaagcttgtgtggggctggcactccggcgtgacggagcccttccccgatgtgatgcctaccggattcacacttccgttaggcagggtagctaacaccgttcgtacctggagatcatgaaatgctatgttccgatgctcactatggtttcatgttcatggatcaaagggacttggaactagacaagagtctacaagttccgatcatcttatccatgttcagcactcctaaatcatggagattgatggaaaacaaatccaactcaatgatgggtagtactcctatgtgggaaaattctcgatatctgtaggattaagtccattattaggccatcagaactaatcatacatataatcttgtttggttcaaatcaggagccaaggatccaccattccaacaagttgtaatcccagtcaaagaacaaaaaaaccacatcatgtcccaaacagtatgagcctaataatttaaagtacacgccctgctactagtagcagcagcagcaatattatttccacacacaatatacaatatacaatagcaggctataagccagctgcaaatatattttaataagataaaagatgaaagagaagagcagcgggctacaaatctttagccagctacagcatggactctaagacgtaatgtgtgtatgacagtgggaccatatgctaatagtatagtaagcaactattgtataaattgactattaaattggctatagataaattggagctagtagttggctatactgttaaccttgctctaaaggggcactgccactgttaaaagttctaacgtgtccatgcctctaccctggcagcctcgccctggaaacgccccttatataacgcctccccaggcttctactccttttcaacctgtctttgtctccctccgcctttgccccgccttccctgcccttttctcttgctgagccgcttctgcattggcttgtg

SEQ ID NO: 1631 - DNA, 2000 bp, Oryza sativa
  N_region (327)..(327): n = any nucleotide
tatgaaatggagcatgtactctttataactaactttacatgtcatcctctacttatcttctcttcctctcttcctacttctctcgatcttgctcctcgtagccccatcattattattgtcgccactttcctatcaccttacatgatttgctcgtccttgtaaaaaatccctttgccacaagctgatgtcgttgcagccatcgacaagtcaaatagccaatgtcgtctataagctcaccggtactacccttcatcagagtttgtgcatttttcactggatcgcatagagatggaatgctgagctagagcgagaggtggctatagcttnaccctcgatgtgtccatgaggtcgccgccggcgtgaggtggctagatctagtcgttgcaacaccactagatctaaaggttgtgtggccatgaatcgagttagcaagggcgaaacaatatagggtattggtcgcctcaagctcatgggaaggggtgtgtcatttttaccgttgccttgagccatccaaatcttagatacgtgagatcatcttcgtcatttcggtggcctactaccggaacatggttgttgcatatattccatcggcacaatgacatggagccccaccatgcaacacaaggtaggtgttaagaggctgagctgtagacttgcggtgcatgtcttgccagaaagctcaatggagccagtggacttagcatgtgttatttggcggtttcatgaaagcacagcacacacattagcgtgtttagtaaggaaaaaatatacatgtccaactgaaccaattctctagcttgtgttgaggatgtgcatgtgatatgtatgttaagtgttcgactattgtatttgaaagaaaacaacataaccaatgaatcgtgttcctaaacttcccatttgtttgttcttctttagcctttttggcaaacggtggcacaaaatggtttgtgtggattgaaagcattactagtgactggattaatgtactatggtattaaacaaaccactaaagaaaactatcgagttgatatttaactcttaaaagttaaccaaaatgtaggactagttccaaacagcaccaccaaccaataattaaattataaaagaagggagcatatatattaacataatacaaatgttcatccaaaattattcgtttgtctatctagatttgactaaattaagtagttgtttaactagtatatcaggattcattacttgagtggtggtagaaatatactgtgcgcagggaaatcaaaggccataaagaccacgatgtttttggtagcttggaaaatctagagtgaacacaatagacaagtcttcaaccaacaagagagagagagagagagaggaaggtgtctcaaattgttgaaagaaatcaacatttgagttatgtgtagagtgaaagacttagcgagaacatctagcttaacatagccgtgtagtttatgaagactccacagtcatatttttttcttatgtttttgtcgactgtaagtattgtttgtactgaaatattgggcctgttcactttgatgctattttcaaccttaccaaattttggtaaaattaccaaaaaaatatctacatttagtttgctgctaaattttggtaactatataagaaatcctaccaaaattttgacaactatgccaaaatttttggcaatgccaaatttcggtaagttttttttcatcaaagtgaacatgcccattgttactcattcctaatactataggaacagcaatatttagaaaaaaaaacagtcatatttgtttgaaaaacttttttctcagctttgaagaggttactttgagaacaagcatgagaaggccacagctgtcattttcagtctcggcctaaagcccaagaaagaaaaaggcctaaaccccttaggcccttaacgccaccaagagtccaacaccaagccgcaccagatctccctcttcccgaaccccagcgccgccgccgccgccgccgccgatcgcatcgggccg

SEQ ID NO: 1632 - DNA, 2000 bp, Oryza sativa
  N_region (1410)..(1410): n = any nucleotide
gggcggcagcttgcgtacattctccgtggtgaaaccaagttcaagaatatcaagaagaacaagactactggaggattttcagtgactttcttgggcgacattgtggcgactgggctgaaggttgaggaccagctctctcttgggaagaggttggcactggtggcgagcacaggtgcaatgcgagctcaaggcgacaccgcttatggagctaacttggaggcacgcctgaaagacaaagattatccgattggccagtccctgtcaaccctgggtctttctttgatgaagtggcgccgagaccttgctctcggtgcgaatttgcagtcccagttctcgattggaaggggctcgaagatggtggttcgtcttggattgaataacaaactaagtggccagatcactgtcaggacaagcacctcggagcaggtccagatcgcgctgttgggtcttatcccagttgcagcctccatttacaggagcttcaggcccagcgaaccctccttcgcctattagcttcgcatcaagatgaacaatttactcatgtcggctgcgcctcctttcgtcttagcaattttcctatcttatatgaaccataattttctgtctgtttttgcttttaccagtgtactccgaagatcgttcctatcataattttggctgaagagggttgtgaaatttaatgtggaacttcaactgaataatgttgttagatctatataccatccgtttttctattacagtaccattgttgctctgaatttaatgcttttatcctagtaattatgctttttgctggagcctggaagtggtctttacaagctgctgataagcatgtcttgagcctctgctgatgatttttgttgagatgcaggtgtttctgtgaaatatctgtcacttcagatctttgagagattggaagcatacgcatcgttgttggagtgcattttcttgcagcagcttgttttgaatttgcactactttctgcaatgtgatgtcctggaaaagaagatactagcatgttctttctggcattcggctgattgtgaacttctttctgagttctgataggaatgatagcatatgaattcatctgaacatatgttgaaatgaattgagggtaccattcagcttcattgcttcttgctttctcaatggtagtagcagtgtaattgcatttgaacccaggtccgcttgatgtacatttgggtctaagaccaatgagattttttcataattcatctttaaatttgaaaaatatgattgttcatatctgctagtagtatttttttccttgctgcaattcagatcttttttctctcattatcagaagagattcaaaattcaagtcatatacaggtggtcaacgcaaagcccacagctcccgagtcgtccaaatttttttaaaaaatnaaaatattaaaaaaaccccacaaaaatccgcggatggcgttcacacgtgaacccgagcggcccgcacgtcacgtctacccaccgacgcgtgggacccacaagccacagggcccacatgtcagtgacacgtgaagcgcccctcccttctagaagcccctcgtctcttcgacgcgaaccaaaccgcccaaacagagagacgcgtcatcgaacccttaacacttaagaaaaaaaactaaaaaaaaacggcgagaaaaaacttgacgcctcaattaagtcttcgccttcctataaaatcccccgaattccccacgcccaaaaacccaagcaaaagaatccccaaattccaacaagaacaccttcgatttcgatccaccaatctaacacaacatccaatatccatggccgattcaggcagcgacgccccgatcagcaaccgccccgtaagaatctgctccaatttctctctctctctctctctctctctctctctctctctctcttgtgagttctgggtggtggtggtagattgatttgtgtggtttggtttggttgagcaggaggaggaggtgacggtggagaagacgccggag

SEQ ID NO: 1633 - DNA, 1519 bp, Oryza sativa
  N_region (1)..(2): n = any nucleotide
  N_region (4)..(4): n = any nucleotide
  N_region (7)..(8): n = any nucleotide
  N_region (10)..(10): n = any nucleotide
  N_region (12)..(15): n = any nucleotide
  N_region (23)..(24): n = any nucleotide
  N_region (27)..(28): n = any nucleotide
  N_region (30)..(30): n = any nucleotide
  N_region (33)..(33): n = any nucleotide
  N_region (36)..(37): n = any nucleotide
  N_region (42)..(42): n = any nucleotide
  N_region (47)..(47): n = any nucleotide
  N_region (50)..(50): n = any nucleotide
  N_region (52)..(52): n = any nucleotide
  N_region (54)..(54): n = any nucleotide
  N_region (61)..(62): n = any nucleotide
  N_region (64)..(64): n = any nucleotide
  N_region (66)..(66): n = any nucleotide
  N_region (68)..(68): n = any nucleotide
  N_region (70)..(73): n = any nucleotide
  N_region (75)..(75): n = any nucleotide
  N_region (78)..(79): n = any nucleotide
  N_region (81)..(81): n = any nucleotide
  N_region (85)..(85): n = any nucleotide
  N_region (91)..(91): n = any nucleotide
  N_region (95)..(95): n = any nucleotide
  N_region (97)..(99): n = any nucleotide
  N_region (117)..(117): n = any nucleotide
  N_region (123)..(123): n = any nucleotide
  N_region (141)..(142): n = any nucleotide
  N_region (145)..(146): n = any nucleotide
  N_region (149)..(149): n = any nucleotide
  N_region (151)..(155): n = any nucleotide
  N_region (157)..(159): n = any nucleotide
  N_region (165)..(165): n = any nucleotide
  N_region (171)..(173): n = any nucleotide
  N_region (175)..(175): n = any nucleotide
  N_region (180)..(183): n = any nucleotide
  N_region (190)..(190): n = any nucleotide
  N_region (198)..(198): n = any nucleotide
  N_region (208)..(208): n = any nucleotide
  N_region (211)..(211): n = any nucleotide
  N_region (217)..(217): n = any nucleotide
  N_region (228)..(228): n = any nucleotide
  N_region (233)..(233): n = any nucleotide
  N_region (235)..(236): n = any nucleotide
  N_region (239)..(239): n = any nucleotide
  N_region (241)..(241): n = any nucleotide
  N_region (252)..(252): n = any nucleotide
  N_region (268)..(268): n = any nucleotide
  N_region (274)..(274): n = any nucleotide
  N_region (277)..(277): n = any nucleotide
  N_region (293)..(293): n = any nucleotide
  N_region (295)..(295): n = any nucleotide
  N_region (298)..(298): n = any nucleotide
  N_region (301)..(301): n = any nucleotide
  N_region (305)..(305): n = any nucleotide
  N_region (307)..(308): n = any nucleotide
  N_region (337)..(337): n = any nucleotide
  N_region (355)..(355): n = any nucleotide
  N_region (357)..(357): n = any nucleotide
  N_region (359)..(359): n = any nucleotide
  N_region (368)..(368): n = any nucleotide
  N_region (378)..(379): n = any nucleotide
  N_region (387)..(387): n = any nucleotide
  N_region (390)..(391): n = any nucleotide
  N_region (394)..(394): n = any nucleotide
  N_region (396)..(396): n = any nucleotide
  N_region (399)..(399): n = any nucleotide
  N_region (405)..(405): n = any nucleotide
  N_region (411)..(411): n = any nucleotide
nnantannanannnntaatatanngannangtngannatatntatanaanancntgcctanncnananannnngntgnngntgtnctcatnttangnnnacacacagagggaggtgngagagnaagagaggagagaggttnnccnnccncnnnnncnnncccccngggggnnnanaaaannnnccccccntttttttncccccccccncanagaaanccccccccccnttttntnnttntnacacccccccntttttggggggggggncccccnccnttttttttttttcatncnaanatncttnannggggggcaaatttccccccgaatttgggncccaaggggttagtgggnantntttgggggnaaaagggtannccggggtntgnnccntnggntccganttctangattccccttaggaataattgtagccatgcaacgcacgagttgatgactattatttacaaaattcattgagatcatattgagagctaatttttaagataattatgaatatatgagttttatacaatcaatctaaaaagatgttgccattcaaagaattaaaggtttgtttgggacgttttaatgtttttacgactgctggagtatccataccgtgcatgtactccaatatatgacttttgacaaagagattaatattattcagctcagaatatacgataacacgttttagctatgttcgttgacaaatcattgtgatttatttttaataagattatatatctaaaaacagatgacgcgccatgcatataaattaatatagcatgttctttcatggtagatggaactaataatgaatatcataatgaacatctgtttctagatgaactaataactacacataaggaactgaataatgcaaataaattgaggatcatttctcattaaagacatgacactaaatgaatatatttgcatcactgcataaaaatagccctctctaaatgaaccattactacaatttacaggtgggcagatcaggttttcttcatctttttctgaatgccaaatgtggcaccacaccacaggtatatggaatgcagaataaatgcaaactttaaaccaaaacaaatccaaaaaatcaaaatgcatttaaaactcgactagatcaaaccacagagagaggccttctttctttctcctcctcctcctcctccttccccctagaaatcggaattaattggcattaaataattcccccaaccatttcccaacaacaccaataaattagtggccgcccattcgccgcgtgggtcccacctgtcggccacggcggcgcgcgccctctatatatatataggcgagccgcgcccaccaccaccagcgccaccgcttcttcttctttcgattcttcttcttcttgcggcgacgcggagaagcagaggaaagccgccacgggggagaggggaatggcggcggacgtgagctctgtggcgaggctgctgcgaggggaggccgggaggaggggcggggcggcgggggaggtcgtga

(The sequence listing continues in the following parts.)
